United States Patent Application Publication US 2008/0034453 A1 - sequence listing, part 28

SEQ ID NO: 228258 - DNA, 530 bp, Glycine max
ttacttatatattttttctatatttattcattttctttgctaaacaacaaaaggggggttttcttaaccccattataatggaaactcccattggccttattaaaacaggcctttcttaacctccttctactggatggacaaaccttaatttgcccactccctccacaatttatttcaaaaaacatgaatgccccaaatcttagagccaccttgaataccattaaacacccttttgcctttgaaaacattacaaaggggaggtcctaccactaaataaaaatctgggatgttttaatcttggtcccccgcacctttgggagcggctctttgtaattcatttcaaccaacattctacattttataagtccccatggactggtttcccccaaaaatatggctgctccaagcagctttcctctgatagagtctttgccgactcccccattttaggaatatttttttaaaaaagcatcttttcatggttacaaccccctccagggaatttagaactcttttttaaaacaccttaa

SEQ ID NO: 228259 - DNA, 474 bp, Glycine max
ctctttcttcctcttcctcagtagtgcgattttcgattctcttctctgcaactatgcctaaccctaaggtcttcttcgacatgaccatcggcggtcaacctgccggccgcatcgtgatggagctctacgccgacgtgactccgagcaccgccgagaacttccgcgcgctctgcaccggcgagaagggcgccgggcggagcggcaagcccctccactacaaaggctcgtccttccaccgcgtgatcccgaacttcatgtgccagggcggcgacttcaccgccggaaacggcaccggaggcgagtcgatctacggcgccaagttcgccgacgagaacttcgtgaagaagcacactggtcccggcatcctctccatggcgaacgccggtcccggaaccaacggatctcagttcttcatctgcacgacgaagaccgagtggctcgacggacagcacgtcgtgttcggacaggtcgtcg

SEQ ID NO: 228260 - DNA, 547 bp, Glycine max
cctcagaagcgaagaagaagccacagagaactagtctcctactctcacccgcaagaaaaaaatggcatctcacatcgttggatacccccgtatgggtcccaagagagagctcaagttcgctctcgagtctttctgggatggcaagagcagcgccgaggatttgcagaaggtgtcttctgatctcagggcatccatctggaagcagatggctgatgctgggatcaagtacatccccagcaacactttctctcactatgaccaggttctcgacgccaccgccaccctcggtgccgttccaccaaggtacggctggaccggcggcgagattgggtttgatacctacttctccatggccagaggtaatgctaccgtgccagctatggagatgaccaagtggttcgacaccaactaccactttattgtccctgaattgggccctgatgtgaacttcacctatgcttctcacaaggctgttgatgaatacaaggaggccaaggcgcttggagtggataccgttccggtcctcgttggccctgttacatacctg

SEQ ID NO: 228261 - DNA, 489 bp, Glycine max
  unsure (1)..(489): unsure at all n locations
ttggaaggttgcgacgagtgatgatatacacatattgtgacggtagtgaaatcgaggaaaaagaggtagcaatttgcgagttgcaatgagtaacgaaaaggctccttcatcagcttcttcgagtagctacgagttgagcaaaggcatcaatggcctcgacaaggttattcttcgcgacgcacgtggtagctccgctgaggtgtacttgtacggtgctcacgtgacttcatggaagaatgaccatgccgaggaattgctttttctcagtagtaaggctatctttaagcctccaaagccaattcgtggagggattccaatatgttttcctcaattttcaaacctcggtcctctcgactcacatggatttgctagaaaccaattctggacaattgatgattcccctcctccttttccaacangtacttcgaataaagccttgttgatttgattcttaaaccctcagaagacgacatcaagatttggcctcac

SEQ ID NO: 228262 - DNA, 598 bp, Glycine max
  unsure (1)..(598): unsure at all n locations
ctccgagaacaaaaaaaaaaacgtgattcgctcttctcttcgaataaaccacaaaaccaacaaacgagaagaggagtgagagaagatggggttgtcgttcacgaagctgttcagcaggttgtttgcgaagaaggaaatgaggattctgatggtaggtctcgatgctgctggtaagacaaccatcttgtacaagctcaagcttggagaaatcgtcaccaccatccccaccatcggatttaatgttgagactgtggagtacaagaacatcagcttcactgtgtgggatgttggtggtcaggacaagatccgtcctctgtggaggcattatttccagaacactcagggtctcatttttgtggttgatagcaatgatagggatcgagtggctgaggcaagggatgagttgcacaggatgttgaatgaggatgaacttagagatgctggtctgcttgtttttgccaacaagcaagatcttcctaatgcaatgaatgctgcagaaataactgacaagcttggacttcattcactccgtcaacgccactggtatantccaagcacttgtgcaacttttggagagggtctctatgaaggtttggac

SEQ ID NO: 228263 - DNA, 488 bp, Glycine max
ataaatggaacatgaaagcacgatgcgtataatttattgacatattaaaaattgcaaccctctgatacaataaaccaagaaatttccctgtacaatgagaaaattccctttctttccatcaaaataggtggaacctcaaaattcttcatatttacatttcaaaatataactcaaaatagtgagagcaataagagcttgccgccaaaaaaatcccccatcccttatgaagaacttagatcccatgcagaacaaatgaattacctaacctacttgatggcatatgaacgggtacacactgattcaagggcctcagcgaacaaggaagagaaactggtcaatgcctgaaacactccaggcaagcctgtttgcaaattgttgagagtcatggctcttgttacctccacagcttttgaatgcctcagcatttcatcttcgacacgcctttggcagggtgccagttctatttttttctcagcaagtgggtcacg

SEQ ID NO: 228264 - DNA, 581 bp, Glycine max
  unsure (1)..(581): unsure at all n locations
tcgacttctttttctctaatcgaagtcatggagtcaaatttgtggagtttattgggaaagtttctccggtaaggagccgccatgataagcagcttgtttctcatgatccaaagagtaataactacaactacaaatatacattttctgttgaaatcagccctatttgccgtgaggatttaatctgtctgcctcctagagttgctgttagtttgggaaatattggtccacttgtgatttgcaccaaggttaccaacagcattgctttgctcgatccatttaccttgagacactgtttcatagatgctgatcagtactggagaacatcctttaagtcgttacttactagcagacaattggtggaatatatagtgctggatgtggagactgtttcatctgaggtcactattggtggcacgaaatatcgtttagcagatgctcaggtggctcgtgtttcagattttggaaagaacgacacgatatttaacatcaagactcatcttggccatcttctaaatcctggggattatgctctcggntatgatctgtatggggctaatagtaatgacatggaaattgacaag

SEQ ID NO: 228265 - DNA, 422 bp, Glycine max
caaaggatattttattactttcaatctgttcttacataataattataatgggaaaacacaattatttctggcagaatatagcaaatatactctccgacacattttgcgtgtctacaattctttccattgtatcatagtaaattaaataaatgtgtaagggctcaatcttcattgatacaagccctgtaatacatggggcaatattcagcacaatagcctgacttgactatgtacagtatacacagtctttgcgcatccaaattctcttatataaatctttgtttttggccaggcaatgcatgattaggccttggcaatcttttgaggtatacttgaacaaccagaagacaaggagcaccaattatgaacttcaaatattttttatatactgaacctaatatgatctaaaccacacgtatttg

SEQ ID NO: 228266 - DNA, 627 bp, Glycine max
  unsure (1)..(627): unsure at all n locations
cacacactcatctccacttcccacattttaatattcacacaccaccttattgatccaaagcttcaatatgggggatttcatcttctccttcaagacccaaccacaagaccatgctcaccaccaaagagcaaagcacaacaacaacaacaacaagaggctaaccgaggaccaggtcgcgattctcgagaagtgcttcgcctccaacatgaagctcgagccggagcagaagttccaccttgcaaaccaacttggtgtgcctccaagacaagttgcaatttggtatcaaaacaaaagggcacgctggaagacccagagcctcgaggtggaccatggtgtgcttcaggcaaggctagagaatgtagtggctgaaaagaagcagctagagaaagatgttgaaaggctcaaagctgagctgaagaaggctcaagagatgttgttaatcaacaataatgtcaaaagtggagaccatagtaacaataataataataatgcttcttgtgaattttcaacttcttttgaagaagganggagttctggggtggtgcttgatgatgccactcatcatcatcatcatgagtgttggcacaatggtagtgaggttatgcacgctgaggagctctttactta

SEQ ID NO: 228267 - DNA, 372 bp, Glycine max
ccttcccctttcagcattcagttttgagttcacccatcacagttttcttcttcttcttcttcttgtgcatggcaactgaaccgagtgagagcacacaaaggaacacccttgtcgttagaaagccatgttttggcctcccaacaggttgccctcaatgcctctctgcttacatttttctcaagctctctcaagttcccttcaacttggattaccaccctaactaccctgattctgatcagattccttactttgaggatggtgattctgtgacatacaataatgagaaggagggggatcattgagtgcttgaaaaggaatgtgggtggtgatttagatagtgagggtttcttctcttccctgatgggataccca

SEQ ID NO: 228268 - DNA, 559 bp, Glycine max
  unsure (1)..(559): unsure at all n locations
ctctggagtccaaagggtgctttcaaggttcatggaaatgcctgaagtgagacaaagcagaaagatgttgaatcaggagagctttttgaggcaaatgatcaccaaaggccaacagcagttgacaagacaaaggaatgaaaacaggaagaaagagatgaccaatcttatgcttcaatacctgaccgctggaaaggttgttggcaatcctagcttggtggatttgaatgatctctcatggttgattgatcagaacctcaatgaaatagaaaagaagatcaccatgctccaaatccaagaagtggtgataccagtgattgaaaatgaaggacacatgaatcatgttcaagggctggagagcaacatggacaccaagaaaaagcaacattgatccatggaatttatcaatggtgccattgcggatgggatgttatgtctccttaaaaaaattatgttcttttaagtgtttcagttgtctttcccattttaatcagcaatgcttagttntattgtctttctttgaaagtgtcaatgaatacaatatccgtatgtcatagtttgc

SEQ ID NO: 228269 - DNA, 475 bp, Glycine max
cgaaaatgagtcattttgaggcacccgacgaatttttgctgggtcggctgctcactggtggccgcccgtcctttttttttttaagataaatgtttgttttgtatcctttcagctaaatatataggggggcaagaaacacacaaagattttgaaaagacggtacaacatttgggaactacaccgttcacgcaacctgttttaatgaaaggaatatctgtcatgaaaaattttaatgaaaagaaaatgatcaggtgatgtgggggttcacggaaatcccatcacccacggggaggtggcccatgtggatccttgatttttgagccagatacttgttgagctccattacatggtcccgaagtaggcttaatgtaatcccataatggtgcatcggagcgtgcagccacatattcagcccatggggtgatattcgatccgaatagtcctcctatcttcacaagctttagaacccttttgt

SEQ ID NO: 228270 - DNA, 498 bp, Glycine max
cggaaagtacatccattttcgatccaggtgtttttcctgtgcattagctaatgggcagaaaaccatgtttgtcagacagctaggttatcctatgtatcctaattattgtttatattaaggcaaggaaaaataaaatactagcttggatcactaaggcgaccagataggaagaaacgccaaattgaagaatactaatactgcaaaatgactccaaggcattaaatccataatcgaaactttacagtaaaaaggtttttgtttcctcctcaaagttgaggcagatgtggtctcttttccaacatttcataatgtagaacaaaattatccttgcggacggtttcaaatatgcttggatcgaaacagtgataagatcctctctcatatgtgtttgttttaaccagcggctccatgttgggaactcttattaaccataaacgatgttctttgtgataaaaccaacctctgttgtaaagctcactggcggcatataattgggct

SEQ ID NO: 228271 - DNA, 264 bp, Glycine max
gtttgaagtctagacgcagtgtagtactctttctaccactatgttaatacagaaatgaaatggtttcgataaaattattagatttttttttcgatatagaacactcatgtcgataaaatggcttgaatcctatttacttacggcatgatattgaaaacgggttaatttaaccctccctttgtacaatgcgtaatcgatgacctatgtataaatgaataagagttctttggatttgaagaaaaaaaacaactttgctgacatata

SEQ ID NO: 228272 - DNA, 377 bp, Glycine max
cttcagcgactgcgtttttggatcggaacctcttctgcggcgtagcaatgggacactccaacgtttggaactctcacccaaaaaactacggtcctggttctcgcacttgccgtgtgtgtgggaatccacatggactgatcaggaagtatggccttatgtgctgcaggcagtgcttacgtagcaatgccaaggaaattggcttcatcaagtatcgctaaaagagcagttgtcaactacggaccaatattgtgttctggcactaggatgttttgaggatgttatgtttgaagaaacttgagactttcttttttcatctaattaattatcagacgtaatttgtggtactaagaatacttttatataaattgttttgaacc

SEQ ID NO: 228273 - DNA, 440 bp, Glycine max
  unsure (1)..(440): unsure at all n locations
gaaacttaatcgatcatcacttcacttcactaatacatcatggcagacgagacccagaacaagtatgagagctctgaggttgaggtccaggatcgtggtgtttttgactttctcggtaagaaaaaggatgaagaagacaagcctcatcctcaggaggaggtcatcgccaccgagtttcaaaaagtcactgtctcagaccaaggagagaacaagcacagcctcttagaaaagcttcaccgatctgacagcagctctagctcttcaagtgaggaggaaggagaagatggagagaaaaggaagaagaagaagaaggaaaagaaagggctgaaagagaagatcgaggagaaaatagaggngtgatcatcatcatcacaaggatgaggacacaagtgtccctgttgagaaagttgaggttgttgaaacagcacatgctgaggaaa

SEQ ID NO: 228274 - DNA, 547 bp, Glycine max
agattatatgtaattaatatattaccaattatcaatatttttttatcaaaattttatttcaggttcacactactccttttgctttgactagtgtttcgcaggtagtaaaaaaggatataaaaagatcccagagagaaaagaagaactaaatagctcaaacctcaggaaaaagaaaaaggggttcctaattactgtgcagagcttgtagccatggcattcatagagaaagctgtgtttttcttgatgatgatgatgacagctttccaagtttcacatgcagctgtgcacaaggttggggactctgctggttggaccatcattggtaatatagattacaagaagtgggctgctactaagaactttcaagttggtgacactatcatttttgaatataatgcgaagttccacaacgtgatgcgagtgacgcatgctatgtacaagtcatgcaatgcatcatcccctttgacgaccatgagcacaggcaatgacaccataaagataaccaactatggtcaccacttcttcttgtgtggcatccctggtcact

SEQ ID NO: 228275 - DNA, 537 bp, Glycine max
gacaaaaaaacgacattttatttatcatgcattagacaataacagcagcaaaggccctatcattctctacactcaaactcacaagttttcacaaattcaataatcctaaagggatatatatcatatatgaaatttattttcttcttttcacaaccagaaagagaactcagtcccccaacagggaccatgtcatgtcatcattggtctgatatagatttactcccccattcgaatgatgcatctgatggactcccctttcagcatgtaatcaaaagccttgttaatctctgagaatggaactgtgtgagtgatgaatttctccagttccaattccccattcatgtacttctccacaacagaaggaagatcagtgcggggtttgtagtttccgtagaaggtaccctttagagttctctcgttcaagaaattcactggatgagttttgaatgcatcatctttgtttggcactccaacaagtacagcaacaccccaaccatcgtggacgcattcgaatgccgagaacatggcttggatgct

SEQ ID NO: 228276 - DNA, 532 bp, Glycine max
atttcaattccataatttcttttctttgactaaaaatgataaggcatagccataaattctttgaataagaaaagggtatattatattatgatatatattggcttagctataatcactagaattattatatactaagtataaatatatagaaattctagtgattatagactatctttatataataatataaataagaataaaaaaataaaaaaaaaaaaagaatctatataaatataaaaataatatatataaggtacaaatagtaaatcgaggtacccattttatgataaactttccttccatttttgttcctctagtaggcctagtatttccggcaattgcaatggcttctttatttctttatgttcaaaaaaacaagattttttagatacagaaaacaaagtaaaattctggggttttttattccccaattataatactaaattcaaaaaaaggagagtaatgagtataatctttcgctcagacgatgtactgatatattctatggcggaggttcgaagaacaagcaatt

SEQ ID NO: 228277 - DNA, 527 bp, Glycine max
aacttgaacactctctttttgatattgatattaagagacacattggtagggcatacatacaaacagagagtacatgtttttagttgatcacgtaaaaaattacaaaagaacatacaaataacaaaataggaggaagaggagagaaacacacagagtaagagacgtggaaagttatggatattagacatattataagggcaacgctcaaaaaacttccagcatagagcagtggaatgaattacttaggccttctcccacttgaggggtttgaccacttcccatgtgaagtcagggtcttctcttccaaagtgtccataggcagcagtcttcaaaaacctgttatttccacccctcttgagatcaaggttgatggagatcataccaggcctgaaatcaaagttttccttcacaatgttgagaatcttcttatcatggatctttccagtgccataggtggcaacaaacacagacaaaggctcaggcacaccaatggcataagacacttgcacaatgcaccttttggcaag

SEQ ID NO: 228278 - DNA, 593 bp, Glycine max
ctattctacttaccttttctcttaatccaaatatcatcatctgaaacgatggctgccatggcaaccacaaccctctcttcaaacccgaaactctcatttttccacggaaagcccgttacatattcttcccgcgtcgcacccaccaccaagttattctcatccaaacaaggcacaatctccatgtccctaacccaacccccatacgacctccaatccttcaaattccaacccatcaaagaatccatcgtctcacgcgaaatgacgcgccgctacatgaccgacatgataacctacgccgacaccgacgtcgtaatcgtcggagccggctcggcggggctctcctgtgcgtacgagatcagcaagaaccccgccgtgagcgtcgccataatcgagcagtccgtgagccccggcggcggcgcgtggctcggcggacaactcttctccgcatggtggttcgcaagccggcgcacctcttcctggacgagctcggcgttggcgtacgacgagcaagagggactacgttgtgataaagcacgccgctttgttcacgtccaccatcatgagcaggcttctagcgaggcccaacgtgaagc

SEQ ID NO: 228279 - DNA, 556 bp, Glycine max
atgttaacatagcctttattaacgtcactttcttacaatttacataacaattgagtggatactatcccgtagacaagcagataccttatagaaagaaatatatctgggcacttttcatcgattgagaatagatgaaaaaaattaagtggcgtctatctctcccatccttgataatatatggtttcctccgctatacgtggcacgtgctgtccaaatacaatgtaacaacaagtattgtctccttcataattcacatgttgttcatttattccaaaattaaaatcataattaagtagggaccaaacagaaagaaaagaaaagaaaagctatatatctagctaatttgaaagtaagtttaagcatcaacaatttcctcagtgtctgcagaagcgaaaataagctggggttcttccctttcaacttcacacgttccatcaattgcattgttccttcccaacgcctttaacgccaaatgagccgtcttctggcctgatatcatcatttgcccaaacgttggacccattctttggtgagccatcaatttctgccaccttca

SEQ ID NO: 228280 - DNA, 415 bp, Glycine max
aaccacttatcccctttctccttctaacgagtgaggaaaaatggcgcgtaagaagatcagagagtatgactcaaagaggttgttgaaggagcactttaagagactctctggcaaggagttgccgatcaagtctgcacaaattaccgcatcaactgatttcactgagctacaagagaaggaaccctggctttcatcttctaaattggttgttaaacctgacatgttatttggaaagcgtggcaaaagtggtttggttgccttgaatttggattttgcacaagttgtttcattcgtgaaggagcgtcttggaaaagaggttgagatgagtggatgcaaaggacccataacaactttcattgttgaacctttcatcccacacaatgaagagctttaccttaacattgtctccgagaga

SEQ ID NO: 228281 - DNA, 459 bp, Glycine max
ggaacagaaaataaaaatgttcattttattgcaacaactaagagattcaatcataacaacacaagtccggcaacagaaaattttcaaacaaacaaagcaataaaaacatacactaatcagtaaatatatcacacactctcacaactgatcacacgacgtaggaacaaaagaaatggtctccttttcaagatcatggttcaccaaaatgttctgctgttgaacatttccaaatatagacattccactagaagcacccatggccaaacaagccactcccaaatgggaggcaccaatcatgtagttctcagcaggaagctccaaatccccacccttgaaatggaaaacaagctttggaatctccacttgtgttgaccctgatggcaaggagaaacaaagatccaaccctgttgagctagttttgtccaaagcaagtttggtttgagaaatgaactctttttt

SEQ ID NO: 228282 - DNA, 481 bp, Glycine max
acttgaacctggctgatgccatggccagggccaaggtgtttgatatcgacctgcagaaacagttgaggccgtacatggaatccatggttccactccccggaatctatgacccggatttcattgctgccaaccaaggagaccgtgccactaacgtaatcaggggcacaaagaaagaacaagttcaacaaatcatcaaagacattaaggagttcaaagaaagcactaaggttgacaaggtggttgtcctgtggacagccaacacagagaggtacagcaacgtatttgtgggactaaacgacaccatggaaaacctctttgcttccttggacaggaatgaggctgagatttccccttccaccttgtatgccattgcttgtgttatggaaaatgttcctttcatcaatggaagccctcagaacacctcttgtccatgactgattgatctgtgcatcaaaaggaatagtttgattgtacgagatga

SEQ ID NO: 228283 - DNA, 553 bp, Glycine max
attcaaactcatttgctagaagttgaaaaaaaataaaatacagcacatctaagtccccttcgaattcactgctaagaaggaatgataaataactaaaagaaaacaactgaaagccaaagactccaaaagttttagtaggtatagcccttgacaaacattcccttcttggcctcttcactctcaccctcagcagagtatcttccaagttgagccaaggagtttgctttagcacgcaccaaaagggacttttgagcagcttccacattctcagggtgtccttgccatgtcttaagcacagtgttctgaagagcccgtgcatatgagaaagaaacatgccatgggttgggactttggttcatggcatttagatttagtgttgcttccacttcggattgtccaccagacaaaaacatgattccagggacagcaggaggaactcttcttctaagcatggttagagtatatttggcaatggtttctggagaagcctttttcttgtgttcagccccaggtgttaccatgctgggtttgagcaaaattccctcaaaaagga

SEQ ID NO: 228284 - DNA, 524 bp, Glycine max
  unsure (1)..(524): unsure at all n locations
taccaatccattcctgagatgtgttgatattaagctggtttcagagctttgccacaagaaggggactttgctctgtattgatggtacatttgcaactccattgaaccagaaggcccttgcccttggcgctgatctgattctgcactccttaacaaaatacatgggtggacatcatgatgtccttggtggttgcataagtggttcaattaaggtggtttcgcaaattcggactttgcaccatgttttgggtggtacacttaacccgaatgctgcatacctattcatcagaggcatgaaaacgctgcatctccgtgtacagcagcagaattcaacaggaatgaagatggccaaacttttagaggcacatcccaaggtgaagcgggtctactatccaggcttgccgagtcaccctgaacatgagcttgccaagaggcagatgactggtttcngtggtggtgtcagttttgagattgatggagatctacataccacaataaaaattattgattcattgaaatcccata

SEQ ID NO: 228285 - DNA, 326 bp, Glycine max
cttgcggaaataaaagaagaaatccagctacaagagaaaaaggtggggtcaaagaagaagcggaacagaatatacatgaaggagcttgctttggcctttctacttctaacagcttcagcaaggagtctcctttctgctcagggaatccacttctacttcttgttattccagggcatatcattccttttagttggtctagacttgattggtgaacaggttgattgaatctgaaaggtgaaaaaaaaaaaaaaaaagcaaaaaaaataaaaaaaaaaaaagacagggccggccctggctaaacatcccctgctggcattaaagaaatt

SEQ ID NO: 228286 - DNA, 567 bp, Glycine max
aatatagcagacgcgataaaagttctatagtgcatttaagagacaaaattcaacggataaaatctcaaaagacaaattaaattacaaaccaaaaacattgaataaaaactaccaagcactcaaagtctattcatatcctaaagatttaagcagcagttgcttgttgggcggcaatccttttcctagcttcctcaatgattgatagcttaatacctttacccttgggaagagatatccacggttttgttcccttgccaatggtgaacacattgcccattcgagttgcaaattcatgcccagtagcatcctgaacatggatagtctcaaagcttcccttatgcttctctctgttcttgatcactccaacacgacccctatttcttccacccgtcaccatgactacattcccaacatcaaatttgatgaaatcaacaatcttgttcttctccaaatccagcttaatggtgtcattagccctgatgagagggtctgggtagcggatagtgcgaccgtcgtaggtatttaatatgggatacccttttgcccaaactgcactgagcgaacttt

SEQ ID NO: 228287 - DNA, 485 bp, Glycine max
attgccgatatcaagtattgggggaaaagagactaaaccctcatcttaccggttaacgacagtgttggttggtgtctgtgcagtgaccatgaacacccaccaacattgccgatgtcaagtattgggggaaaagagacgaaaccctcatcttaccggattacgacagtatcagtgtcactcttgatcctaggcacctctgcaccaccaccactggtgccgtctgtatggctttacaccaatatcgcatgtggcttagtggaaaggagatttatctttctgggggcaggttccacagctgtttaagggagatccgtgctcgtgcttgtgatgttgacgatgaaacagaaggtctcaagatcacacacgacgattgcggcaaattgcatgtacacattgcttactacaaaactttcctactgcgtgaggactgggttcatcaactgccggcgttgcatgccttgcttatgccctagggaagctaatga

SEQ ID NO: 228288 - DNA, 535 bp, Glycine max
aatttcactctttcaagaaggtgtctcggtccatgggatatggtgagaatgatatcaccttagtatcttttcaatcagtctccaaaggctatcacggggagtgtgggaaacgaggaggttatatggaggtgactgggttttctgcagaagtgagggaacaaatatataaagtggcatctgtcaacctttgctctaatatctctggtcaaattcttgcaagcttggtcatgagtccacccaaggttggagatgagtcctatgactcattcatggctgagaaggagaatattttggcgtcccttgccaggcgtgcaaagacactagaagatgcattcaacaaattagagggtgtaacatgcaacaaagcagaaggggcaatgtacctgttcccccaaattcgcctgtccgaaaaggctatcaaagctgcagaggctgcaaatgcaacacctgataacttctattgcaaacgcttgcttaatgcccacaggagtcgtgttggtcctggttctggttttggacaggttcctggcacatg

SEQ ID NO: 228289 - DNA, 444 bp, Glycine max
aaggacaaaatacttcgataactttatgttattgtacatgcatgcatagcataaatagcctgctctcaaattagtcagcaggaacaaagatcgagagatccaacgatctttaaatttcacatttgccataattatattacaagtaagaggggttgggatgtgagttaagttttgatctcattcaactgcagtatcccaaaccattactcttaacactttgaacttgacttgcactccaggagcatgtcgtgctcaggagctaatgcccacaagcccttaggatggtgtccagcatggctcggtgctttgacagggccttcaccactggcgggctcagtggaaccagaggggccttggctaggttactgaggatggacactacctgggtggaatgggaggagctttccatcattttcagctctgaactcgattggagcgctcagc

SEQ ID NO: 228290 - DNA, 469 bp, Glycine max
atgattaacgaaataattttgatatgtagattaaataaacacacgaagtacaaataaacattggtctctctaatcacaaaggagattaagtccattgtggtgtgccttcatgactgaattataccaaagtactacccttaacatactcagtaaaagccagagcaatcaaacccaacatagcaaatctcccattccacagttctgcatctgaggacatgaaccctttggacttagactccacgctgacaccttggaagagtggaatcaaggaagcaagggtaaggaccacacttgttcccaagaaccatgggatgccaccattggatatttgttctaacacaccttgccctttggctacttccactgccattgcagccacaaacccaatcatggccaaccttccattgatcctctcaagtgctggcccactgaatgccaacacattagaaaaacttagtgctcacctttg

SEQ ID NO: 228291 - DNA, 435 bp, Glycine max
gtgtgggcataaagtcgttgacagtgaatttcaaactcctctcactcttccttccatctctgggtcggcattccaatccaatccaaaacgctgcgttttattttgtattcaattctatcaatcccaaaattcctccccggagaatagataatcttaacaattccaccactttccggcgagacatggccgtctccgactccgaccccgcccgccagaagccgagctccgacgcgagcctctttacactctgccccttctggagttaacgcaacgccaatcaaagcttcttcaaaacggtgtcttccgtcgccaggtcgctgctccctccccgccgcagactccgtctcgatcctttcaattacctctattttccatatgaaccgggtaagccagtaaggagcacttttcggttgaaaaacactagcaagtctcacg

SEQ ID NO: 228292 - DNA, 458 bp, Glycine max
gtggcacttctcgtgttgctcaacacagacaacaatggcgtcggtttcagtaatggctacgaccagcaacaacaggtggtccatggcttccttgcgcttccctgtattgccatcttcctcttcatccaagctccgaatttctcgaaccaaacccaaatcccttctcacccctttcaccggtctggttcctcttaaccccctcttcctctcctctccttcttcagaatatgccggctctgatcactcttttaccattattgacaatggtggtcgagtctctgccatgagacatgggaggaaagtgcccaaactcaacagaccccctgatcagcgccgcgcactcatacgaggccttacaactcagctccttaaatatggtcgcataaagaccaccagagcaagggccagtgcaataggaagtttgttgataaaatgatcactttggcaaaggatggttc

SEQ ID NO: 228293 - DNA, 467 bp, Glycine max
  unsure (1)..(467): unsure at all n locations
cccgtcttcatttgatccggtgagagagagttcccctttggttgcgtgaatcttcagaaaagggttgtccttgtaatataatagtttgtgaattggagtttgtgtttatagcaagagaatggatgagtcaaaaaacaggcataatgataatttgggtgtgaacaaaatggggaaaaacattaggaagagcccattacaccagcccaattatggcaacaacaacaacagcagcatgaatgggggtagacagcaacagcaacagcctcagcctcaggtttacaacataagcaagaatgatttcagggatattgttcagcagcttacagggtctccctctcagtctcaggatcatcctcaatccaaacctcctcagaatcagaacaattccccaaaacctcanagtatgaggttgcagaaaattaggcctccccctttgccctatgtgaggcctccattgcacaccacct

SEQ ID NO: 228294 - DNA, 564 bp, Glycine max
attcatctttctcttttttagcttttcttttcctctaaaagtgagtccttccttcttcgatcacttgttaaattcacatatcatagcaatggcagcacgttcctacagccccatcatggttgccctctctttgcttcttttggtcacattctctaatgtagctgaggcttatacacgcagtggaacacttcgtccttcagattgtaaaccaaagtgtacttaccgttgctctgcaacttcacacaagaagccatgcatgtttttctgccagaagtgttgtgctaaatgcctatgcgttcctcctggtacatatggcaacaagcaaatttgcccttgctacaacagctggaagaccaaggaaggaggacccaaatgcccttaaaccccttaattgcctaatatataaataatttaataagcaatgtaatcctatatgactcttcatgagcaattttctatctctacatagataagcaatgctgttttaattgtttagttgatagcacctggggacaccattagttatgttcccttcaagtttcagagggaaaactatatttttag

SEQ ID NO: 228295 - DNA, 445 bp, Glycine max
cagtctcaaatgcccggatgccaaagtcaattaaaaaatatagactatatatataatatatagcaacacaaaatacaatttgctaaaaatatagttttccctttgaaaactgaagggaacataactaaatgtgtccccaggggctatcaactaaacaattaaaacagcattgcttatctatgtagagatagaaaattgctcatgaagagtcatataggattacattgcttattaaattatttatatattaggcaattaaggggtttaagggcatttgggtcctccttccttggtcttccagctgttgtagcaagggcaaatttgcttgttgccatatgtaccaggaggaacccataggcatttagcacaacacttttggcagaaaaacatgcatggcttcttgtgtgaagttgcagagcaacggtaagtacactttggttaacaa

SEQ ID NO: 228296 - DNA, 562 bp, Glycine max
  unsure (1)..(562): unsure at all n locations
ctcttaaccctgttgatgccaagaggaggcagggaaagtttaaagccactgattctgctcttccgactgttccgggctatgatgttgcgggtgtggtggtgaaagttggtagtcaagtgaaggactttaaagtgggtgatgaagtgtatggagatgtaaatgagaaagcacttgaaggtcctaagcagttcggatctttggctgagtacacagctgttgaggagaaattgttggcaccaaaaccgaagaatttggactttgctcaagctgcttctcttcctctagcaattgagactgcttatgagggtttggagaggactggattttctcctggtaaatctattcttgttctaaatggttctggaggagttggaagcctagtgattcagctagctaagcaagtttatggagcttcaagagttgctgccacttcaagcactagaaatttggacctactngaaagctngngagctgnattggccattgactacacanaagagaactttgaagatttgcccgaaaaattgatgtatttatgatgccattgggcaatgtgacaggg

SEQ ID NO: 228297 - DNA, 354 bp, Glycine max
  unsure (1)..(354): unsure at all n locations
gagcaactcagaaccagcaccttccaacgcttaaaatcacacactttgcaccttctcgaccttttgcagaaccctcacattcagtatcagaagcattgttctctcaccgtaatcccccaactccttcgtttccttcagagttcttcgccctctacgttacaacccttcttcgactacactctgtttccgttacttctgctcctcgatgcagcgatccagtgcaggtctactcagaaagttgattctcaggaaaattataacatgcctggtgttctgaaaacacctgttaatgtgagtgatggcgttgctgaaagtgtggttaattggttggaggagcttcttangaagtgtcgt

SEQ ID NO: 228298 - DNA, 458 bp, Glycine max
cacactactcacaactcacagcacaaaccgtaacagaaccaaacaatgagaacccaacggcggaaccatctccttctctccctcttcctcttcgcagccgcattctccagcctccacccgacggccaccgccggagacgaaggcgcaccgtctgcaggcgacggcgaccgcgacgccgatttcatccgcactagctgcaacaccacgctctacccggaagtgtgtttcacctccctctctcgctacgccaatgcggtgcagcagaaccccggccatctggcgcgtgtggccattgccgtaagtctctcgaaggttcaccgtgcggcgtcctacgtctccaacctcacgcgcgacgccgactacggcggaagcacgcgcgccgctcttgctctgcacgactgcttctcgaatctgggcgacgccgtggacgaaatccgcggctcgctgaagcagatgcg

SEQ ID NO: 228299 - DNA, 450 bp, Glycine max
ggtgatggtgtgagtcacactgtaccaatctatgaggggtatgcactcccccatgccatccttcgtttggatctcgcaggtcgtcatctaactgatcatttgatgaagatcctcactgagagagggtacatgttcaccacctctgctgagcgagaaattgtccgtgacatgaaggaaaaacttgcatatgttgccctagattatgagcaagaactcgagactgcaaaaagcagttcatcagttgagaaaagctatgagcttcctgatggacaggttatcacaattggggcagagagattccgttgcccagaagttcttttccagccatctatgattggaatggaagctgctggaattcatgagaccacctacaattctatcatgaagtgtgatgtggatatcagaaaggatctatatggcaacatttgtcttagtggtggctcaactatg

SEQ ID NO: 228300 - DNA, 344 bp, Glycine max
ctatattctcttcttggatcatcttggttaagctgcagatcagaatagaataataataaataaagataagatggagactcatttggttttcttgcttggtttgatcttcactctagttgccggcgttggagcccaagcccaaggcccatccacctctcctgcgcctcccacaccccaagcatctccacctcccgtccagtcttctccgccacctgttccctcttcacctccaccctctcagtctccaccaccagcttccactccccctccatccccactcagctctcctcctccttcctctcctccaccctcctcccctcctccttgtcgtccaccccccgcct

SEQ ID NO: 228301 - DNA, 523 bp, Glycine max
  unsure (1)..(523): unsure at all n locations
gcagttctgaggtgttctatgttcctcagcgccttatcagtgattttgttgagcttgttaaccttgtgggcgacctagaaatccatcagaaggttgcaattcctatgttctttgtctccctagattctcctcagaattttgaccccgttcttgatacaatgatctacaagcaaaatcctcctgcaaattccaccactctttattcggcaaaagtccctgctgttcatccatggagtgtatcaagtgagcaagaatttataaagcttatcagaataatggcagaaggggatccactccttatggagttagtttgaaagtagaaccctttcttcttgataatactacatggcgagagaggatgcaagaaacatgtaacactcagatagcgctcctacacggtctcttcttaatcttaaacagtgttacacagtctttntgtttcttgggtggttttttaacccttctcttttcaccttccttttattgtgtagagatttgtttcacagaaaatgtatcattccta

SEQ ID NO: 228302 - DNA, 503 bp, Glycine max
  unsure (1)..(503): unsure at all n locations
gttcgctctttctttctcccctacacaaaacatggctttgcccaatcagcaaaccgtcgattaccccagcttcaagcttgtcatcgtcggcgacggtggcacaggaaagacaaccttcgtgaagaggcatctcactggtgaattcgagaagaaatatgaaccgaccattggtgtggaggttcatccgttggattttttcacgaactgtggaaagattcgcttctattgttgggatactgctgggcaagagaagtttggtggcctcagagatggatattatatccatgggcaatgtgcgattatcatgtttgatgttactgcccgtctaacatacaaaaatgtccctacctggcaccgtgatctttgccgggtctgtgaaaacatcccaattgttctttgcggtaacaagggttgatgtcaagaataggcaagtgaaggcaaggcaggttactttccacaggaagaagaatntgcagtactatgagatatctgctaagagcaac

SEQ ID NO: 228303 - DNA, 541 bp, Glycine max
  unsure (1)..(541): unsure at all n locations
gttggtcttgatgctgctggtaagaccactatcctctacaagctcaagctcggagagatcgttactacaattcctaccattgggttcaatgttgagactgtggaatacaagaacattagcttcactgtttgggatgttggtggccaggacaagattcgtcccttgtggaggcactacttccagaacactcagggtcttatttttgttgtagacagcaatgatagggacagagttgttgaggccagagatgagttacataggatgttgaatgaggatgaactgagagatgccgtattgcttgtgtttgcaaacaaacaagatcttcctaatgcaatgaatgctgctgagattactgacaagttgggtctccactctctgagacagcgtcactggtacattcagagcacctgtgcaacctctggggagggcctttacgaaagtctggactggctttccacaacattgccaataaggcttaatgcctttnggagacgggagtcttgcggattggtatttctggatgcaggggtgaacattatct

SEQ ID NO: 228304 - DNA, 562 bp, Glycine max
tcgcgatctagaactgagaaagtgaaggtgcttcggcgactcctcgagacaccaggggttcaccaggggccagcctgtttcgacgctctgggtgcgaagctcatagaatccgctggctttcccttactgcatcaccagtggcttctccatcgccgcttccaggttggctctgcccgacaccggcttcatctcctacggcgaaatgctggagcagggccaactcatcacccaagccgtttccattcccgtcattggcgacgccgacaacggctacggcaatgccatgaacctcaagcgaaccgtcaagggtttcattgccgccggtttcgcaggaatcattctggaagaccagattgcgccgaaagcgtgtgggcacacgcgcgggaggaaagtgataccgagagaggatggcgttatgaagattagagccgccgtggatgcgagaagagagagtgggtctgacattgagattgtggcgcgcacggattgctcgcaagctgtgtccttggaggaagcgttgaccaggtgcaaggcttatggggatgctggggcccatgttctt

SEQ ID NO: 228305 - DNA, 510 bp, Glycine max
ctgcccttgccctcccttctgacggaaagatcttagctatggatgttaaccgggaatattatgaattggggttgcccgtgattgaaaaggctggagtggctcacaagattgacttcagagaaggacccgctcttcctcttcttgacgttctcattaaagacgaaaagaataagggagctttcgatttcatctatgtggatgctgataaggacaattacttgaactaccacaagagggtgattgagcttgtgaagcttgggggattgatcggctacgataacaccctatggaatgggtccgtggtggccccacccgatgctcctctcatggattatgttaagtattatcgcgattttgttatggagctcaacaagcttttgcacttgattcaagggtcgagatttgccagctttccgtggtgatggggataccctgtgccgccgcatcatctgatcattctgcttctttcttccccctttacctacttcacctaccacatatgggaaaaac

SEQ ID NO: 228306 - DNA, 516 bp, Glycine max
atccaagcagacacacattatgtctatttaaggattaggtaaaatagtagaaggttgtgttttttccatatgtggcaggtgaagtaggtaaaaggggatggatatgacctcaatgatcagatgatgcggcggcacagggtaatcccatcaccaacgggaagctggcaaatctcgacccttgaatcaagtgcaagagctttgttgagctccataacaaaatcgcgataatacttaacataatccatgagaggagcatcgggtggggccaccacggacccattccatagggtgttatcgtagccgatcaatcccccaagctttacaagctcaatcaccctcttgtggtagttcaagtaattgtccttatcagcatccacatagatgaaatcgaaagctcccttattcttttcgtctttaatgagaacgtcaagaagaggaagagcgggtccttctctgaagtcatcttgcgagccactccagccttttcatcacgggcaacctcaattcataatattc

SEQ ID NO: 228307 - DNA, 524 bp, Glycine max
  unsure (1)..(524): unsure at all n locations
cgcaagcaaaaagaaagaatcccaggcgaggagaaagatggaggggaaggagcaggatgtgttcttgggagcgaacaagttccccgagagacagccgattgggacggcggcgcagagccaagacgacggcaaggactaccaggagccggcgccggcgccgctggttgacccgacggagtttacgtcatggtcgttttacagagcagggatagcagagtttgtggccacttttctgtttctctacatcaccgtcttaaccgttatgggagtcgccggggctaagtctaagtgtagtaccgttgggattcaaggaatcgcttgggccttcggtggcatgatcttcgccctcgtttactgcaccgctggcatctcagggggacacataaacccggcggtgacatttgggctgtttttggcgaggaagttgtcgttgcccaggcgattattacatcgtgatgcatgcttngtgctatttgtggccttgcgtgggaaaggtttcaggggaaacaaatacgtgcgttgat

SEQ ID NO: 228308 - DNA, 521 bp, Glycine max
atgactctggtgttatttttgattttgcaaattaaattacacaatcacagccgtacatcacacatgagttgggcctcttccaacttaaaagcagaggataacattgggcccatgacgcgacacatgcaccacctaataatcataattttacatctttacatacaaaatacaaagactttaaattttaaaaagaagaaaagagataaacagatcatcttaatgaaatgaaaccaaaacccacaaacattggcttgatttttgttgctgttgttgttcccaacttgattaagcatgaaccgtttgattgaatcacttggacttgaagggaatggccctgattacgacctggtggtagagtgctgcaagagctgcaccgatgaatggtcccacccagaagatccagtgttcatcccaaccaaggtccttgttgaagatgatagcagcaccaagactacgagcagggttgataccagttccggtgatggggatggttgccaagtgaaccaagaacacagcgaacc

SEQ ID NO: 228309 - DNA, 478 bp, Glycine max
  unsure (1)..(478): unsure at all n locations
ataattacacatatatactccacctactctcctctccaagcttctattcaaatcccatttgagaatcaaccaacaccacctcaacacaaaaacataattaacatgtcttcaagttccggtactagtgccacgccttaccccatcaaaacgattgtcgttttggttcaagaaaaccgttcctttgaccacatgttgggttggatgaagtccctcaaccgggaaattgacggggtcaccggtttggagtcaaaccaggtttccacattcgatccaaactcgaaccgggtttacttcggcgaccagtccgggtttgaagaaccggatccaggtcacacggttgaggatgtctacgagcaagtttttggcgagccgtggagtgaatcctcggcggcgaataaactgtccccgaggatgaaagggttctgcccataattctgcaaagcaaaagaagggatcaacggcgganacggtgatgaat

SEQ ID NO: 228310 - DNA, 422 bp, Glycine max
acgggaacatgactcaatttaacaacattaaagccagccaatttaagaacaaaccgattggggccgcataacattggtcccaaactccactcccactaaccccctattttttccattttccacaccaagctcattaaagttttatcccgcaaaccggacatacactattagtaattacaatcttcttcacgttggagagcagagcaaacacacttacgcattacatagcataagtaagacacaggcatttttcacattcagtcttttcacatgggggctggttaaacataatcggcctcctcggcctcatactccccattatcctcgggaggggcatcctggtactggtggtactctgaaacaagggccgtcatggtgctctttggctttgggaactccattttggtcatgccttccccggg

SEQ ID NO: 228311 - DNA, 499 bp, Glycine max
atctactctctattttcctagcttagattccttctccaatggctcttgccgtttccactacttcttcctcttcagctgcagcagcagcagcagcgtcgagctctttcttctcgcgccttggatcttcatcggacgctaaagctccgcaaattggttcctttcggtttccggagaggcctcaagtttcgtctggtgttgttaatttaactcaaagacgctcctcggtgaggccactcaatgccgaaccgcaacggaatgattctgttgttcctcttgcagcaactatcgttgctcctgaggttgagaaggagaaagaagattttgagcaattagcgaaagaccttgaaaattcatctcctcttgagattatggataaggccctcgagaaatttgggaacgacatcgctattgccttagtggggctgaagatgttgctttgattgagtatgcacatttgacgggtcgaccctacagagggtttagtcttgacactgggaga

SEQ ID NO: 228312 - DNA, 519 bp, Glycine max
cttgaaaccatctttaaattgcaaataccattctgatacaagaataaatgcattacaaagctaacaacaccaaccaactttcaccaaaccagcacttaaaaacaacagtggccaacatatatattttcaccaatcacatgaaagagtccttcaaattgcagagatgtccaataactcaagtcacccaccacatataacaatataataagaacaccaataaaatgtgaaggaaactcggatcatttcatgatgaaattgtgcataacttcatctcagggcatggaacttcaacttcaaatcttagatcttatcaagcttttcagccttgacaactgggtttgctttagctatagcatcttgagcggcagtgcggtaatcaaatgggcaattatgcttgtctgagtagcgatgtacagcacaaaaaaggtcaccacatcgacaattaaaccctgtcaaaccaacttgcttgttgcagctgctgcaacgttttggtccatccttcggctttgcctcaacact

SEQ ID NO: 228313 - DNA, 573 bp, Glycine max
  unsure (1)..(573): unsure at all n locations
gggtcaatccaaatctttgggctggtaggagaatacaataaataacatgatacaatagttttttttttgcccctcaagtctcataatgaaaaatacaacccaaaacacttgaatctattacaagaaatttactagcacaaaagtggacaacccagaaattaagttgaagaaatgggagtctgcataacaatggcagataaaaaagaagtgacctctgcaagctgaagaagacaagaaagcacacataaaattcacttgccaatccttcacttaaaaacaagatggtagcgcaggcccatggcaaacaaatgccaatacaacataaactatcactagtaggacgactataagtgcaatcgtaagcttgacatttctccaccaaacagtgcttctgaagcgacgagcttgtttcctgaagcgaaatgtgtttccttgcatattagcagttntatcgaccagcaattccaaccgatcacctctatctaaaactttgtcaatattttctatcatgacattccgtacctgagacatttcacctttgagacgattgatcctatcggcgttaggatcact

SEQ ID NO: 228314 - DNA, 552 bp, Glycine max
acaccaagtacgtttgtctatatatacaagaagcatgtttactcccttaattgggcacacaatggtcttcaactagataatgaaaaatataactaaaaccaacaaaaatgactatgaagtcttttttttatcaaactttctaatattctagaatttagcagatgatcacgcagccctaagactcttttcaaaacctctaacctagtaatttgaaccatacaatgttggggtcatgtgataataaaggggataggcttcgtaaagaggaatagcggggtccttctccttctccttttttgctgggccaaatgaaattagttcagtgggacaccactttcgtagctttgacactgcactcactggatcaatctcacccaataagactagtttcatgtccttaacgtcaacagaaatcgattcaacccctgaaaggccagatgctggcttcatagcttttttcttgattctatcattatttaaggccacctttaatactacttttcttcattgatgataaaagattgtttgtgagagctaagcaagaattttttt

SEQ ID NO: 228315 - DNA, 310 bp, Glycine max
  unsure (1)..(310): unsure at all n locations
gaagcaagtaacttttttgcttcaatttcataattccatcagccatgagttttcaagacatccagggtgggcccaaccctccctctcgccggaaccagtccccgtcgcaggccgttgccgccggaattttccagatcaacaccgncgtcgctactttccggcgactcgtcgatggcgttggaaccgttaaagacactcccgaacaccgtcagaaactgcacaatacgaggcagagaatattgctgctggtgaaagaatagtctgctaagctcaaatccttgactgaatctgatcgtgatgctaatgccat

SEQ ID NO: 228316 - DNA, 465 bp, Glycine max
cattcgaattcattttatttatatattaatattatattcaaatgaaataaaaagatattaaaagatactaattataagaatttgaaagtgaaattataaagttattaaatgattaatcaatttttttctacctgttcctgtagtaaaaagagttccatctgttcttgaatagcttccttcaaaaggacttctgcttccccagtgaatgtcttggtagaagatatgatttctttgaattgaggtttattcgtgtttaagtaagcacgtaactcaacaagaaatttccttacctgtccaatttctaatgaatcaagataaccattcgttccagtataaatagttattatctgttcttccacggtaagaggagctgattgggattgtttaagcaacttgcgcaatcgttgaccttttgctaattgattttgagtagctttatcgagaatcagaagccaatttgggcaa

SEQ ID NO: 228317 - DNA, 377 bp, Glycine max
ggttcaaaacaatttatataaaagtattcttagtaccacaaattacgtctgataattaattagatgaaaaaagaaagtctcaagtttcttcaaacataacatcctcaaaacatcctagtgccagaacacaatattggtccgtagttgacaactgctcttttagcgatacttgatgaagccaatttccttggcattgctacggaagcactgcctgcagcacataaggccatacttcctgatcagtccatgtggattcccacacacacggcaagtgcgagaaccaggaccgtagttttttgggtgagagttccaaacgttggagtgtcccattgctacgccgcagaagaggttccgatccaaaaacgcagtcgctgaag

SEQ ID NO: 228318 - DNA, 600 bp, Glycine max
  unsure (1)..(600): unsure at all n locations
aggatatagaacatgatgatgttgatggtaaggctgagagtgaaggtgaagctgaggggatatgtgatgcacaagcaggaggagatggcacatctttgccattgtcagagaggttcctttcatctgtgaaacctctcacaaagcatgtatcagcagtttcatttgtcgaagaaatgaaggactcaagggtgttctatggaaatgatgacttctatgtgttttttagacttcatcaagctctttatgagaggctcttatcagcaaaaacacattcaatgagcgcagaaatgaaatggaaagcaaaagatgctagttcaccagatccttattcaagatttatcaatgcattgtacaacttgcttgatggatctgccgaaaatgcaaagtttgaagatgaatgccgggcaattattgcgaaccagtcatatgtgttattcacattggacaagttaatatacaaattggtcagacagcttcaaactgtcgcaaccgatgaggtagacaataagcttctccaattatatgaatatgaaaagtctcgcaagcctgggaaagttaatgattctgtatatcatgcanatgctcatgtcatccttcatg

SEQ ID NO: 228319 - DNA, 531 bp, Glycine max
  unsure (1)..(531): unsure at all n locations
ggtgtttcatgtggattggaggctttcgctcatccgaactactcaagcttcttgaaagtcagttggagcctttaaccgagcaacaattgatgggcatctacaacttgcagcagtcatcccagcaggctgaagatgctctttcccaagggatggatgcattgcagcaatcactgtctgagacattggctaatggttcacccagcacatcaggctcctcgggaaatgtggcaagttacatggggcaaatggctatggccatgggaaagcttggtactcttgatgggtttcttcgccaggctgacaatctgcggcagcagacattacaacaaatgcttcgaatattaacgaccaggcaatcagctcgagctcttctcgcatcagtgattatttctcacggctgcgagctctgaagtctttgtggcttgctaggccaagggagtgaagcatttcacagctccattagtggacttctttcatancctgaccccttaagactgatcgttgaatcttgtgctctgaatgagttcaatg

SEQ ID NO: 228320 - DNA, 547 bp, Glycine max
  unsure (1)..(547): unsure at all n locations
atcgcagaggcagagcataacaacacaagagtcgcatctcaagcttttgtctttctctacttttcttcttctttctgtgtatcgtatcgtattggagagaagagatggcgacgagggtggtggcggaacagaagccgaagacgaagattgtgtgcacgctggggcccgcatcgcgctctgtcccaatgatcgagaagcttctgcgggcgggcatgaacgtggctcgcttcaacttctcccatgggtcccacgagtaccaccaggaaaccctcgacaacctccgcgccgccatggagaacaccggtattctctgcgccgtcatgctcgacaccaaggggcctgagattcgaactgggtttctcaaggacagtaagcctatccaactgaaacaaggtaatgaaataaccatttccactgactatgacctaaagggtgatgagaagacgatttgtatgagctacaaaaagctgcctgaggatgtgaggcctgggatggtcatactctgcgcggatggcaccatatcatntacagttttatcatgtgacaa

SEQ ID NO: 228321 - DNA, 555 bp, Glycine max
tcaaaactgaccctgattgcgttggttgttgcggccctgtgcgccgttgatctaacccagagagcatcatcatcatcatcatcccctcacgcgccagcgccctccgtggactgctccaacctggttctcaccatggccgattgcttgtccttcgtcaccaacggcagcaccatcacaaagccagagggcacatgctgctctggtttgaagtctgttctcaaaaccgctccggcgtgtctctgcgaggctttcaagagcagcgctcaattcggcgtcgttttgaatgtcaccaaggcaaccactctccctgctgcctgcaaagtctctgctccttctgccaccaactgtggattgtctgagacgcctgctgctgctcctgctggaggcctctctccacaagcttctccatctccccaacaagcagcagatgcttctactaatggtcctgtaaatgaggtatctccagcaccagcaccagctcaagggaacacagcatcagcattattcccaatttcagctatctccttgtttggtgccatattggtagccacattc

SEQ ID NO: 228322 - DNA, 449 bp, Glycine max
ttcgtccttttttttttttttttaaaaaaagaaattataaaacacaaataaaacacactattattccattttcagtacatatgtaatttctttttacttcaaagaaggaaacctacacaaacttttttttttgtaaatggaagagataaatacacaataataaagtaaattaagtttgcatcaagaaacaccaaagaaacccacaaggctgtcatttgatgaaatgaaaacaaagcacaccacaatcatgcatttccaaccaacaaaaaagccttgtctcaatcttaaatatcaatgagcaccactctccttttccttttccttttcctcctctgtcttggagtgataaccaggaagcttctcttttatcttttctaatatacctttcttctccttggcctttccttcatgatgagcaccttcaccatgctccaatgatgcaacaagtg

SEQ ID NO: 228323 - DNA, 529 bp, Glycine max
caggcaagccccactcaaccaccacacctctcctcgttcacgctacccctttctgctcttcttctacctttcaagttttaaaagtataaagatggcagagacattcctatttacctcagagtcggtgaacgagggacaccctgacaagctctgcgaccaaatctccgatgctgtcctcgacgcttgcctcgagcaggacccagacagcaaagttgcctgcgaaacatgcaccaaaaccaacttggtcatggtcttcggagaaatcacgaccaaggccaacgttgactacgagaagatagtgcgtgacacctgcaggaacatcggcttcgtctcaaatgatgtgggactggatgccgacaactgcaaggtcctcgtcaacattgagcagcagagccctgatattgctcagggtgtacacggccaccttaccaaaaaacctgaaagattggtgctggtgaccgggtcacatgtttggctatgccactgatgaaacccctggaatgatgccattgagccatgttcttgcaac

SEQ ID NO: 228324 - DNA, 286 bp, Glycine max
gagagatcgccggagtgagagcttggctaaacggagatccaaactttccagtgctgcaaagcgcaactgcctcagcataggttgctttctggtagagatatggcgaagtttaaacttcaccctagtttttggtagtcttgtttgagggtgattatgataaacatttatggtttttcactttaaatacatttgagttcatttaagtattttgcaaatttttgagagttcaatcgaatcgaattgatgtgttgttggcttctataaagttgcataatacttttcattt

SEQ ID NO: 228325 - DNA, 408 bp, Glycine max
cagtcttttagggatcagggcatgaagtctattcaaactgcacaaccagcaccagatccatttggtttgcttggcctgttaagtgtgatcaggatgagtgatcctgacctgacatctcttgctcttggaattgatcttactacactggggttaaatttgaattcatcagaaaatcttcacaagacctttgggtctccatggactgatgaatcagctaagggagatccagagtttacagtgccacaatgttattttgccaaacagccacctgctctacatcaaggttatttttccaagttgttcggtggaaacatttgtttacatatattatagcatgcgcaaagatgaagcccattatatgccgccagtgagctttacaacaaagttgggtttatcacaaagacatcg

SEQ ID NO: 228326 - DNA, 598 bp, Glycine max
  unsure (1)..(598): unsure at all n locations
gccatccaatcagagaagccaacctatcaagtgattcagccaatcaacggtgacccattcattggaagcctggaaaccccagttacatccagccctttgatcgcatggtacttgtccaacctgcccgcatacagaaccgcagtgagcccactactaagagggatcgaggtgggcctggcccacggataccttctggtgggcccattcgtgaaggccgggcctcttaggaacaccgagatcgccgggcaagcgggctctctggccgccggtgggcttgtggtgatcctcagcctttgcctcacaatctatgggatttcatccttcaacgaaggagccccatccactgctccgtcgctgaccttgacgggccgcaagaaggagcccgatcagctccaaactgctgatgggtgggccaagttcaccggaggcttcttcttcggaggcatttcnggtgttatttgggcctacttcctcctctacgtcttggaccttccatactacatcaaatgatgaatgtgcttactagctttctttactttttcttattcattctccatgaatggactatntgtgcaatagagaatgatgtaaatgatgt

SEQ ID NO: 228327 - DNA, 513 bp, Glycine max
tcttttttttttttttttttttttttaagcacaaaatacttcgataactttatattattttacatgcatgcatagcatagatagcctgctctcaaattagtcagcaggaacaaagatagagagatccaacgatctttaaatttcacatttgccataaatatataacagaaaagagggtttgggatatgagttaagttttgatctcattcaactacagtatcccaaaccattactcttaagactttgaacttcacttggactccaggatcatgttgttctcaggagctaatccaacacaagcccttaggatgttttccagcatagctcgctgctttgacagtgcattaaccactggcgtactcggtggaaccagaggggccttggtcaggtaactgaggatggtcgcaactgggtggaatgagtggaactttccctcattttcagctttaaactcgattcgagtgctaagctcagcaagaaggaccaagtccaagataataggagcagctaaca

SEQ ID NO: 228328 - DNA, 460 bp, Glycine max
aaaaaaaagcctgctaccaccaccaatctattgcgccttaaaaaacaactccctcacgattaacaaactcgtgcattccaccaatcccaaggcacaacagcaacaatgtcagcaaccttaacatgtaaactaggagacaacaacctaagcttaaacgataaaaacgaccaacccccttcacctcctcagcccctacaaaaatgccctgccaatatggtttcgatggtggtctcagagctaagaattcaacgaggaatagcccttccaatggtggccatgaatttggcttggtttgccaagacagccatcacaacagcatttttaggccgtcttggggagcttagtttagcaggtggagctctcggcttcacttttgctaatgtcactggcttctctgtcctcaatggtctatgtggtgccatggaacccatatgtggacaggctcatggtgccaaaaact

SEQ ID NO: 228329 - DNA, 383 bp, Glycine max
aacaataatatagagatttctcgatacatatgactattaacatcaatgattcaatgttccaaggggaaaaatccttcaaatgtaaactttaaaaatacaaaaagaaaatgggggaaaaagagatcatcacaatcactcccttgctacaacacaacctactaagaagatatagatgaaccacggatggccaaacgcaagaaatgcctctctctaactgtctgccccccacacaaaatatgatgcatcaagctaaagaatagaccctcctttaatgatacttcctcacctcttatccatggcaatatcgttaacatgacatgacacagacccataaaaacaactggtgcgaaaaatatttcaccattgaagcatattttgtactt

SEQ ID NO: 228330 - DNA, 489 bp, Glycine max
ttcagttcggtggagggagggagccgtagcagcggaagctctagcttgggtagcgaatcacaatggcgagaggattaaagaagcatctgaagaggcttaatgccccaaagcattggatgcttgacaaactgggtggtgcatttgctcctaagccctcatctggaccacacaaatcgagggaatgcctgccactcatactcattttgcgaaaccggctgaagtatgctctaacataccgtgaagtcattgctattctgatgcagcgacatgtccttgttgatggcaaagtcaggactgacaaaacataccctgctggttttatggatgttgtatcaatccctaaaacaaatgagaacttccgcctgctgtatgacaccaaaggtcgattccgtctccactcagtcagggatgacgaggctaagttcaagctttgcaaagttcgctcagtgcagtttgggcaaagggtatcccatacttaaatacctacga

SEQ ID NO: 228331 - DNA, 406 bp, Glycine max
atccacaaatggaggtttcaatttcaacaattcatcacaaggttcataacatccaaattagagaccattcattttaacacaattccaacagaacatttgacgatcaaaattcaattgaatcgccagatgggataacaaacaaattgcccaatttttaaaaaaaaaaacttgggtgaatcaggaaaactgtctatatagcttccaaagcttgcaggacattagccttcaaatccttaaaatcttcaactccaaagctgaagccaaccagggtggcataaattttgtacttggccctttttgactgaggaagaccccagtaagacaaaatagccgggtgatccacaatgctttcacagccaccaaacgagggcggaatatttgggattttcaaagaatcaataaattt

SEQ ID NO: 228332 - DNA, 570 bp, Glycine max
gaaggatgctgaggctttgcacaccttctaaatgttctggcacctgaatacaccaatccctccacattggcagttaaaaatccctttgaaagagcaaagttagttcttgaacatgctgataagatgggttgcaagcgatacttaactgcaagagacatagtggaaggatcaccaaatcttaatcttgcctttgttgcacatattttccagcacaggaatggactttcagcccagacaaaacaacaaatgtctctccttgagacatttccagatgacacccaagactctagagaagaaagagcatttcgcctatggatgaatagccttggaaattcaacatatatcaacaatgtctttgaggatctccgaaatgggtgggttcttcttgagactcttgacaaggtgtcaccagggattgtcaattggaagattgctaacaaacctccaattaagatgccattcagaaaagtagagaactgcaccaagttgtgaaaatagggaaacagattaaatttttgctggtaaatgttgctggacatgacattgtgcagggaaataaaaaattaatac

SEQ ID NO: 228333 - DNA, 502 bp, Glycine max
ctggttaatactgaatgttcagtagcgtttttttttcttctttcaaagtggatatggaaaaaagcactcctcataactgaggttccaaacttgcaaaaaataaaaacccttactatttacatagctgcttgaacaaaatttgctttgaaaccattaaattacctagtgccatacattgatcttttgatcaactaaaaagagtggttcaaatatatgtatatattaaaaagaaaaaaacggtttcactcgaggcatatatttacatgttcccattctcatctattgatgaatcagaggcagagtcatctagtgttgaatttgatgtagtctccaattgactcccactctcattatctgaagttcccactgtcctttcttcacgagggtgttttaggcaccaagacattatactagccgttagtgcaaggatcattttttgattcacctcagtgatgtcttcccgaagcaggaatatagaacatacaagctttcttgcaatact

SEQ ID NO: 228334 - DNA, 568 bp, Glycine max
caccactggaggaaagaccagtggccagaaggagcttgctgctttctttggccatgttggcagcaagacctcttgtggatatggggtggctacagggggacccttagcctggggcttatgctacaataaggaattgagtcctgataaattctactgcgatgactactacaaattaacctacccttgtactcctggtgcagcatactatggccgtggtgccatcccactttactggaactacaactatggaaaagctggggaagccttgaaggtggatctgttgaaccatccagaatacatagaacaaaatgccaccttagccttccaggctgcactctggcagtggatgaacccaccatagaagcacctaccatcaccccacgatgtctttgttggcaactggaaacccacaaaaaatgacacattgtccaaagggtgcctggatttggtgccacaataaacttgctctatggggaccaaacttgtgggcagggatcaaataatgaggccatgaacaacatcatttcacactatctttattaccttgatctcataggtgttggcagag

SEQ ID NO: 228335 - DNA, 523 bp, Glycine max
ttcttctcttaaaagttattaagagcttttgcttttctttctgcgcgcttttcccagttaagtagttcttccttttctcaaagcaaaaaaaatgttcatcgagagtttcaaggttgagagtcctaacgtgaagtacacagagactgagattcagtccgtgtacaactatgaaaccactgaacttgttcacgagaacaataatggcacttatcagtgggttgtcaagcccaaaactgtcaaatatgaatttaaaaccaacacccatgtccctaaactaggggtaatgcttgtggggtgggggggaaacaatggctcaaccctcactggtggtgttattgctaaccgagagggtatttcatgggcaacaaaggacaagattcaacaagccaattactttgggtcgctgacccaggcatcaactatcagagtggggtctttccaacgggaagaaatatatgctccattcaagagcctgcttccaatggtgaaccctgatgatgctgtgtttgggggatgggatatc

SEQ ID NO: 228336 - DNA, 446 bp, Glycine max
gaattgaaggtattttgctcaattcaaaaaaaggagcgagacttatttttctccaacaaaatagcccaacttgatctgaaacataaattacagatacctaaacaaacacatactgcgaactaggagtaacgaatcattatgccacgagtagcatgtgcttccttgaaagggtcctctaggcaaaatattttgggctcaaaaagcctgctagtgaagcccaacgaagaatagatcaaccaccagaatgtttcccatgaacttacttgggaagcccagtttcatcgttcagaagtgcttgtatgctatcagaaagcaaaacaggtccccttccaggtctggtacatatgaagtaactgacatcccccttgtatgtttgcgatggaatattatctttaatttctggaggtggcggcaaagcttctacatcctggatttcattgatccca

SEQ ID NO: 228337 - DNA, 459 bp, Glycine max
  unsure (1)..(459): unsure at all n locations
agaagaagaagaagagaaggtggtaccgccttcaattctctctctccatttctcatgctcatcatcttattatacctcttccatctccataacatccacttgtgaaaaaaacccattaatatatatcacacacacatgtatctctgagctccaatccaatccaagaccacaccttgtcgcgtcggacgaaccttggtgtctgtctttttttttttttttgtttcattagtttctccgaagagatgcggaagggcagaggaggaggagcctcggcggcggcggcggcggcggtgaacggatccgttttaaaggagcctcggtaccgaggcgtgcggaagagaccgtgggggagattcgcggcggagatcagagacccgctgaagaaagccagggtttggttgggaaccttcgattctgccgaggatgctgnacgtgcctacgacaccgccgctcggaatc

SEQ ID NO: 228338 - DNA, 568 bp, Glycine max
ataagaatggagaaaatcaaatatcctttcaagtcttgcatattcaaaatgcaactataaggagttgacaaatttattcctgaaaacaaaagagactattttctctaactacaaaatccatcctcatcaaatatcaattgggtacccttaaattgacggataaaattcaagtaggacttagtcacggaactcatccatgaatttttcatggaactcagtcaagcgggtgacgatggccggaatcttttcttctggaggcaatatggtgcacctaaaatgccatgtgccaggaacctgtccaaaaccagaaccaggaacaacaacgactcctgtggcattaagcaagcgtttgcaatagaagttatcaggtgttgcatttgcagcctctgcagctttgatagccttttcggacaggcgaatttgggggaacaggtacattgccccttctgctttgttgcatgttacaccctctaatttgttgaatgcatcttctagtgtctttgcacgcctggcaagggacgccaaaatattctccttcttagccatgaatgagtcataggactcatct

SEQ ID NO: 228339 - DNA, 361 bp, Glycine max
tttgttttttttttttttttttttttttttttttttttttttaattcttatttatacgatcgggatttattgaaaaaggtaatgagcccaaatcccagcctacggacaagggcctgcgacgaggtgggaaaaaaaaaggggccccttaattcaattcaatggccgtaattttacaccgaaatgaccgggaaaaccccggggtaaaccaaaataatcccctggaaaaacatgcccctttcgacaaaaggcgttagaacaaaaaggcccctcccgaacgcccttaccaagaaatgcaggccccaaaggggaaatgggacctcccttggaaaaaccaaatgaacccggggggggtggggggtac

SEQ ID NO: 228340 - DNA, 587 bp, Glycine max
  unsure (1)..(587): unsure at all n locations
attgaagatatcaaaaccaccacctatatcccaaaaaataatcgacccaaaataaaaactactaaagagacccgcgattccataaaaagccatcgtggccccttgtggaataaatggaaaataaataaagtccggaataaaagaaaaatcactaattttctcagaaataaagaacaaatccataccaagataactggaaattgcaacgaacaataaccccaatgaacctaacaaagtgaaaacggcccaaaataaattgcttgttcttcgaacctccgccatagaatatatcagtacatcgtctgagcgaaagattatactcattactctcctttttttgaatttagtattataattggggaataaaaaaccccagaattttactttgttttctgtatctaaaaaatcttgtttttttgaacataaagaaataaagaagccattgcaattgccggaaatactaggcctactagaggaacaaaaatggaaggaaagtttatcataaaatgggtacctcgatttactatttggaccctatatatattatttttataattatatagacgctttnnntttttttatttttt

SEQ ID NO: 228341 - DNA, 419 bp, Glycine max
aagaagtcctcttctttttccaaggtttcatgcggtagtagcttgtgcagtgctttgccttcttgaacatgcagtgatgggtgtgagtatgtttattcatacggtgattattcaatgacacaaggcgttttggctaccgagacttttacttttgggaagtctaagaacaaggattccgttcacaacattggttttggttgtggggaggacaatgaaggtgatggatttgaacaagcttcagggctggttggtcttggacgtggtcctttgtctttggtttctcaactcagggaacaaagattttcttattgtttgaccccaattgatgacacaaaagagagtgttttgttgctggggtctgtgggtcaagtgaaagatgcaaaagaagtggtgacaacacctcttctcaaaaacccttt

SEQ ID NO: 228342 - DNA, 413 bp, Glycine max
agtaacagtcaaatgaaaaacactctttattgtgtcaagacagcgccatcagaattctacaaaaacaatgtgacaacaatcctggccactctttcttggatggcttgatttcataaacatatactctaactaaatttccaaattccaggaatggaaaaggaaattaagaatcaacgttcacttcagactcaccatgaaaatactataaatgaaggtgttgttgaccttaagcagcggctgtaatgaactgtattgcctctttgcatataccagtcattgtggcttcgggtccataaacctcaatggggatgccaatctcctctccaagtgctcgcatcaaagctagacccttctggttgttgggaccccctcttctcacaaagatgtgcatccttgctgctttcaatttcgac

SEQ ID NO: 228343 - DNA, 570 bp, Glycine max
gcctccgcgatcagaacattgtgcccggcatcaaagttgataagggtctggtccctctgccagggtcaaacaatgagtcttggtgccaagggctggatgggttggcttctaggtctgctgaatactacaagcaaggtgctcgatttgccaagtggaggacagttgttagcattccatgtggtccttctgcattagctgtcaaggaagcagcgtgggggcttgcacgttatgctgctatctctcaggacaatggtcttgtgccaatcgtagagcctgaaattcttcttgatggagaccacccaattgagaggacgctggaagtggccgagaaggtctggtcagaagtcttcttctatttggctgaaaacaatgtcctttttgagggaattttgctcaaacccagcatggttacacctggggctgaacacaaggaaaaggcttctccagaaaccattgccaaatatactctaaccatgcttagaagaagagttcctcctgctgtccctggatcatgtttttgtctggtggacaatccgaagtggaagcaacactaaatctaaatgccatgaa

SEQ ID NO: 228344 - DNA, 426 bp, Glycine max
acacagcacgctatccttacattgctagagattggggagcataacacagtttataatttctatgatacctctatgggacaaatgatttacagtacgattttgtaatgtgattcagctcaaggagaatgaacatcccaattccaaacttattttacagataaacatcaacatatactgtaaatttttatcgcagtacaatgtttcaccctttaagatggacgatacgaagcatgacgtgcaaggggcagttacacgggcatatcgggcaccacatctttctgcatacatttaagccacaacaggataagatgcacaagttgcaacaccgcacatattcttccctaattccatcttgaaggaaccattgtcaccccagttgcttccccatgaatttttaatgatccaatatggaacaccatttttaac

SEQ ID NO: 228345 - DNA, 564 bp, Glycine max
acttagatcaacttggaatagcatctagatacaacactaaggtttattgcaggcagactttaattggaggaaactatggtcttctcaataccactactttcattccaaatcctgactactacagtgcacttttgtggtgtcagctaatggggaagactgttcttgcagctagtagtgatgttttttcaccatctttacgcacttatgcccattgttcaaaaggcagagatggtataacattactgctgatcaatttaagcaatcagactcatttcacactcacggttcatgaccgggtgcctgtgagcaatggaggaaatgaaaatgctaaaagcatccatacagaaaactcattctttagtcatctcaagagggcattttcttggattggaacaaaaggatcagatgtcacattcagggaggagtaccaattaactccaaaagatgattaccttagaagccaaaccatgttgctgaatggtattcctctagagttgacacatgatggagaaattccaacattggatccactactcaataatgtacattctccaatacacttgg

SEQ ID NO: 228346 - DNA, 569 bp, Glycine max
  unsure (1)..(569): unsure at all n locations
gagaggaccacttgggaagagggcttgaagaaaaccatggactggtatatcaacaatcctgattggtggggtgatgtcagtggtgcattgcttccccatccaaggatgctgatgatgcccggtggactggagagacattttgatggatctgacgaagaaaaacctccatcgtatgtctcaactaatactcgaatggtggttccgacatccaagaatgttaactcctcacagaaacctgctctcaagttcttgctctatggcagaacaggttggattgggggtttgctggggaagttgtgtgaaaaacaagaaattccctacgaatatggaaaaggacgactagaggaccgatcatcacttgtggctgatattcagaatgtgaagccaacacacatttttaatgcagcaggagtaactggcagacccaatgttgattggtgtgaatctcacaagacagaaaccattcgaccaacgttgctgggacttaacattggctgatgtcagcagagagcatggaatcttgatgataaatatgctactgggtgcatnattgagtatgacaaagctca

SEQ ID NO: 228347 - DNA, 548 bp, Glycine max
aactgaataccccacaaaaaggatataatatatgagcaataaaaagaatacatgccttccaggatgcaaaagcttttaggtaacaagaccctattttctaaggctgctcttaacagaggacgctacaaactagaataaagctacagaaatgttaacttaggaaccatatctggcccaattattatacttgtcaccctctaaacacagtaacatgatggaactatgctgaaactggaatcacttgtagctatgagaacaagaactacatggctagcttttctagtaaggttcttatcaaaacccaacgaaataacaatgaaataaagagtgatctatgtagcccgcaacaaaaatgcataatctttgatttctaaaacatgaaaccgctcaatacttttaagcagttttcttgtttggctcaaagacatacttgatcagtgattccttgaaggaaagaagctcatggaactcgtttttcagtttggatgcatccatctcattgttgctccgtggagcaattattaccttggcttgctcttcaagattga

SEQ ID NO: 228348 - DNA, 490 bp, Glycine max
gctgatgcaatcaatgatgctgatgaagaaaccatcaaaaagctgatttatcctgttggggggtatactagaaaagcctctaacttgaaaaaaattgcaaatatctgtctcatgaagtatgatggagacatacctagctcaattgagcaactactgttacttcctggcatcggtcctaagatggctcatttggttatgaatgttggatggaacaatgttcaaggaatatgtgtagatactcatgtccaccgcatttgcaaccgccttgggtgggtctcaagactgggcacaaaacagaaaacttcgacacccgaagagacgagggaggaattgcaacggtggcttccaaaggaagaatgggttccaataaatcctctattggtaggatttggacaaacaatttgtacacctctaagacctcgttgtggagaatgcagcataagtgagttatgcccctcagccttcaaggagacctcaaactcaagcccat

SEQ ID NO: 228349 - DNA, 406 bp, Glycine max
ctcttaatggagagcttgaattgcaatattgaatacaaatacattttcatttcatttttcacaaaaaaaaggggcaaaaaattaggaatgatacattttctgtggaacaaatctctacacaataaaaggaaggtgaaaagagaagggttaaaaaaccacccaagaaacaaaaagactgtgtaacactgtttaagattaagaagagaccgtgtaggagcgctatctgagtgttacatgtttcttgcatcctctctcgccatgtagtattatcaagaagaaagggttctactttcaaactaactccataaggagtggatccccttctgccattattctgataagctttataaattcttgctcacttgatacactccatggatgaacagcagggaactttgcccaaata

SEQ ID NO: 228350 - DNA, 473 bp, Glycine max
gtaaaaatgaagttctttatttttgttttttagctttaatctaaactctgatttacatagaatatgaagtttactagacagacacggcaaaattgcctatcccttttacttgattcaagggatgggatgtataacaacctttccagttgctcggtttgtttcaaggtaagagaaggcttcagcaagcttatcaaaggggaatggacctttggggtcaacaattggcttcaccttcccactttctaagtaagggtttagtttcctcagaacttctccattggaagtaactacaaatctgaagccaggtggtgtaacagcacctgtgagtgccaccacactgccatcttctttcacagccttcactggcctgtcacattgcccaatggcatcataaactacatcaaatttttcgggcaaatcttcaagttctcttttgtgagtcaatggccaaatcagctcccaagcttttcagt

SEQ ID NO: 228351 - DNA, 583 bp, Glycine max
  unsure (1)..(583): unsure at all n locations
tataccgcctcctctgcctatttgggaccagcaccaccatcgtgacaactggtcacagaatgacataggtaatcagcatctagtaattgatttggagattattaacgacttgagaattgacatggctcgattacagcaaaggatgaataacatgcagagaatgctggaggcttgtatggatatgcagcttgagttgcaacgatctataaggcaagaagtttctgcagctctaaatcgctctgctggttcatcaggaatacatgattgcgagtcaccagaagataaatctaaatgggaatgtgtaagaaagggactttgctgcatatgctgtgaaagcaatatcgattctttgttgtacagatgtggtcatttgtgtacatgttcaaaatgtgcgaatgagttgcttcaaagcagaaggaagtgcccaatggtgtcaagctctgtggtggaggtgatacgtgcttattctatacaataatttgacattaatataaaggtcacacttttaacaaaatacaggattctaacagttttattttcgggacgttnccaggtacactntttcgtntttttttttttttat

SEQ ID NO: 228352 - DNA, 285 bp, Glycine max
aaatgaaaagtattatgcaactttatagaagccaacaacacatcaattcgattcgattgaactctcaaaaatttgcaaaatacttaaatgaactcaaatgtatttaaagtgaaaaaccataaatgtttatcataatcaccctcaaacaagactaccaaaaactagggtgaagtttaaacttcgccatatctctaccagaaagcaacctatgctgaggcagttggttttgcagcactggaaagtttggatctccgtttagccaagctctcactccggcgatctctc

SEQ ID NO: 228353 - DNA, 530 bp, Glycine max
  unsure (1)..(530): unsure at all n locations
aaaaaattcttgcttagctctcacaaacaatctttaacaacaatgaagaaagtagtattaaaggtggacttaaataatgatagaatcaagaaaaaagctatgaagacagcatctggcctttcaggggttgaatcgatttctgttgacgttaaggacatgaaactagtcttattgggtgagattgatccagtgagtgcagtgtcaaagctacgaaagtggtgtcacactgaactaatttcatttggaccagcaaaagaggagaaggagaaggaccccgctattcctctctacgaagcctatcccctttattatcacatgacaccaacattgtatggttcaaattactaggttagaggttttgaagagagtcttagggctgcgtgatcatctgctaaattctagaatattagaaagtttgataaaaaaaagacttcatagtcatttttgttgggtttagttatatttttcattatctagttgaagaccattgtgtgcccaattagnggagtaaacatgcttcttgtatatat

SEQ ID NO: 228354 - DNA, 341 bp, Glycine max
tttttcttaagcttgagatcaggaattaatttcagaggttcagagaatggcaacggattcttctaatggtaatggacatcaccaaacaacaacaaagcaacctcctttgccgtctcccctgcgcttttccaaaattttcagtccaacatgagaatcttggttactggaggagctggattcattgggtctcacttagttgacagattgatggaaaatgaaaaaaatgaggtaattgttgctgacaactacttcactggatccaaggacaacctcaaaaaatggataggtcattcaagatttgaacttatccgtcatgaagtcacggagcctttattgatcga

SEQ ID NO: 228355 - DNA, 596 bp, Glycine max
cttccaagttttcaccatcgtaatgggttccgaaggatccagcgtcgtggttcctaggaatttcagattattggaagagcttgagagaggtgagaagggaattggggatggaactgttagctatggaatggatgatgctgatgacatatacatgcaatcttggactgggactatcatcggtccccctagtactgttcatgaagggcgtatctaccagttgaaattgttttgcagcagggattatccagacaatcctccatctgttagatttcaaacaaggattaacatgacatgtgtcaatcaagaaactggagtggttgagccacatttgtttcctatgcttgctaattggaaacgtgagcgtacaatggaagacattttgattcaattgaagagagaaatgatgtctccccaaaataggaagctaactcagcctcctgaaggcaatgaagaatccagggttgatcaaaagggggtggtggtgagatgttgtattgtgtaattccctggagaatcccagaataataataatggtaataactatattcaatagaccacttccttcctggagcaatccaagatatagtagttactat

SEQ ID NO: 228356 - DNA, 558 bp, Glycine max
gacaagtcaaatgttatcccacaattttcagacacaagtatacacatgacatgggttcacacaaaaggatagttaaaaaggatcttaaaattcgaaattagaatcccgctgtaaaaacagcctcagtacaataaaaatttcacaagacatgatagtaactactatatcttggattgctccagggaggaagtggtctattgaatatagttatttacattattattattcttggattctccacggaattacacaatacaacatctcaccaccaaccccttttgatcaaccctggattcttcattgccttcaggaggctgagttagcttcctattttggggagacatcatttctctcttcaattgaatcaaaatgtcttccattgtacgctcacgtttccaattagcaagcataggaaacaaatgtggctcaaccactccagtttcttgattgacacatgtcatgttaatccttgtttgaaatttaacagatggaggaatgtctggataatccctgctgcaaaacaatttcaactggtagatacgccctttatgaacagta

SEQ ID NO: 228357 - DNA, 557 bp, Glycine max
  unsure (1)..(557): unsure at all n locations
ggaccacgtggaaagagtctctccactgggaccccagatgaacaaagagctcttaatcagttactgagaatgagtgatgttcttcttctaacttctgacgaggctgaggaattaactggcatagaagatccaatattagcagggcaggagtttctcaaaagagggatccgcacaaaatgggtgattgtaaaaatgggttctaagggttcgattcttataacagcatcgagtgtagcttgtgcacctgcattcaaggtgaatgttattgactctgtcggatgtggagacagttttgtagctgctattgtctatggttttatacataatatgccactggttaatacattggcaattgcaaatgcagtgggtgctgcaacagccatgngctgtggtgctggtaggaatgtagcaacactggagaatgtagtaaatatattatagatcatcaaacctcaacgaagatgatgaattttggattgaaatatttgaaaagaatgtggttgctcaggaaataacatatctgtcaaatgttatgaatggaaacaanaatcgtctca

SEQ ID NO: 228358 - DNA, 336 bp, Glycine max
tatttataggatttaaaaaaatgatatttttattatttttaaacacatttttcaaaacaaaagtaaaaatattttcatgagacacgaaaattatgttttaagtctttaaatttagagttaattataatccacatgtaatttatttttattacattgttcatttttttattatttctaacctcatttgttaattatgtgaattttttgttaataaatttaataaaaaaattatttaggaaataagaaacaaagaaaaattcatcactatttaaatataattcttttgtcaaaagttattttaatactcaattaaatatattttaatactcatttagg

SEQ ID NO: 228359 - DNA, 553 bp, Glycine max
gggaagaagtactgcgacaaaggatgggaatgtaagggctggtcaatttactgttgtaacctcactattactgattatttccagacctaccagttcgagaatctcttctccaagcggaactcgccggtggcgcacgccgtcggattttgggactaccactcgttcatcgccgctgccgcgcttttcgagccgcaagggttcggcaccaccgggaacaagacgatgcagatgatggagattgcggcgttcctcggacacgtcggcagcaagacctcttgtggttatggagtggctaccggaggacctttggcctgaggtctttgttacaaccatgaaatgagtcctatgcagtcatactgtgatgactacttcaaactcacatacccctgtacacctggtgctgagtacttgcgtcgtggagctattcccattttctggaactacaactatggtgctgttggagaagctttgaagatcgacctactcagccatccagaatacatagagcagaatgccacccttgctttccaggctgctatttggagatggatga

SEQ ID NO: 228360 - DNA, 493 bp, Glycine max
  unsure (1)..(493): unsure at all n locations
tgccactaaaattctattcaattcatctatggctgcctcttcttatgctatgcaatcaatcgtggcaaaccctttgatccgcatttccagcgggtctagggtgaaccaatttggcgttcctgctttgcacatgagaaggaatgttggcctgagagttaggtccatggctaaggaagaacaaccaagtgagcctgcaaccccagttacaccgccaccatcagtagaacccaagccacagccagtctctgctccttcaccaaaggtgagcactaagttttctgatgtgttggcattcagtgggccagcacctgagaggatcaatggaaggttggccatgattgggtttgtggctgcaatggcagtggaagtagccaaagggcaaggtgtgttagaacaaatanntcaatggtggcatccatggttcttgggacaagtgtggtccttacccttggcttcttgattccactcttccaaggttgcaacgtggagtcta

SEQ ID NO: 228361 - DNA, 436 bp, Glycine max
aaaacctcaaatccacgtaaaaaaatgtcaataatacaaccccaaagacacattggagcatacacaaataccattaacttagtaaaatgatccacagacccacaattcctactcaaattgatcattatcgtcgtcaggaaggggctgactagcagctgcaagaagctcaacctcgtgctggtggtgggcagctaaatcaatttgaacttttgggggggccaatgcaggagattctacaaagggcaagtttgcatcgcctgcaagtttcctggccaagtacaaaaatgggttttcaaaattggagttgcttttagcagatatctcatagtactggaaattcttcttcctgtggaaaggaacctgctttgccttcacttgcctatttttgacaataaccttgttaccgcaaagaacaattgggatgttttcacaaacc

SEQ ID NO: 228362 - DNA, 490 bp, Glycine max
ggagaatgctgatgagtgtatggtgcttgataatgaggcgctctacgatatctgcttcagggctctcgagttgaccactcctagctttggtgacttgaaccacttgatctctgcgaccatgagtggtgttacatgctgtcttcgattccctggtcaactcaactctgatctgaggaaattggccgtgaatctcattcccttccctcgtctgcacttcttcatggttggatttgcgcctctcacctctcgcggctctcagcaataccgcgcattgacagtgccagagctgacacagcaaatgtgggatgccaagaacatgatgtgtgctgcagatccaaggcacgggcgttacctcacggcatcagccatgttccgtggcaagatgagcaccaaggaggtggacgagcagatgataaacgtgcagaacaagaactcttcatattttgtcgagtggattcccaacaatgtcaagtcgagcgtgtgtgacatt

SEQ ID NO: 228363 - DNA, 413 bp, Glycine max
catgacctcaaacatatttagccaaaatatatttaactatcaattacataatatacatgacagcatcttgtgccagaaatttttggattgtggggccgtatgcggtctagcacaataaacaatttcagatccatcaattttattactttgttttgctttctcacactcattcaagaatgttccaaatgcatcttcacagtatttcactgcctccgaaacagttaagttctcagttagcttggggtatatactcttattatgatccccatttagagttgctgccatatatatcaaatcttcttgaaattcactcaattgcgtttgttgttccgcggaagcagcctttcgcagtttgacggggtcaggcaatttcactggacaatcagtacgtggggtgcttaaagataagagat

SEQ ID NO: 228364 - DNA, 586 bp, Glycine max
tggggattctgtacgcgctggttggtcgtggatcggtggtgctggcggagttcagcggcacgaccacgcaacgccagcgcaatcgcgcgtcagatccttgaaaaaatccccggcaacaacgacacgcacgtttcttactctcaggatcgctacatcttccatgttaaacgcaccgatggactcaccgttctctgcatggccgacgacaccgccggaaggcgaattccttttgcgtttcttgaggatattcatcagaagttcgtgcggacttacggacgcgccgttcactccgctcagccttacgggatgaacgaggagttctctagggttttgagtcagcaaatggagtattactccagtgatcctaacgccgataggatcaatcgtctcaaaggtgaaatgtctcaggtacggaatgtcatgatagaaaatattgacaaagttttagatagaggtgatcggttggaattgctggtcgataaaactgctaatatgcaaggaaacacatttcgcttcaggaaacaagctcgtcgcttagaagcactgtttggtggagaaatgtcaagcttacgattgcacttatagt

SEQ ID NO: 228365 - DNA, 374 bp, Glycine max
  unsure (1)..(374): unsure at all n locations
aaatcgaccgtgcctgtgaaaacagctgaggcaattgagaggattctgactcacaataggaaaggcatcaatttcacaattctgtcaaaccctgagtttcttgctgagggtacagcaattgcagacctgtttaagccggatcgagtcctcatcggaggcagggaaaccccagagggtcaaaaggctattcattctctgaagagtgtttatgcccattgggttcctgaggacagaatcctttgcaccaatttgtggtctgctgaactctcaaagcttgcagccaatgctttcctggcccagaggatctcctctgtgaatgccatgtcggcgctatgcgaggcaactggtgctgatgtctcccangtgtcacactc

SEQ ID NO: 228366 - DNA, 403 bp, Glycine max
aagccactgcaggcatgtccttgagccatgaatctagaggtttgccaatggagtaaacaatgaaaccaatttccctcagcttggtaacatccacgacgtttgcggccatcgaaaatgaatgcaggcttctgcatgctgtcataaaccttctggcaatcaaggttcttgaactcatcccactcagtcataacgcagatgccatgtgcatccttgattgcctcataggcatcccaaaccacagatacttgtttgatggaagttggactcagtggttgaagatgagcagggtggtcccaatcaaacttcttcattgctaaatccctcatgatttgatcctcagtgacctgaggatcatatatgctcaacttggccttgtctcccaaaaggcccttgcacacatcaa

SEQ ID NO: 228367 - DNA, 493 bp, Glycine max
ctcgagccgctcgagccgctttggacaagatttaatcggtgacctcatggatgctccaacatctgttcctgtagaaaagccagcaactagtaatgtaccagaggttgatctttttgcagatgcagcatttgtatcagcagaacctcatgtggacaaaggagccatttctcaaccacaggctgaggtggatctattttcttcacaaccagccattcctacagttacaccaacagttgatttgttttccattcctgaaccggcagtgcagccagacaccaagtcagagaagtctgttcctatgaataacagcactattgatccctttgctgctgttcctcttaataattttgatggatctgatatttttggtgactttacttctcaatctgattctgtgtcttcccagccctccataatgttttcagtgatggcaagcatgataatgtgactggtaaatctttagcagactctaaagtttcacctaaaaggataa

SEQ ID NO: 228368 - DNA, 464 bp, Glycine max
  unsure (1)..(464): unsure at all n locations
aacgaatacgttttctctttctcttcaatttcacccttattagcatagcatattcatttccctttcttgaatcgttgtaagcgcattgcgattttgcccttatctttatttcaattttttgttctgtttttgttattcatttgggttaatttcgattcgaagcttaactgcgagaggggatatcagagaagttgattggcctcccattaataacagatctgaatgatctgatggagtctaaaggtgggaagaagaagtcgtctagtagtaagtcctttttgtacgaagctcctctcgattacatcattgaagacgttcgaccacacggtggaatcaagaagttcagatctgctgcttactccaactgcatccgcaagccatcctgagattccctangttcgtgtganggacgtagccaccttagtcctgcatctgctatatttggctagtctcttctcttctcc

SEQ ID NO: 228369 - DNA, 569 bp, Glycine max
aatataattatatttatatttatttatataaaataaaatacaagtgcaacagcctcatataagagtctcccatatgagttggcagtagaaacgaaaaaaacatttgcataatcacaccaaattaagtgaagctacacaataagctcattgcttcactctcacatcataacccccaaatttatttattaggtaataacacactcaacagtaaagataaataacagaacataaaaaccagaagtacttatatctccctcacttcatcttcgatctcatcctcactccagcagcatttcagaatagacctgggagatgtactgccatcacagccttgaacaaatgattggtacacaactgcaccacctactccaagctcttcatagctcctcttaccacagtagtatcctttgatgtccaagggaaatttgttaagtttttcgccatgcatgtcaatgttgcaagcaacagaaaactctgctggacgaaagcatgctaaaactttttccacaagttcaccctaagccatttcatcaaagtcataaccatcagcttcaaactcgcgtaactga

SEQ ID NO: 228370 - DNA, 427 bp, Glycine max
gaacactacaaatagaaagttgacatttaataaaccaaagcaacacaacgcagcaaagtcctgaaactcgctgcgcttaacaaaaatgtaatcaggggtttcccatcatacactatctcattaaaacacagataaataaaagcaattttgccactcgtcgatcaagaacccagttctgggaacaacagttgcgagatgatggtggagacttcaaactttgtccgaaaaacaagctacctagaaaagaagacacaagagtacagaaaagaaaccaacatttattgtaaccaacatcccctgatgaaccagcccgcacgattcacttcttcttctgggcagccttggtgaccttggcttcggtaggatccttcttcttaacgctcttgatgactcccacagcaacagtttgacgcatgtccctaacagc

SEQ ID NO: 228371 - DNA, 453 bp, Glycine max
cgcaagcaaaaagaaagaatcccagttgaggagaaagatggaggggaaggagcaagatgtgttctggggagctaacaagttccccgtgagacagccgctagggacggatgcgcatcaacaagacaagtgcaaggactaccaggagccggcgccggcgccgctggttgacccgacggagtttacgtgatggtcgttttacagagcagggatagcagagtttgcgggcacttttactgtttctttacatgatcgtcttaacaggtatgggagtcgccggggctaagtctaagtgtagtaccgttgggattcaaggaatcgcttgggccttcggtggcatgatcttcgccctcgtttactgcaccgctggcatctcagggggacacataatacccgcggtgacatttgggctgtttttggcgaggaagttgtcttttcccacggccattttctaca

SEQ ID NO: 228372 - DNA, 488 bp, Glycine max
cgcaagcaaaaagaacgaatcccaatctaggagaaagatggaggggaaggagcaggatgtgttctggggagcgaacaagttccccgagagactgtcgattgggacggcggtgcacagccaagacgacggcaaggactaccaggagccggcgccggcgccgctggttgacccgacggagtttacgtcatggtcgttttacagagcagggatagcagagtttgtggccacttttctgtttctctacatcaccgctttaaccgttatgggagtcgccggggctaagtctaagcgtagtgccgttgggattcaaggaatcgcttgtgcctttaggtggcttgatctttcccctcgtctactggaccgctggtatctaacggtgacacattaacgcgggggtgatagttggggtctaacttgcgaggaacttgactgtggccatagctagtttcatacatcgtgatgcaatgcttgggtgctatttgtggcct

SEQ ID NO: 228373 - DNA, 495 bp, Glycine max
gaaagcaaggttttcacaccaaaggatctgattcattaaaagcaatagattcttcacaaccacacaccactcacttgacatatatggaacacatacataatccatatagcattacttaggggtggggcatttcttacttttatttaatgcacaaacataacaagggcaggaaggaaaaccacaaaattaaaacgaagatcatatagctgttaataataacaacaacacatgcaacataaaaaccacatgcagttgtggtaggggcatcttcttcagattggaaacccctcaatgatggaagggagagcgttgatcttgatgatgttgtaacgcgcgaaaccggttttcttgaacagccacttccaggtctcttcggtcctctctttgccaccggcgttgggagcgagaagcatcatgtcgaatgcgatgccaacgtttgtgaagagttcggtgccttcgggtcggagaacgtgatccacgattgtgacttttgct

SEQ ID NO: 228374 - DNA, 571 bp, Glycine max
agcttaaatgcagaatttttattagtagaatttttcacatagaatacacaagagaagtgagactacaagaaagatcgaagcctttcaagtttcaaccatcacaacaataataataaccaattacgaacgaaatgttcgttggctatacggaatacaaaagtacaaagtacaaaggatgatgaataacgaatatagcgaaatagaaccttgagacatactttacattaggaaactacacattatagaagtgtttattcattaatagcagacgaaacccttgggaacaccctttccacagtagttgagtagcaagctcaagttcactggaacattgaggttgatgcccaacacattagctttgagagcagtgcagaggcacactgcagcttcaagatcagcgagaccctcaatgaggttgcagcatggggtctttggtggcttcccaagttgcacgttgatcaaacctaacacattagcacacacaccaaacttaatagtgtctttggggcaacttgcttgctttggggaaggtggctttgggacaagtgggtgttttggaagtttggggggg

SEQ ID NO: 228375 - DNA, 497 bp, Glycine max
agggcaaagtagcaaagacatgctatcttaattcttataactgataattaaagcggggcgcattaatacaatacaatacaatttgtaactatgaactatcaatttatgatcgttatttatgtctgggatacacacaattcaggccatgatattcttacgtgatttacagcaacttctaacttatttaatacatcataccaacccaacttggggcaattttcattatacaatgacacttatttttaaactttgaaacatgacaaggggggagtcaccagggaccatattcttatgcaatttatgccacaactggataagacgcacaagttgcaacaccacacatgttcttccccaattccattttgaagtagccattttcaccccaacttttttcccatgaattttttatgagccaatatgggacgccatttttaactccataccccacaacaaggacggcatggttcacattctgggaagtgctaccgcaaaagtca

SEQ ID NO: 228376 - DNA, 445 bp, Glycine max
ccgcatttgatcaaggcaatacaaggccacttagggaacaagaatataaaagaaggaaaaagatgaagacgacatagcacagcctagaaacatgggtcaccattcttgctgcaaccaacagaaggcttaaagaggactttgggctttctgaaggaagattaaaaagctccatcagatacattactactcatggatatggctgctggagtgaagctccagaaaaagctgggcttcaaaggtgtggctagagttgtcgcttgagatggattaattattgaagacccgatattagaagagggaggtttacacctgatgaggagaagttgattataagccttcacggggtcgtaggtaacagacgggctcacattgtaagccacttgtcaggtcgaactgacaatgaaatacagaactattggaactcatggatgaaaaaatactaatc

SEQ ID NO: 228377 - DNA, 426 bp, Glycine max
  unsure (1)..(426): unsure at all n locations
atccatgagttccaatagttctttatttcattgtcagttcgacctggcaagtggcttgcaatgtgagcccatctgtttcctacgaccccgtgaaggcttataattaacttctcctcctcaggtgtaaacctccctcttctaatatcgggtcttaaataattaatccatctcaagcgacaactcttgccacacctttgaagcccagctttttctggaacttcactccaacagccatatccatgagtagtaatgtatctgatgagcttttcatcttcctcaggagaccaaagtcctcttttaaccttctgttggttgcagcaagaatggtgacccatgtttctaggctttgctatgtcgncttcttctttttccttcttttatattcttgttccctaagtggccttgtattgccttgatcaaatgctg

SEQ ID NO: 228378 - DNA, 562 bp, Glycine max
ccctaggcagagagaaagttccccaaatttcacaccctagattgagagaaaccggagcacgcggtgggaacacgcgagacatctcgcgaaccctgccccgatcgcatactcgacgacataggcggcgccttcggcttgggagcggctgggtggctcccgccttcattttagtaaggggcctatacaattgccccagaggcgatcgattcgtcggcgccacccaggccgtgcgccttaacgccccgcgcgtcagcggcagcttcgccggctggggcggtctcttctccgactgtgactgcaccatggtctacgctcgccagaaggaggacccctggaactccatcgtcgacggcgccgccactggcggctgcctctgtatgcgccagggcctctgcgcctgcgcccgatgcgcggcattcggcggcgtactcctcgccctaatcgagggcgccgggatcatgctcaacaagttactcagcgcgcagcagcccatgcctatgatcatggacgagccgcagtcgcagcccccgcagtcgtccgagcagccgaggctcgtagggtg

SEQ ID NO: 228379 - DNA, 575 bp, Glycine max
aatgcataatagagatcatttcataaataagtattcagcaagcaatttatggatacaaaaggcggctccgataaaatttaatgttattaagcaaacaaggggaaaaaagaaaaagagtagcagagtcggttttccacgagacgagaagagacacgcaactcgataagtatcacaaaagattacagaagaaaaggaacattctcttctcaactatatcctatttgttgctgttgctgaggtggttggtaaccaggataccccggataactgccatacatgttgggatcctgtccagcagcaggagcatacccataattttcataaccttgtgcagcatacccatagtatccaccaccagaaccagcaccaccattccactggtttggatctgcctgagcctgtttgtttgaaggactgcggccccatgaaagacgaacattttgaccacccaacagggtcccattcaacacccgaagtgcctcttcggcacagctcctgtctgcgaattggacaaacccacatcgcttgcctgctggaatcttcacatgcactaattctccatactggctgaaaac

SEQ ID NO: 228380 - DNA, 470 bp, Glycine max
caccatcttgaggctgaccataagaccactatcctttgcaggctcaagctcggagagagcgttactacaatttctaccattgggggcagttacaagacgacccttagcactggggcttatgctcactgattgggatgttggcggacaggacaagatgcgaccattgtggcggcactacttacagaacacttatggtcttatttttgttggggacagcatggatagggacagagttgatctacaactatggaaaagccgtggaagccttgaaggtggataactggaacacgccataatgcatgtgacagcatgcaaaccttagccttccaggctgcactatggctgtggatgaacccaccagagaagtacctaccattatgccacagatgtctctggtgcattctgagaaccctgagcaacatgtgcggtgggcctttacgaaggcctggactggctttccaacaacattg

SEQ ID NO: 228381 - DNA, 387 bp, Glycine max
gccgactatcgaggtcgttctccatgctgttaattccagccctgtcctttaaggcgtaccacttttacatatcgtgagtacaattactaccattgggttcaatgttgagactgtggtactgagtaacattggcttcactgtacggtatgacgcaggacacgacacgattgcatcctgggggaggcactacgtgcctaacgctcgagctctcattcatgatgtgcactgcgctgactggcccctattcagtgaggacacctgtcaggcccattgcatgttgaatgaggatgaactgcgagatgccgcattgcttgtgtttgccaccaaacaggatcttccttttgccatggatgctgctgagattactgacacgttgggcctccactc

SEQ ID NO: 228382 - DNA, 509 bp, Glycine max
gaacttcaataataatgacatgcaattaaatatgaccaacactaatggcagtacccaaaaacaataaagcagtcattttaagttaggccaacatctagcaagaaacaattcacgagctaaataaaagtaacataaaatcatgtctccttagaaagggtattctttgcagcctcagcagccgttttctttgcatcaatctcagacacaatggcatcaatttttagcttcagtgagtacagccaatacctagcaagaacaatgctcgcataacacaaaacagaaaattatgtctccttaggaggggctttcttagcagcctctgcagctgccttctccgcttcgatctcagcaacgatggcatcaatttcggcttcctccagttgacgcagaccctgctccttagtcatcaccggaacttctatggtcttccctccactctcaacaacttcaagcaatgcgcgaatagccaacttgacagtctcctggccagaagtgtccttatagttctt

SEQ ID NO: 228383 - DNA, 509 bp, Glycine max
tcaaaactgaccctgaatgcgttggttgttgcggtcctgtgcgcccttgatctaacccggagagcggcatcatcatcatcatcccctgacgcgccagggccctccggggactgctgcaacctggatctcaccatggccgattgctcgtccttcggcaccaacggcagcaccatcacaaagccagagggcacatgctgctctggtttgaagactgtaatcaaaaccgctccggcgtgtctctgcgaggctttcaagagcagcgctcaattcggcgtcgatttgaatgtgaccaaggcaaccactctccctgctgtctgcaaagacattgttacttatgccaccaactggggattgtctgagacgcctgctgctggttctgctggaggccattcttcacaagcttcttcatgtgcccacaagcaggagatgctgctactaatggtcccggagatgagggatgtccagcaccagctccagctcaagggaacacagcttcagcattatttcca

SEQ ID NO: 228384 - DNA, 525 bp, Glycine max
catcaacaagaattgtctcattcattctactttcaataagatcagtcacaacacatacaaatctttcatgattttagatgcacaaactgaccattatggacaaatttagatttgttcatgacacaaatctttcactatacagttaaaagcacaccactcggaatcatgtcattcgtaacactttattcaaatgtatgctgatatagatgcataccgtatatcctattataaaaagcaacaccactcgactatatagtagttaggtgacacattttccctcaaaaacttggaactgaggaacgtgatgctcagaactccctttctggaaacatgataggagctacgagagaccacaagtacagcagagcagttgcccaggaagtgatgattcgaacccacacagaaggccaccccacgttaaccaacttcccgctctctccaacagatgttgaccaaccagtcagaagcattgcagaatacatgcttgcaagagagaaaatcaagtggaagaaggcctatgaatat

SEQ ID NO: 228385 - DNA, 532 bp, Glycine max
tcaaaactgaccctgattgcgttggttgttgcggccctgtgcgccgttgatctaaccgagagagcgtgatcatcattatcatcccctcacgcgccagcgcccttcgtggactgctccaacctggatctcaccatggccgattgcttgtccttcgtcaccaacggcagcaccatcacaaagccagagggcacatgctgctctggtttgaagtctgttctcaaaaccgatccggcgtgtctctgcgaggctttcaagagcagcgctcaattcggcgtcgttttgaatgtcaccaaggcaaccactctccctgctgcctgcaaagtctctgctccttctgccaccaactgtggattgtctgagacgcctgctgctgctcctgctggaggcctctcttcacaagcttctccatctccccaacaagcagcagatgcttctactaatggtcctgtacatgaggtattctccagcaccagcaccagctccagggaacacagcattagcattattcccaatttcagctatctccttgttt

SEQ ID NO: 228386 - DNA, 455 bp, Glycine max
agattttatgcccaaggccctcctgctatcattacttcccagactgcatttgcttatcaacggcaacttggtcctgctatgaggccatgtgcagcttccgttccaaaattgttcgtgccaatgggtcaaccgggacaacatggacaatgaccttctgtaatgcgttcagttgcacaccataaggtctaaccgcccgattccaatgatgccaactcttatactacctaggtcgcaacgccattcttatggacctggtcaacctatgccacatgttttgatgcccggagttgctggacgtatattatctgttccatatgatgtgggtgggatgccactgctcaaagcatgaatttcccagcaaattcctgatgaggctttatcaacagctatgacaaatgcttctccagagcagaacaggaccatgctaactgagaaactctacgagcttgtggaac

SEQ ID NO: 228387 - DNA, 505 bp, Glycine max
  unsure (1)..(505): unsure at all n locations
tactacgtagtctantaatcattacgcggtcttatgcaccgcgtacgcttagctcgtcaagggctgagaatctagccattttatatagtattgtacatttctttgggtagtagacactgaaagggtcaaattgttgaagcactaaacagtagtgaagttcgttatctttgggtggctcgagccaatgcttcttttctgaaagaaaagtgtgggagataagggcatggtggttgccatggtgtgaccaattgaaggtgttgtcttcattcttccgttggtggattatggagccattgtggatggaattccactcttgaagctctctctgctggggtgccaatgctgacattccctcttttcttggatcaagttccaaatagcagccaaattgtggatgagtggaagaatgggtctaaggtagagacatcaaagttggacagtgaagttattgtggctgaagaaaagattgaacaactagttaagaggtttatggatcttcaaagcc

SEQ ID NO: 228388 - DNA, 546 bp, Glycine max
ctgcagtaaactccactctttagcattgataagttattacacaaaatgtgcagcaagcgtctcaaattgctgaatctaagaggacaaattcagctatcagaatcagagagcacttcagtttcagttacgagacagtctacaatggtatgtgcatccttacattcaacaacaatatgcaaccctttattaatacattgcttagttgtgttattgatcccaagctgcttaatgagtcaggggctttgaaatgtctctaataaaagcatcaaggttcccatatgaggagccccctgcggcaatcgctctgagacacataaccttgatttctcttgccctgtctctgatctcctttccctcttggctttgaagatccataaacctctaaactagagcttctatcttttgtgtggccacaataactgcactgtccaactgtgatgtctctaccttagacccattcttccactcatccacaatttggctgctatttggaacttgatccaagataagagggaatgtcagcattgggaccccaaccaagagagc

SEQ ID NO: 228389 - DNA, 372 bp, Glycine max
ggcctatgtcgactatctgtaatccttatgcacgcttacgcacgcttgcgcttgctctcaagcttgtacctgctaaggttttgacgtatatttatggcatttacattcctacatacctcagacagggtcaacgagggacaccctagacatgctttgtgaccaattctctgatgctggactggactcttgcccttgacttatctgacaacaatggctttgccttggagttcatgcacgaggactaatcttggtctatggtcgaggacttctattcatccaacgctgctgttgactactttaggatatttcgagacagcctcttgaacattacctttgtctcacacgttatgcaactgaaggcctacccctgca

SEQ ID NO: 228390 - DNA, 534 bp, Glycine max
aagaataattttgtatcacgtttaattgatcatgtaaaaaaattacatatgaggatagaagaaacaaaatagaatggagaggaggaagagaaagtgagaagcacacacgaattaagtaaaataaatgaaacaaattatagatatgataagggcaaagctcaaaaaactcccagcacacagcggtgaggaatgaatggccttaggcctcctcccacttgagtggcttgatcacttcccatgtgaagtcagggtcctctcttccaaagtgtccatatgcagcagtcttcaaaaacctgttatttccacccctcttgagatcaaggttgatggagatcataccaggcctgaaatcaaagttctccttcacaatgttaaggatctccttgtcagggatctttccagtgccataggtgtcaacaaacacagacaaaggctcaggcacaccaatggcataagacacttgcacaatgcaccttctggcaagtccacttgccacaatgctcttagcagcctgtctcacaatgtaagcaccac

SEQ ID NO: 228391 - DNA, 486 bp, Glycine max
tggagcttgctcgagcgtcgctactgaaaggatatattgcggggctttacttgttttattacctcagcgtgggccaacagggtgaccatggccatggccacgatcctgatcctgttcactgtcttcggggtttcatcggtcctaggcatgtggataatctggtacgattaacaacaacgccgtcacgtaagtcgttgacgaggtgctgatgagcatgtacgatcggcggttagtattgctcggctaggagtcatcgcgctgagagacaatgagatgaggttccagatctacaaggacggcctgcgattcatcgacggccacaactaccattaggaccgcacctacatgctaggactgaaccgggtatcggatctcaccaacgaggagtgcagggccatgtgctggggaaccaagatcgatcccaggctgaggctcggctagatcgcgagcaatcgacacgcgccacgtgtcggcgacatactacct

SEQ ID NO: 228392 - DNA, 386 bp, Glycine max
tcgagctcgagccagatcggctcgagcaaaccattagatggtatttttgaatcaagggcgagggccttgcatggcttcagattgatcttcctctgcacttacatgttgcggcatctgtactgccgagtttcatgcagaataatggtgccggtagtctggttccataacgggaaggaaattgacgttgaacaaggacagagcagcagatggaggactatcgctgggcactacagagtgcgcagtggctgagcccgacctacctgtatgggagccaagcgtgacacattctacatggctcgatggcactctacccgacgacttctgctatgacgatcttggtctaggatctgacctgtagagtctgagatggtatgaccacgcagagc

SEQ ID NO: 228393 - DNA, 509 bp, Glycine max
  unsure (1)..(509): unsure at all n locations
ctggagccgctcgagccgaatcggctcgagcaccctttctttaatttttttttctttagcttttggagtttggattctcttgaaccatggctaagaatacaggagagttgaggattcatgagagtgtggatgagcttaggactgatttggcagactatgttgctgagttatcagaggcatctgtgaaagagcgaggagtctttgccattgctttatctggtggttctctcattggcttaatgggaaaactctgtgaagctccttataacaagacagtggactggtccaagtggtatatcttctgggctgatgagcgtgttgtggcgaaaaaccatgccgatagcaattataagcttgctaaagatggccttttgtccaaggtgcctattatccccagtcatgtgcattctatntaacgattccgtgtcagcagaagaagctgccgatgatacgagtttgtcattcgacgttagtgaaacccgtgttgcagcgtgtctgaattagtgact

SEQ ID NO: 228394 - DNA, 529 bp, Glycine max
ttttttttttttttttttttttttttttttttttttttttttttttttttttttttttttttttttttttttgaaagccccaagttttattggccggttacaaaaactttacccccatttttccaaacatccccctaggaaaaacccccaaagggacaaagaacaaaaaaaaaaaaaaaaaacccaagctttttatccaaaacaaaaaaaataggccggattctaagggtgaccaacccttgggaaatcccctaaccccacatacaaaccaaacatggcctacttgttaaaattggaattttcaagttttggggcgccccgttttttcaaaaacccccccaatttccccaaaggtggggggaccattttcactggttttaaggggccctaaggcccaacatcgttttttgccaaagggccggattccgctttgattttccccgggacaactacggaaaaattgggggcaaaattgttgaccggccaggtgaagggaaatccttaaggggggggtttgggggagccccct

SEQ ID NO: 228395 - DNA, 563 bp, Glycine max
taagcatcagactcattaaatgttcaatgtactttgcagccagagaatcttcttctggactcaaatggtgttctgaaagttacagattttggattgagtacatatgcacaacaggaggatgaacttctccgaactgcttgtggaactccaaattatgttgctcctgaggtgcttaatgatagaggttatgttggttctacatctgatatctggtcatgtggagtcatcctctttgtgcttatggccgggtatttgccctttgatgagccaaatcatgcggcactgtacaaaaaaattggcagggcccaatttacatgtccatcatggttttctcctgaggcaaagaaactattgaagcttattcttgatccaaaccctctaacaaggataaaagttcctgaactcttagaagatgaatggttcaaaaaaggatacaaacaagcaacttttataatggaagaggatatcaatgtagatgatgttgctgctgctttcaatgattctaaggaaaatcttgtgacagagagaaaagagaaacccgtgtcaagaatgctttgagctca

SEQ ID NO: 228396 - DNA, 532 bp, Glycine max
aattaaggtcatgaaatattatgaataaaagttcaaggaaatatacactctaagttttgtacgatctaggttttgtttttaccctatctaacattagagcagacttttccaactcaacatgctccagttttagctaagcatgatatcttccatgaacaaaagaaaaagtgcctgatatctttcatgaacaaaaataagtgcacgatatcttccatgcatccacaccttgattcttcattgtttttcttcagaatgccacacaacgtcttgcaaccctgatgatgatgaaaagtttttgtagaacttgtgaaactctagtgtgtcacccccggtctttcgcagctccaccatgtgcaaggagggagccacttcaaaaacctctgtagcaactgaaaggtgacccttccttccactcttattaccttgcagcttcatcttataatttcgcttgtgaacattaaatcccagaggcttggcagcttcctcaattttgacatgatttcatttgcagggcgctgtgaggtaaaatgtg

SEQ ID NO: 228397 - DNA, 492 bp, Glycine max
atcgcaaaggccgagcataacaacacatgagccgcatctcaagcttttgtctttctctacttttcgtcttctttctgtggatcgctcactacctgtactgaagagatggcgaccagggtggtggcggaacttaagccgaagacgatgatggtgagcactctggggcccgcttcgcgctctgtcccaatgatcgagaagcttctgcgggcgggcatgaacgtgggtcgctataacttctcccatgggtcccacgagtaccaccaggaaacccttgacaacctccgggccgacatggagaacaccgttatcctttgcggcgacgtgctcgccaccaaggggcctgcgattcgaactgtgtttcttaaggacagtaagcctatccaactgaaacaaggtaatgaaataaccatttccactgactatgacctacagggtgatgagaagacgatttgtctgagctacaaaaagctgtctgtggatgtgaggcctggg

SEQ ID NO: 228398 - DNA, 592 bp, Glycine max
  unsure (1)..(592): unsure at all n locations
gaaaaaggcaaaaatgttctcagtcctaatccgcctcctcaaaaccacagaaatcatgaacaacatcaactcacagctcataacagccaagagtggcggcataaccatccttgcaccagatgattctgccttttccaacctcaaagcaggcttcctcaactccctaaacgaaggccagaaaatcgaattagtgcagttccacatattgccagagtttgtgtcgagctcaaacttcgattccctaagcaaccctgtgcagacagtggctggtaaagaccctgcaaggcttccgctgaatgtgaatgcattaggtaacagtgtcaacatttcaactgggggtagtcaatgccaccattctcggagtagtctactcggataacaagcttggcatttatcatgtggacaagggttcttcttcctctagatttctttctaaccaataaggctccagctntggctccaacaactcttgcaaaggctcctaaagctgccaagcaaaactcttctgaggatgatcaagaagaaacagaccaaaatcacaataaatccggggcagtgagtttggttagccttggtggagcaattgtgatgt

SEQ ID NO: 228399 - DNA, 535 bp, Glycine max
aaccattcaaggattctttcccttttcataacattaacacacaagaaaccacaaaagatgcaaaaatttaaacaaaaataaaaagcagaaaaaagaaaatttacgacaaagaaaactcaaaatgcagctgccatatggatcaactccacatggttgccactgtgaccaaagctatcccaatcgacatcaacattgctccaccaaggctaaccaaactcactggccggaattaatgggaatttgggccggatcttctttgaccatcctagaagaagtttggtttggcagctttaggagcctttgcaagagttgttggagccaaagctggagccttattggttagaaagaaatctagaggaagaagaaccttgtccacatgataaatgccaagcttgttatccgagtagactactccgagaatggtggcattgactaccccagtagaaatgttgacactgttacctaatgcattcacattcagcggaagccttgcaaggtctttaccagccactgtctgcacagggttgcttaggga

SEQ ID NO: 228400 - DNA, 478 bp, Glycine max
aaatattttatgcccaaggcccttctgctatcattacttcccagcctgcatttgggtatcaacaacaacttgctcctggtatgaggccatgtgcagcttccgtgccaaatttctttgtgccaatggttcaatagggacaacagtgacagtgtcctgttggaatgcgtacaggtgcagtccagcagtcctagcagcccgattcaatgatgccacagcagatgctacctagagggcgtgtatatcgttatcctcctgctcagggtatgccagatgtttctatgcccggagttgctggaggtatgttatctgttccatatgacgtgggtgggatgccactgcttgatgcatgaatcttccagcaaattcctgatgaggctttagcacagctctgactaatgcttctccagagcagcacaggacgatgctgggtgagaatctctaccgccttgtggaacagatagagcctgacaatgctggc

SEQ ID NO: 228401 - DNA, 482 bp, Glycine max
  unsure (1)..(482): unsure at all n locations
ttgcgctcgaggttcacaaacagaccaaatggtggtatgccaagcggtttctgcatcctgacattgtggcaccatatgactatatattcatatgggatgaagacctgggtgttgagcattttaatgcggaagagtacataaaactggtgaggaagcatggggttggagatttcacagcctggcttagagcctaataaagggttgacatggcaaatgacaaaaagaagaggtgatcaggaagttcacaaagtgacagaggaaaaaccaggatggtgttctgaccctcatttgcctccttgtgcagcgtttgttgagattatggctccagtgttctcaagagatgcatgngcgctgtgtgtggcatatgattcagaatgacttggtcacgggtggggtcttgattttgctcttaaagatgtgttgaggtgagtccattctacacctttgtcaagtaaaatccaatttggctgacccagtgacct

SEQ ID NO: 228402 - DNA, 472 bp, Glycine max
gcataaccacattataaccttatagcgaaatagttgatggcatatgcatgccttttacaaaaagaatcaacaacatattaacattacatctgaatgaaacaaggaatacaacacagggtctcctggtcctcaaccttacttccttttatcctatgattttgcatcaaaactatggcacttccttcctcttccctttgattttgcatcaaaatgatgagacttgagcttctttttccgaattgggggggcgggaccacttccctctctgaagggcatacccataagagccaacaatttgtgtgcttcttggtcggttttagctgttgttgcgatgcagatatccattccccgaggcttaccaacaacatcagctctgatctttgggaagacaccctggtccttaatgccaatgctgtagttcccatgcccatcaaagctgttggggttcacaccttggaaatcttttgtccta

SEQ ID NO: 228403 - DNA, 608 bp, Glycine max
  unsure (1)..(608): unsure at all n locations
tcactttcttccatacacataaccatgtcttctcagactgttgtcctcaaagttggtatgtcatgtcaagggtgtgctggagcagtgaacagggttttgggaaaaatggaaggtgttgagtcatttgacattgatctgaaggagcagaaggtgacagtgaaaggaaatgtggagccagatgaagttctgcaagccgtttccaaatctgggaagaagactgcattctgggtggatgaagcaccacaatctaaaaacaagcctttagaaagtgcacctgttgcctcagaaaacaagccttcagaagctgcaactgttgcctcagctgagcctgaaaacaagccttcagaagctgcaattgttgattcagctgagcctgaaaacaagccttcagatactgttgttgaaactgttgcttaaggatttgtggttctatttatctatgtggaagtaggtctgtttcatatagtattcatgtgncttgtgcatgtcagctattatatttggtgtgttggtactggtatctaagctacaataacttgtggcctattttcacatgagatacatttcatgggtgctataatttagaaaattgacctgtcactcttgtt

SEQ ID NO: 228404 - DNA, 508 bp, Glycine max
aacaagagtgacaggttcaaattctaaattatagcacccatgaaatgtatctcatgtgaaaaataggccacaagttattgtagcttatataccagtaacaacacaccaaatataatagctgacatgcacaaagcacatgaaatactatatgaaacagacctactttcacatagaaaaatagaaccacaaatgccttaagcaacagtttcaacaacagtatctgaaggcttgttttcaggctcagctgaatcaacaattgcagcttctgaaggcttgttttcaggctcagctgaggcaacagttgcagcttctgaaggcttgttttctgaggcaacaggtgcactttctaaaggcttgtttttagattgtggtgcttcatccacccagaatgcagtcttcttcccagatttggaaacggcttgcagaacttcatctggctccacatttcctttcactgtcaccttctgctccttcagatcaatgtcaaatgactcaacaccttccattt

SEQ ID NO: 228405 - DNA, 553 bp, Glycine max
  unsure (1)..(553): unsure at all n locations
aaagttgaagacttttttggtggggtgggtttgaatggggattgagaggaccttggctgatagaaaaggaagagacttttgtgaattgccgagagaaaccattgccagcagcaactcaaggaggaaccggcggcgacagaggaagaagccgccggttcagaagctcttcgagacttgcaaggttgtgtttgcctctgcggggacaggctttgtccctccccatgaggacattgacgagttgcaatctgttctagatggaataaagccagaagatgttggtttgagaccagatatgccgtatttcaggacaagtgccacacagagagtgccaagaatcacgtacctgcacatttatgagtgtgaaaagttctcgatggggatattttgtttgccaccttctggggtcatccctcttcacaatcaccctggaatgacggttttcagtaagctactttttggcactatgcacatcaagtcatatgattgggtcgttgactcgccttctgaatcttctacaactctcaaaccatcagaaaaccanggtcctgagatg

SEQ ID NO: 228406 - DNA, 501 bp, Glycine max
acgctggccatggaccaggtggaacagttgcagagtttttaacattaatgcatccaacgttctcaaccagaaagtaaaaaatgtacatcctcttgccctttttccccttattaaataacacaacttaaaaacaggggggcagtttggccacagacattgaccgtagttcatctcacagtcggcaacattaaaatggaaggaaggaataacctgatacattttcatacccaaaaaatggaaaattttgttgtttggcattgccaatagttcctaaattattaaatttagcaattacaaaaaaaaaagggattaaaatgagaacagggctgtgtgtgattaagacgctgcagattccttagcaattttctcggcctttgcaatgacctcctcaataccgccaaccatgtaaaacgactgctctggaaggtcatcgtatttttcatccaacacaccctgtaagctggcaacgttctccttcaacttaacatattttcctggggc

SEQ ID NO: 228407 - DNA, 498 bp, Glycine max
gagcattaagcaaatgaagatttataataactaccaacttctttctatgttgctcctaggcatcactagaaaactagtacattaatgtggatattagatatccctcctaaaatcagtgatttcagaggagtttaagtcttctactcttgttcataaaagtgcacatataagagggtattttcactattcaaatagaaacaaaatatgatcatgattcacttctattcaaggataaatatacccttagtgcaccttacacctaaaacaattttccttgccaatgagtgggttaggagttggtcattcctcaagcaggaacccaagaggaaacagcaaaaagaattcgccctttccatccttgcaaaacccacttgccattctcattaaccacaaaatctttatgatgttccttcttcaccattttctttactctattcacatgctctggggccaatggaagttgcttgaaccctgctctctggttcctaacttgccact

SEQ ID NO: 228408 - DNA, 550 bp, Glycine max
  unsure (1)..(550): unsure at all n locations
gtttgctgattatgttgcaagcatatttgttcctacagttgtggtgttggcattattgacactattgtgttggtatgtagctggggctcttggagcatacccagatgaatggctgccaaaaaatggaaatcactttgtttttgctcttatgttttcaatatctgttgtggtgattgcatgtccatgtgcacttggtttggcaacaccaactgctgtcatggtggcaacaggggttggggccaacaatggtgtgttaattaaaggaggagactccttggaaagggctcagatggtgaagtacgtcatatttgataaaacaggcactctaactcaggcaaaagccactgttactgttgctaaagtgtttggaggaatggaccgtggagattttcttacattggtggcttctgctgaggctagcagtgaacacccactggcaaaagcaatattgcaatacgctcgccattttcatttctttgatgagtcttctcctaccagtgatacaaagagtgcttctgaggactacaagtcanggtggctttatgatgtc

SEQ ID NO: 228409 - DNA, 501 bp, Glycine max
ggaagaactatgaaattacaagagcatttacaatgaatcggcagctacaattacaattgcaccccaatgggtgcagcggatataaaggaaaaatgcacaaaatttggaattacaagggtcaaatttatttgcaccctcaagttattctgtttcaattctcgttaaattacaactatttcaagtattgtagtaagtttgggttttctatatcttctcaaaagcaaagaagagcatacaacgcttacagacgacagagccatgcatgcaccagcaacccatggtggcagcttgatccccaaccaaggaaagaaaaccccggcagcaactggtatagcaacaacattgtaagccattgcaaatacataattcaatcgaatacggaaaaaggtctttttggaaagatcaatggcagtgatcacatctttcaagttatctttcatcagcacatagttagcagctcctattgcaacatctggtccagccccaattgccataccaaca

SEQ ID NO: 228410 - DNA, 432 bp, Glycine max
ctttcaaagaaaaaaggagagtgcttagtttgagagcaaaacatattattttcattttcatcggggtttgagtatcaacaaatggcaaccactgtgatgaccactctcccccaattcagtggtcttagaccccaattcttaagctgcccctgggaagaacttggttgctgtgcaacccatgagtcgcaaggggaagggcgcattgggagctcgatgtgactacattggctcatccactaatctgattatggtggcttctacaaccctgatgctgtttgctggaaggtttggattggctccatcagcaaacaggaaagccactgcatggctaaagcttgaggtgagggactcaggcttgcagactggtgaccctgctggcttcacccttgctgacaccttggcctgtggatctggtggccacatcattggggt

SEQ ID NO: 228411 - DNA, 426 bp, Glycine max
ttctttttttttttttgggaaaagggagaaactgaatattctgcttagtttgaaaaagactgcagagcgatgtgaaaatgaagtacataataacattgattacagatgcatcaagcactaaacttatatagtggctttatacagggcaccaatgtgcttgagaccaagaacaaccccaatcccaatgatgtggccaacagatccacaggccatggcgcaagttagggtgaagcctgcagggtcaccactctgggagcctgagtccttgaccttcagttttaaccctgcacaggctttcctgtttggtgatggagccaatccaaaccttccagcagacagtgttatggctgagggagccacgatgatcaaactagtggatgaaccaatgtcagcacatggtgctctcaatgcaccctttgccttgcg

SEQ ID NO: 228412 - DNA, 489 bp, Glycine max
agagactatatccatgcttgaatgtgtggtgctctatgaccgaatctttgacaagatcatgcaaaggtttaccaagaacacctagagggataacccttctccaaaggattggaattggcctcataatccacatagtgattatggcagttgcatctcttactgaaaggcatagacttagagtggccaaagaacatgggttagtagaaaatggagggcaagttcctttgagcattttcatcttgcttactcaatatgttcttatgggagcagctgatgcatttgtcgaggttgccaaaatcgagtttttttatgaccaagccccagaaagcatgaagagccttggcacttcctattcaatgacaaccttaggcattgagaatttcctaagcacttttcttctcacaactatttcacatgtgaccaagaaacatggccaccgaggatgggttttgaacaacttgaatgcttctcatcttgactactactatg

SEQ ID NO: 228413 - DNA, 462 bp, Glycine max
ttcgttttttttttttttttttttgtttttttttttgtattactttttttattacttttggtttctgtttttaagataaaacaatactcttcattttttagaaagccttataactataaaccataaaagcggttgcccagatgaaattacaccgcaggcgaatctcctattcacgtttagcttagttatcttcattgtcgcccagattattatgggccacatgggggaatcagccctggagggcaacaccaaggggagcagcatccataggtattatcttgtcaatttctacacccttggtgaactggttttcataggctgaaatgtgcactccaagtgctgctctaccggagggatcaaggttgatagaccaaacagcatccgactgaacagatatggctgggctacatgcaacacttgttcctccaggaacagcgagcctagctgagttctgagggaaga

SEQ ID NO: 228414 - DNA, 489 bp, Glycine max
  unsure (1)..(489): unsure at all n locations
tgtgactctatccatgcttgtatgtgtggtgctctatgaccgtttctttgtcaagatcatgcaaaggtttaccaagaaccctagagggataacccttctccaaaggattggaattggcctcataatccacatagtgattatggtagttgcatctcttactgaaaggtatagacttagagtggccaaagaacatgggttagtagaaaatggagggcaagttcctttgagcattttcatcttgcttcctcaatatgttcttatgggagcagctgatgcatttgtcgaggttgccaaaatcgagtttttttatgaccaagccccagaaagcatgaagagccttggcacttcctattcaatgacaaccttaggcattgngaatntcctaagcacttttcttctcacaactatttcacatgtcaccaagaaacatggccaccgaggactgggttctgaacaacttgaatgcttctcatcttgactactactatg

SEQ ID NO: 228415 - DNA, 552 bp, Glycine max
  unsure (1)..(552): unsure at all n locations
agctaattaactttacatttgcacaccactttctatattttgcaactcttggagctgaaacactcacgcacttcatcaaaactctcctcagttatccctccaacagaagataaaacatggttctagttgcaagtcatggcgaggaggaaaagggggcagaaggcattgctgctgttgattttcgaggtcaccctgtggacaagacaaaaactggaggatggctagcagcagggctcatcttaggtactgaactggcagaaagaatatgtgtaatgggcataagcatgaacttagtgacctacttggttggagttttgaatctcccttcagctgattctgccaccatagttaccaatgtcatgggaactctcaacctgcttggccttcttggtggcttcatagctgatgccaaacttggcagatacgtaactgttgccatatctgcaatcatagctgcttgggggggtgtttgttaactgtggctacaaccattcctagcatgaggcctnctgtgtgcagcagtgtcagaaaacaacaccatgaatgcattca

SEQ ID NO: 228416 - DNA, 556 bp, Glycine max
ggaaacaactcacactgtcgtttgccttttttatatctgtaaatacttaataatacattacaattgtcctcgttaaatgaggtcgacaaaacacccaaaaattaaccaaatttggagcacaatgttttgttcttacacactatatattgggccacacaaaatgagattttaagactatatcttatgcttcttcctttccatcaactccaactttcacatcatttgcactcacaagctctttttctgcatcgtcattaggctttatgttgtgctgaactttgtactgatgcctcattgctaatacaagaaaaagtatgaaattcagtagtcctagcactgcgagcaaccaatagaagtaatctaacctgcccttgttcagattgctccttagccatcttttcttacttgctttgtccacaattgccaccaataagctactgacaaaataacccattgatagtgtacataggaaaagtccagtgctcatagatttcattctctctggggccttcctaaagaataattctagttgtccatcataagccaatgctttccc

SEQ ID NO: 228417 - DNA, 545 bp, Glycine max
tgaatattgatgatgggcgtgttgtcagcaacttcattgctcaagcactgcggggggaaccattgacagtccaatgtccgggaacacaaactcgaagtttctgttatgtctctgacctggttgatggccttatccgtctcatggaaggatcaaacaccggaccaatcaaccttggaaacccaggtgaatttacaatgactgaacttgctgagacagttaaagagcttattaatccaggtgtggagatcaagatggtggagaacactcctgatgacccacgacaaagaaaaccagacatcacaaaagcaaaggaattgttgggctgggagccaaaggtcaagttgcgtgatggtcttcctcgtatggaagaggatttccgtctgaggcttggagttggcaaaaagaattaacttgtttttcgctcctttggtgacatgttaaagtagaataataagtgagatgggtctggcccgttttcaaaatttcgtcttatagttattgttacgattatgatactgagaaagatggggggcctgaaatttggc

SEQ ID NO: 228418 - DNA, 494 bp, Glycine max
aaaggaaagaatttcaattcaatcgtcttacaaacagcaaaatttgtagtgacatgctgcagtcttttgctaaacaaaacaacaaatatagcaatctgatagctgtagatgccaaatttcaggccccccaactttctcagtatcataatcgtaacaataactataatgacgaaaattttgaaaacgggccagacccatctcacttattattctactttaacatgtcaccaaaggagcgaaaaacaagttaattctttttgccaactccaagcctcagacggaaatcctcttccatacgaggaagaccatcacgcaacttgacctttggctcccagcccaacaattcctttgcttttgtgatgtctggttttctttgtcgtgggtcatcaggagtgttctccaccatcttgatctccacacctggattaataagctctttaactgtctcagcaagttcagtcattgtaaattcacctgggtttccaaggttgatt

SEQ ID NO: 228419 - DNA, 424 bp, Glycine max
cggctcgagcggctcgagcggctcgagcggctcgaggtcaacttcgtcttgccctactcttctcaattggccgcaaaagaggttgatatggtcattgtaccagcaacaactgggcagatgggtgttctcccaggacatgtagcaacaattgcagagttgaaacctggtgtcttatctgtacatgaagggaacgatgtgaccaagtactttgtcagcagtggctttgcattcatccatgcaaactctgttgctgatataatagctgttgaggctgtgccggtggaccgaattgatgcgaatctagtccagaagggtcttcaagatttcacccagaagctgaactcagccacaactgatttggagaaagctgaagctcagattggggttgatgtccatagtgctctgaactctgctcttacaggct

SEQ ID NO: 228420 - DNA, 460 bp, Glycine max
aatccaaaacaaaaatgaaacttttgtttctaatttcaaggtcttgcccaacatccttgagctagatggaagctgttgaaatattattttatcaagtcacttttcacatagaaattcatggtgaaaatgttcttttagcaactttgattacaccgagacaaatcaatgccacatagtggggggaaataaacaaatacagaaggaaagacttaacactacagtacttattattagcctgtaagagcagagttcagagcactatggacatcaaccccaatctgagcttcagctttctccaaatcagttgtggctgagttcagcttctgggtgaaatcttgaagacccttctggactagattcgcatcaattcggtccaccggcacagccttaacagctattatattagcaacagagtttgcatggatgaatgcaaagccactgctgacaaagtacttggtca

SEQ ID NO: 228421 - DNA, 362 bp, Glycine max
cactcttgtgttgttgccttcatggccaagccagtgtccattgaggtatggaacccaagtggcaaatacagagttgttagcaccaaaccaatgcctggaactcgttggatcaatcttctcgttcaaaatgatgttcgccttgaaatatgtaccgagaagaaaacgattctgtcagttgaagacatcattgctttgattggtgattaagtgtgatgggattaatggacaggtgactggagactggggagaacaggtgttctctactttgagcaaaggcggaggcaaagctttcagtaacatggctgttggttataacaacgtggatgttgatgctgcaaacaagtatgggtgtgctgttggaa

SEQ ID NO: 228422 - DNA, 381 bp, Glycine max
tgcggcccctggccatgaacaattcatagactgcgttgtcattcgcgactttgccgctactcacgggggtggccagagtggccaccatgtccgactttatctgccagagataaagccggaagacagcctagaactaccaactgtactccattacactgcggccggttatgcataagtgaaccgcactggttcatgtgctacctagtctactcccggttcgccctgaactcttgctccatcatggttcacatgtgcctgcgccttgcccgagcacaactcctccactgatatttgagaacatatgggacaccctgatatggcttcaaactgcggcccggtacggatcactctagccatggctcgagcaacactgtgactcta

SEQ ID NO: 228423 - DNA, 608 bp, Glycine max
  unsure (1)..(608): unsure at all n locations
cttcaatggctgattcaggctcagcctcttcttccagaatgtggtgctccatccccgaacgggttcagctgcatgcggccatgttggccctgcagtttggctatgctggctttcatgtggtctcaagagctgcccttaacatgggcatctaacaaacttgttctcccagtctaccgcatcattattgcttttctgctactacttccttttgcctacttcttgcaaaagaaggagagacctgccattactttaaacttgctcttacagttctctcttctggcacttgtcgggattacagcgaaccaaggttcttacttgcttggcttggacaacacatccccaacctttgcatcagcgattcagaactctgtcccagccattacatttctcatggcagtcatactcaggatagagcaagtgacgctgaacagaaaggatgggatagcgaaggtggcgggaacgatattctgcgtggctggggcgactgtgattacactatacacgggtccaacaatatatagcccaagtncacctatacagagtgagagctcagtagtagttgagtttgggacactctcatcactgggagatgcaaggggaagaactga

SEQ ID NO: 228424 - DNA, 599 bp, Glycine max
gtactatttgcacttgaaagggggattcctgctatatctgctgtgatgggcacaaagaggcttcccttccctgggaaagtatttgatgtagtccactgtgcacgatgtagagttccgtggcatatagaaggtggtaaacttcctttggaagctaaatagagtattgagacctggaggtttttttgtatggtctgctactccaatttatcagaagcttcctgaagatgttgaaatatggaaggccatgaagacactaacaaaagccatgtgctgggaagttgtgtcgatcagcaaggatcaagtaaatggagtacgtgtagctgtatacaagaagccaacttctaatgagtgttacgagcaacgttcaaagaatgagccaccgctgtgtccagactctgatgatcctaatgcagcatggaacattaaattgcaagcttgcatgcacaaagtgccagctagttcaaaggaacgaggctcaaaattgcctgagctgtggccagccagactgaccaaagtgccttattggttgctgaagttccagttggagtttatggaaagccagcccctgaagatttcactgctgattatgaacacttgaa

SEQ ID NO: 228425 - DNA, 412 bp, Glycine max
aaatatctaacttcccaagggcctcctgctattatgtctttcaagactgtatttgggtatcaacgacagcttgctcctggattgaggccatgtgcagcttcagtgccaaatttgtttgcgccaatggctcagtagggacaatcaggacagtgtcctgctggaatgcgtacaggtgcagaccaacagtgctagcagctggatccaatgatgccacagcagatgctacctagagggcgagtatatagttatactcctgctcagggtacgccagatgcgtctatgcccagagttgctggaggtatgttatctgttccatatgatgtgggtgggatgccactgcttgctgcatgaatgtcacagcaaatttctgatgaggcattagcaacagctctggctaatgcttctcagagca

SEQ ID NO: 228426 - DNA, 479 bp, Glycine max
aataatccctagttgcattgcaatatgtaaataaatgtaaatccaatgattttcatttcataaaaaactaaatattcctaaaacaaacaatgatttgtttgtaaagtagagacaagaacaataatctagttctgcctataagcaatgtaattggctaaagcaatcaaaggagcagccttaacagggtcaaagccagcaagctgatcctgagcatccttgttcagtttcgcagcaaactccttagacttctcaatccccaaaagcttggggtaagtaaccttatcagccacaaggtcttttccagcggtctttcccaattcctgggaagacttagtaacatcgagaatgtcatcaacaacctgaaagagtagaccaatgtagcgagcgaattttctcaatttttcgacctcgtcgtcggtgccgccgccgaggatggcgccgaggacaaccgcaccctctaggagcgcggcggtcttgtg

SEQ ID NO: 228427 - DNA, 545 bp, Glycine max
  unsure (1)..(545): unsure at all n locations
caacattgtctcccctggagctgatcaaaccatttacttcccccccaccgaaactagccgtaggttgacctccttccaccccgaaatcgaagaacttctttacagctctgtggagaatgaagaacacatatgcgtgctgaaggaccgcagcaagccgattatcttcaccatggcaaggttggaccgtgtgaagaacatcacaggactcgtggagtggtacggtaagaacgcgaagctgagggagttggtgaaccttgtggttgttgccggagacaggaggaaggagtcgaaggacttggaagagaaggccgagatgaagaagatgtacggcctgatcgagacctacaagttgaacgggcaattcagatggatttcatctcagatgaaccgtgtgaggaacggagagctgtaccgtgtgatctgcgacaccaagggagctttcgtgcagccggctatatacgaggctcttggcttgacagtggttgatgccatgactngtgggtngccaacattcgccacatgcaatggtggttctgctgagatca

SEQ ID NO: 228428 - DNA, 579 bp, Glycine max
gaagaaggcacggcttaaaattgaattgatgggtaaaacaccccaattcgaagcttttccaatcaagattcaaatcatgcaaaagaaaaaaagtaaaaggcttttttttttttccttttttttctctctctggctcttatcgaaagcttaatcacaaaattaaaatcatcagggacatattatttatagaactcaagtaagacaaactccaaatgagaaacaaaaagccggttcctccatttctttatccaactcttcatcctcagtttactcaacagcaaggggcacagactcggccaatttgcggtacttgagagcatagaacatctcgagatagcggcggctctcacggcggtcaaggttagacacatgcttccagaagccatagacaccagtgagagtgagaagcctctgtgagtaaatttgccatgtgtacttctcttcaatacgctggagaccagcctttgagattgtttcccagtgggttgggtcaagcttgcacttctcaaagaagtcaacagggagatcagcagcacggtcaccatgggtagggtcaatgtggaagccagacttgccatg

SEQ ID NO: 228429 - DNA, 556 bp, Glycine max
ctcgagccgttttcttgttcctttgttggtgggtttcctttccgcttcaggttcagcttcaacttcaaattctcagtgaaaccaattcagctgagtccaaatcccaaatccgaatcaaaatccgaagtgagatttgcgatggagaggcttcagcgaatgtttgcaggtgcaggtggagcgctagggcaccctcccccagattccccaactctcgattcctccgagcaggtctacatctcctcactcgctctcctcaagatgcttaagcacggaagggctggggttcccatggaggtgatgggtttgatgcttggagaattcgtggacgagtacaccgttcgtgtggttgatgtcttcgcaatgccgcagagtggcactggtgttagtgttgaggctgttgatcacgtttttcagactaatatgcttgacatgctcaaacaaactggaagaccagaaatggttgttggttggtaccattcccatcctggatttggctgttggctctctggtgttgacatcaatacacagcagagttttgaggctttgaatcaacgtg

SEQ ID NO: 228430 - DNA, 502 bp, Glycine max
gtagaagagaaaatccagaaataacattaaaagatatccagtaatactgagggagacaccacacaaactatgtgctgagatttactttcttgaccttttcaaccccgtccaaataatatatgtctagtgtcttcaaatatagtttgagaagaataaggaaacagtgattgtaataactcaaattgtctccttagcacagctacagaaaccagaaggtccaaaataatgactctagaagacaacagtatcaagcatcattccgagagtttgaacgatgttggaagacatcaaatttgagatatgctcttcgagatgtttctttgcatcttgtcttcccacatttgctattgcaagcttctctggaggcagctcatcttcctcttgaacagccttgttatatttgacagctaagttcagcatttcctgtacagtctggtcattagttttggaatgtgtatcaaaatgccgaagtgtcaaaccattagtccattttttcttgtga

SEQ ID NO: 228431 - DNA, 484 bp, Glycine max
  unsure (1)..(484): unsure at all n locations
tttttcttaagcttgagatcaggaattaatttcagaggttcagagaatggcaacggattcttctaatggtaatggacatcaccaaacaacaacaaagcaacctcctttgccgtctcccctgcgcttttccaaattttttcagtccaacatgagaatcttggttactggaggagctggattcattgggtctcacttagttgacagattgatggaaaatgaaaaaaatgaggtaattgttgctgacaactacttcactggatccaaggacaacctcaaaaaatggataggtcatccaagatttgagcttatccgtcatgatgtcacggagcctttattgatgcgaggttgatcagatctaccatcttgcatgccctgcctctcctattttctacaaatacaatccagttaagacaataaagacaaatgtgattggcacactgaacatgcttgggcttgcaaggcgagtangagcaagggattttgc

SEQ ID NO: 228432 - DNA, 572 bp, Glycine max
ctatccaacttaccttttctctaaaggcaagtatagatatatgaaacgatggctgccgtggcaaccacaaccctctcttcaaacccgaaactctcattttttcacggaaagcccgtacatattcttaccgcgtcgcacccaccaccaagtcattctcatccacacaaggcacaatctccatgtccctaacccaacccccatacgacctccaatccttcaaattccaacccatcaaagaatccatcgtttcacgcgaaatgacgcgccgctacatgaccgacatgataacctacgccgacaccgacgtcctaatcgtcggagccggctcgggggggctctgctgtgcgtacgagatcagcaagaaccccggcgtgagcgtctccattaatgcagcagaccgagagccccggcggcggagcgtggatcggactacaactcttgtccgccatggagaatccaaggccgatgcacctctttctggacgagctcggcgtggcgtacgacgagcaagaggactacgttgtgataaagcacgcggctttgttcacgtccaccatcatgagcaggctttt

SEQ ID NO: 228433 - DNA, 443 bp, Glycine max
atcaccttcaacagaattaccaatttactagtctgaggtgttgtgcaatactggcattaaagaagctgccttttgttttcttacatgggattgaggagttacctcgttcaaagaacaatggttggcagtaggtatactacagacgcagcctagacatttgtaattttctgcattttcacgctttacgcggatgactctagcaaaatacgtgatttacaatccacctagtacaacaagctaacattctgactcatcataacaagcacttgatatacaccgaagaaagaaacaagctcccttattattaaattaaaaagctgacaaattggggggtcaactgatgaattagatccattcctcgtggttgacgcatgcgtccacaagtttccattcttcgcttcctttttccgggttatgaaccgtttttccaaccgagcagttca

SEQ ID NO: 228434 - DNA, 507 bp, Glycine max
atgatttggcgccttggatccagattccacgagattgggtccagtattttactccaatactctctattcgtcctcctccttctgttgatccggcacatgttgttgctaagatgaatgaagggttgaattcgggaaaagttgagaatggggccaaattgaaggtttatttgaaggaggatttgcctgagaggcttcattactcggacagtgatcggattccgcccataattggtttggcggatgagggttttaaggttgagcagaacagaactggtaagaaggaatgtggcggtgcacatggctatgacaacgcctttttctcaatgaggactatatttattggacatggtcctacgtttgcaagagggaagaagataccctcctttgagaatgttcagatttataatttggttacttccattcttgacatcaagggtgcgcctaataatggctctgactcgttgcggattctgttctttgcctactgcatgaataataaaggagatg

SEQ ID NO: 228435 - DNA, 541 bp, Glycine max
catctcaacaattcgcgtaataaaagtttgcattaaaagatcatcaaggattactgaaataaaactcctgttttaataataaaaaataaaattcaccaaaaaactcctacataacaacaactactacatctccttttattattcatgcaggaggcagaataacagaatccggaaactagtcaaagccattattaggcgcacccttgatgtcaagaatggaagtaaccaaattataaatctgaacattctcaaaggagggtatcttcttcccttttgcaaacctaggaccatgtccaataaatatagtcctcattgagaaaaaggcgttgtcataaccatgtgcaccgccacattcctttttaccagttctgttctgctcaaccttaaaaccctcatccgccaaaccaattttgggcggaatccgatcactgtccgagtaatgataccttttaggcaaatccttcctttaaataacccttaattttggccccaatttaaacttttcccgaattaaacccttcattcatcttagcaacaacat

SEQ ID NO: 228436 - DNA, 404 bp, Glycine max
acttcgataactttatattattttacatgcatgcatagcatagatagcctgctctcaaattagtcagcaggaacaaagatagagagatccaacgatctttaaatttcacatttgccataaatatataacagaaaagagggtatgggatatgagttaagttttgatctcattcaactacagtatcccaaaccattactcttaagactttgaacttcacttgtactccaggatcatgatgttctcaggagctaatccaacacaagcccttaggatgttatccagcatagctcgctgctttgacagtgcattaaccactggcgtactcggtggaaccagaggggccttggtcaggctactgaagatggttgccactggtgtgaatgagtgggaccttccctcatttt

SEQ ID NO: 228437 - DNA, 569 bp, Glycine max
  unsure (1)..(569): unsure at all n locations
ctttctcttcacactctggctttcattcatttgcattgcgagaaaacgaaaaactctgaaaacggcaacaaactcacacacactcacaagagagtaacaaccaaacaaacaacaaatctctcatcatggcagttgaggctccttcgcacatcatgaatctcttacactcgcagttactaaccggcagagaaatgatgaaaccgaatcctggctgctacaccgcacagcatacggaagctgctgctgctgctgctacgcctattcttcagtcaacggcgttaccttctctacaccaatccgatagtggcctcacctgtcacgtcaccaccaccgctacgacgagaaaacgctccagagactgcatcaccactgtaccaaacgcgctgttaccacttccggagaagaacatactatggtcatcatcatcatgatcacgaccaccgttcattctcgatcatgagcttgtcttncatttccagaaccagcattccgagatcgaccgcttcattgtacaacacactgagaaagtgagaatggagatggctgagcagccagtgaggcaatcgaga

SEQ ID NO: 228438 - DNA, 418 bp, Glycine max
atcaacaaaagaattctacattctactatttctttgtcctccttacactggccttcggacaaaaaagaaagtaaactgtgactatttttttccggtggtgtaaaatggagtagtagtatatggaaaacgttaagaaaagaaaagaagaagaagaaaaaaactcctcctaagagtaattaacatgaacactggccttaatgccagattgacaaagagggcaattgtgtacggtggacccacacattgtgcacaaacacagatgcctacatggcaacaacagcactatcgattctcttaccccacactgattgcacatcctcttccccaaaacgccgtggtttcgctcgtatccgtcgcaaaccttctcctcctctcggtgggggtggttgttgttgttgttgcttgctcaactcgattc

SEQ ID NO: 228439 - DNA, 600 bp, Glycine max
  unsure (1)..(600): unsure at all n locations
aattattcctatctgatcgtagacgagagcacgaaggaagccgcggcggtggacccggtcgaaccggagaaggttcttgaagttgccagctcgcacggcctcactctcaaattcgtcctcaccacccaccatcactgggatcatgctggtggaaacgacaagataaagcagctggtgccaggaatcaaagtctatggtggttccattgaaaacgtcaagggttgcactgacaaagttgaaaacggtgataaggtctctcttggagctgaaatcactatattggcccttcacactccttgccacacacaaggtcatataagttactatgttactggcaaagaggatgagcaaccggctgtttttactggagatacattgtctattgctagctgtgggaaattttttgaaggaactgcagaacagatgtatcagtcacttaatgtaacactcgcttcattaccaaagtcaactcgagtatactgtggccatgagtactcactgaacaacttgcaatttgctctgacacttgagccagacaatttgaggattcaacannaataacctgagctcggaatcacgacaagctggccaagcacattt

SEQ ID NO: 228440 - DNA, 427 bp, Glycine max
tcaagtggcgagcaccgcacacgggctctccacgcgacagaacacgacgacctctgagcgaccgccgttgatgtggacaccctaaccgcaagtcactacgatcatgtagctcgcagaggtcgccttcatcatctgagcagcaggaccaggatgccatgcttgatctgaaggcgaagctggatcggctcgacaaggacgagaaccacgtgcttgccccgcggatgcggcgacgtcaaggtggtgaccgtcgagatgacggggctgctgctcctgacaccggtccctcacagggagaacgtagctgtgcagatgctgtcgacacggcagtgcacggagactgtggcgctgtacatacggaacccgatggcgacgtccagcgtgctatactgccacggcagcacagctgatctaggccagatgtacgagc

SEQ ID NO: 228441 - DNA, 429 bp, Glycine max
aactgtcaaaagaagtgcaggtcccaaatggcaataatctttctttcaagctccgcaattgttcttccaagggtagctttctgtctcacattatttaaccttgcaagttccggatcattgatcggcgtgtactactgtcaagggcgctgacaaccctgccgtcggcgacggcgacggagatgctgctccagtcgacggccatcggaaaggtgcgttcgcacggtaccgacccggccataagaaaagctctggctaacacggggatcggtatcgggaccggtgcggcgaactgggacattgcggggctagcctcggaccctaacgttgcgacaacgttggtgaacaccaacgtcgtaccgtactaccctgccagcgacatcatgctcataaccgtaggccacgaagtgatgacctcgaacgaccaatacc

SEQ ID NO: 228442 - DNA, 513 bp, Glycine max
atataacggattagaatgactaatcacatttcactaaaaaaaaaaggatctttataatgtgatatgcccctacctctttctctatatattacttaaataatgggccccaagatttcaaacgatgattgaacaacacacatacctaaaccacgcttcacagatcacacataaacaaagcatcaatttgcttctgataaagactaaaaaaggtgagactacaaatagaggaagaagatcctcctccatacatgaacactccaagaaccagaacatttcttagcaattaagagagaataattaaaacaacaaaaagtgccctcctttatctacttgttttctgggttaggcatttcctccagcataaagacaactcttgtaacttggattattcgttgacaacatggctgtttgcgagaaatcacaagtcaatggattccgtccagctgtttgatacaatagattcatggcatatgcagcatggtttaccaaagtgttaggttcaaaacaagcccc

SEQ ID NO: 228443 - DNA, 483 bp, Glycine max
tctctcgctcgcaaacgcaaataataaaaaacaaggttttagccatggcatcgaagcggatcttgaaggaactcaaggatctccaaaaggatcctcctacctcatgcagcgccggtcctgttgctgaagacatgtttcactggcaagcaacaattatgggtcctccagacagtccttatgctggaggtgttttcctagtcactattcatttccctccagattatccctttaagccacccaaggttgcattcaggacgaaggtatttcacccaaatataaatagcaatggaagcatttgccttgacatattgaaggagcagtggagccctgcgctaactatttaaaggtgttgctctcaatttgttccctgttgacggaccctaatcctgacgatcctttggtccctgaaattgcccacatgtacaagacagacaggaacaagtacgagtcaactgccagaagctggacccagaaatatgccat

SEQ ID NO: 228444 - DNA, 553 bp, Glycine max
attaacatgaaatggcacttaatagaacggttaaaaacttgagcataacatttaattggggcaacatttcactgttctaaattaccatgaacatttgcaatacaaacagcaggagaaacgttttcccccattcatcttcaactggaggggccttaatcatgatttaaaacgacaaatattcctacaagggctgagagacctaaacactgagagtagaaaggctctccctcaaacataccacaaggtcacttaacccatggcatatttctgggtccagcttctggcagttgactcgtacttgttcctgtctgtcttgtacatgtgggcaatttcagggaccaaaggatcgtcaggattagggtccgtcaacagggaacaaattgagagcaacacctttgaaatagttagcgcagggctccactgctccttcaatatgtcaaggcaaatgcttccattgctatttatatttgggtgaaataccttcgtcctgaatgcaaccttgggtggcttaaagggataatctggagggaaatgaatagtgactaggaaaaca

SEQ ID NO: 228445 - DNA, 509 bp, Glycine max
agctattggatgcccagagcccaactgctatcattacttgccagtctgtattgctttatcaacggctacttgttgctgaaatgaagccacttgcagcttcaaaagccaaatttgttggtgccaatgggtgaatagggacaactgtgacattgtccttgttcatgcgtacagttgcagtacagcagtgccatcagccatttccaatgatgccacagctgatgctacctagagggcgtgtatatcgttatcctcctggtaagggtatgccagatgttgctatgcccggaattgctggaggtatgttatctgttccatatgatgtgggtggcatgccactgctcgaagcatcaatttaggagcatattcctgatgaggctttagcaacagctctggctaatgcttctccagagcagcacaggaccatgctggccgacaatctctactccgtagtggaacagttagaacctgacaatgctgaccaagtgacatgcgtgcttctagagatggac

SEQ ID NO: 228446 - DNA, 576 bp, Glycine max
gacatgaccatattcaaatttacattgcaaccaaggaatgtatatataataaaaataacaaaatcgcccataacgtacatatacaccagatacaaatttttcaagacgtatgatattgcaaatgacttaaacttctacacaagaacgaacaaaatgctataatgaattcccacactgccacacagttcaaagttattgcataccaataatttcaagaacccttattaacttacactttcaaagggattggcacaacaatattatatgctaataaatataataatcttaagatgatgaagcaggtttggaagatgggttgaaaggaacctgctcagcgcatgtaaggatgtcatggggcccagcctgttctcgaccaacaccaagaaggtcaagataatacaggtaatgggaaacaatattgttcattgagtccacatcaccttgtccacaaacaccatccccatagagaatgttcattgtagtgccaaatccaggaacccgattctccatagtgtcattcttggtaggcttccagctgccgacaaaagcatcatgagcagagggctgtgacttttt

SEQ ID NO: 228447 - DNA, 515 bp, Glycine max
aaatgcttgccggtgcatcattgatggatgaggctaatagaagtactgtggtatacatcagtttctcaccatttttttttgttgtcagcttgtcgctgttattgttgttgttgttgtatctaaatatttctttcagagttgtgcactagtaattgaaggattttcatgtatgataatgcatgagttgtaccatacttagagcttcttcatacttcatgatttgccaatgccataccttaagtactatcgacgcttcatgtgacaaatacatttaaggaataaccctgcagctctgctggctttatgttggtattgggctacagatggtgtaggatccaaggatatggttattcttccgtacaaggacagcctgttattattcagtagatacttgcagcagctggtcatggaatctctaggaaggagtttgacttggatggtaatcgggttaatcaaggaattagtgtctatggaaacaaaggaagcacagatcaacatgcctatattcaacaatt

SEQ ID NO: 228448 - DNA, 578 bp, Glycine max
aggcagcgcaaggaacaatttattaattatatttacccactgggttctccatttggttacatgtagttccaattcagaacaccaaaccactttcaagtatttgccttaaaacagaatttccactttcgttaatgaaggaaattcaacattgaaaccaaattattgcagacagcttctcttcttttgctccgtggattcaaacacaattgtaacattatcaaacatgaattccattagtgtaactcaagcatacaattcatcgatgttacattccccaagaaaaaccttgatgctgcgcggtgaaccacagctgccttcggcaattagtgctttgccattggcagccatgtgtgcaataatcttataaatcatttcaatatcttcaggagcatggcaacggtcagctatttcttcgagggtcaatggctcaacaggttctttgcagcttgcctcatttagcactgccaacactcgcttctgaagtgcttagtacttaccctgctgctttcttacccagctttcacacccgggttgatgattaagccattatgttgaccaaggaggcataaattcctact

SEQ ID NO: 228449 - DNA, 455 bp, Glycine max
ggaatcacaagagttcaattattttactcaattccgaatatcatgtcagtattactacatcttagactcagactatgtgagcctgcaattactataaaattattagggaaaagaaatccaagaaaactaaactaccagtgtttacaatcgtagtaaatcaaagtaaagaaacattcatgaaaccgttagttttcaccacaacttatcgatgccacttctatttacgatgagcctccacatctggtactagcttcaccgccttactttttctctggtgatatttagcatatgaataccacacaccaccagctgtattgataaccaatccactcacattcaaagcatggacttgaacaccacccagtaagaagaaacccaaggtctgaagaaacaacaagcaacagatttaatgcttgcagttaaaactagatatatatgaaccataaggggcatgc

SEQ ID NO: 228450 - DNA, 462 bp, Glycine max
aaatcgaccgtgcctgtgaaaacagtttatgcatttgagaggattctgactcacaactggaaaggcatcaatttcacaattcctgaaacccctgctactgttgctgttgccatcacattcgatactcagtttgatcaaacggagttagggttttgattctcttcaacctttcgcacaatttaggatgtatgctgatcgggtggatggtggaactcggagatcactgaaggaacaccttgatgggaattttagcactggttctaatcgccaacacagaatcaccggatagaggggcacggaagatgacctgtgggaacaccatctctatgctgaggaaggcccccggcgctgttgtctcccaggtgttgcactcaatcttgacagactcgtgaattggaccaaagttcctgaatgccagcgtcggttttggtggatcatgctttcagaaagacatattgaact

SEQ ID NO: 228451 - DNA, 360 bp, Glycine max
aggggaataatataggtcctaatttttattgaagggagctcatcatatttttttatggttcttataacaaacttcaatcacttttatgatacgacccacatgataccgatattttaaaaaggaaaggaatgattccaaggggaagggtttcaaatgatatccattacaccgtaatcccctaaacgacatgggaaagagaaaaaaaaaggcaaaaactactcccaaagaaaccacccattcagagccaccggcccatagattaaagcctagggttaacgtctcttttctaagaaagttgcccccagtcggtgacaaccacaggcttggcggtccttccggagctggatcccacctttttta

SEQ ID NO: 228452 - DNA, 592 bp, Glycine max
agaagagtccgatccacttacggcaatgcagttatatgctcgcatgcacacgctcggaagctggctatagggctctcgatatattttattagctaatctttaactctaaaagtgaaaccttccttattagatcacatggggcgttcacatatcatagcaatggcagcacgttcctacagccccatcatggttgtcctgtctttgcttctttcggtaacatgctctaatgtagctgaggcttatacacgcagtggaacacttcgtccttcagattggaaaccaaagtgtacttaccgttgctctgcaacttcacacaagaagccatgcatgttgttctgccaaaagtgtggggctaaatgcctatgcggtcctgctggtacatatggcaacaagcaaatttgaccttgctacaacagctggaagaccaaagaaggaagacccaaatgcccgtaaaccccttaattgcctaatatataggtaatttaataagcaatgtaatccgatatgactcttcatgagccatattctatctctacatagataagcaatgctgctttaattgtttagttgatcgcacctggggacacattta

SEQ ID NO: 228453 - DNA, 409 bp, Glycine max
caacacaaaccgaacttattttcaagggacattattacagacccattaaacatcaaagttcttcaaatgttttgggaacacattcaacatttcacatctagcttaaaaccccccacggagacggaggacaaggtgaagggctgattccttctggatgttgtactcagcgagggtccttccatcctttagctgcttgccagcaaaaatcagcctctgctggcccggtgggatgccttccttgtcctgaatcttggccttcacattgtcaatggtgtcagagctctccacctctagggtaatagtcttacccgtaagagtcttcacgaaaatctgcataccaccacgaagacgcaacaccaagtggagagttgacttcttctggatgttgcactcagcaagggtgcttccg

SEQ ID NO: 228454 - DNA, 488 bp, Glycine max
aaaatagtagagtatctgtattctgagacaaacataaacaactgtaagtaaaactaaccgcaagaatacaatttgcactaagcacctagagtgcatttaagtatctaagcacttgctcattgaactcaaagctcactgaattccaagctgaaattgaaactaagcacttgcatgacatgtcgtctgcaattctctttacaacatgctcctaaaacaagaacattagttctagatgttactcattttgaaagcttatgatcagcagcatgacacaaagactactgagaaagattttaaccaagacatgtgaactcttacattcatggaagcttaaaatttcagcttcagggcttgtgaagtttgaagccaaaaactctcgggacatagctctgtgaaggtttctggggctttagttgtccataagtcatcaagaacagatgaggaaatgtagttccaaaataagccccatcaatggtgccttgatactt

SEQ ID NO: 228455 - DNA, 557 bp, Glycine max
agaaagatgctatatatttattctttgaaatagcaaatgtcaagaacaacctaggatttcaaagggagaaatcctagattacaacttataagcatcattttgaaacaaaatcctaattaacagcgatatagctcaatgacaaacaaaacaagtagtccacaccacacacaattttccccagagattctgagtctcacatacatgaatctattttgaagcagtgaggctttcatagaagcctttaacaaacacataattcttagaaatactaagtctcacaccacatcatcaaatctattttgaaccaaaaaggctttcatagagacccttgaaaaaggagaaaacaggatctctagggggcagactttctttgacaattggatggttcaaaaattcttggctccaattgtggagcttaggaaatttctcacttgtgaataactccaaccctgcaatttcttgaaccatagggacccaaaatgctatgtagacagcagcaatatctaccaacccaatctcctcttctccaaagaacttcttgtcctttatctcattct

SEQ ID NO: 228456 - DNA, 436 bp, Glycine max
atggtggtgtgttgtgattttgttgttcataataacattgattacagatgcatgaagcgctaaacttatatagttgctttttacaagggcaccaatggtcttgagaccaagaacaaccccaaccccaatgatgtggccaacagatccacaggccaaggtgtgagcaagggtgaagccagcagggtcaccagtctgcaagcctgaggccctcacatacagctttagccctgcagtggctttcctgtttgctgatggagccaatccaaaccttccagcaaacagcatcagggttgtagaagccaccataatcagatgaggggaggaaccaaggtagtcacatcgagctcccaatgcacccttccccttgcgactcatgggttgcacaggaaccaagaacttcacaggggcaactgagaaatggggtctaagaccactg

SEQ ID NO: 228457 - DNA, 541 bp, Glycine max
gaactgataaaggaaacacttttattaagacttcaaatcacagcattcaagataatacaatacgcaacactttttagaaagccttataactataaactataaaagctttgcccagatgaaattacactgcgggcaaatttttcattcacctttagcttagttatcttcattgtcgcccaaattattctttgtcacatctttgtattagccctggatggcaacaccaaggggagcagcatccataggtattatcttctcaatttctacacccttgttgttctggttttcataggctgaaatgtgcactccaagtgctgctctaccagagggatcaaggttgttagaccaagcagcatcccactcaacagctttggctgtgctacatgcaacacttgctcctccaggaacagtgagcctagctgagttctgagggaagaacctctcaaagatcattctgtagtaatatgcttccttggtttttggggtgttgtgggggtaaatggtaccagcattaagcattattttttcagtcacatgtttt

SEQ ID NO: 228458 - DNA, 579 bp, Glycine max
tttgtttttttttttttggaatcacaagagctcaattattttactcaattccgaatatcatggcagtattactacatcttagactcagactatgtgagcctgcaattactataaaagcatcaggtaaagagaaccaggataactaaactaccagcgtttacaatcgtaggaaatcaaagtagagaaacatccatgaaaccgtgagttttcaccacaacttatcgatgccacttttatttacgatgagcctacacatctgggactagcttcaccggcttactttttctctggtgatatttagcatatgaataccacacaccaccagctgtattgataaccaatccactcacattcaaagcatggacttgaacaccacccagtaagaagaaaccaaaggtctgaagaaacaacaagcaacagatttaatgcttgcaggtaaaactagatttaaatgaacataaagggcatgcaagtcaaaataattactaactagtaagtactaagacaagatgcatagatatgtatgactatgaataattccgggcaggacaacaatgtcaaatccagtttttatgctct

SEQ ID NO: 228459 - DNA, 477 bp, Glycine max
  unsure (1)..(477): unsure at all n locations
aaaaggcgtcttcataaacgccgcccaaaacttctcatacccttttattcattccattcgtttctagggttttcttttctttgccgagaaaatgagagagtgcatttcgatccacattggccaggccggtatccaggttggaaacgcctgcttgggaactctatcgccttgaacacggcattcagcccgatggacagatgccgagtgacaagaccgttggcggaggagacgacgccttcaacacatttttcagcgagaccggcgccggaaagcacgtgccccgcgccgtcttcgtggatcttgaacccaccgtgatcgacgaagtccgaaccgatgcgtaccggcagctcttccacccggagcagctgatcagcggtaaggaagacgccgtcaacaacttngcgcgtggccactacaccatcgggacgaagatcgacgatctttgcctctacaggatcccgaagctcgtcgacaact

SEQ ID NO: 228460 - DNA, 535 bp, Glycine max
atagaaacttctgtgctatacatagcacatatatgggataacaatcatcattcaaaaaccacacatgtccgacagaagacgaaaaagtagacatcaaacacacgatatttcagacactctagatgatcatcatgtgcttcaccatcatcatctacatcaccagactcgggaccaacctgctcataatccttctcaagagcagcaaggtcctcacgagcctatgagaactcaccctctgccataccttcacccacataccagagcacgaaggcccttttagcatacatgaggtcaaactgatgatcaatcctggagaacacttcaggcacactagtggagttcgaaatcatgcacacagccctctgcaccttggcaaggtcacctccaggaacaacagtaggaggctgatagtttataccacacttgaacccagtggggcaccaatccacaaactggatggatctcttggtcatgatggtggccacagcagcatttacatgcttgggcacgacaacggcccggtacattaaacaac

SEQ ID NO: 228461 - DNA, 468 bp, Glycine max
ttgctgctagaactcgttcttcttcttttgttgatctgtgtctgagtttgacttttctctcacctgaaaatgtcttgctgcggaggtaactgcggttgcggaagctcctgcatgtgcggtaactgctgctgaggctgctacatgttccccgacttgagctacactgagaaaccagcaccgaaacctatgtcatcggagtgtgccctggttacgctcaattagagggtgctgcaatgaaagtgccctctgagaacgatggctgcaaatgcagaccaaactgttactgcaacccctgcacttgcaagtgaagcgtttggagaacaagctccaggcaaagaatgccacgaacttggaataatgatggactattaatgtgcagctaaaaactaatgaattatgtctgcgatagttatcgtgcactctggtgttgtgagtttaacaaacatccttagaatagagtggtcatgt

SEQ ID NO: 228462 - DNA, 433 bp, Glycine max
aatattataagcagagattcataattcagagtaggcgaactttatacagaagcgaccaattaccaaacattaaaaaaaaaaaaaggaagcaaccatgagcttaacacacccatcacaagtccaaaacacttgaacttgctgaaaggcaagacatgaccactttattctaaggatgtttgtttaacacaaaacaccagagggcgcgaaaaccatcacagacataatacataagtttttagctacacattaataggttatcattattcctaattaagggctatctctgcttgaagcttgctctcccaacacctaacttgcaagtgcaggggttgcaggagcagtttggtccacatttgcagccatcgttctcagggggcacacccatttcagcaccctcaaattgagccttaacaggtgccactcccatgaccaa

SEQ ID NO: 228463 - DNA, 466 bp, Glycine max
  unsure (1)..(466): unsure at all n locations
gcatcaactaatcagataaatggatttattattaaaaaggatgctcctggtttaacagtcacaaaaatagagaataaaattggactcaggattgtacaaaatggagacattgttatgaggaaagtttttgtccctgacgaggaccgaaattgcaggagtaaactcttttcaggacacaaacaaggtacttgctgtttcacgcgtaatggttgcttggcaacccattggtatatcgatgggcatctacgatatgtgtcacaggtacctaaaggagaggaaacaatttggagcaccattagcagctttccaaatcagccagcagaaacttgttcagatgcttggtaatattcaagctatgatacttgtctggttggcgcctctgcaaattgtatgagagtggtaaaatgactccaggtcaagctagcttgngaaagtcatggatcactttgagagcacgagatacagc

SEQ ID NO: 228464 - DNA, 452 bp, Glycine max
gagaaagtgcgcgtggtgaaaaccatggcttctcagctcctgagacgaaccttcggaagtcgcatccttgcaaaccctagggccttctccttctcctccgctgcttccactccgatccgcgccactctcttccccggcgacggcaatcggccccgagatcgcccgatccgtcaaacagatattccaagcagctgatgtcccaatagaatgggaagagcactatgtaggaactgaaattgaccctagaacccaaagttttctgacatgggaaagttcggaatctgtaaggcaaaatggggctggcttgaaaggaccaatggccacccctattggaaaagggcatcgttcattaaatcttactctgagaaaagagctcaatttgtatgccaatgttcgaccttgctacagtcttccagggctacaacctcggtatgataaatgtcaatctaatc

SEQ ID NO: 228465 - DNA, 547 bp, Glycine max
aaaaaaaaagaggattttttttaaaaaataaagcaaataatattggaatatcctgcacaaagaaagatcataaagatgaacaaatgaaacatcatctggtgttttttatttagcactatattattgacaaagaatactaaaacggactaccaagggttatcaatcaatgtgcattgtgaaagggcagcgaatatttgaaagcctgcccattccttgtctttggttgtaaaatgtcacacacatgggtgagttttcctttaagctgaggtaatcccactctttcggattaattgggttaataaatagaaaattgactgaaaatcaaaatcataagcaagaatttcttgctgactccaaaaccaaaatctaaagatgatcaataattgcctttgtgaattcagttgtctttgaactgccaccgaggtcagctgttcggtacttcccttctgcaattgtgttcaggatggctttttgaatctgttctgctttgtcatggaggttcaaatggcgcaacattgtaacaccacttagcagtaaagcagttgga

SEQ ID NO: 228466 - DNA, 541 bp, Glycine max
  unsure (1)..(541): unsure at all n locations
gttcttcagacatatctataacgctgtttctgtgagagcatcaatggcgacaaaagctttgtccttcgctctgactctcaatgacctcaccaataaccacttctcttccaatacgccacacaccgccgccaaagtttccgtctttaccgtcaaatgctcttcttcggctggtggagagaggccttggaagaattcagatgctagacttgtgcttgaagatggttcaatttggaaagcaaaatcgtttggtgcttcggggactcaagttggcgaagttgttttcaatacatcattgacagggtatcaagaaattttgacagatcctagttatgctggccagtttgcgctcatgancaatccacatattgagaacactggcataaattttgatgatgaggaatcaatacaagtgtttccttgctggtcttggaattagaagtttgagtatcagtacctctactggagatgtaagaaggatctggtggattacttgccgaaaggcatatcatgggaattatgatgttgatactcgtgcaatcac

SEQ ID NO: 228467 - DNA, 470 bp, Glycine max
  unsure (1)..(470): unsure at all n locations
gctgccgtcgccggtcgtcgccgacactgttgcttcactctgttcctcttcgtgcgaagtactaggatcagatggctttgcgaggggtttggcaacttaacaagctgattgtcagttattgcaactggggcggaagtagcagaagtataagggcatttatggagtctcatttgccagcatttaaggagaagaatcctcaattagaggtggttactgaactcatccgtggtcagcatccacatctgaagggttattacaagaacaagaatcagcgagtgatatctgtgaagaatatggatccagaagacatacttttgcatgcaaccaggctaagaaatgcattgggaaggaaggtagtgaaattgaggacaagacatgtaaccaaacgccctagtgtgcaaggtacttggacaactgctgtggagtattaagatagaaaaccaagtgtatgngaaagttccttttatatg

SEQ ID NO: 228468 - DNA, 603 bp, Glycine max
  unsure (1)..(603): unsure at all n locations
tcaagtttaaagcaccacacacagcatatacacaaagaagctctttttcactatcaccactctccctttcgcttttcgtcctaaccaaaaaagaagaagaagatctaataaaccaccaattcattcatcatttcaacaacgtgtgtgtgggtgcgtgtgaattattatgggaggggtgacgtcctcgatggcggcgaagttcgcgttcttcccgccgaatccgccgtcgtacaaggtggtgacggacgacatgacggggctgctgctcctgacgccgttcccgcacagggagaacgtggaaatccagaagctgccgacgcggcggggcacggagattgtggcgctgtacatacggcacccgatggcgacgtccaccgtgctctactcccacggcaacgcagctgatctcggccagatgtacgagctcttcatccagctcagcatccaccttcgcgttaacctcatggngtatgactattctgggtacggacagtcatcagggaagccaagtgagcagaatacatattcagatattgaggcagcatccaagtgtctagaagaaagtatggtgccaagcaggaagacataatccttatgggcatc

SEQ ID NO: 228469 - DNA, 637 bp, Glycine max
  unsure (1)..(637): unsure at all n locations
gttacttcctgtggttgatactgctaaactccctgatagccttgaagtcatgttcagtagctctcaattcaaggagaacttaacttactttcagcagcttcttgcggaaggagtctttgatatctctttgttgggcgcaaaatctgaagactgcangattttgaaaagacttgcattatccaatctgtcaaagtcaaaatgggtagcgcaccataattttctcaagaaatgtaaaaacaaagctggaaaatctaatactatgggatctactggtacaacatcaactaatgttttgaacaacagggcgtcaactgatgttgcaaacatcaagagaatgcgtgacagcagaaatcaaaacttaccagaaataaagacaataatgagaagccccaaagaacgatcgcaaaggcgagctgtgagggcaaagaagctgtagagaatggtgcttgctatagtccaaaacacctatttgctntgcctcctgatgctagttttctcttgctggattccttaactntgctcacgagagtagtgatcaggatctgctgctaaggtgtcatctacacttctttttcacagcagagctcttgcagcaacttaagctggtgctcaagcagcctagtgcagctaatctact

SEQ ID NO: 228470 - DNA, 497 bp, Glycine max
ctcgctgttggattttaatatttatctctgctatcaatattattaaggtctcacttctgggattctgaattctatgccccttggaccaaagtttcgtaagttctttgttgttgtgcatttcttttctttttttttttatccgtgggaatggaagaatgacaggaggtttacaataactcgtgcatccttcttaaccaacttaactagactcccttgacatttctttctagtttctcatttccatttctttagtgtaaggggattttttgttgtaaagtttggaattcgaaacttcattccaacttggtttatgtcaaattcaagttggttttctcaagaaaggcaattcacagaatggaccagagaagagaataagaaatttgaaagtgcccttgccatatatgataaggataccccagacagatggctgagggttgcagccatgctccctggaaaaactgtctatgatgtgatcaaacaatacagaagaattggaa

SEQ ID NO: 228471 - DNA, 621 bp, Glycine max
  unsure (1)..(621): unsure at all n locations
gcctaataagcactttgttggggagagtagttctagcactaccaaagtaatcaaacacgtcgaaaacgagaagagtccttcgaagctagaggtgcttcctctgtcgtcagaagggccaagggatgtttttcagtgtcaagctagactgtggcaagctgttaccaaagctgtgaagaaaatcaagcgaagaaatgggccacatagaggagaggatttcaccttgtcacaagcaatggccaaggccgatttttgggtcatgttcttctctcttgtcatgggctgtggatcgggcttgacaatcataaataacatgggtcagatttgtcaatcattgggagacaacaatgtcaatgtttatgtgtcggttatcagcatatccaacttccttggtcgtgttggtggcggctacttctcagaggttatagtaaggagttttgggtacccaagacttgctgcattggcagtgattcaagcagggatgtctctgggactatgctactatgtatttggtttggctggtcaagtttatgcggtggccatccaatggttttgggtatggtgcccactggtcaatnngcttagcagcagcttcagagctattnggcctanaaaactttggac

SEQ ID NO: 228472 - DNA, 553 bp, Glycine max
gtgtttggcattagagaagatagcagaatcacttgaactgccttgcagatacatttctcttgggtgtccagagatatttccctattacagcaaacttaaacatgaggctatttgtaacttcagaccatacaactgcccttatgccgggtcagactgctcggtggttggggatattccatgccttgtcgctcatttaagggacgaccacagggttgatatgcattctggatgcacttttaaccatcgctatgtcaagtccaatcccatggaagtagaaaatgctacatggatgctaacggttttccactgttttggtcagtatttttgcctccattttgaggccttccagctgggcatggctccagtttacatggcattcctccgattcatgggtgatgaaagagaggcgcggaactacagctacagcttggaggtgggaggaaatggaacgtaaactaacttttgaggggagtccaagaagcattagagatagcccatagaaaggtaagagacagccatgatggtctcatcatttaccgcaacatggcgcttt

SEQ ID NO: 228473 - DNA, 537 bp, Glycine max
ggttagaactcagtttttttattttgtttggaagttgaaatatccccataaccattcaccagtcaaagattaacacttctcaaattatctacaggaagaaatagcaatcaagagaatatgcaatcaacctagctacacaggttgggtatgcacactccaccttcagggttttgctgttctttccatatccttcctgttactcgtagcttcaactctttcctgtctccacccgagaagaaaagcgccatgttgcggtaaatgatgagaccatcatggctgtctcttaccttcttatggctatctctaatgcttcttggactcccctcaaaagttagtttacgtccatttcctcccacctgcaagctgtagctggagttccgcgcctctctttcatcacccatgaatcggaggaatgccatgtaaactggagccatgcccagctggaaggcctcaaaatggaggcaaaaatactgaccaaaacagtggaaaaccttagcatccatgtagcattttctacttccatgggattggacttga

SEQ ID NO: 228474 - DNA, 492 bp, Glycine max
gtatgttattaaggttttatagtatatttcatattataggtattctatacattgtttcttttgaggagcacatgcagcaattcagtcttactacatgattgtctttatttagaaaacaaaggtttaccaattaaacaaacttatcagctaggctttggaccttagacaaactgattaaggtactcattcacagtgatgtatttcacatcaggatatagagctgaagcttccactccaaaagaagactcaatttcaaagttagtatgatccccctttacataagaagagtggttaattgacaggatcacattcacgggtggtgcggactcttcaatttgctttaggaggggctcttctggaacataaattctttcaagagttttaccaattttttcctcccagagagtaacaagcctatttaacgacaaggtattatctggtggaataatgtatagaattttgttcagggttcatggatcattcacaggattg

SEQ ID NO: 228475 - DNA, 559 bp, Glycine max
aataattgtaggaattgtagtaattggaggacttctggttctactcgttgtgtgcatcattaggaagtccaaagcagaaagatcacctcataaaatggacaaatctgttgctaataaatattctaccagtgtatctcctagaccaattggtacaagacatattcctcaggcaatgaagcaagctgcagttggactgccaccataccgtatcttcacatcagaggaaattgaagatgcaactaacaactttgacccatcaaatttaatagaagagggatcacagggacagctatataaaggttggctcagagatggttcagtggtccttgttaattgtgtaaaaataaagcagaaaggtttgccccacagcatcatgcagcaagtagaggtattacacaatttgaggcacaagcatatggtgagtgttctaggacactgtgtcattactgaacaggagcatccacaaacaacaagcacagtcttcattgtgtttgagtacatctcaatgtgtcattgagggatcaactttcagatgggaggaagagggaaatgctgaaat

SEQ ID NO: 228476 - DNA, 451 bp, Glycine max
gataggaacctaattcaaatattataaaaccttaataacaataatgatatggaaaaatgcgaaccaaattgtgttttggggccttatgaaagagattacatatgtacatcaacattttattcattatgataatgaacatatggaaatataagcaagcattttttttattgacaagtgtggtttacaattttgtgctgaggtttccactgctggtccaggacttttgaacttgcattgcatactgcaaattccaaagaacatcctctattgaagggcgctggctagaaaccttggagagacagtttatggtgatctgaactgcagtcttcattgattcatatgcataagttcccctcagtgtagggtcaatggcacttctgattactgatgttgcttctggtgaaccattctccagctctttctttagttgctctatttcacttgaggatgt

SEQ ID NO: 228477 - DNA, 512 bp, Glycine max
ctcgctgttggattttaatatttatctctgctatcaatattattaaggtctcacttctgggattctgaattctatgccccttggaccaaagtttcgtaagttctttgttgttgtgcatttcttttctttttttttttatccgtgggaatggaagaatgacaggaggtttacaataactcgtgcatccttcttaaccaacttaactagactcccttgacatttctttctagtttctcatttccatttctttagtgtaaggggattttttgttgtaaagtatggaattcgagacttcatatccaacttgttttatgtcaaattcaagttggttttctcaagaaggccaattcacagaatggacaagagaagagaataagaaatttgaaagtgcccttgccatatatgataaggataccccagacagatggctgagggttgcagccatgctccctggaaaaactgtctatgatgtgatcaaacaatacagagaattggaagaagatgtttgtgaa

SEQ ID NO: 228478 - DNA, 518 bp, Glycine max
  unsure (1)..(518): unsure at all n locations
gtaagacgtgtttggattggtcaaaatggattactttccactcctgcagtatctgctgttatacgtgaaaaacttggagctgatggatccagggcaacaggtgcatttatactgacagcaagtcacaatcccggtggccctaatgaggattttgngattaaatataatatggaaaacggtggacctgcaccagagggaattactgacaagatatatgaaaacacaacaacaattaatgagtacttgattgcttcagatctgccagatgtggatattacctcaacaggtgttacaagctttacaggccccggaggaccatttgatgttgaggtttttgattcagcaagtgattatataaaattgatgaagtcaatttttgattctgaatctatcaggaaactgctgtcatctcctaaattcacattctgttatgatgcactacatgggnttggctggagcatatgcanagagtatttntgtggatgagcttggagcacaagaaagctctttactgaact

SEQ ID NO: 228479 - DNA, 295 bp, Glycine max
ggatcattaggcctgaccttgtcgtgggtggctcaatgattttatcatctgagtttgtcaatgaaactttagatagaggcctaatagcaagctggtgtccacaagaggaagtgctgaaccacccttcaattggtggattcttgactcattgtggatggaactcaacaattgaaggcatttgtgctggcgtgccaatgctgtgttggccattttttgctgatcagccaataaactgtagacacatttgcaaagaatggggcattgggattgaaattaacaccaatgcgaagagaga

SEQ ID NO: 228480 - DNA, 315 bp, Glycine max
  unsure (1)..(315): unsure at all n locations
acaacgtcttctggttctttgaagaagaacccttctctttgcgcgtgtcccgttctcttctccaatcctcctccatccccactgtgtgatctgatcctaaaccctatagccatgactaccatggaggttaagctatggaatgacaagcgcgagagagaaatgtatgacaactttggggagctttatgccattatcaaagccgctgagaggcttgagaaggcctatgttagagatataatctcaccccaggaatatgagttagagtgccagaagctcatagctcatttcaaaaccttagcttncacccttaaagac

SEQ ID NO: 228481 - DNA, 567 bp, Glycine max
cgcaaatcgccacatggtagtaaagttagcgtagcacgcaagtaactcccttccgtaattaacataaacacagaatccaagaggtattgcaactggaattccatggcgacgagtgggtcagagacaaagcaagtgatggtgattggaatcgacgacagtgatttcagcacgtacgctctccaatggactctggatcacttgctatcccctgcaaatgttcctaagttcaagatttttcttgtttatgccaagccttctgttgcctctgctgtcggttttgttggccctggagccgctgaggtgttacctgttgttgaggccgatttgagaaaaacagctgccaaaatcactgaacgtgctacagaactatgcaagaagaaatccgtaaatgacgtagcagtggaagtgctagaaggtgatcctagaaatgttctttgcgaggcagtggaaaagcaccaagcttcaatgttggttgtgggtagtcatggttatgggactttaaaaagagcggctttaggtagtgtaagtgactattgtgctcatcatgctcactgcactgtcatgatc

SEQ ID NO: 228482 - DNA, 536 bp, Glycine max
acacacacaacagtgacatttatttaaataaattgctcttgaacaaaataaaccaagcaccaccagtggccgtgaaggaaaaagtattgtgcttacatacattatttgtgggttgtaactttgaaaataaaaaagtaaatgaaccttaaaccacaaagtcagctaggcatgcagaaaacaatattatgaattcttaagaacatttattttccctgttgctgaaaagatttatgtgcactgctatttaatcggagccaacgattgagatcagtgtttgtgctttggtttcttcacgatcatgacagtgcagtgagcatgatgagcacaatagtcacttacactacctaaaaccgctctttttaaagtcccataaccatgactacccacaaccaacattgaagcttggtgcttttccactgccttgcaaagaacatttctaggatcaccttctagcactttcactgctacgtcatttacggatttcttcttgcatagttctgtagcacgttcagtgatattggcagctgtttttttta

SEQ ID NO: 228483 - DNA, 447 bp, Glycine max
attgcttatggactcgacaagaaggccactagctctggggagaagaatgttctcatcttcgacctcggtggtgggacttttgatgtctcccttctcaccattgaggagggtattttcgaagtgaaagccactgatggtgatactcacttgggaggtgaagatttagatcacaaactggtgaaccattttgttcacgaattcaagacgaagaacaagaaggatattaacggaaatgccaaagcattgatgaggttgagaacagcatgtgacagggccaggaggactctttctttcactgctcagaccaccattgagaacgattccttgtatgagggtattgacttctacacaaccatgacccgtgcccgtttcgaagagcttaacatggacctattcatgaagtgcatggatcccgaggagaagtgtttgcgggatgctaagatggac

SEQ ID NO: 228484 - DNA, 534 bp, Glycine max
gtctcaagttgctcttcttctttttttcttttctttcaccctcaaaatttctcactctctttatcttcaccttttcagtttaaagcttcagatcacaacagatccaccattcacctcaccactttctcttcacaaggcaaatctaacaagaaaaagtagtctctgaagccgatccagtgtcttgtgaatttggaattggtagtgaatttagatctaaaaagccatagcaatgtcttttatcggtacccagcaaaagtgcaaggcttgtgagaaaacggtttatccagttgatcagctttctgctgatggcactgcttatcacaaagcttgcttcagatgttctcactgcaaaggaacattaaagctgagcaactattcctcaatggaaggtgttctttattgtaagcctcactttgagcagctcttcaaggagagtgggtccttcagcaagaacttccagtcacctgcaaagctagcagataagacaacacatgagctgacaaggtctcctagtaaagctgcgagcatgttttc

SEQ ID NO: 228485 - DNA, 501 bp, Glycine max
atcttgcaaatcacgctctcattagtcaagtcattactgaatgtccattgtataaaataaaccacacaagatttgcacgccacgcatgttgtaagtaaaaatatcagaaaatgatcaaagtcacgagagaacaatcaaaaccaaaaaaggccacacatacaagcacttgcttgacagaccaaaatgtatttgaaaaaggaagggcaattgaaggaaccaacattcaagattctggaacagaggccacggttgttgcagttgctgttgctgctgctgctgctgcacgtttgactgaggcagacttagtaagatgattatagctccctttctccttaaaaagctgggagaagtggtgcttgcaatacaaaatgccctcaagggctgcgtaattcgacggcgttatgggacatccaccatgtgaacacttgaaacatgaattgtgataggcctgccctttcactgataccttttacaatggataagcaagttttgccacatgtg

SEQ ID NO: 228486 - DNA, 565 bp, Glycine max
  unsure (1)..(565): unsure at all n locations
gtaactgcgtgcactctctctctctctacaacaagaattcatctattcatttcagcccatcagcatggcgaaggagaagaaaaacttgtccaacaagaacaagaagccaagcaatgcagacgaggttcacttccgcggagtccggaagcgcccctggggccgctatgccgccgagatccgcgaccctggaaagaagacccgcgtctggctcggcaccttcgacaccgccgaggatgccgcccgcgcctacgacgtcgccgcccgaaacttccgtggccccaaagccaaaaccaacttccccttcctccccgacaacaacaccaacgttaacctcaacaagaagaacaacaacgttaacgttaaatctgacagtcccagccagagcagcaccgtggagtcctccaccccggagcgtgaattcacgcgccgcgccgcccccgccgcaatggatcgctttccgttcctacccatccagcagcaaatcctcgtgacccaccccgtcgcacccatgcgcnncgtttactttctcgaccgggcccacttcatgacccagcccttcccactc

SEQ ID NO: 228487 - DNA, 536 bp, Glycine max
atttgatggaactgtacaagagcctcgaaagggaatcagaagtggtcatgtacctggtagcaaatgcatcccttttgcacagttgttagatagttcacagacattgttaccagcagatgagttgaagaagcgatttgaacaagaagggcatttctctggaaagcccagctgtgacttcatgtggaacaggcgtaactgcttgcattcttgcattgggtcttcatcgtcttagaaagtctgatgttgcagtttatgatggatcttggactgaatggggagcacaatcaaatacacctgttgacactttatgaattcaatacagctaaatttgcatgccaccaaaaagtatctgcaagtgaaggggctgttttcatttgtcaaacattttgaacacaccaatttttgtatgctttactgtttgctgttttggtttagttgtggttgagattcttgagaattgctaatatgttcaaatgttactaatattaaatcctatcatgtggcttataaatataatgataggatggttcaagaat

SEQ ID NO: 228488 - DNA, 570 bp, Glycine max
cgcgagataagaaataatttgcataaggtgtgtgatatatgatcttaaatcttattttgtaatttttaacaaacccaaccttttcccacttctatgagacattcttgaaccatcctatcattatatttataagccacatgataggatttaatattagtaacatttgaacatattagcaattctcaagaatctcaaccacaactaaaccaaaacaacaaacagtaaagcatacaaaaattggtgtgttcaaaatgtttgacaaatgaaaacagccccttcacttgcagatactttttggtggcatgcaaatttagctgtattgaattcataaagtgtcaacaggtgtatttgattgtgctccccattcagtccaagatccatcataaactgcaacatcagactttctaagacgatgaagacccaatgcaagaatgcaagcagttacgcctgttccacatgaagtcacagctgggctttccagagagatgccttcttgttcaaatcgcttcttcaactcatctgctggtaacaatgtctgtgaactatctaacaactgtgcaaaagggatgc

SEQ ID NO: 228489 - DNA, 501 bp, Glycine max
  unsure (1)..(501): unsure at all n locations
cggctcgagctcgaacacaccgatgttgctgtgcttctcgacaacgaggcaatctacgacatttgcaggagatctcttgacatcgaacgccctacctacaccaacctgaaccgtctcgtttcccaggtgatatcatccctcactgcctctttgaggtttgatggagcactgaatgttgatgtgactgagtttcaaaccaacttggttccttacccaaggatccatttcatgctttcctcgtatgcccctgttatctctgccgagaaagcataccatgagcagctttccgttgctgagatcaccaacagtgccttcgagccatcctccatgatggcaaagtgtgaccctcgccacggcaagtacatggcgtgttgtttgatgtaccggngcgatgtcgtgcccaaggatgtgaatgctgctgtggccaccatcaagaccaagagaaccatccagtttgtggattggtgccccactgggttcaagtgtggtataaactatcag

SEQ ID NO: 228490 - DNA, 560 bp, Glycine max
atatagaaacttctgtgctatacatagcacatatatttgataacaatcatcattcaaaaaccacacatgtccgacagaagacgaaaaagtagacatcaaacacacgatatttcagacactctaataatcatcatctccttcaccatcatcatctccatcaccagactcggcaccaacctcctcataatccttctcaagagcagcaaggtcctcacgagcctctgagaactcaccctcttccataccttcacccacataccagtgcacgaaggccctcttcgcatacatgaggtcaaacttatgatcaatcctggagaacacttcagccacactagtggagttcgaaatcatgcacacagccctctgcaccttggcaaggtcacctccaggaacaacagtaggaggctgatagtttataccacacttgaacccagtggggcaccaatccacaaactggatggttctcttggtcttgatggtggccacagcagcattcacatccttgggcacgacatcgtcccgtacatcaaacaacacgccatgtacttgccgtggcgagg

SEQ ID NO: 228491 - DNA, 550 bp, Glycine max
caagaaggtacctgtgcttgtccacaatggaagaccattggctgagtcccttgtgatccttgaatacattgatgagacatgggagaaccaccaccccatcttgcctcaacaaccttatgatagagccttggctcgattctggtcaaggttcattgatgacaaatgcatgcctgcaatatcaaaggcagcatttactgcagacaaggaggaacgtgacaagggcactgaggaatcactcgagtctcttcaaattcttgagaatgtactcaaacacaagttctttggaggtgagactactataggcatagtggacatagccgctggcttcatagctttctggctccctgcgattgaagaggctgtggggttgaaattgctgaccaatgagaagtttccaaaactctacaaatggggtgaagactacaccaaccaccctgttgtgaaaaagaatcttccccaaagagatagggttggggggttcttcaaagctcgatatgcatccatcactgcttccaaatagaccaattgggggtgtgatagagactcatga

SEQ ID NO: 228492 - DNA, 532 bp, Glycine max
atattagaacataattacttaaataccaaattgaacacaaagtgcacaaacactacaattttactcgaaattccatcatgtagaccctcccttaagaaaccacctactccttacaagatttattacacaacaatttcccaaaatcatgagtctctatcacacccacaattggtctatttggaagcagtgatggatgcatatcgagctttgaagaaccccacaaccctatctctttggggaagattctttttcacaacagggtggttggtgtagtcttcaccccatttgtagagttttggaaacttctcattggtcagcaatttcaaccccacagcctcttcaatcgcagggagccagaaagctatgaagccagcggctatgtccactatgcctatagtagtctcacctccaaagaacttgtgtttgagtacattctcaagaatttgaagagactcgagtgattcctcagtgcccttgtcacgttcctccttgactgcagtaaatgctgcctttgatattgaggcatgcattt

SEQ ID NO: 228493 - DNA, 607 bp, Glycine max
  unsure (1)..(607): unsure at all n locations
caatctctaacttttcccgagaaaattataatttccattctcttttctccctcagattcccggaaaatatagtattcacaacgttatattttggcaccgccaagctccaattcaatccgtcgtcgttttcgcgaattccgaatgcgtcgacttcgggttggagaatgagttctccgtgctcttcttgtggctgtttgttggcgttcttggatctctcttcaaaccctccacagtctcctgtccaattttaactctcttagtcagtttaactatgtatcacacaaagaaattttcaccggctagcatggtgccgcataaatctcaaggtggtgctgaacagcttgcaaatgctggggttttgggtggatcggctgtaaaaactgctgcaccctctnggggaagtgggaagcaacgtttaaggtggacatctgatcttcatgaccgttttgtggatgccattacacaacttggtggaccagatagagcaacaccaaaaggtgttcttagagtgatgggtgttcctggactgaccatttatcatgttaaaagtcatttacagaaatatcgccttggcaaatacttgcctgaatcaccagctgatgaccct

SEQ ID NO: 228494 - DNA, 550 bp, Glycine max
  unsure (1)..(550): unsure at all n locations
gccgtgagttcaaggctaacaagatctccgaggaagagtatgttaagtcaattaaggaggaaattcgcaaagttgttgaacttcaagaagagcttgatattgatgttcttgttcatggagaaccagagagaaatgatatggttgagtacttcggtgagcaattgtcaggctttgccttcactgttaatgggtgggtgcaatcctatggttcccgttgtgtgaagccaccaatcatctatggtgatgtgagccgcccaaagccaatgactgtcttctggtcatctctggctcagagctttaccaagcgcccaatgaagggaatgcttaccggtcctgttaccattctcaactggtcctttgttagaaatgaccaacctagatctgagaccacctaccagattgctttggctatcaaggacgaagtggaggaccttgaaaaggctggcatcactgttatccaaattgatgaagctgctttgagagagggtctgccactgaggaaatcagaacangctcactacttggactgggctgtccatgccttcagaat

SEQ ID NO: 228495 - DNA, 446 bp, Glycine max
caacagcacaaagcgggttactgtctgttcaagctaccatctctctctctctttcttagtgcctccttgccagaagttaaaatggcccaagaaactttcctattcacatctgaatcagtgaacgaggggcaccctgacaagctctgtgaccagatctccgatgctgtgctcgatgcatgcttggagcaggaccctgacagcaaggttgcctgtgaaacctgcaccaagaccaacatggtgatggttttcggagagatcacaaccaaggccaacgtggactatgagaagattgtgcgtgacacatgcaggaacattggttttgtctctgatgatgttggtcttgatgctgacaactgcaaggtcctcgtcaacattgagcaacagagtcctgatattgctcacggtgtgcacggccacctcacaaagaggcctgaggagattggtgc

SEQ ID NO: 228496 - DNA, 498 bp, Glycine max
ttcagatctcgtcgatcttgagcttcaacaatggcgaaaccaaggtactctcgtcttccacctcgcaagtcatcgtcgtcttccacgctgattctgactctcttcctggtcttcaccttcctcgttctcattctcctcgctctcggcatcctctccattcccagctcctcgcgcggcaatttgcccaaacctaacgatctcgcatccatcgctcgcaacacaatcgagacttccgacagtgacgagaggggggagcagtgggttgaagtagtgtcgtgggagcccagagcctttgtttatcacaattttctgacgaaggaggaatgcgaatatctaattgacatagcaaagccaagtatgcataagtcaacagttgtcgatagtgaaactggaaagagtaaagacagcagagtgcgtacaagctctggaacttttctggccagaggtcgtgataagattgtcaggaatattgagaaaaaaatttctgactttactttc

SEQ ID NO: 228497 - DNA, 553 bp, Glycine max
  unsure (1)..(553): unsure at all n locations
aagatcttatatttttggatgttgcccttgattctacagttagaacagctgtggaaagaagttatgaggaattaaacaatgctggacctgagaaaataatgtacttcattagcttggtccttgaaaatcttgcactgtcatcggatgacaatgaagatcttatctactgtttgaagggatgggatgttgccttaagcatgtgcaagagtaaagatactcattgggcattgtacgcaaaatcagtccttgacagaacccgccttgcactcacaaacaaggctcatttataccaggaaattctgcaaccatcggcagaatatcttggatcactgcttggtgtggacagatgggctgtggaaatatttactgaagaaattatccgtgctggatctgctgcttctttgtctactcttctaaatcgactggatcctgtgctccgaaagacagctcatcttggaagctggcaggttattagcccagtggaaactgttggatatgtngaggtcatagatgagttgcttgctgttcaaaacaaatcatatgagcgacctac

SEQ ID NO: 228498 - DNA, 552 bp, Glycine max
agtagggaaaaagaataagaccatctaattttttaattaatttacattattccatgtttatacacttataaattattccttaattttcaatatatcacgtgtaataaatctataaggccaaatttggtaatcccgcgggttactcttaaactcgcagaagctgccacggccacgtttgaaacgccatgttgcacgggaatgaacatagaacatagttgaggtagttggcttagaagacataggtatggaggtctacatttgtggtctggtctggacaacatagacttttccatccttgatgacaccttcaatgtcctgaggagtgccatacaactcttcaatttcatttcctgcacgggcaatgctggacaagattgactggcgaaaactgccatcaaggatcagtttgtctgaagaataatcaagcaccaccttctctgcttcatccattggcacactgtcataaagacctgcaccagcataaccttctagatcttcaccattggaatcagatcgaaaaataattgaccgtcttataaataggccgacagg

SEQ ID NO: 228499 - DNA, 338 bp, Glycine max
gggagttgaacaagaaacagcagggcctggcgaagaagagaaagaaaacaatcatgagcttcattctgtttccgattctctttgcatttacctttctgtcctcgcccgttctctctgctttggatctggtcctcgccaaggttgaccgtcgcattgatctgacttcacagattgtgcgcatcactacttcactaaaggtgcagaatacgggatctgatgttgtgtctgagattttgctgtcccttcctgagaaccaggcaagtaacttggcatacttgaaggcaacacttggtgatgggaagggaaaatcaaaaccatcttctggtgttggtttacct

SEQ ID NO: 228500 - DNA, 397 bp, Glycine max
aaaaaaaataaataataaacagcgaagttacgaagattctgtagagaagaagagcaatggcgtccaacgattccgattcgcagatgaagatcgtacatggcgatgctggttacatacttgaagacgttcctcacttcgccgactatattccaaatcttcctacatatccgaatccgcttcgatccaatcctgcttactcggttgttaagcagtatttcgtgcacatggacgacactgttcctcagaaggttgttgttcacaaggatagtccaagaggtgtacattttcgacgtgcagggcctcggcataaggtatactttaaatcggatgaagtgcatgcatgcatttgtcacgtgtggtggactctgccctggcctcaacactgtcataagggaaa

SEQ ID NO: 228501 - DNA, 475 bp, Glycine max
ataaataattccgttccattcttaatgacccaggttaaaattcagcaatcttctgagtacaacaatcacgcaagacggtagtaggtctttataaagaaagacgtaccaacttgcaaaacatggaaaaggacaaaaagaacagctcccaatactccaggctttggaggttgtagggcttgagtcaaaaagataaaacatgtccccaaatacagttgtagatgaacaagtctaaatctaattttgtgtcttgataccattgtctgtgtggtttcctgattcttgttcatctttgggaggttgttctttctcggcatcaccaacatcattgcaattgttctcttccaacaattgtgtcggagattctgctttcttggctttttctaaatctttagggctcaaaaagctaggcttggttggttgaagaaaggagtcttgcccacattttgtcagttatcacacccttgttctgcctctc

SEQ ID NO: 228502 - DNA, 501 bp, Glycine max
ggaaatcagtatattgcatgccaaagcgaccagcattcaagggatctgccccaataaatctatcagatagattgcaccaagttctgaggtgggctcttggctctgttgaaatttttcttagtcgtcattgcccgttgtggtatggctaattgaggaaaaccttaagtacctacagagggatggcttacaccaacaccattgtttatccatggacttccatccctctgcttgcatactgcacaattccagctgtgtgtctcctgactggaaagttcatcatccccacactaaacaaccttgctagcatttggtttatggctctatttatctccatcattttaactagcgtgctggagctccgatgagctggtgttaccatcgaagccctttggcgtaacgagcaattttgggtcatgggaagtgtttctgcttcacctttcgccgtgttccaaggcctcttcaaagtcttggtggagtagacaccaacttcactgtgacagc

SEQ ID NO: 228503 - DNA, 530 bp, Glycine max
gaagttggcaaaaatatatattcttattctcaatagatgaaaaatcatctagtagcaccaaaacacagaacatgttttcccaaacaatgacaatggctatactacaatatatggttttgttgtatcatcaaatgaatacattccaatcagacccaactttcctcttttaagactatgtacacagataactcttctaattaaggcaaaccactcaatagcagtaagaaaataaaagcatgcacacaagtgcaattaactcttatcattgggacatcaacatggcctctccacagagtcttattagcattccaccccacattgtttgagcactggaccagtttgcttgggcaagaagggatcaatcctgacccaaatcaatgagaaaatagatgctagaaggattgaccacaacactacaatggtaggagtcctgttttgctttcccatgagacctttgaggaaagggtacaagtgaacaatgacccagaaggcaaagaacagcttcccaaacaaggtccccatgaaccata

SEQ ID NO: 228504 - DNA, 512 bp, Glycine max
  unsure (1)..(512): unsure at all n locations
ccctaggcagagagaaaattccccaaatcacaaaccctagattgagagaaaccctaacacgccatgggaacacccgagacatctcgcgaaccctgccccgatcgcatcctcgacgacataggcggcgccttcggcatgggagccggggggtggctccgcctttcattttctcaggggtctctacaattcccccaagggcgatcgattcgtcggcgccacccaggccgtgcgccttaacgccccccgcgtcggcggcagcttcgccgtctggggcggcctcttctccgcctttgactgcaccatggtctacgctcgccagaaggaggacccctggaactccatcgtcgccggcgccgccactggcggcttcctctctatgcgccagggcctcggcgccttcgcccgctccgcggcattcggcggcgtcctcctcgccctcatcgagggcgccgggatcatgctcaacangttcctcagcgcgcagcagcccatgctatgatcatggacgagcc

SEQ ID NO: 228505 - DNA, 570 bp, Glycine max
gcacgattcccgtctcgaaggcctcatcaaaatgtcagatctgactattaatctggctgccatttgcactcccgcggattacaacacgcgccctcttgacacaatttacagcaacttcatcgacgcgcttcctgtggtgaagtactgttcagagaacaacaagcgtctcattcatttctctacgtgtgaagtctatgggaaaacgattggaagcttcctccccaaagatagtcctcttcgtcaggatcctgcatactacgtacttaaggaggatgagtctccttgtatttttggttcaattgaaaagcagagatggtcctatgcctgtgctaagcagttgattgagaggcttgtttatgctgagggtgctgaaaatggcttggaattcacaattgtgaggccttttaattggattggaccacgaatggatttcattcccggcattgatggcccaagtgagggtgttcctcgggttctggcatgctttagcaataatctcctccgtggagagcccctcagcttgtggatggtggccaatcccagaggactttgtgtatattaaggatgcta

SEQ ID NO: 228506 - DNA, 544 bp, Glycine max
ggctaccaaaaccaagggggaaattaccatgtatataaataaaatcaaccattgaactatatataagtgcccctataggcagaaacactcttctcaatgcaattcaataccatacaagtttaacttgccacgggctttgcaatgactttcttaacggcttcagcataagtcctgtgctgataggtgagagttgattcaagcaggtcccaaagtgaggttttaggattccagccaagctgcctattaattatggtcatgtcaggaattctcttgtcactatcatcatatccctcaccataaaattctttggagctcacatcaatagtaggtttttccagaggtgcttctccacttacctttgaataaacctgagtcatcatttcagcaagctgcctaactgtaacctcattgtttgggtttcccacattaaaaatatgtccattagccctggcgggattttcaatcatcaataagacagcttcaatagcatccttaatatacacaaaagtcctctgggaatggccaccatccacaagcttgaggg

SEQ ID NO: 228507 - DNA, 559 bp, Glycine max
caaagaggctaaccttcgacgaaatccagagcaagacctacttggaagtgaaggggacaggaacagcaaaccagtgcccaacaattgatggtggattggactcatttgccttcaagccggggaaatacaatgccaagaagttgtgccttgagccaacttcattcacagtgaaggccgagggtgtggccaagaatgctccccttgagttccaaaacacaaagctcatgacacgtttgacctacactctggatgagattgagggaccctttgaggtgtcttctgatggcactgtcaagtttgaggagaaggatggcattgactacgccgccgtgacagttcagctaccgggaggcgaacgtgtgccctttctcttcaccatcaagcagttggtggcatcagggaagccagatagctttagtggggagtttctagtcccatcctaccgtggaagctctttcttggaccccaagggaagaggtgcttccacaggttatgacaatgcagttgctctgcctgctggtggaagaggagatgaggaagaacttgccaggaaaacaat

SEQ ID NO: 228508 - DNA, 524 bp, Glycine max
gagctcgaaaactcacacacaccatcaatttaaaccttgaattttaaacattgtaattggaggtcgatataatatacaaccatgacagtactctcagtagtgctaggaaagttgggtcaagggataatgcagcaacaccatgcatgaagttactaacaaaatctgagccaacaaacaaaacagaaaacaaaacactctatgactcaagctgagcataccagatgccctggatcttgacatcctttggagcctttgctcccaaatcagtgtcagatggttgaacactctcgaacacaccgataacctcacccgtctcaggcttggtcttggtgacactcaaggtgattttgcccttggatgatgaggcacttttattgttttccttggcaagttcttcctcatctcctcttccaccagcaggcaaagcaactgcattgtcataacctgtggaagcacctttttccttggggtccaagaaagagcttccacggtaggatgggactagaaactccccactaaagcta

SEQ ID NO: 228509 - DNA, 624 bp, Glycine max
agccctcagaacacctttgtcccaggactcattgatctggccatcaaaaggaatagtttgattggaggagatgactttaagagtggtcagaccaaaatgaaatcggtgttggtggatttcctagtaggggccggcatcaagccaacatctatagtgagttacaaccatttgggaaacaatgatggcatgaatctctcagcccctcaaaccttccgctcgaaggaaatttccaagagcaatgttgttgacgatatggtcaacagcaacgccatcctctatgagcctggtgaacatccggaccatgtggttgtcattaagtatgtaccttacgttggggacagcaagagggccatggatgagtactcttctgagatattcatgggcggaaagaacacaattgtgttgcacaacacttgtgaggattcactgttagctgctcctattatcttggacttggtccttcttgctgagcttagcactcgaatcgagtttaaagctgaaaatgagggaaagttccactcattccacccagttgcgaccatcctcagttacctgaccaaggccctctggttccaccgagtacgccagtggttatgcactgtcaaagcagcgagctatgctgga

SEQ ID NO: 228510 - DNA, 534 bp, Glycine max
acttcgataactttatattattttacatgcatgcatagcatagatagcctgctctcaaattagtcagcaggaacaaagatagagagatccaacgatctttaaatttcacatttgccataaatatataacagaaaagagggtatgggatatgagttaagttttgatctcattcaactacagtatcccaaaccattactcttaagactttgaacttcacttgtactccaggatcatgttgttctcaggagctaatccaacacaagcccttaggatgttttccagcatagctcgctgctttgacagtgcattaaccactggcgtactcggtggaaccagaggggccttggtcaggtaactgaggatggtcgcaactgggtggaatgagtggaactttccctcattttcagctttaaactcgattcgagtgctaagctcagcaagaaggaccaagtccaagataataggagccgctaacagtgaatccttacaagtggtgtgcaacacaattgtgttcttttcgcccatgaatatctc

SEQ ID NO: 228511 - DNA, 422 bp, Glycine max
cctaattttgtgtgtgtggacagttttgcatttggagctgccactcgctatcttcaaatccccaaagaaaagtgttgtgtccccttagtccagtctgtgtacaatggtgaggaacactacatgcagggtgaaactagaggagatttgaggacttgggatgatgcactaaggaaaagcactcaagaattccaacatctatcttacaatctctttacctgcaactgccactcgtttgttgccaataatttgaacaagttgggttttctgactggtggatggaatgtggtgaatctggcaattttcattttattcaatggacgttgggtcagcaaagcatctatgcttcgatctatcttaccatttgtggttgtattttttcttggagtcacattctggggcttcaccttcctaaagtttggttc

SEQ ID NO: 228512 - DNA, 562 bp, Glycine max
accacaagaacaagcctttaacatttagcaacaaaatttatctgaatacaaagtatatggttaattgggtcacttccatcacttcgaacgtattacagttttatacaaagtagaacaagagaaacagatactacaactgaatcaggttcttgaaacaataagtaccaagaaggaaccacccaataagaatggaagtgaagaagaaccaaaactttaggaaggtgaagccccagaatgtgactccaagaaaaaatacaaccacaaatggtaagatagatcgaagcatagatgctttgctgacccaacgtccattgaataaaatgaaaattgccagattcaccacattccattcaccagtcagaaaacccaacttgttcaaattattggcaacaaacgagtggcagttgcaggtaaagagattgtaagatagatgttggaattcttgagtgcttttccttagtgcatcatcccaagtcctcaaatctcctctagtttcaccctgcatgtagtgttcctaccattgtacacagactggactaagggacacaacactttttttggg

SEQ ID NO: 228513 - DNA, 238 bp, Glycine max
ccggcgtcgccgccgatatcttccacataaacaccagatctgaggtagtggggtaccaaggtgatgaagagcttggaaaagctttggagggtgccgatgttgttataattcctgctggtgtgcccagaaagcctggaatgactcgtgatgatctttttaacatcaatgctggcattgttaagacgctgtgtactgctattgctaagtattgcccccatgcccttggtaacatgataag

SEQ ID NO: 228514 - DNA, 467 bp, Glycine max
agataaaaagcaaaatactctaataatatacgtaataaaaagtggcattatggaataataatatctaggagaaaagacaaactaacatatgtataaaactagcaaatgcaaggaagttacaaaacactacacccggctaaaattgcattaattcagtcagcctaaaaacaagtacaaacttctgaataacaagaaattaaatgacctaaaaaatgcacctacagagtccatacatattctggtgcatctttccttttcccagccaatgtacgatacaaatacatcttctctaccttctgcccatcttccagactacaatcttcttgctcgttttcattgaagatctccacattcaaccttggcatcttcttggctagcaacttgcaggctccgacagtcacttcacaggacgacattcaaagggatcgcattgtttcatacttccctacgttcgtcagaagtgccat

SEQ ID NO: 228515 - DNA, 586 bp, Glycine max
  unsure (1)..(586): unsure at all n locations
caacacctcagcgtcactgtaccagttggaaatggagacaataacagagaacggatcagatggtgtgagtttggcaagaaatacatccaacaacgcccgtcgagggttgccaatgatccaaacaaacatgaagccaacggattcggaattccaagtgtgccacgacgacagcaccccgccggtcagagcccaaaccattcacgagctccattctctgcagaagaaaaagtcaaccccttccactcccctctcagcaacgcaaggccccttcgccactgtttccgatgaggaacgccagaaacagcaactccaatcaatcagtgcgtcgttggcgtcgttgacgagggagtcagggcctaaggtggtgaaaggagacccagccactaaggcagagaaggggacacatgttcatcaccatccgcaaccacattactttgcttcacggcgtttgatgtcagtgacagtgcgctcaaattcacccacgtnctctacaatctctcccccgctgagctgtatgagcaagcgattaagcacgagaaggatcattcataatcgcaacggagcgttagctacacttctgagcaaa

SEQ ID NO: 228516 - DNA, 463 bp, Glycine max
cgctaaataggaaatgctctcatcagaatataggaccagcagagacaatctcttcagtcaacttctgatcccctcctatcttgtaggtcgtgaatccatcaaaattcttcttgaataagcttgctagtttcaagcgtgtatcttgataggccttcttgtcagaccaagtattcacagggtccaagatttcagaagggactccctctagtgctgttgggatctcaagcccaaacacttcagtcttagtgtactgtgcattcaaaaggctcccagagtgaatagcatcaatgattttcctagtatacgctaacttaatccgattgcctaatccataacttcctcctgaccagccagtattgacaagccatccagtagccccatgcttctgcatcttttggctagcattgctgcatatttggtagggtgcatcattataaacgctgccccgaaacaagcagagaat

SEQ ID NO: 228517 - DNA, 524 bp, Glycine max
  unsure (1)..(524): unsure at all n locations
caattgttggagcagcagtggctgcattttaccaccaatacatccttagagcagcagctatcaaggctcttggatccttcaggagcaacgcttaattaattaatcaattaagctagctaccttgattaatttgccaacaagggctatgcatggtgtttcccccgaagaataataatttctatgttgaggagtgctagtgatctgtctatgcagttccctaatttaggctttttcgtcttttcctctcatcagctacagttgttgggggtgtttggaagagaaggccaaaaccatgggggcatgcatcaaattgtagataagcatgcttgtgtcaagggtgtattttgtatcccttttgtgtcttttctttttctttntcttntttttaatttccatgtatgtattccttgagtgttccttttctgtcctgtgcatccttagtcatttctcattntactcttcataattaagtactcatcttctcttggttattaaaggcttattaatcatcatctatggatggt

SEQ ID NO: 228518 - DNA, 552 bp, Glycine max
  unsure (1)..(552): unsure at all n locations
cgacgccgtctacggcctcttccagtgccgcggcgacctcaccaacgaccagtgctctcgctgcgtgtcgcgtgcggttacccagcttggcaccctctgcttcgcctcctgtggcggcgcgttgcaggtcgacggctgtttcgtcaagtatgacaatgccaccttcatcggagtcgaggacaagacattggtcaccaagaaatgtgggccgtccgttgggttgacctccgacgcgttgacccggagggacgctgtgctggcgtatttgcagacgtccgatggggtttataagacgttcaggacgagcgggtactggggatttccagggtgtggcngcagtgcaccggggattntgagtcccagcgagtgccaggattgtctttctgatgccatccaacggttgaaacccgagtgcgggcccactaactgggccgatatttacttggctaagtgctacgcgcgctacntcgaangtgggactcgctcgcgtggtaataataatgatgatagcaatcacaatgatgatgagatcgagaagacactcgctatact

SEQ ID NO: 228519 - DNA, 581 bp, Glycine max
  unsure (1)..(581): unsure at all n locations
cctttctcctaaaacatctccagtgggttcttcttcttctattacaacaacgtcgtccaagaccatgaccatggccatggccacgatcctgctcctgttcacggtcttcgcggtttcatcggccctagacatgtcgataatctcgtacgacaacgcccacgccgccacgtcgcgcagcgacgaggagctgatgtccatgtacgagcagtggctagtaaagcacggcaaggtgtacaacgcgctcggagagaaggagaagaggttccagatcttcaaggacaacctgcgattcatcgacgaccacaactcccaagaggaccgaacctacaagctcggactgaaccggttcgcggatctcaccaacgaggagtacagggccaagtacttgggaccaagatcgatccaaccggaggctcggcaagaccccgagcaaccgatacgcgccacgtgtcggcgacaaactacctgaatcgnttgatggaagaaggaaggtgctgttccttcagtcaaagaccaaggaggctgtgggagctgctgggcattctcagcantcggtgcagtggaagggataaantagatag

SEQ ID NO: 228520 - DNA, 399 bp, Glycine max
gggggcaaatccaaaaaaggctgcattggcacatagtctacataaccggggaaactaacagcaatcaaatttgttccccattgggaatgggaatttgaatacaaatccagggcatcaataatataaccctatgtccccagccaatttttgactgaaattggatccaaaatagtatcaattgggatcataaaaaaagggcccaaaaaaatttatgtgaaggtaaaggggaagggtatcaccgggggtttaaattcttgggctttaatttacttaataatgggctccttcctgcacgttcacatttcctttatctgcttaagcactgctgaccttgttcttacccccaaaggtccaatggggtttagccggagtacccctcaatgccttcactccgaaggg

SEQ ID NO: 228521 - DNA, 598 bp, Glycine max
ccccttctctctctcactgtccggttctccgatcgccgtctttgccctgcccattcctgatcaatatgtctcgaagatatgatagccgtactacaatcttctcccctgaaggacgtctttaccaagtggaatatgctatggaggccattgggaatgctggtactgcaatagggatcttgtcaaaagatggggtagttctggttggtgagaagaaagtcacatccaagctgctgcaaacctcaacttccaccgagaaaatgtacaagattgatgatcatgttgcatgtgccgtggctggaattatgtctgatgctaacatcctaatcaatactgctagagttcaggcacagcgctacacgtatgcttaccaagagccaatgccggttgagcagttggttcaatctctttgtgacactaagcaaggttacacacaatttggtggtcttcgtccatttggagtctcgttcctctttgctggctgggacaagaattttggctttcaactttacactagtgaccccagtggaaattatggtggttggaaagctgcagctattggtgccaacaacccagcagcacagtcatttctgaacaggac

SEQ ID NO: 228522 - DNA, 487 bp, Glycine max
aaaacaaatacgaactaaaaagcaattagcattacaccaagatacacaatgcttaaagtttgaactttgaaataaatttgggacatgggacactttctgacgtctattatgaaaggaagaacgttcaaatgcactgtataggcataattaaacgggatattacatgaaactagaagctaagcagtgtctgctgccggttgagtcaccccaaactttaccaacagcttaatcaggttttttggggagcaaacttgatacttgacttttccagagggtgagagaaatacctttgcaagctcaagcttttcagaggtaaaacttgtgctggccatagttttacttagcaccttcagtgcaagttgaactgcttcttcccttgggatatcatccttgtagtcctgtttcagaattgactgtgctgcctggttgttggcaccaatagctgcagctttccaaccaccataatttccactggggtcactaatgt

SEQ ID NO: 228523 - DNA, 609 bp, Glycine max
agtttgtagaatttaaaaccatgtcacttgaagtgaaaatgccaacagtaaataaccatttgccatctttattggagcttaatgagaatgaggaagaaaaagttcctgagacacccacttctttggagagtctacatcagctacacaagaaactacttctccttgagaggaaagaatcaggaacagaagagtcattggatggaagtgtgataagtgatatagaaggtggtgaggtaaccattgaaaagttaaaatctgcattgaaatctgaaaggaaagccttaagtactctatatgcagaactagaagaagagagaagtgcatctgctatagcagccaatcaaacaatggcaatgataaataggcttcaagaagagaaagcagcaatgcagatggaagccttgcagtatcaaagaatgatggaagaacaatctgagtatgatcaggaggctctgcaacttttgaatgagctcatgatgaagagggagaaagagaagctagagctagaaaaggagaatgaagtatatagaaagaaggttcatgaatatgaggtaagagacaagctgagtcacttgtatacctacatgtattcattgtattatatatata

SEQ ID NO: 228524 - DNA, 581 bp, Glycine max
ggagctccaaaccagacgggactactctctagctccgtccacgtgccgtcgtacgctctgaaatcttccgtcgtctctggcatctccgctgccagccttctgatctgtcataccaaatggccaacagggttcaaattcctaccaacaattcagcactcattgctatgattgcagatgaggatactgtagttggatttttgttggctggagtgggaaatgttgacatacgtaggaagacaaattacctcattgtggattcaaaaacaaccgtcaaacaaattgaggatgcattcaaagaatttacaacaagggaggatgttgcaattgtgctgattagccaatatgttgcaaatatgataaggtttttggttgatagttataacaagcccgttcctgcaatacttgaaatcccttctaaagatcatccttatgatccggcacatgattcggttctgtcacgagtgaagtatctcttcaataccgaatcagttgcatctgggagacgctgaattcaccttttgcagttgcagctttttgggggtggttgtgtttttctttgtacaatatggataataatcttt

SEQ ID NO: 228525 - DNA, 467 bp, Glycine max
  unsure (1)..(467): unsure at all n locations
gaagaaaaaaccgacacaaagatctagtcctagctagaatcaaacaggggcgatctcaccttcaagaacacatcgccatggcaaggaacttgcttcttgtgctttttgcagtagccaccctcctccatggctcagcagcccaaaccagacacatggtcggtgatgccacgggctggatcatccctgctggcggcgctgccacctacaccgcctgggcttccaacaaaaccttcaccgtaaacgacactctcgtgttcaacttcgccaccggccaacacaacgtggccaaggtaacgaaatcggctttcgacgcgtgcaacggcgggagcgccgttttcaccctgacctccggtccagcgaccgtgacccttgacgaaacaggggagcaatactacanttgctncgtnggatcacactgttccgctggccagaaactggcaattaacgttacagagcttcttctaccg

SEQ ID NO: 228526 - DNA, 432 bp, Glycine max
agaaattaaattaaagctaactttattgtcatcctcaaaaaaataagaaaaaaactgaattcatgaaacacaatcaaagagcgatgatgatgactcgcaagctcctgactagaataatctcgtggagtatctaatagaaaaaagtggcggcaactgaaagcagggtggcaaatactccaacaactccaagagatgcagcaccagagttctgtgggggaggagtgacagcaccggctggagaagggctagaaggagtggtggggggggccgcggcggaaggtggtgtggcggcgctgctgccggtgacgttgatggcaagcttttgaccttccaaacagtgccctggaattccacagatgaagaaatgttgaccagatttgttgagggtcactttcgcatgcggagtggtgaaagtggcaataggagaagctg

SEQ ID NO: 228527 - DNA, 551 bp, Glycine max
ggaaggatgagtactccaaatggctggtgggaagtcagagaagtctccttgaggtaatggctgagtttccgtcagcaaaaccaccgcttggtgtgttttttgctgcagtagcccctcacttacaacctcgttattattctatttcatcctcgcctaggttttccccgcaaaaggtgcatgtaacttgtgccttggtatgtggtccaactcctactggaagaattcacaaaggagtatgttcaacctggatgaagaatgccattcccttagagaaaagccgtgactgtagttgggctcctatttttatcagaacatcaaacttcaagttaccagctgatcattccattcctattattatggttggtcctggtacaggcctggcacctttcaggggatttttacaggaaagattggccctcaaagagggatgccgtcaacttggtcctgcattactcttctttggatgtaggaatcgacaaatggattctatttatgaggatgagctaaagattctatggaaccaggtgctctgtcagagctgatagtcacat

SEQ ID NO: 228528 - DNA, 497 bp, Glycine max
tccttttttttttttttttcatcaactagaagaattattacattaatcgagtgcttattcattgccaattcctacaatttgatacatggccattggaaataaactagtgcgacctatacgtattaaatcatctatgaagctatctatcagcccccctaaaaataatcctagttcaaatatcatgacaagagagaatatctaggcggagaaaaatataagaaaaccacacaaatgtccacgaaaacgatttgctttctcaaggaaatttcagccttcatcattggtgtcccaaaactccgtgatcgaagagtatcaaatattcttcaaccaatcttgaacttaacagaccaaattgcaaggaaggcacaacccataaagatgaataatcagaaaatttaccagacatctctaagataacgtccatccatttggagttttttaactatagcctttgcctttgaagagtccacattttcctgctgctggacaatggtttg

SEQ ID NO: 228529 - DNA, 570 bp, Glycine max
cacacctcatcgtttctctctctagatctctgtttcttctttttctccaaccttcgtttcaccaccacacttacattactttgtcgaaatggctccaccaattgagaccccaaacaaggtttccagctatcaacagtccccaaaccctcgtcttaacgagaggattctttcatccatttccaggagacacgttgctgcacacccgtggcacgatcttgagataggacccgaagctccaaagatcttcaactgtgtggtcgaaatagggaaaggaagcaaggtgaaatatgaacttgacaaaagaactggacttattatggttgatcgtatactttactcatcagttgtttatcctcacaactatgggtttattccacgtactatttgtgaggacggtgatcccatggatgtcttggttattatgcaggagccagttcttccgggttgctttcttcgggccaaagctattggtctcatgcctatgattgatcagggtgagaaagatgacaagataattgctgtctgtgctgatgatcctgagtataggcattacaatgatatcaaggagct

SEQ ID NO: 228530 - DNA, 477 bp, Glycine max
gttgtaaaaatgctttatataagatgtaagaatcccatatgctccaaatatttggtagagtgagctacaataataaaactttgatattaattaatgaaaaaatcattcactcaaaactaagcacatgtgtagaatatgcatgttgcagccctgagaccaatgcacacgcgacaaggatagaaagcttttgttattgtcataatcgtaattataatagcagcctttgaatacatgtaatgtatgtcttcacaaccaaacaaaattccaagcacccaggaatcaacactaccgccttaagttctccacaacggatttcgcatataagggtatggaatgcttgatcgctttataagcagctgaggcaggaagaaagtcgttcactgcaacttccttgttctcattctttttgtcatctttaaagaaacgacgaattttagcttaacggggtggaagaagctccttgggatcattgtaatg

SEQ ID NO: 228531 - DNA, 570 bp, Glycine max
  unsure (1)..(570): unsure at all n locations
ttcttgaggagaagaattggccgccttttttcccaataatccatcacgacattgctaatgaaattccaattcatcttcaaaaattgcaatatgttgcatttactacactgttaggattagtgttgtgccttttttggaatgttatagctgttactgcagcttggattaagggtgaaggcgtaaaaatatggtttcttgccattatctacttcatagcaggggtccctggagcatatgttctgtggtatcgcccattatatcgtgcttttaggaatgaaagtgctttgaaatttggatggtttttcatgttttatctgcttcacataggattctgcatcttagctgcagttgctcctcctatagttttcaaaggcaaatccctgacgggcattctggctgccatagatgtgctgggcgaccatgctttgattgggatcttctacttcattggatttggattggtctgcgttgaaactatgatcagcatttgggttattcagcangtatacatgtactntccgcgcagtgggaaggccgctgagatgaacgggaggccgcatgggagcactg

SEQ ID NO: 228532 - DNA, 492 bp, Glycine max
ggtgaaacaactttagaccgcaaaattcaaaatccagaagtggctagttttttggttcaccaaaagcctggtacaaaatcttaacaaatgaaaacaagtggctactcgccacaatgataaggcaaatgtaacaaaaaaaaaaaaaccagtaatatatgatatgtgaaaaacaggtaaccgatcctaataaatgcttataattgaagtttgcatccaatgtggatatgaagagggatatcccgacctctttcgggccttgcattatatgagacctagacaagagactatgtccttgaaatgggggggatcattttactaggaagatgcttcatgatggatgcagtgcccacacgatgcagtgccaccactgaatgcccgtggtgggagagacccttggacttggcatgttgcatggcgaattctattgcttcttctgttgtttcagcatgagaagctctagcagaagctgcactcaacacggggaaccaaccc

SEQ ID NO: 228533 - DNA, 452 bp, Glycine max
  unsure (1)..(452): unsure at all n locations
atcgtgaaaaccttccagtccgaaggcatcctcggcttctacagcggcgtgtccgcggtcgtcgtcggctctaccgcctcctccgccgtatacttcggcacctgcgagttcggaaaatcgttcctctccaagctcgaagcgttccccgccgtgcttatccctcccaccgccggcgccatggggaacatcatgtcttcggcgatcatggtcccgaaggagctcatcacgcagcgaatgcaggccggcgcgaagggccgctcgtggcaagtgtttgctgaaattattcaaaacgacggcgtgatgggcctctatgctggttactccgcgacattgctgagaaacttacccgcgggagttctgagttactcttctttcgagtatttgaaagccgcggtgcttcagaagactaagcagagttacatgggaaccgtgcannagtgtctgggtggggc

SEQ ID NO: 228534 - DNA, 559 bp, Glycine max
cagcaaaatcactttattgtaaccaagataagaaacatttcagcacctacattttcattttgtttatgccacggtagtagtacattttccataacaaaatactccttatctactgaaacattcaacatggaagtaagtaactgtaattcaaaacccaaataaaaaagaagcaataaagaacaaaagcacaaactcaaccagaggagacagagacttcacgcaactccttactcctaagatactcccgcaaaatggaaagcctggccgtctcgaaagcaaaatagcccaacgccgaaaaacaagcactatgcaggacccggggccccattccacgggtaagccctacccacccttcctccttcaaaatctgcttcaccgtggccgaaaccccgtcgtacataaccgcagcaaccttgctcaccccctcgccccgaacctgcgtcatcaacctcgtcttcaccacatccaacggcgtcgtgagcgacgccgatatcgccccggcgagggccccacacagaacactctgcaccggttccatgtaactctgcttagtcttctg

SEQ ID NO: 228535 - DNA, 559 bp, Glycine max
gtcttctacgaatgattgaaagtgaaagaaaaggtgaagcagtggatagaactcttctaaaccatcttttgaagatgtttactgctctgggaatttatgcagaaagctttgagaagccattccttgaatgcacatctgaattttatgctggctgaaggcgtgaaatacatgcagcaatcagatgttccagattacttgaagcatgtggagataagattgcaagaagaacatgaaagatgtttgatctacttggatgcaagtactaggaagccattgatagcaacggcagaaaagcaacttcttgaacgtcatatacctgccattcttgataagggcttcgcaatgcttatggatgggaatcgtattgaagacctccaagaatgtacttactcttttaagggtcaatgccctcgagtcactgaggctggccattagttcatacatcaggagaacttggtcaggcatttgtttgggatgaggagaagataaaatatggcttcatccctctgggattaaggcttctctgacacacatgggagaaagcttttcaagatgagca

SEQ ID NO: 228536 - DNA, 554 bp, Glycine max
gttgcatatggtgcggctgttcaggctgcaatcttaagtggtgagggcaatgagaaggttcaggatcttctcctcctggatgtcacccctctgtctcttggtttggagactgccggtggtgtgatgactgtcctgatccctaggaacccttccaattccaacatagacggaacaagttttctcaacatactctgacaaccagcctggtgtgcttatccaggtctttgagggtgaaagagcaaggaccagagataacaatttgctgggcaaatttgagctatctggcattcctcctgcacccaggggtgttcctcagattacagtgtgctttgacattgatgccaatggtatcttgaatgtctctgccgaagataaaaccactggccagaaaaataagatcactatcaccaatgacaagggctagattgtcaaaggaagatattgagaagatggttcaagaggcttgagagtacaagtctgaggatgaagagcacatgagaacgttgaggcccaaaacgctctggaaaactatgcatacaacatgagggacaccg

SEQ ID NO: 228537 - DNA, 570 bp, Glycine max
ctcgagccggagagagagagagagagagaagagatatacactgccaagaagaagaacatgaaaattcagtgcgatgtgtgtgagaaagccccggcaaccgtgatttgctgcgcagatgaggcagctttgtgtgccaaatgtgacgttgaagttcatgctgcaaacaagcttgcaagcaagcaccagaggcttctccttcaatctttatctaacaagcttcccagatgtgacatatgtcaagataagccagctttcatattttgtgttgaggacagagcactcttctgtaaagactgtgatgaacctattcatttagccagtagcctttctgcaaaccaccagcgcttccttgctactggtatccgggtggctttgggttctaattgcaccaaaggcaatgaaaaaggtcacgtggaaccatctaaaccaaaagcacaagaagttcctgcgaaaattccttctcagcaagtgcctagcttcacatcctcttgggcagttgatgacttgttggaattaacagacttttgatcaccagacaaagttcagaaagcatcccttgagtttggagaa

SEQ ID NO: 228538 - DNA, 526 bp, Glycine max
cgagttagatagagatcatggaaaaagttggggtaaggctggtggtattgctgtgtttcattgtgacggcggcgatggcccaaaactgcgggcgacaagctggtgggcagacatgtggcaacaacctatgctgcagccaatacggttggtgtgggaacagcgaagatcattgttctccctctaagaactgccaaagcacatgctggggcagtggcggtggcggaggaggcggtgaaagtgcgtctaatgttcgcgccacgtatcataactatttaccagagcaacacgggtgggacttgaacgccgtgagtgcttattgctcaacttgggacgctgccaaaccttactcttggcgcagcaaatatggctggactgctttctgtggccccgttggacctcgcggccgtgatgcttgtggaaaatgcctccgggtgacgaatacagggacgggagcgaacataattgtgagaaatgttgatcagtgcagcaaccgagggttagatatggacgtgggagtgttcaatcg

SEQ ID NO: 228539 - DNA, 524 bp, Glycine max
aatgtcattaataaggataagatatacaaaatcccgaaccccacttattgatgattacttaggtaaagaccacgatcgatgtttattaattaaggagctagcatcgaggatatgtggagtaaattaggtttagtaagttgcatattgttgcaactaattaatccccacagttgacaaactgatagttaacaatgagatgcccctgttgatatcctcttccatctgtgtctatccgattgaacactcccacgtccaaatctaaccctccgttgctgcactgatcaacaattctcacaattatgttcgctcccgtccctgtattcgtcacccggaggcattttccacaagcatcacggccgtgaggtccaacggggccacagaaagcagtccagccatatttgctgcgccaagagtaaggtttggcagcgtcccaagttgagcaataagcactcaccgtgttcaagtcccacccgtgttgctctggtaaatagttatgatacgtggcgcgacattagacgcacttt

SEQ ID NO: 228540 - DNA, 556 bp, Glycine max
gatcacaatacaatgcaagagggattttctagtgacgatagtgaaactgggaatcctaaagatcttctttttgagtattttgatcatgatcctccttatagccgcgaacctttgtctgacaagatacttgatcttgcacgcgactatcctagcctcaagtctctaagaagttgtgatttattaccggccagttggatgtgtgtagcatggtgagaaaacttgatctattgctttagagctgtctcttgtgccaactaacgttgttgtaatggcatctttcaggtatcctatatatcgaatacccaccggtccaacattaaaagatttagatgcctgctttcttacataccatacactccatacacccttgacaggaaatggaggtactcaggccccaattttggtttatccaaatgacattgatggcggtgtgccaaagatttccttaccaacttttgcaatggcttcctataagttaaagggatctatatggacacaaaatggagttagtgagagtcaagtagtaaattctctcttgcaggctgcagataactgg

SEQ ID NO: 228541 - DNA, 510 bp, Glycine max
cggcgaatcatgtaggcaattaggcagaccatattggcggttcgacgagctcactgagctgagtacgcccttgtcgtcctttttttatatgggcttctcatgctttcaacttcgcacatatacacgctaacaatgaccatttgaaaaccgcacatgttcgttcagaagacgaaagtagtagacctctaaacactagcgttatgttcagacactctaatggtgatgatctccttgaccatcattatctccatgaccagactcgggaccaacctgcatataagccttgtgaagagcagcagggtcctcacgagcctgtgagaactcaccctttttgacacggtttggcgcatgccattgcacgaaggccttctatggatacatgaggtcaaacttatgaacaatcctggagaacacttgatccacactagtggagctcgaagtgatgcccacattcgatggcacttggcatggttggcttcaggggcaactgtttggggctgttagattata

SEQ ID NO: 228542 - DNA, 605 bp, Glycine max
  unsure (1)..(605): unsure at all n locations
gacgatgctgcgcaacaagttcctcctatacctcctcctccctgcgttgaagtcctcgcttctgaggttccttcatccctcaaacacaacgtggactctgtaaatttagatggagttattttgttaaaggggcgggtgaatacccagcaagtttttggtttgtccaactccgatttagttcccgggaaatatgaaggaggacttaagctgtgggaaggttcacttgatctaattaaagcccttcgttcagatataaaaaatgggcttatctcatttgctgggaagcgagtattagaggtaggatgtggtcatggactgcccggaatctttgcatttcttgagggggcagctgctgtacattttcaagacttcaatgctgaggtcctacgttgcctcacaattcctaatttaaaagcaaatctttctggagaatctcaaccatcatcatccaactcgacaatttgtgacgaggcagaagttcgcttttttgctggcgactggagtggaatngataaactgctccctcatgttactacaagatgcaaacataatcaaagggatgggttatgacttattcttatggcagagacagttactcaatcaca

SEQ ID NO: 228543 - DNA, 584 bp, Glycine max
  unsure (1)..(584): unsure at all n locations
gtccttgtatctgctggtaggactccattcactgctggacttggattggacaagataggtgttgaaactgacaagattggacggattttggtaaacgaacgatttgccacaaatgtctctggtgtttatgcaattggagatgtaattccaggcccaatgttggcacacaaggcagaagaagacggtgttgcttgtgttgagtacatagctggtaaggtgggccatgtggattatgacaaagtccccggtgttgtctatacaatgcccgaggttgcatctgttgggaagacagaggagcaggtgaaggaacttggagttgaataccgtgttggcaagttcccgttcatggctaatagcagagctaaggcaattgacaatgctgaaggactggtgaagatattggctgaaaaggagacagacaagatattgggagtgcacattatggcacccaatgcaggagagcttattcatgaagcagcaatagcactacagtatgatgcatctagtgaggacattgcacgtgtgtgccatgcacatncaacaatgagcgaggctgtgaaagaagccgcatggccacttatgac

SEQ ID NO: 228544 - DNA, 529 bp, Glycine max
aatcagaaccgtcccacactcccattaagttgtcttcaccctgtcagaattacaatattgtcccagagagaaggggagatatatatattattcaacaaggataagaacaacacaatcattcctcttattatgcaaacaagtaaacaaggggctaatttgcatttaaaaacctgaatctaaatttaacacaggatgtatcatctccaagtcattgtaaaattcttggacaaaaatgaaaacaagaagtagcaaccggctccttttaaatgtgaatgggcttgtcataagtggccattgcggcttctttcacagcctcgctcattgttggatgtgcatggcacacacgtgcaatgtcctcactagatgcatcatactgtagtgctattgctgcttcatgaataagctctcctgcattgggtgccataatgtgcactcccaatatcttgtctgtctccttttcagccaatatcttaaccagtccttcagcattgtcaattgccttagctctgctattagccatgaacgggaa

SEQ ID NO: 228545 - DNA, 494 bp, Glycine max
caattgttaatggtgcacgaggatcaggagcaacaattcgtgtttttcaacataatgagccatctcatctagaagaagtgttgagagaacaaattgctgagggacaacctaggacacataggccttggaagaagataatggttattgtggaggggatatacagcatggaaggagagctttgcaaacttccagaggtcatagctgtatgtaaaaaatacaaggcttatacatatttggacgaagcacacagcattggagctgtgggcaagacaggaagaggtgtttgtgagctcttgggtgtggatactgctgatgttgacattatgatgggaacattcaccaaatcttttggatcctgtggaggttacattgcgggatctaaggaccttatccaacacttgaagtacacttgccctgctctttatgcaacttcaatttcaccaccggctgcacaacaaataatttcatccataagagttattcttgggagagat

SEQ ID NO: 228546 - DNA, 548 bp, Glycine max
ctcatcacttactggaagccttgttgtgagtaagagaaaaggcttcctgcaccgagcacaccaacttgatacctctgattctttctttgcttagaattccacagaatatggagactgttcttttcaatcactccccacctttggaattcaaagggtttgagcaaggaggaggaagactcattgctagggcaagtggaaatatggaggtacatgacatgcttcacggactccgtggccttgaaagctgtcatagagcttcgtatagcggacatactagaccgttatggtaaaccactatccttgtcgcaaattgtggagaacatagaagacgcaccctccccagatgcctctcttctccagagagtcctgagagtgcatggtgcgcagaaagatcttcagtgcacaagaatcagagacaggagaaaccctcttcggcttgacacgagccctcgagtggatccttcgcgacacgaaaatgaccctagcacccatgttgctgctggagaaccacccaattcacctgaaccctgcgcactacatcagtgaga

SEQ ID NO: 228547 - DNA, 587 bp, Glycine max
cacaccaaaggatctgattcattaaaagcaatagattcttcacaaccacacaccactcacttgacatatatggaacacatacataatccatatagcattacttagtgggggggcatttcttacttttatttaatgcacaaacataacaagggcaggaaggaaaaccacaaaattaaaacgaagatcatatagctgttaataataacaacaacacatgcaacataaaaaccacatgcagttgtggtagtggcatcttcttcagattggaaacgcctcaatgatggaagggagagcgttgatcttgatgatgttgtaacgcgcgaaaccggtttccttgaacagccacttccagttctcttcggtcctctctttgccaccggcgttgtgagcgagaagcatcatgtcgaatgcgatgccaacgtctgtgaagagttcgttgccttcgggtcgaagaacgtgatccacgattatgacttttcctgtcttctctggtattgcctttctgcagttcttcaagatcttgatgcagtgctcgtcgctccagtcatgcagaatccacttcatgtaaatagcatcagcactaggaa

SEQ ID NO: 228548 - DNA, 561 bp, Glycine max
  unsure (1)..(561): unsure at all n locations
aaacacattccatctattaagattttagagagtgaaaatggattggcaaagcatgatgggcaacctggacccattccaaagaacaatcttaatcctcgtcccactaacactactcctgctgctgttactatctcgtacccgtccaagacccgccctatccaccaggccctaagggcttcccaatcataggaaacatgtttatgatggaccagctaacccaccgcggtctcgccaacctggccaaacactacggcggaatcttccaccttcgcatgggcttcctccacatggtcgccatctccgaccccgatgccgcgcgacaggttctccaagtccaagacaacatcttttccaaccgccccgccaccatcgccatcagctacctcacctacgaccgcgccgacatggccttcgcccactacggccccttctggcgccagatgaggaaactctgcgtcatgaagctcttcagccgcaagcgcgccgtagtctgggcagtccgttcgcgacgaggtcgactccgnncgtcgngccgtcgccacagccgtcgaaacccgtcac

SEQ ID NO: 228549 - DNA, 512 bp, Glycine max
aaaagagagggcacaccacgcgcttggttggtacagcaatgagtcgcgtggaccttggagcggtgagtccgaacacgtcacccatgtccatctcacttggtttcattccatctggcaattcccacgtgaagcagtgaagaagatgagccaccgccaattcaagcgcgtagagccccaacaccattccggggcaggatcttcgacccgacccgaatggaatgaactcgaagttgctccccttgaaatcgggcacgcccggtttaaggaaccgggcgggcttaaaagtttcgggttcctcccaggaattcttgtccctcccaatggcccacgcgttgatcataacacgcgccttcctggggacgaagtagccgccgacggtggcgtcctccgccgtctcgtggaggaggagcggtatctgagggtggaggcggagggtctctttgagggcacatttgagataagtgagtttctcgaaatcggactcttcgacccgacggtccaggcccactaca

SEQ ID NO: 228550 - DNA, 499 bp, Glycine max
ctcgagccgcgctcaacaactgggccacccacttgagtgacccactccacacaaccatcattgacaccttctcatcctcctcttaagaagaagagtctttcttgtgcctcgtcactattactagcatattgtaaaagtcttttcttcttcggcttttggttgtaattagaacattttcacttagttggattagtagtacttgtgaaaaacttgtaacgtgaaattggagaggctaagcagaaatgcttctgcttgatgtttaaaaaaaaaaaaaaaaaaaaaaaaaaaaaaaaaaaaaaaaaaaaaaaaaaaaaaaaaaaaaaaaaaaaaaaaaaaaaaaaaaaaaaaaaaaaaaaaaaaaaaaggggggggcccccccctaggggcctcttcaccccgggaattaattcgggccgggtcccggagggggtcccacttttccttttgggggggcgttttaaagctgggggaaataaggggcaaagcggttcccgggggg

SEQ ID NO: 228551 - DNA, 560 bp, Glycine max
aaaagcaacaggaaaggttttggctactgagcttcctaagattggaaataaatgcaccgttctctatcctgcttctgcaaaggctagcaatgagattgaggaaggactttcaaaccgtggatttgaggttactaggatgaatacatatacaacggtgccagttcaacatgttgaccatacggttctaaagatagcacttgctgcccctgttgttacagtagcttcaccatcttctattcgagagttgatcatgtttggattcaatatgtcaattcgatgtaaaggggattcatgtgttaaacttgatgcgtccaatgactgtttcatactcactatcctgggatgctgtttttgtccctttgttaatcaagcgtcataatggctcctgtgcctggaagaatcttctttcagattctgagtggaacaattctgttgcatgcattggtgagacaactgctacaatggcaagaagtttaggtttcacaaatgtgtactatccagcacaaccaggcatcgaaggctgggtagaaagcattcttgaagcattaggttcctatgat

SEQ ID NO: 228552 - DNA, 579 bp, Glycine max
aaaaaaataatggttagaatttgtgattaaaaacaagtgcatgtataacaaactttgaaattaattacaaaaatatttatattttaatcaatgacgataagtgcactttatttcctaatatacactacactctccttactttattgaagctaaatgtatctttaaaaatactactactgaacagagagtatatccatccacgatgccaaatcattatattaatcttgcagcatgagagaaacagttgaaaacatctccaggttgctacaaagagctgagacctacctcaataattcatcataggaacctaatgcttcaagaatgctttctacccagccttcgatgcctggttgtgctggatagtacacatttgtgaaacctaaacttcttgccattgtagcagttgtctcaccaatgcatgcaacagaattgttccactcagaatctgaaagaagattctttcaggcacaggagccattatgacgcttgattaacatagggacaaaaacagtatccaggatagtgagtatgaaacagtcattggacgcttcaagtttacacatgaatcccctttacatc

SEQ ID NO: 228553 - DNA, 481 bp, Glycine max
gcaaacttcaagaagagcaacaattaggacaccgaatcaagccattctcattgcactccaaacacctgttcaacacctcttcatcctcatcaaacacctttctactcccactgcagttcccacacggcgcaaacctcacatccccacaactattaccaacaaaccctgctttggtccgtggcaacccttccagaaccttctccagctcccccacctcccacatgtgcttgatgacgtcagcaccccccacgtgccgcccccttataaaaatctgcggaagcgccacgtgtcccttcttgttgatgatattgttatgctctccaaacaacgcgctcatcaactccttacggtaattcgcgttcatcgaaatgtcgcgctcgtgaacccaaaccctaaatccccgaaatatcattcgcaccgagtagcaatcttcgttggttcttcgaatttcacgcaagcttgtgaagtacaacacgatccg

SEQ ID NO: 228554 - DNA, 556 bp, Glycine max
aacccccacccgaaaccgtcgtcctccgactccgacaccgacttcgagcccaccaaagtaaaacccaagcccacggaccaggcccagaagccccagccctcacccgcgccgcccaaatggggatccaagcgccctgcccagaacaacgcccctgccactgacccgaaacgcgcgaagaagaaattgaccaattcttcttccgccgctgccgcccacgagacggaggagaagtccggtggcggccaagcgaagttgtctcagagactcttcagcaaggaagacgaactcgccattcttaagggcatggctgagttcatttcgaagacgggccaagacccttacaagtacgccgatgccttccaaaatttcgttaagaattcgctctgcgtggaggcttcgagcaaccagatcaaggagaagatccgacggctgaagaagaagtttgaaactaaagcacagagagcgaagaaatgggaggaccctgagttctccaaatttcacgaccggactgtgtttgaattatcaaagaaggtttggggagaaggagccaatgggc

SEQ ID NO: 228555 - DNA, 333 bp, Glycine max
gaaatgctgaaaacgttgctgcacggtgggagatgcaagcagctcgtcttgaggcacatgtcgagcagatgttcgatggtctggatgatgctgatggagcagaagatgttccctttgatgaacttgttggcatgcagggtccagtttttcatttggttgaaaatgcatttacagtgctggctagcaatatgattttccttggtgttgtaatctttgtgccattttcattgggccgtatcttacttcattatctatcctgggtcttctcaactgctagtggccctgtgttgtcagctgtggccccaactggcagacccatttttttttttagca

SEQ ID NO: 228556 - DNA, 539 bp, Glycine max
gaaattctaaagcataatttggaagaaaaaagaaaatatttttcagatataattcttgaagttgaaaggagtgatgccgaggttcaggctgagggtgtatacaaccaaaggcttcagaatcttgctgtcactcttgataaggtaaggtatgttatgagatgtatttttggtgatccacggaaagcaccacctcctcttgagaaactcagtcccgaagcaactgtttcctttctctggaaaggagagggttcatttgttgaggagcttcttcagtgcataactcctcatgttgaagaaggcatcttgaatgatctcaagtttaaaattcatgctcatgatccttcaaattctggagatattcaaaaagagcttcgaaagtctctgttatggttgagggatgaggtccgaaatcttccctgtacatataaatgtcggcatgatgctgctgctgacctaatccatatttatgcttataccaagtacttctttagaatacggaattatcaaaccattacatcaccacctgtctatatcagtcc

SEQ ID NO: 228557 - DNA, 511 bp, Glycine max
  unsure (1)..(511): unsure at all n locations
gacttagtgaagtgggtgaggaaaggattcgatcaagaaagcccgttatctgaaatggttgatccatcgctgctccaagaagtgcgtgttaagaaagaggtgctggctgtgtttcatgtagcactgtcttgtactgagggagaccccgaggctaggcctaggatgaaaactgtctctgaaaatcttgataagattggaacgtaatgctcgaacatgtgcagtgtgctagctctaggactcagcctgagactgcagtttacacaaaagatgcatttcaatctaacaacgcatttctgtgataacactgagaaggttttatgatgtgcatcaatatggtgctgcaaacctgatccttccatcttggataagcccctttacatttgttttggaactcgagcaatttttggagagctgtaattatcatggtctcacttacattccattctcattttattattntttggtacatatcaggaaattggtagatattttatttttttggtctgatctc

SEQ ID NO: 228558 - DNA, 565 bp, Glycine max
catttccttatctatcttcacctccatcttttaacagttcccctcgaaacttctgaagatgggtggcattgcattcggacgcttggatgattctttcagtttaacctcaatcaaggcctatattgctgagttccattcaaccttgctctttgtttttgccggtgttggttcagccatagcctatggtaagttgacatcagatgcagcacttgatcctgctgggttactggcagttgctatttgccacggttttgcactctttgttgcagtttctgttggtgccaacatctctggtggccatgtcaaccctgctgtgacttggattggctcttggtggccacatcaccatcctcactggcttcttctactggattgcacagcttcttggctccatcgtggcatgttttcttctcaactatgtcacaggaggcttgccaactccaatccacagtgtggcttctggggttggagctgttgaaggagttgtgaccgagatcatcatcacatttggtttggtgtacacagtgtatgccacagcagcagaccctaagagggatcattggga

SEQ ID NO: 228559 - DNA, 459 bp, Glycine max
catttccttatctatcttcacctccatcttttaacagttcccctcgaaacttctgaagatgggtggcatctgcattcggacgcttggatgattctttcagtttaacctcaatcaatgcctatattgctgagttccattcaaccttgctttctgattttgccggtgttagctcagccatagcctatggtaagttgacatgccatgccgcacttgatcctgctgggttactggcagttgctatttgccacggtattgcactctttgacgcagtacctgtcgatgccaacatgtatggcggccatgtcaaccctgctgagacttggaatgtctcttggtggacacactaccatcctcacttggttgttatactggattgcacagcttcttggctccatcgaggcatgttttcttctcaactatgtcacaggagggttgccaactccaatccacagtgtggct

SEQ ID NO: 228560 - DNA, 583 bp, Glycine max
  unsure (1)..(583): unsure at all n locations
cggctcgagcggctcgagcatcgctacgtcaaatcaaatccacaagaagttgaaaatgccacatggatgttgacggtcttcagctgctttggtcagtatttttgtctacattttgaagcttttcaactaggaatggctcctgtctacataggctttttgcggtttatgggtgatgatgatgaggcatagaattatagctacagtttagaggtaggtggaaatgggaggaagatgatttggcagggggtgcctagaagcatcagggacagccaccgcaaggttcgtgacagttttgatggtctcatcattcagaggaatatggccctctttttttccggtggtgaccggaaggaattgaagctaagggttactggctaggatctggaaagaacagtgaagggagagcagatgtccttccactagcaattatatataggctgatagttctgtagtgaaactcgtttgtagtgatatatgtaccttctggtcttctatttgtgttttgtaatttaagaggcaaactctctttgcttatccttacatcanatacacgaacaggaagttgtacctctaatcattatga

SEQ ID NO: 228561 - DNA, 397 bp, Glycine max
aaaggggcaaaaatttttttggggaatcaatataatgattagggggcccacctcccggtcccgtttttgtgggaagggtaaacaaaaaaaggtttcctcccaaattacaaaacccaatttgaaaacccgaagggccctttttttttccaaacgagttttacttcaaactttcaccctttatataaatgctgggggaaggaaaaactcttcccttaactggtttttccaaatccccccaaaaacccctaatttaaaatcctttcgggcaccaccggaaaaaaaaaggggcctatttcttttaatggtgagaccataaaaactgtgtcgaaacttggggggggtgtccctgattcttttagggcccccctgccaaaaatatttcttccatttcccccac

SEQ ID NO: 228562 - DNA, 556 bp, Glycine max
  unsure (1)..(556): unsure at all n locations
gaaccggtggccttgttgtcctgtctgaaagttttggtcattcagtcttcaaggactcttttaagcgagtttttgaggatggggagcaatctcttggtctttgtttcaatggaaccctagagataaattgctccaaggaaatcaaaattcagggaattattggaccttgcacctcgttggaaaagaaagggccttctgttgctgatactgttataggagagggaaacacaacagcatggaagatgtgtggccttgacaagagtacatgcttgactgtgatgtttgatctttcatcaagtgatcgttcaaatacccctggtgctgttaacccacaattgtacctacagttccttacaagttaccaggacccaagtggtcaatcagtgcttcgtgtcacaacagtaactagaagatgggtggatagttctgttagctctgaggaattggttcaaggatttgaccaagaaactgctgcagttgtaatggctagatttgcttctctgaaaatggagagtgaggaaacatttgatgctacancgtgggtggatcggtttct

SEQ ID NO: 228563 - DNA, 604 bp, Glycine max
  unsure (1)..(604): unsure at all n locations
ctcgagccgaatcggctcgagcaaaaatatgatagaagacaagcagatgtgaactcacttatgctgttgttgggattgttgtgctacttgcttccaatgctgttcaaatacagtggtgcctcagctgctctcactgtagacccttcactacacttgtcaagagcttctagcattgtgatgttgattgcatatgttgtctacattgtctttcaactgtggacacacagggagttatttgaagaagaagatgacggtaaagatggcgaggatggttcagaagaacaagctgtgattggattatggagtggcattgcttggttggttggaatgactgtattcattgctgtgttgtctgaatatgtggtggatacaattgaggatgcatcagattatggggtttgtctgtgagcttcctaagcataatcttgctgccgatagttggcaatgcagctgaacatgcaggagcaattatatttgccttcaagaacaagctggacatctcattgngtgttgcattaggttcagcaactcagattgccatgnttgtggtcccattatgtgtaatcgttgcttggattatgggtatcaatatggacatgaactt

SEQ ID NO: 228564 - DNA, 317 bp, Glycine max
ttgttgtttttttttttttttttttattttttttttcgttttattttttttgttctttttttgttttttttttttttttgtagttcttcaaaaacacaagacggtaaaaagtttttttccccagggaccttccaacttgtttaacacgccaaaggacccacgaacatctgcaaacgcaaaagggggtgttggttgaagggcatgagaccaaaagaaaattcccgttcttggggacatcccgggatgacccagggtaaaaaggagtttttgtggtgaaaccaccgcccgtggggaccaaagattttaaacactggggg

SEQ ID NO: 228565 - DNA, 589 bp, Glycine max
gttgagtgcgtctccgttggggaagatggcaaggtcaacttggttggtatcggggattccaatttgaattaccggaggttgtttgatagcgccgggttggtttcatacaccgcagtgaggtgggcgtcgccgatggagttcgccaccggtgggttcggcttcggtcttcagtggtgggaccaacgtaaaccgggaggaccggtttcccagtttaagggtaactgggataagaaattgacatctgggattgtgcactctattgacattcatccctcgcgcaagcacacttgcctggctggtggttccttaggtacggtttttgcctgggatcttaggtggcagcaacaaccaattatactttcaggtgctggagctgccaacactgcggttcagtccatatctgaaagtgaggtttgggaggttcagtatgatcgttgcataaaatcaaacacttcatctacccggatcttaccttccatgatatgctcagaggatggaattctcggtgtgattgagcaaggtgaggaacctattgagctgctggctgaaccttgtgccatcaatagctttgatattgatcgacataatc

SEQ ID NO: 228566 - DNA, 568 bp, Glycine max
gaagaatagtagcaatcagagactgaagacgagcttccccttgcgccggagggccaccgatggttgaaaccgagatggatgcagaaactgttgcaaatgtggttccaccaaaggagactccaaatagtgtttccatttctcatcattcctcacaccctccccttaatgagaggattatttcatccatgaccaggagatctgttgctgcacacccatggcatgaccttgagataggacctggtgctccaattatcttcaattgtgtgattgagattgggaaagggagcaaggtgaaatatgaactggacaaaaagtcggggcttatcaagatcgaccgcgtgctttactcatcagttgtttatcctcacaactatgggtttatccctcgtactatttgtgaggacagtgatcccctggatgtcttgattattatgcaggagccggttcttccaggttgctttcttcgggccaaagcaattggtctcatgcccatgattgatcagggggagaaagatgataaaattattgctgtctgtgctgatgattctgagtatagacattacaatga

SEQ ID NO: 228567 - DNA, 367 bp, Glycine max
ggctaaagtgcagagatgaaatatttgaaattaagcacgtgtagtctgtagaacacgcatgtgctaagaggcagctaatgtaaaatgttttttttttatccctacataatattgataatgcagccttttttaatgcaaatatcttccattggtccgtcagttaaaaattcttgacgtgcatcattcatcggctaccgtcttaagctctccactatgtaatccgcatacaagctcatggatcgcttaaccgcttcaaaagcagctgacgcaggcaaaaagtcgttttactgcaacttccttgatttcattcttcttggagtcttcaataaaaagacgaattttagctaaacgatgtggaggaagctct

SEQ ID NO: 228568 - DNA, 515 bp, Glycine max
atcttaaagaacacgtgattaagcctgtgattcctgagaagtaccttgatgagaagaccattttccatttgaacccttctggcaggtttgtcattggagggccgcatggcgatgctggtctcaccggccgcaagatcatcatcgacacctatggaggatggggtgcacatggtggtggtgccttctctgggaaggatcctaccaaggttgataggagtggtgcctacattgtgaggcaagctgcaaagagcattgttgcaaatggacttgctaggagggcaattgtgcaagtttcctatgccattggtgtgcctgagcccttgtctgtgtttgttgacacttatggcactgggaagatccctgacaaggaaatcctcagcattgtgaaggagagttttgacttcaggcctggcatgatctccatcaaccttgatctcaaaggggtggaaatggcaggttcttgaagactgctgcatatggacactttggcagagatgaccctgacttcacatggg

SEQ ID NO: 228569 - DNA, 435 bp, Glycine max
catcatataaaatatatatgttctgaaagaacacatacaagtacacaaaaaaaagggggaaattcataaaaaaatacagaaaaaaaaaaacagaattgagtaagagggaaggaaacatagagaaaattttagcaatcagataataagaagccagtagtagtgcaaaagtcccttgccaagagtgttggaaccccttttagttaagcaggtaccttctcccccttgagtggcttcaccactttccatgtgaagtcagggtcatctttgccaaagtgtccatatgcagcagtcttcaagaacctgccattttcaccccttttgagatcaaggttgatggagatcatgccaggcctgaagtcaaaactctccttcacaatgctgaggatttccttgtcagggatctttccagtgccataagtgttaacaaacacagac

SEQ ID NO: 228570 - DNA, 529 bp, Glycine max
gttagtgagggtcaattttatcaggttctactgtttgagcttgatgctattcgaaaggcatgtgcatccctggaacccaactatcagcctcctgtgacttttgtggtggttcaaaagcgtcaccacacaaggctctttgccagcaaccatcacgataagagttcttttgacaggagtggcaacatattgcctggtactgttgttgactccaaaatctgccatcccaccgaatttgacttttatctctgcagccatgctggaatacagggtacaagccgtcctgctcactaccatgtgttgtgggatgaaaacaattttactgctgatgccttgcaaacactcaccaataatctttgctacacatatgctcggtgcacccgatctgtttcaattgtgcctcctgcatactatgctcaccttgctgcattccgtgcaaggttttacatggaacccgagacttcggatagtggctctatgacaagtggtgctgttgcaggccgtgggatgggtggcggcggtggtggtggtg

SEQ ID NO: 228571 - DNA, 530 bp, Glycine max
aacttctcgaaggcaacaacaaagtaagaaactttcgacaataaacatagtttgcatcaaatatcagaccctcatagcaaagataaaacactccactccacactggacaaccttattcaacacaccacacaccttaaatagtttcaaaaaactcaatactaatgacacagaccacaccactggagatagtttgaaagcagcaagggaaaaagcactcctccacaaaacaaggttgctaaaagtaatctttggcatgcatatcatatcttcttaacaataaaacataactctcttaacgttctctttgagtgcaggcaatggtctcacagcagcattagcaccaggtgcccgggtgctacgccctacaccaccaccaccgtcgacacccatcccacggcctgcaacagcaccacttgtcatagagccactatccgaagtctcgggttccatgtaaaaccttgcacggaatgcagtcaggtgagcatagtatgcaagaagcacaattgaaacagatcgggtgcaccgagcat

SEQ ID NO: 228572 - DNA, 535 bp, Glycine max
  unsure (1)..(535): unsure at all n locations
ctcgagccgctcgagccgaaaaaacatgaaacgaaaccataatttccccttccaccaccggccacgcaagtgggcgatggtgatccccaccgtcacaatatgcttcctcctcctcttcctcccgctccttcccctcaccaaaccctcatcttcatcttcttctttttctgcgacatggtcttcttcttcgctgaatttaacggaagaactagaagtgggtgttccgagattggcgtacatgttgacggcgacgaaaggggagggggcgcagctgaagagggtccttcaggcagtgtaccatcccaggaactactacctgctccatctcgatctagaggcttctgatgcggagaggctggagctggccaaatacgtcaagtccgagactgtgcttgcggcgtttgggaacgtcttggtggtgggtaagcctgatttggtcacctacaagggccccaccatgattgcttctactcttcacggtattgcccttttgctcaagagggccccacactgngactggttaatcaatctcagc

SEQ ID NO: 228573 - DNA, 381 bp, Glycine max
aaaaatgcccataaaattggggttaaaaatttcccgttgcaaagggactaccatttacattgttccggcctaaaaatttcagaatttaatagctcccctattagtttttctagcttctttgattggaaggggggtttaactcccatggggtttccataaacagcacaagggtcttttcccaaaagaggattggcaatacaccaaccttccggggtaaagggaccatttgaccttttaaaaagttccttatcaattttggtgaaaactgggtcaccctcgggaaacttttgagcaaaaggggccccccttgggaccatggtatcaaaaagcccccaattttaagaagacttggatgctgttttgggggggtgtccccccttt

SEQ ID NO: 228574 - DNA, 586 bp, Glycine max
  unsure (1)..(586): unsure at all n locations
aacagcacaaagcgggttactgtctgttcaagctaccatctctctctctctttcttagtgcctccttgccagaagttaaaatggcccaagaaactttcctattcacatctgaatcagtgaacgaggggcaccctgacaagctctgtgaccagatctccgatgctgtgctcgatgcatgcttggagcaggaccctgacagcaaggttgcctgtgaaacctgcaccaagaccaacatggtgatggttttcggagagatcacaaccaaggccaacgtggactatgagaagattgtgcgtgacacatgcaggaacattggttttgtctctgatgatgttggtcttgatgctgacaactgcaaggtcctcgtcaacattgagcaacagagtcctgatattgctcaaggtgtgcacggccacctcacaaagaggcctgaggagattggtgctggtgaccaatgtcatatgttcggctatgccactgacgagactcccgagctcatgcccttgagccatgtccttgccacgaagctcggtgccaagctcaccgaggttcgaagaacggacatgcncttgctgagacctgatgg

SEQ ID NO: 228575 - DNA, 568 bp, Glycine max
gagagaacattttttttgtttcatcatataaaatatatatgttctgaaagaacacatacaagtacacaaaaaaaagggggaaattcataaaaaaatacagaaaaaaaaaaacagaattgagtaagagggaaggaaacatagagaaaattttagcaatcagataataagaagccagtagtagtgcaaaagtcccttgccaagagtgttggaaccccttttagttaagcaggtaccttctcccccttgagtggcttcaccacttcccatgtgaagtcagggtcatctttgccaaagtgtccatatgcagcagtcttcaagaacctgccatttccacccctcttgagatcaaggttgatggagatcatgccaggcctgaagtcaaaactctccttcacaatgctgaggatttccttgtcagggatcttgccagggccataagtgtgaacaaacacagacaagggctcatgcacaccaatggcataggaaacttgcacaattgccctcctagcaagtgcatttgcaacaatgctctttgcagcttgccctacaatgtaggcaccacttctat

SEQ ID NO: 228576 - DNA, 511 bp, Glycine max
  unsure (1)..(511): unsure at all n locations
ggttgatcgaggaagaagaagaagatgtcgtacctgttgcctcacttgcactctgggtgggcggttgatcaagcaatcctggcagaagaggagcgtctggtcgtgatccgtttcgggcacgactgggacgaaacctgcatgcagatggacgaggtgttggcgtcggtggcggagacgataaagaactttgcggtgatatacctggttgacataacggaggtgccggatttcaacaccatgtacgagctctacgacccttccacggtgatgttcttcttcaggaacaagcacatcatgattgatctgggaaccggtaacaacaacaagatcaactgggctctcaggacaagcangagttcatcgacattgttgagaccgtctaccgtggagccaagaagggacngtggtcttcgtcatcgctcccaaagattactccaccaagtacncgtactagtttcattcatcttgtacatacaacacactaaatattatctcttttcttacttctctg

SEQ ID NO: 228577 - DNA, 450 bp, Glycine max
caaagaaaaaatgtcaacttttattgaaaaaatcaaattgggtttgcttcaccaacgatcctaaactactaaagcaaagttgcaaaactaaggaattattctaacaacactttagcatatgacaaaagcaattcatgtaacagagttgtgaataagcagaaatcagaatgatcatacaaccacaaccagcaccacaccagagaagtaagaaaagagataatatttagtttgttgtatgttacagatgaatgaaactagtaacggtacttgggggagtaatctttgggagcgatgacaagaccacgtcccttcctggctccacggaggacggtctcaacaatgtcgatgaactcctgctggtccttgagagcccagttgatcttgttgttgttaccggttcccaaatcaatcatgatgtgcttgttcctgaaaaagaacatcaccgtggaa

SEQ ID NO: 228578 - DNA, 560 bp, Glycine max
ggcatttggaggagaatttgaagaacacggtcaagaacgttgtgagtcaagttgctaagaggactctcaccacaggtgtcaatggagagcttcacccttcaaggttttgtgagaaggacttgctcaaggatgttgatagggagtacacatttgcatacattgatgacccctgcagtggaacataccctttgatgcaaaagctaaggcaagtgcttgtggactatgcattggccaatggagagaacgagaagaacacacacacatcaatcttccaaaagattgcaacatttgaggaagagttgaagacccttttgcctaatgaagtgaaaggtgcaagagttgcatatgagaatgaccaatgtgcaattgcaaacaagatcaaggaatgcaggtcttaccccttgtacaagtttgtgagagaagagttggggacagcattgctaactggtgaaagggttatctaccggcgtgagagtgtgacacagtgttcactgctttgtgccaagggaagatcattgatccacttttggaatgcctttgggagtggaatggggcacctc

SEQ ID NO: 228579 - DNA, 519 bp, Glycine max
cgcttttggaggcttcaacaagggaatctattccaacaccacatcctcaccctatcttaacaacaaccaccaccacctcgacgacaacaacaacctcaacagaaataatctcaagggctacaagacatattttaagggtgaagatcagtttcacacacccaaaagtgccaagaagaagaacaccaccaacaacaccaacaacaagaagcatggggacaacactaataataatgatggcacaaagactggtgctgagaagaaattcaaaacacttgcaccatcagagtctctgcctaagaatgaaaccattggaggctacatctttgtttgcaacaatgataccatggcagagaatctccaaagacagctctttggtctgcctccacgatacagagattcagtaagaacaataactccagggttgcccatttttctgtacaactactccactcaccaactccatggtatctatgaggctgcaagtttgtgaggatccaatattgatccaacggcttggga

SEQ ID NO: 228580 - DNA, 589 bp, Glycine max
gaacaaagttagttccttcttattgtattcttttatgtgatgttcatatacacccataacaagaaaaaaatgggcaaccaggcataacagcctctatacaaataacattatagtagtaattataacacaaatatatgacggctgaaattcaatattcgttgtcttaattatcttctgacactctaataatatgaatccacagtattcattcattatccattgtccttgtaacttctctcttcttgtataatttctacccttctatgctggaatggctttgaaaatgtcatcgaaactgttctggtttgcaaaaatatccagaagagacagtgcctcaggcacactcagttcaagacggaacttagggccatcataatggtgaagaattggtctaaaggaatctttctctagtggctcacaaactttcctagtaatcacttgaacctgagcagggaaacgagattcaccagggcacttcttgtccttcccaagccgttggatcaatattggatcctccaaaacttgcagcctcaaagataccatggagtttgtgagtggagtaattggtccacaaaaatggccaacccct

SEQ ID NO: 228581 - DNA, 496 bp, Glycine max
cagaaaggcttttgaaggatggggaactgatgagaacactgtcatagtaattttgggtcatagaactgtgtatcagaggcagcaaatcagaagagtttatgaggaaatttaccaggaggatcttgtgaagcgcctagagtctgagatcaaaggagactttgagaaagccgcgtaccgatggatactggaacctgcagatcgtgatgctgttttggccaatgttgccatcaagagtggcagccactacaatgtcattgtggaaattgccactatcctctccccggaagagcttttggcggttagacacgcctatctcaaccgctacaagcactccttggaagaagatgttgctgctcatacctctggccatctacaccagcttttagtggggttggtgaccgcattcaggcatgtcggtgatgagatcaatccacaatcggcgcaatctgaggctgaaactcttcatgatgctgtaaaagagaagaatggtagctat

SEQ ID NO: 228582 - DNA, 470 bp, Glycine max
ccaatgtaaagctttgtactttaaattaaattaaacatagtacatctcaacattgtttagctcaaaatcagtttttttaaaaattcaaatggccactgagatatcttttattttgagcctgttaataataatttataagccaccaaacagctatcatattaccactctataagatagaactccaagttctcatgatcaaggaaaactgaaaacagactcaagcaaaatcaacacagattaacaccatcaaccatcacacacacacaagtatagcttggtgtcctaaactcgtaatcacaaatgccctcagagaaaaaatatttagtcttctttccccaacagagtgagaaggaacttcttgtagtcccctgagatttccttggcaatagcatgctcaagaagaacgctgtttctcttgtagtaaacctctgagattatctttaggtccttctgggccccgctcacaacca

SEQ ID NO: 228583 - DNA, 530 bp, Glycine max
cgaaatcgcgaacagaacagcaacgttaacaatgggttctcgctacgaggtggaactgaagctctcatcggcacgcgctctcaagaacgtgaactggcgccatggcccgaaccgcccatacgtcgtcgtttgggtcgacccaagcaacaagctctcgacgcgcgtggacgaaagcggcgacactgacgcgaattgggaccaaacgctcacaattccgttgccaccaaagcctctcgaggatcaaacgttgtacatcgacgtggtccacgccggctcggaggaggacaccaagccgcttatcggctcggctcggtcaagctgggggacattctcgacgacgttggaatcggcgagcgcgtgagccgcacgctctcgctgaagcgtccctcggggaggccgcacggcaaggttgaggttagcgtgacaatcagggagcccagctaccgtgcgcagggtgggtacaacgcgcctccttacggcgtgagggattattcccctgcgccgcaggggtatggtgggtatcctccata

SEQ ID NO: 228584 - DNA, 528 bp, Glycine max
  unsure (1)..(528): unsure at all n locations
gtaaatttacggaaacttacagagattctcatctgtaaagtaattaagggtgacatgcgagccttagaagacttgacatatgaaaggaggagagagtttttgaaagagcatcatctgccaaaagaagtcccaattgtttcctttcggaccgaagctggcatttcccctgctgttttagccacattatctcacgttgcacatgctgaactacccctggttgctccagccggtgagtctagaaaacttcctgtggtgatgccccttggtgctgctatggctgcttgtgcacagctgctgcaggtgaggtatggagagaaaagtgacgggcttgtcacatgccgagatgcagaagttcccggatccgttgtggtgcgacctaaacgaaaattggaccatgcatggatggtttattcatcactaaatgatgacctttctgaaggagatgcatttcacgtctgtgaggctctctcactctactngtgggaaatcggcagaaaagatgcatgagcttgcaatgaagatgaatga

SEQ ID NO: 228585 - DNA, 532 bp, Glycine max
agaccaagaactgcattgcatcatcaatttcttacctaaatcatacgaaagttttgcttgaatatgttgttctacagctatgttcgctctacagctacatatatgaatgtatattcttacacatatgaccttacacttttttatctagactgtaaaaaataaattgaatatatagtttttgagagaaaaagaaaaatatgtacaggtacaacagaaattaggaatgcttcattcatctttcattgcaagctcatgcatctttttctgcccgatttccacaagtagagttaagagagcctcacagacctgaaatgcatctccttcagaaaggtcatcatttagtgatgaataaaccatccatgcatggtccaattttcgtttaggtcgcaccacaacggatccgggaacttctgcatctcggcatgtgacaagcccgtcacttttctctccatacctcacctgcagcaactgtgcacaagcagccatagcagcaccaaggggcatcaccacaggaagttttctagactcaccg

SEQ ID NO: 228586 - DNA, 549 bp, Glycine max
  unsure (1)..(549): unsure at all n locations
cagaggctgaaaagcagatgcggcatgagaagcattataggtatgttagtacacatgatgttgcgtattgggcacgtagcttcttgcaggatctggaaagggcatgtagagatcatctgaggaggagatgctggggaattggttttggtttaggcttccgagtgattgctttggatccaaactttagaaagctatctgtggaacatattgtttcagcttataagaggaccaagcaccgagcaattcttttggattatgatggcactatggtgcagcctgggtcgatgagtttaacacctaatgctgaagccgttagcatcttgaacatcttgtgcagggacaccaagaattgtgttttcattgtaagtggaagggagagaaagactcttactgaatggttttcttcttgtgaaaggatgggaatcgctgcacagcatggttattttgtgaggacaaatcgaaatgcagaatgggatacttgtattccagtacctgnatttgagtggaaacagattgctgagccggttatgcagttatatatggaaacaa

SEQ ID NO: 228587 - DNA, 567 bp, Glycine max
gattcacaatcctagcattcattcattcccaatcaaaaatcactttatcatacatcaaaatggcccaaaccaatagtcaagaaaagaaacaataaatacagtaccccatgtaattcatctactttcaaaacaacctattgatagttgcaacatagttgggatatcaataaatgaaggcaagtcagccagaaaataaaatagatcacgaaatctaacacaagatagatatcccagtatagtatagaaaaatagtactacattgtagccaaattgtgtgtgtgtgtgtttgcactctacacattaaaaagaaccttaatgagaagctggttgcaaagaagttctagtagagtgctcaaaagcattggcaaggccttgcaacattctcaaaatctcacttgtgtcttccaaataatactttgccttgctaggattctggccaacagtgcatggaaacacttcagcaactggagatagggttgcctttgcattcatgattaccccaaacatgtcctcgtctgatctgtcatctccaatgcatagaacaaaagctggaaacactcccttttg

SEQ ID NO: 228588 - DNA, 563 bp, Glycine max
gccatttcaatccccagtttcttcttcaacgtcctcttacgagcagatcccaattctccttcccagtttcaaaccctaattccctcattcccatggcctcagaagagcccactgtcgcggtggaacccgctcccgaacctgccaccgccgagcctcccccggaggagaaggaggagcccaaacctgaagccaaggctaagaaaaccaaggaacccaaacctaaaaaggtttccagaccacgcaaccctcccactcatccttcctacgaggagatgattaaagacgcaattacctcgctgaaggagaaaaccggttcgagccaacacgcgattgcgaagttcatcgaggagaagcacaagcagcttccaccgaacttcaggaagcttcttctctaccatttgaagaaacttgtagccgctggagaactcgtcaaagtcaaaggctccttcaagctcccacctacccgaccttctgcatcttcttcttcttcgccggcgaagaagaagaagcccgcacctgctaagccccaacccaagcccaagcctaagcctaagcccaagccc

SEQ ID NO: 228589 - DNA, 565 bp, Glycine max
cataaaatcagatttcatatattataggatcatctgtaaccccaactacaccaccaagaggacaaagaacttcacaaaactaaccctaaaaccactctacccaccacattctgacttgctaccccctctcttagccgtagcctttttcgctggagactttacactctttggtttcacactcttcactggcgctttcttagcaggcgctactttcttcgctgccggcttcgcagcaggagctgctttcttccctggtgaagtccgtgtcgacgtccttgaagccttggcgggcttcgctttgggctttgccgcgggcttggcagcagcagcctttgttttagcagcgggcttgggcttgggcttggcagctggcttagtccctttgggcttggcggcagcaggcttgggcttggaagcagcagcagcagcagcctttggtttaagggcgggcttgggcttggctggaactttggctttaggcttagcagctgccttgggcttagctggtgcctttgacttaattgccttagtgtccttggctatagcagcgggcttgggcttaagc

SEQ ID NO: 228590 - DNA, 464 bp, Glycine max
  unsure (1)..(464): unsure at all n locations
ctcgagccgtgcctgaggaactcatctttcacatcaactatcttggtgctgatcaacccaccttcacccttaacttctccaaaggttctagccaagtcattgctcaatactaccaactaattcgccttggttttgagggatatagaaacgtgatggaaaactgcagagacaacatgttggtgctgaaagaaggactagagaaaacagggagattttcaattgtgtccaaagacaatggagtgcctttggtggcattcacactgaaagaccacacccactttgatgaataccaaatctctgacttcttaaggcgctctgggtggatagtgccagcatacaccatgcccccagatgctcaacatgtcacagtgcttcgtgttgtcatcagggaggacttctcgaggactctcgcaagcgcctcgtggncgatgttgagaagggtctgcatgagcttgattcacttc

SEQ ID NO: 228591 - DNA, 261 bp, Glycine max
gttgtgtttgggggatgggatatcagtaacttgaacctggctgatgccatggccagggccaaggtgtttgatatcgacctgcagaaacagttgaggccgtacatggaatccatggttccactccccggaatctatgacccggatttcattgctgccaaccaaggagaccgtgccactaacgtaatcaggggcacaaagaaagaacaagttcaacaaatcatcaaagacattaaggagttcaaagaaagcactaaggttgac

SEQ ID NO: 228592 - DNA, 426 bp, Glycine max
aagcacaaaatacttcgataactttatattattttacatgcatgcatagcatagatagcctgctctcaaattagtcagcaggaacaaagatagagagatccaacgatctttaaatttcacatttgccataaatatataacagaaaagagggtatgggatatgagttaagttttgatctcattcaactacagtatcccaaaccattactcttaagactttgaacttcacttggactccaggatcatgttgttctcaggagctaatccaacacaagcccttaggatgttttccagcatagctcgctgctttgacagggcattaaccactggcgtactcggtggaaccagaggggccttgggcaggtaactgaggatgggcgcaactgggtggaatgagtggaacttttcctcatttgcaggtttaaac

SEQ ID NO: 228593 - DNA, 392 bp, Glycine max
aatccctctttcttcctcttcctcagtagtgcgattttcgattctcttctctgcaactatgcctaaccctaaggtcttcttcgacatgaccatcggcggtcaacctgccggccgcatcgtgatggagctctacgccgacgtgactccgagcaccgccgagaacttccgcgcgctctgcaccggcgagaagggcgccgggcggagcggcaagcccctccactacaaaggctcgtccttccaccgcgtgatcccgaacttcatgtgccagggcggcgacttcaccgccggaaacggcaccggaggcgagtcgatctacggcgccaagttcgccgacgagaacttcgtgaagaagcacactggtcccggcatcctctccatggcgaacgccggtc

SEQ ID NO: 228594 - DNA, 459 bp, Glycine max
actaggcgaataatagaggtcctaatttttattgaaggtagctcatcatatttttttatgtttctcataacagactccattcactctatgaacgaaccacatgatactgatattttagaaaggaaaggaaggattcaaaggggaagggtttcgaaatgatatccataacaccgcaatcccctaaacgacatgggaaagagaaaaaaaaggcaaaaacgacaccgaaagaaacgacacattcagagccaccgacacagagataaaagcctagggtcaacgtcgtctatctaagagagttgaccacagtcggcgacgacgacaggcttggcggtcctgccggagctggatccgaccttctgtatcttcttgacgacgtgcatcccctcgacgacctgtgcgaacacgacgtgctttccgtcgagccactccgtcttcgttgtgcagatgaagaactgagat

SEQ ID NO: 228595 - DNA, 328 bp, Glycine max
tccaaagcttgttttccatttcaagggtggggatttggagcttcctgctgagaactacatgattggtgactccaatttgggagtggcttgtttggccatgggtgcttctagtggaatgtctatatttggaaatgttcaacagcagaacattttggtgaaccatgatcttgaaaaggagaccatttcttttgttcctacgtcgtgtgatcagttgtgagagtgtgtgatatatttactgattagtgtatgtttttattgctttgtttgtttgataattttctgttgccggacttgtgttgatatgattgaatctcttagttgttgcaat

SEQ ID NO: 228596 - DNA, 567 bp, Glycine max
gttttcactgtctctgagaatggaggcgctaagtcgctccgtggaagacgtattcgaggatttcaagggccgaagagccggcatcatcaaagctcttaccaccgatgttgaagatttctacagccaatgtgatcctgagaaggagaatttgtgcttatatggatcacctaatgagcaatgggaagtaaatttacctgttgaagaagttcctccagagcttcctgagcctgtcctgggcattaactttgctagggatggcatgcaggaaaaagactggttatctttagttgctgttcatagtgatacatggttacttgcccttgccttttattttggagccagatggatttgataaaactcacaggaatcgactattcagtatgatcaatgaactaccaacaatatttgaagttgttacagcaaagaaacaagttaaagagaagtcttcggtttcaaacaacagtggcagcaaatctaagtctaactctaaagcgataatttgtgttcttatcaaattgctggctggtggagcagcgggcttccgaaacccagggcagacaatcaaag

SEQ ID NO: 228597 - DNA, 571 bp, Glycine max
ctgtctcgtttacacatctctccaacctttcactttcgtttctcagttttattcgaatccctctctcaatctcctttccaaatggccagcgttgaggttgcacagcaaacaccaacaacagttccagaaaatgaaacaaccgaggtaagcaagacccaggaaacaaccccagtcactgaggctcctgcaacagaacaaccagcagctgaggttcctgcaacagaacaaccagccgctgaggctcctgccccagaatcaaccaccgaagcaccaaaggaagaaaccaccgaggcaccaacagaaacagtagaaaaaacaactacagaagtagccccagaggagcctaaagaagttccagttgagaccgaggaggtggtggcaaaggagacagaggaagagaagccagcagaagagaaatcagaggagaaaactgaagaagtgaaagaagaagcagaggagcctaaagaaactactgaaacagaatcagcagcagcagcaccaccagcaaccacagaggaagagaacaaaccagctgagtcagttgaaaccccagtagagggtcctgttgaga

SEQ ID NO: 228598 - DNA, 431 bp, Glycine max
aaattataaagtaaatatcatttattcaaacctaaagaaacacagtaacacaccatcacaaactcatgtaaccctgccaataaaccatcacccctaaactccagcaccagcagcttgctcacttcaatacacaactcccagaatttctcatgtcaccacgtggcaagcacgctgatgtggagccaagtgttgtgcttacacgtaggtgtaccctgcataatacaaccaaagacttaagcatcatataataatattaataaagtaaactaaagaaataaaaagaaaaaaaaaaaagaggcttttcaacatggcatggcaaatggtagacctgatccccacaactaggaccatgtttaaacctggttttttcactcacacttgccatagggctaagcttcaagtcttctcaacagggaacctttactgggggt

SEQ ID NO: 228599 - DNA, 538 bp, Glycine max
actgcgcagaagattagttgtgcttaattttaaagttgatttatttacacccaaactgaattaactatatatacacaaactcgggtcatggccatggattaattgaatagatgagtgatatctgaagacaagtgcaagaacagcaaagttttagaaagaaaacggtaactaacacacaatggaactaaaaatgacaagcatgcatgagacaataatcaagcgaggttgtcttcggtggtggcaagggaaggcgaaagcgaagtgcgcgagcgagcctcatcgtaatcatctcccagaggagactcttccactctgatctcctcaatcatgttgacaacctccaacatgcacggcctgttgtgcgcctgcgacgccacgcacgccagtcccacgtgcagcatcgccaccaactgatcctctatgttcttgtacctcagcagctcctggtgaaacaccttcgaagtgcactgttgtttcaccaccgatttgacccacttcggaagatccacctcagcctcacgcgccggagaagtgtact

SEQ ID NO: 228600 - DNA, 387 bp, Glycine max
gaatgatccgtgtgatggttggaactatgttgtgtgtgctgccggaaagattattactgtcaatttctagaaacagggtttgcagggtaccatctcccctgtatttgccaatttgactgacttgaggactttgtttctcaatggcaataatttgatcggacctatacctgatagtttgatcactttgcctcagctacagactcttgatgtgtctgacaccaacctctgtggattggttcctaagttcccaccaaaagtgacgttgctgactgcgggaaatgctttgcttgggataccctttactcctggaggtggaccaagtggaactacttcttctgggtctacgaccggtggaagtggcggcgaattctctcagggtcattctta

SEQ ID NO: 228601 - DNA, 408 bp, Glycine max
  unsure (1)..(408): unsure at all n locations
ggaagaatcagagctcagcgataagcagaaagtggagatcgcgaaatggttcctcctcaactctcctcccggagaaatccaatacgttgccaaagatgtgaaatcgattctcaacaacgacgatttgtacaaggaagccgcttccgaggcttttccctattacaacaaatcgcacttgatttccattccaatgcccaaccgaagcggagacgtactggttacttcgttcggtgagcttgagggtaatgcatttcttgaacctaggactgcgcaagttgcaattgttgaccatgctaaacaagtttgtacagaggtgagacctgccacagacgaagaactttcatctncatatattgaagaatctcgatgcaatctggatgctgcaacacttatatatgttgaagaaac

SEQ ID NO: 228602 - DNA, 417 bp, Glycine max
caccaattagcaataaaattacagaagatctcagcacaccaattagcaataaaattacagaagatctcagcacaccaattagcaataaaattacagaagatctcagcacaccaattagtaaggtctcagagatcttagtgcctctgactcctcagattgagggtgagatcttgcagtcatccaatctgaagaactttagtttgacagaactaacagctgccacaagaaatttccgtaaagacagtgtgttaggaggagaaggtgattttggatcagttttcaagggctggattgataaccactcactggctgctgcaaaacctggccgggcgttgttgttgctgtgaaaagacttagtttggatagcttccaaggtcacaaggatcggttggcaaggcacggtatgactcatgaagc

SEQ ID NO: 228603 - DNA, 334 bp, Glycine max
gaattgttgaggatcttaaagatgatagtgaaccttataggcgtatggttatggagactattgagaaggtggttactaacctgggggcatctgatattgatgcacggctggaagagcttctgattgatggtattctttatgccttccaagagcagaccagtgacgatgctaatgtgatgcttaatgggtttggtgcagtcgtaaactcacttgggcagagagtgaagccatatcttcctcagatttgtggtactataaagtggcgattgaacaacaagagtgcaaaggtgagacagcaagcggcagatctcatttaaggattgctgttgtcatg

SEQ ID NO: 228604 - DNA, 474 bp, Glycine max
catcaagagaggaacctgttatctatgtaacaagacacaatgatgttcaaacaactgagctttacattgctgcgaggaagtactgaaaactgccaaatatattggagacagaaatgaactaactaatcaaaatccaactagatgaacatcattaactctggcctgctgtaaacattgttctgctcatcctccaaggcagggtacgatgctacaagagcatcctgggctccaatatagagagagttgtagatcttccaatatacctccctaacttttcgtgcaggggggaagagtccttgtagacaataattcagtacaacagctgctcccaacgctaccctcatcccttcaattgcttccatcacagcattaatcacatgaggagaagtttcaaaaatgtttggccagacataatttagcaaatgaaccagtgcattcttacaacctaaaccagccactcccagagccatatgc

SEQ ID NO: 228605 - DNA, 427 bp, Glycine max
ccaaaaccaatcggatcgtttcctctgcggagtcagaaatccatggatccctacaagaatcggccatcaagcgccttcaattctcccttctggactactaattccggtgctcccatctggaacaacaactcatcgctgactgttggatctagaggtccaattctgctggaagattaccatctggtggagaagcttgcaaactttgacagggaacggatccccgaacgtgttgtccatgctcgtggagctagcgcaaagggtttctttgaagtcacgcatgacatttctcacctcacatgtgccgatttcctccgagcccctggagttcagacccctctcatcgtccgtttctccactgttatccacgaacgtggcagccctgaaaccctcagggatcccagaggtttcgctgtgaaactctacacta

SEQ ID NO: 228606 - DNA, 586 bp, Glycine max
  unsure (1)..(586): unsure at all n locations
gaaccctcaccaatcctcttcggtttcttccacttcaaggggtggttatactgtgcttataaacacttggaggcaaaaatctcttctgaagcaaactgttgctcattattcatcatgtcaaagtgtggatgcaatacatttggtgtggagtgaaagtgaacaaccatccgagaagctgaaaacatatctgaataagattgtggttttgaagtctcagaaagctcacaagccaaactttagatttgacatcaatgcagatggtgagccaaacagcaggtttaagccaataaaggacctcaagacagacgcaattttctcagttgatgatgatgtggttgttccatgttctactctagattttgctttctctgtctggcaaagtgcaccatttacgatggttggatttgttcctcgaatgcactggctggataaggagcaaaataatgctgcatattacaggtatggaggatggtggtctgtttggtggatgggcacttatagcatggttctctcaaggctgcattctttcacaggaaatactnggatttatatactcatgagatgtctccatcaattcaggactatg

SEQ ID NO: 228607 - DNA, 84 bp, Glycine max
aaaaaaaaaaaaaaaaaaaaaaaaaaaaaaaaaaaaaaaaaaaaagacaaaaaaaaaaaaaaaaaaaaagaaaaaccaggagtt

SEQ ID NO: 228608 - DNA, 544 bp, Glycine max
gttcagaaggctgctgctgcattgaagggttcagatcatcgccgtgcaacaaatgtcagtgccagactggatgctcaacaaaagaagctcaaccttccaatccttccaaccaccactattggatccttccctcagactgtagaactgaggagggtacgccgtgagttcaaggctaacaagatctccgaggaagagtatgttaagtcaattaaggaggaaattcgcaaagttgttgaacttcaagaagagcttgatattgatgttcttgttcatggagaaccagagagaaatgatatggttgagtacttcggtgagcaattgtcaggctttgccttcactgttaatggggcgggtgcaatcctatggttcccgttgtgtgaagccaccaatcatctatggtgatgtgagccgcccaaagccaatgactgtcttctggtcatctctggctcagagctgtaccaagcgcccaatgaagggaatgcttaccggtcctgttaccattctcaactggtccctttgtagaaaatgaccacctagatctgag

SEQ ID NO: 228609 - DNA, 556 bp, Glycine max
gcacaaaactggtaatatttcatatcaataaggattgcggcaaagccgcaaagatacaacattcattagggaaaacaggagttgggaaaaataaggggagaggggttgaggaagaatcaattgctcacagagcatgctaaaacatctaaatattccacacacggttattgaaacaacccaatatagaaaatttttctttggtgtattataaaagcagaaccaatgaacttgtagattctactttcttataccattcacttggcaagttcgttacggatgagttttgctgcggcaaccatgtttgtgagggctggcttcacttcagtgtacttgcgggtcttgagaccacagtcagggttgacccacaagatgttcttctcgagcactgcaagcatcttattgattctgtcagcgatttcttcagttggtggtattcttggggagtggatgtcatagacaccagggccaattccagcaccatacttcacacctttacggaagactgacaggagcttttcatcggagcgagagttctcaatggtgataacatcagcgt

SEQ ID NO: 228610 - DNA, 517 bp, Glycine max
cccactactccttaatttctctcttcacttatcatcatacttatatattatataacccaataattaaattaaatacatgttagcactttaacattcctttctctaacctcgttcccactctcatattttcccttctgctgatattcagctaaactaagtcaataagatgactcagggaaagatagttgaagctgcagaagctcataaaacacttgaggatttcgatcctccaaagaagcgcaaaaggaacaagtatgcttttgcttgtgctgtgctggcctccatgacttccatcttgcttggctacgatattggtgtgatgagtggagcagccttgtacataaaaagggacctgaaagtgtcggatgtgcaaatcgagatcctgctcggaatcatcaacctctactctctgataggctcatgcctcgccggcagaacctccgactggataggtgggcgttacacgattgttttcgccggcgccatcttctttgtcggagcacttctcatgggtttc

SEQ ID NO: 228611 - DNA, 527 bp, Glycine max
accctgcgcccgcagcctcaacgggaagatctcagaactataaacccacgtgatgggacccgcaccaatggagaacgtggccacgtaagccaacaccatggctatgctcaatgcaacggcccacattagtttcctctcggagtgaccaatgatcgtgaggctgatagcgagcgtgaggagagagagcaccatgcccccgacactagacaacaacaacggacgacgacccacgcggtccaacgtaaaagtagccgccaagatgaaaacggttttgacgaatccaacggccacggttgcaagaagtttatgcgtgtcgtctttgatcccagccttctcgaagatcctggggctgtacaaaacgacggcgtctacgcccgacgcttgttggaagaagtgaatcccaagggcagcgattacgatgtgacgaatttggggcgttggatagaggaagagttctttccatacgccttcacctgtgcttcgtttggttacctgaacgacgtcgtcgttgcaactctcggggatcc

SEQ ID NO: 228612 - DNA, 273 bp, Glycine max
cctctttcttcctcttcctcagtagtgcgattttcgattctcttctctgcaactatgcctaaccctaaggtcttcttcgacatgaccatcggcggtcaacctgccggccgcatcgtgatggagctctacgccgacgtgactccgagcaccgccgagaacttccgcgcgctctgcaccggcgagaagggcgccgggcggagcggcaagcccctccactacaaaggctcgtacttccaccgcgtgatcccgaacttcatgtgccagggcggcgac

SEQ ID NO: 228613 - DNA, 457 bp, Glycine max
actaggcgaataatagaggtcctaatttttattgaaggtagctcatcatatttttttatgtttctcataacagactccattcactctatgaacgaaccacatgatactgatattttagaaaggaaaggaaggattcaaaggggaagggtttcgaaatgatatccataacaccgcaatcccctaaacgacatgggaaagagaaaaaaaaaggcaaaaacgacaccgaaagaaacgacacattcagagccaccgacacagagataaaagcctagggtcaacgtcgtctatctaagagagttgaccacagtcggcgacgacgacaggcttggcggtcctgccggagctggatccgaccttctctatctccttgacgacgtgcatcccctggacgacctgtgcgaacacgacgtgctttgtcgtcgagccactccgtcttcctcgggcagatgaagaactg

SEQ ID NO: 228614 - DNA, 582 bp, Glycine max
  unsure (1)..(582): unsure at all n locations
tatgtttccaatgtatcacatggaattgatacttacagcattagagaaccacttggtgtttgcgctggtatttgtcctttcaactttcctgcaatgattcccttgtggatgttccctatggctgttacctgcggtaatacctttgttctaaaaccatcagagaaagacccaggtgcttctgtaatgcttgcagaattggcattggaggctggtttgcctgagggtgtcttaaatatagttcatggaacccatgatattgtgaatgctatttgtgatgatgaaaacatcaaagccatatcttttgttggttcaaatgttgctggaatgcacatatattcaagagcagcagctaaagggaaacgtgttcagtctaacatgggagccaaaaatcatgcgattgtcatgccagatgcaaatgttgatgctactcttaatgctttagttgcttctggttttggtgctgctggacaaagtgtatggctctcacacagttgtttctgttggtggctcacaaccatgggaggataaactnttagagcgtgccaaagctctaaaagtaaatgctggaactgaacctgatac

SEQ ID NO: 228615 - DNA, 555 bp, Glycine max
caagattcgaagtctggccatacctagagacttacactgaggatgtcgcccttgaacttgccaaggagttgcaagccaagccagatctgattgttggaaactacagtgatggaaacattgttgcctctttgttagcacataaattaggagtaactcagtgtaccattgctcatgctctagaaaagaccaagtaccctgagtctgacatttactggaaaaaatttgaagagaaatatcatttctcatgccaatttactgctgatctttttgcaatgaaccacacagactttatcatcaccagcaccttccaagagattgctggaagcaaggacactgttggacagtatgagagtcacactgccttcacccttccaggactttaccgtgttgttcacggtattgatccatttgatccaaagttcaacattgtctctcccggtgcagacatgggtatatacttcccatacactgaaactgagcgtaggttaacagaattccactctgacattgaagagcttctttacagctcagtggagaatgaggaacacatatgcg

SEQ ID NO: 228616 - DNA, 425 bp, Glycine max
gaatggaaaaaggcatatctttaaattgaattgatgggggggaaaaccccaatttaaagatttccaatcatccccaattttgcaacaaccaaaagaattttaaaaaaaaaagactttttttttttactttttttacccaaaacctaagcaaaatttaaaaacaaacgacccttttttttagactctttaaatccaaaagctgatcacaatcaaaatcaatggcgttatttatgaaagctccataagacttcaaacgaccaaaagccgggttctccattgatgttctcttcaaacatgaatttactcttcaatagcaaggggcacaaactcagccaatttgcggtgcttgagagcataaaacatctggagggaacctttgctctcacggggttcaagattggtcacgtgcttccagaagccataca

SEQ ID NO: 228617 - DNA, 575 bp, Glycine max
gcttttcccccaaaagaagcaaaaccactgtcactcgaacaagaacaagaagatgaagattaacgtcaagactctcaaggggactcactttgtccttcaagtgaaccctcaagacacggttgctgttgtgaagaagaatatagagacagcgcaaggtgctgatgtttaccctgctgcgcaacaaatgcttattcatcaggggaagaataaggtatcaagtggagcctcatctgcgccctcaaacctgggaacccaacctcaaagttctttgcctcctacttcatcaacatctcaacctcctgcatcggctgtaggacagggagaatccaattctgagcagagtccagttataactcctcccactattgctgtgcccagtatctatgatcatgcagcatcaaatcttatggcaggaagtaatttagaaacaactattcaacaaattctagaaatggggggaggaaattgggaccgggatactggtaccggtgctcttcatgctgcatttaacaatcctgaaagagctattgaatatctctattctgggaatcctgaacgagctgatgtaccagcag

SEQ ID NO: 228618 - DNA, 535 bp, Glycine max
cctcaacatgtttctgttttctagtcaatggcagaaaacgatgtaccgatgctatggttccaaaggtaaaagatatagaatattaacattggcacttcttcaaagattgcagaatacaaaatcacacaaaaggaccaacacaggaaacctcagttggagaagatgaatttgaattttgactagtccgtaggcataaattcatccgggtgatccaatagatagttggctgctagatcctcgtttttattgcatgcaaagaacgcctccaccacaatatctcgatgaaatcccatagcttcaagccgttgaatggcctcattctcttcaggggtgatagtgacagtcccagaaatcatggaatccaactgactctgtaaattctcgtccccttcaggttcattcataaggtcaagtatgtcctcttgatgatcttggatgatctgcattagctgaggattttgttgtcccagttcctgaatcataggctgcaaaatttgggggttttctcgcatcggcttttttaatgcttggaact

SEQ ID NO: 228619 - DNA, 513 bp, Glycine max
gaaggtcactatcataataataataataattgggaacaatgtatgatttcagttgtccaagaaaaatagcatcacacctatccaacaacaggaattgtttctgattgcttgtggtcatgatctgtctcctgttgtttttgaccaactagttgagaggaagataacgacaattgtgagagactacagcaattatcctcccgctcctgctgcttctgagattctttctcgtacaaggcatactcctcaggcttatcccatctgctttcacaagttatacagttgtagtagtacttatcgccatcggggcagtagtgttcactccagtcacactctggaaaatcttcatcttggggacttgtaggcatatccggcagggtaatgccagtaactgtactagggttgctttcggtctgagaaggcagctgggaacgaacattaaactgagaaaactattgtagtctgtgaactaagctgctgctctatattttgaactgatgaatctgctggatgtga

SEQ ID NO: 228620 - DNA, 472 bp, Glycine max
  unsure (1)..(472): unsure at all n locations
caaagcattgaattcaaaaacttaagttcattccttgtgttttgctttcttcctcaaaaccaaacatgtcgaacacatgcggcaactgcgactgcgctgacaagactagctgcaccaagggaaacagctatggtgttattgcagagactgagaagagttacatcgagactgttgtcatggatgttccagcagctgagcatgatgggaagtgcaagtgtggcactaactgcacttgcacggactgcacctgtggccattaaggaatatgtatgaaaatgtaattgccatgtgtttggcaatacaaatatccaaataatgtaatcttcgtatgaataaatgtgtgtgctgttatcctacttcaggtctgtgtagtcatgcagtctgaatcatttcaagttcctgtcttagttaatataacagccatgngttgtggcattctatggctcattagactaaaaaagtgtaaatctcc

SEQ ID NO: 228621 - DNA, 465 bp, Glycine max
attgaacggaaatttacacttattttagtctaataaaccatagaatgccccaaccatgggtggttttttaactaagacaggaacttgaaatgattcaaactgcatgactacccagacctggagtgggataacagcccacacatttatttataccaagattacattatttggatatttggattgccaaacacatgggaattacattttcatacatattccttaatggccacaggggcagtccctgcaagggcagttagggccacacttgcacttcccatcatgctcaggtggtggaacatccatgacaacaggctcgatgtaacttttttcagtctttacaataacaccatagctgtttcccttggggcaactagtcttgtcagcgcaatcgcagttgccgcatgtgttccacatgtttggttttgaggaaaaaagccaaacacaaggaatgaacctaagtttttg

SEQ ID NO: 228622 - DNA, 569 bp, Glycine max
  unsure (1)..(569): unsure at all n locations
gaaaaaaaaaaaagaaagaaaaaactagtcctacatagagagaggtgcgttgcgtgttggtgccgccctaatcgtgagaagaaaggaaaggcaaaagggaaagatggtgtgcataaggaaggcgacggtgaaagaccttctggcgatgcaggcgtgcaacctgttctgcctccctgagaactaccagatgaagtactacctctatcacatcctctcctggccccagctcctctacgtcgccgaagactacaacggccgcatcgtcggctacgtcctcgccaagatggaggaagagaccactgactgccacggccacatcacctccctcgccgtcctccgcacccaccgcaagctaggcctcgccactaagctcatgaccgccgcccagaacgccatggaacaggtgtttggtgccgagtacgtgtccctgcacgtgcgcaagagcaaccgcgcggccttcaatttgtacacggagactctagggtacaagattcatgatgtggaggccaagtattatgcggacggngaggatgcttacgacatgaggaagcagctcagggggagcagca

SEQ ID NO: 228623 - DNA, 527 bp, Glycine max
ctcagtagtgcgattttcgattctcttctctgcaactatgcctaaccctaaggtcttcttcgacatgaccatcggcggtcaacctgccggccgcatcgtgatggagctctacgccgacgtgactccgagcaccgccgagaacttccgcgcgctctgcaccggcgagaagggcgccgggcggagcggcaagcccctccactacaaaggctcgtccttccaccgcgtgatcccgaacttcatgtgccagggcggcgacttcaccgccggaaacggcaccggaggcgagtcgatctacggcgccaagttcgccgacgagaacttcgtgaagaagcacactggtcccggcatcctctccatggcgaacgccggtcccggaaccaacggatctcagttcttcatctgcacgacgaagacggagtggctcgacggaaagccgtcgtgttcggacaggtcgtcgaggggatggacgtcgtcaggagatagagaggtcggatccagctccgcaggacccgcaagcttcgtcgtcg

SEQ ID NO: 228624 - DNA, 520 bp, Glycine max
  unsure (1)..(520): unsure at all n locations
gaatccacacaaactcagggtagggcagagagagagagagagagagagagagagagagagaatgggagggtgggctatcgcggtgcatggtggcgctggtgtcgaccctaatctcccactcgagcgccaagaagaagcgaaacaacttctcacgcgctgtctcaatcttggaatctctgctctaaattctaatcttcccgccatagatgtcgtcgaacttgtggtgagggaattggaaacggatccgctgttcaattcgggccgtggatctgccctgacagaaaaaggaacggtggagatggaggctagcatcatggatggtccaaaacgacgatgcggcgccgtttcgggtcttaccaccgttaagaacccgatctcgcttgctcgtttggttatggacaaatccccgcattcctacctcgccttctccggcgccgaagaatttgctaggcacanggggtggaaggttgtggacaacgagtactttatcacacctgacaacgttggcatgctcaagctg

SEQ ID NO: 228625 - DNA, 528 bp, Glycine max
ttttgcgagaagacacacacacagagagagatggctacgacgaggattgaggcagagaagaagccgaagacgaagatcgtgtgcactctgggccccgcatcacggtcggtcccaatgatcgagaagcttctgcgagcaggcatgaacgtggcgcgcttcaacttctcccatgggtcccacgagtaccaccaggaaaccctcgacaacctccgcgccgccatggagaacaccggtattctctgcgccgtcatgctcgacaccaaggggcctgagattcgaactggttttctcaaggacggtaagcctatccaactgatacaaggtaatgaaataaccatttccactgactatgacctaaagggagatgagaagacgatttgtatgagctacaaaaagctgcctgaggatgtgaagcccgggatggtcatactctgtgcggatggcaccatatcatttacagttttatcatgtgacaaacaagcaggcttggttcaatgccgatgtgagaactctgccactcttggcgag

SEQ ID NO: 228626 - DNA, 486 bp, Glycine max
aaaagttaaaacaactttagaccgcaaaattcaaaatccagaagtggctagttttttggttcaccaaaagcctcgtacaaaatcttaacaaatgaaaacaagtggctactcgccacaatgataaggcaaatgtaacaaaaaaaaaaaaaccagtaatatatgatatgtgaaaaacaggtaaccgatcctaataaatgcttttaattgaagtttgcatccaatgtagatatgaagaggtatatcgagacctcttttgcaccatccaaaaaatttgccataaacagcagaagaattccttgtaatgggggggatcatttcacagtcaagatcttgatgatagatgcagtgcccacacgatgcagtgccaccactgaatccccgttgtggcagagacccttggacttggcatgttgcatggcgaattctattgcttcttctgttgtttcagcatgagaagctctagcagaagctgcactcaacacggga

SEQ ID NO: 228627 - DNA, 519 bp, Glycine max
cagtttcttaaatcttaatctttcacttcttcgctaatctctagattactcccattcattccattttgtttcattaattaaccaaataaaaaacgatgagcacttctcatcaacaacgttatctcctcttcgctttcactacgttaatagttttcttcagcttcaacactacaccagtttcggctcgtttgttccccaacgtttcctccatcccaaggtggaacacatcccacgcgccacctgatagcgcgtggaacgcgtatcgcaatttcactgggtgccgcccgggaaaaacatataacggtctttcgaatctgaaaaactactttcattattttggctacatctccaacgtgtcctcgaagtcgtcgaattttagcgacgatttcgatgatgcgttggaggcagccgttagagcctaccagaagaacttcaacctcaacatcacaggggagctcgacgaccccacgatgaaccaaatcgtcaagccacgctgcggcgtggctgacatcatcaacg

SEQ ID NO: 228628 - DNA, 413 bp, Glycine max
actagtcgcacaattcatgacctgccccatcctttgtaattgtggtgcccagttggcttagtaactaaagtaaggataagctgcagcagacacggatggacattgcagggtgttgaattatagttaatttgtgtatcattatggcttgttataatatttcaaacaaaacaatgagatgcatgtctaattaagtactaattatgaacaggaacataatgactctcaatcatgttgttagacttggctttcttatatatctttgcttgttctgtgtgagtgcttgcttaataataattataagatgtgtttgtctgttgtctacagagccaagttcgacgacgagaacttttgaagaatcacacttgtccaaggggcgtgtgaatcggaaaaaaaaaaaaaaaagggggggccgc

SEQ ID NO: 228629 - DNA, 407 bp, Glycine max
ttgtttttgttttttctctggctctctcgcccttttttttttttttttttttttttgtgtttttttttttttttttttttttttggacaacggacaaaccccttttaaaatttttattaagcaggccccccccccgaacaggccaaggtttttaagaaagcccagtctaacaacaggggggggggggattgggggccgggtcaaaatggggccttaatgagacatgcctctcatgggtggggggggaatattataaccaaccctgggggtgcccaaggtggctgtgtgggaaccccctgggggggccatccgggggggggggaggttatccttactttgggggccaagccaacgggggcccacaattacaaaggggggggcaggtcatgaattgggcgactaggttt

SEQ ID NO: 228630 - DNA, 368 bp, Glycine max
gtttgccttgtgccgtttgtgttgttttcgggacgaagaagaagatggtgtcaggttctggaatctgcgcaaagcgggtggtggtggacgcgcgccaccacatgctgggtcgtctagcctccatcgtggcgaaggagcttctgaacggccagaaagtggtggtcgttcgctgtgaagagatttgcatctcgggcgggctggtgaggcagaagatgaaatacttgaagttccttcgcaaacgcatgaacaccaaaccctcccatgggcccatccacttgcgtgccccctccaagatcttctggcgcaccgttcgtggaatgataccacacaagacacagcgtggggaagctgctcttgctcgtttgaag

SEQ ID NO: 228631 - DNA, 490 bp, Glycine max
cttctccagctccctaatggtatcatagtagctccatccaacttcagatgacaacctgcccagcacacaatacttgtgtcccttctgaagcctcaacaccttgagtgcatcaggaacaaccattctcttggtcttgtcatatggaggagggattccttcataaaccttcaaacgagcaagagcagcttccccacgctttgtcttgtgtggtatcattccacgaacggtgcgccagaagatcttggagggggcacggaagtggatggggccatgggagggtttggtgttcatgcctttgcgaaggaacctcaagtatttcatgttgtgcctcaccagcccgcccgagatgcaaatctcttcacagcgaacgaccaccactttctggccgttcagaagctccttcgccacgatggaggctagacgacccagcatgtggtggcgcgcgtgcaccaccaccccgtgtgcgcagattccagaacctgacaccatc

SEQ ID NO: 228632 - DNA, 519 bp, Glycine max
cttcttctcttaaaagagcctttgctttttctttaggcctttccgaattaagtacttgtttcattttctctcgaagcaagaaaaatgttcatcgagagtttcaaggttgagagtcctaacgtgaagtacacagagactgagattcagtccgtgtacaactatgaaaccactgaacttgttcacgagaacaagaatggcacttatcagtgggttgtcaagcccaaaactgtcaaatatgaatttaaaaccaacacccatgtccctaaactaggggtaatgcttgtggggtggggctggaaacaatggctcaaccctcaccggtggtgttattgctaaccgagagggtatttcatgggcaacaaaggacaagattcaacaagccaattactttgggtcgctgacccaggcatcagctattagagttgggtctttccaaggggaggaaatatatgccccattcaagagcctgcttccatggtaaaccctgatgatgttgtgtttgggggatgggatatcagt

SEQ ID NO: 228633 - DNA, 516 bp, Glycine max
aagcacaaaagacgtggataacttgatattattttattacatacatgcatagatagcctgctctcaaataagtcggcaggaacaaagatagagagattcaacgatcttcaaatttcacatttgccagaaatatataacagaaaagaggggtatgggatatgagttaagttttgatcacattcaactacactatcccaaaccgttactcttaagactttgaacttcacttgtactctaggatcatgttgttctcaggagctaatccaacacaagccctcaggatgttttccagcatagctcgctgctttgacaacgcattcaccactggtgtacccggtggaaccagaggggccttggtcaggtaactaaggatggtcgcaactgggtggaatgagtggaattttccctcattttcagctttaaactcgattcgagtgctgagctcagcaagaaggaccaagtccaagataataggagcagctaacagtgaatcctcacatgtgttgtgcaacacaa

SEQ ID NO: 228634 - DNA, 383 bp, Glycine max
ctgtcctataacaaacttgagggtccagtaccctcaaatgggatgttggtgaccataaatcctaatgatcttatcggcaatgagggtctttgtggaggcattctccctccatgttctccaagtttggctgtgacaagccatcgaaggagctcacatatcagacacgtcattattggttttgtgactggcgtttcagtgattttagctcttggtgcagtatattttggtggtagatgtttatacaagagatggcacttgtataacaatttcttccatgattggttccagagcaatgaggattggccctggaggttagtagcattccagaagatcagcatcactagtagtgacatcctcgcatgtataaaggaatcaaatgtcat

SEQ ID NO: 228635 - DNA, 502 bp, Glycine max
atctaaaattaatttccatttttcttttatctagaatacatgtatttactatttgatataaatttggtcgacgtaggcaaagcatacatccaaattcagaggttaagggaattcaaaattaaaaatatattgctaattcctaaacaacttgttgctacaaaagactgattattggggagggggggaagatcgttggcttttccaccctcctgctgtcttgtcccccattatggcaaatacttttccttcttggctttgcctctccaagcattgggacgatgtctctcatggggggtctttccttgggaagctttgcagtacatagaagtgcaatccggagcacaagcagcatttcttcttggacatgcttgcactgactagctatagcaggatccaatgcttctaacaaggctttggtgcttttcttcttccttatccattcgactatgtcaattgattcttcaaatgaagggggctaaaggcatttttccagttaggagct

SEQ ID NO: 228636 - DNA, 503 bp, Glycine max
atttgcccaaaatgcaagcaacaattctgcctcgattgtgacatctacgttcatgagagcttacataactgcccaggctgtgagagttccaggcactctaagtctgtaactgcttcccaatgattgccaatcttctgcctgtgacttaaaatttccataaaaatggcgttctacattgtctccttcatattgctatactgcatccacccactggacccatgaataagttccggtgccaagtgactgactaacattatcatctgctcattgatcacaatattttggtgcttgatcagtaaatgctttgcaggacagacaacagaagtgatattacttatacaagggtgagattaaaccaacaacttctgatcattttccttcttttgtttttttgctggaaattaaggcacatgtaaaatgtctccattgtgtttttttcaatcagtgggctgacaccattcttgctggcgataaatattgatcattaaatatttgtatgagat

SEQ ID NO: 228637 - DNA, 467 bp, Glycine max
gttctcccataaaacccccccctcacccacccaacattcacactcaagcccctcactccaaaacaaaacctaaacattttactcttttcggttttttttttttgtttcacacatgccgtcgtcgaattccggcgagagtcgccgagcgagcaagccgcagagctcgggcggagcggcgccgccgccgccggagcaggaaaacctgccgtgcccgcgatgcgactccaccaacaccaagttctgctactacaacaactacaactactcccagccacgccacttctgcaagtcttgccgccgctactggacccacggcggcactctccgcgacattcccgtcggcggcggcagccgcaagaacgccaagcgctcccgcacccaccacgtcgccgacacatcatcctcctccacctcgtccaccatgacgtcagcacaggaacaccacgcacacactttattggcccccg

SEQ ID NO: 228638 - DNA, 463 bp, Glycine max
ttgtttttttttttttttttttttttttttttttttttttttttttttttttttttttttttttttttgggtaaagaaacccccccgttaatcccaaaaaaacagggggcccgggaaccccccccgggcttgggaaatttacccaaaaagaaaaagaaaagggcctaggtgggcttcaaatttcacaaaggaatatcccccgggaagggggaaaccctgagcttaaaccataaaccccccttgctttgggcccagggggcccaacccgaaaaggttaaaaagaaaaaaaaaaaagggggcgtttcatttgggaccctttcccgggggtgaaaatgcaagcccaggccaagggaagaaatttccggtaacaaacccttctttggccctttttaactggcccgggtgtggggcaaaaaaccccacggggcccccaatggggccaccggggaccattcctgggggg

SEQ ID NO: 228639 - DNA, 562 bp, Glycine max
cagccaaagaaacaccagcaccagcacctgcacacaaaaagaaagcaccaaaatcatgacctgttccctcaccactaagtaacacaccgacaccagcaccaacgccagcgattgaaacgccaacaccagcaccagcacctgaagatgacacgccacccccccctccccacaggcacaggaaaagaaggacaaagaaaaaggagacggtgatggtgaagagaagaaggaaaagaaagataaagagaaggagaagaaaaaggaaaagaaggataaagatgaagaaacagacacattaaaggaaaagggaaaaaatgatgaaggtgaggatgatgaaggaaataagaaaaagaaaaaggataagaaggagaaagagaaggatcacaaaaaggaaaagaaggataaagaggagggtgagaaagaggatagcaaggttgaagtttctgttagggatattgatatagaagaaataaaaaaagaaggtgaaaaagaagataaaggaaaggatggtgggaaggaagtgaaagagaagaagaaaaaagaagaccaagaccagaaggagaag

SEQ ID NO: 228640 - DNA, 316 bp, Glycine max
aagaaaccctagccactctcccggcgtcacgatgcagatcttcgtgaaaaccctaacgggtaaaacgatcacgttggaggtggagtcttcggacaccatcgacaacgtgaaggccaagatccaggacaaggaaggcatccctccggaccagcagcgcctcatcttcgccgggaagcagctggaggacggccgcaccctcgccgactacaacatccagaaggagtccacgcttcacctcgtgctccgcctccgtggcggcgccaagaagcgcaagatgaagacctacaccaagcccaagaagatcaagcacaagcac

SEQ ID NO: 228641 - DNA, 370 bp, Glycine max
ataatcccacctgataacgaattgccaccaacacctcccccccccaaacggaacaagctgagagatcttctttccttcaggaagagctcccgtgattctgccagtaagctgtcaaaaaagctttccgctataaatatagtggaggaactgtttgaagaaggatcagcaatgcttgctgaaagattaggaaatgatgacaacttgaactcggggcaatcaacatctggcatttttgtctgtgctgtatgtcaagttgatcttgctccaagtgagggcatctctgtccacgcaggttctattttctgcaccagctccaaaccctgggaaggtccttttctatgttctgatcgccgtgataagaaggatgcta

SEQ ID NO: 228642 - DNA, 519 bp, Glycine max
acttaacaacagcacaaagcgggttactgtctgttcaagctaccatctctctctctctttcttagtgcctccttgccagaagttaaaatggcccaagaaactttcctattcacatctgaatcagtgaacgaggggcaccctgacaagctctgtgaccagatctccgatgctgtgctcgatgcatgcttggagcaggaccctgacagcaaggttgcctgtgaaacctgcaccaagaccaacatggtgatggttttcggagagatcacaaccaaggccaacgtggactatgagaagattgtgcgtgacacatgcaggaacattggctttgtctctgatgatggtggtcttgatgctgacaactgcaaggtcctcgtcaacattgagcaacagagtcctgatattgtcaaggtgtgcacggccacctcacaaagaggcctgaggagattggtgctggtgaccaaggtcatatgttccgctatgccactgacgagactcccgagctcatgcccttgagccatg

SEQ ID NO: 228643 - DNA, 530 bp, Glycine max
gagagaacatttttttttgtttcatcatataaaatatatatgttctgaaagaacacatacaagtacacaaaaaaaagggggaaattcataaaaaaatacagaaaaaaaaaaacagaattgagtaagagggaaggaaacatagagaaaattttagcaatcagataataagaagccagtagtagtgcaaaagtcccttgccaagagtgttggaaccccttttagttaagcaggtaccttctcccccttgagtggcttcaccacttcccatgtgaagtcagggtcatctctgccaaagtgtccatatgcagcagtcttcaagaacctgccatttccacccctcttgagatcaaggttgatggagatcatgccaggcctgaagtcaaaactctccttcacaatgctgaggatttccttgtcagggatcttcccagtgccataagtgtgaacaaacacagacaagggctcaggcacaccaatggcataggaaacttgcacaattgcccttctagcaagtccatttgcaacaatgc

SEQ ID NO: 228644 - DNA, 491 bp, Glycine max
aaaagaactggccacttaaatgccattcattttccattagaataaagacaatgtagagagctggttccaaaagtcacatgttacatttaaaatgaaggagctggagacatagcacagactatctccctaatatggaaatgctattaaaataagggatattagcccccaacttggcacaaattttcttcaatttgaagtgaagaacatctattaagtcctcctacaagttgctcccagaagcagatacctcagtactacaaactgggcaaaccttgtttattttcaaccaattgttaatgcactcaggatggtacagatgtttgcaggaaagaactgtcaaggactcaccatcctgatagtccacccggcaaatgacacacgaatcatggcttccatgttgatcactcccagtcttgtagttgactgaaggtaaacaggcaatagtatcagttgaaagacctctgctctgagttccaactacttcactcaat

SEQ ID NO: 228645 - DNA, 590 bp, Glycine max
  unsure (1)..(590): unsure at all n locations
ctcgagccgaatcggctcgaggatagtgtggtagagagagaggagcggaggagagaaaatgacgacgaggttcaagaagaacaggaagaagagaggccacgtcagcgccggtcacggtcgtatcgggaagcaccgcaagcatcccggtggtcggggtaacgccggtggcatgcaccaccaccgcatcctcttcgacaagtaccatcccggttttttcggaaggggggtatgggctattttccacaaactccgcaacaaattctactgccccatcgtcaacattgataagctatggtccctcctaccccaggaggccaaggacaaggccaccgccgacaaggcgccattgctcgatgtcacccagttcggttactttaaggttttgggtaaaggggttttgcctcagaaccagcctctggtcgtgaaggccaagcttgtttccaagatcgccgagaagaagatcaaggaggccggtggagccgtcgttctcaccgcctgatttttttggggtatttttatttaaaaggattttgagatctgggtgtatttttggtctgggtcttggttaatctgnctgaactggatagttt

SEQ ID NO: 228646 - DNA, 256 bp, Glycine max
ggaaaattggagagaactgctgtactcaaggctgtatgttccggatttaaggagactactgaaccttcagtttgtttaagtggagatgtcgagactaatgagtgtcttgaaagaaatggaggatgttggcaagacaaacatgctaacataactgcgtgcaaggatactttcaggggaagagtatgtgagtgccctgttgtgaacggtgtccagtataagggtgatgggtatactacatgtgaagctttggacctgc

SEQ ID NO: 228647 - DNA, 632 bp, Glycine max
  unsure (1)..(632): unsure at all n locations
cgttctcggaatcctcatttgcattccaaagacctgctccagcacatctttgctcaaattcactcaccgttgcatcgaacaactttcattcagcaacaggtggtggtcgtcttgtgctgaatgttggaggcacctgcttgtgtcgaaagtttcgtggtttgaaactgtggctacttgagagactcagcttccaattccagccaccaaagcaacctaagaatagaaaccatcacttcaggaataatttggaaaatgaaaagggatcggtttctgattcatcttcaaatcttcgtgttcctgatgataaggtcactccggtggagtctctatcgttgccgcagacaggtttgtctggtactcccgtggatgttggcagaaagccctcactttgtattgctgtcataggagccaccggtgagctggcaaagaggaagattttccctgctttgtttgccctctactacagtggctntcttcccgagaatgtaggcatttttggctattcaaggaaggatataactgatgaagacctgcgatctattatagcttcaacattaacatgccgagttgatcatcaagaaaattgtgacaacaaaatagatgctttncttagtaaaacatattacattaat

SEQ ID NO: 228648 - DNA, 536 bp, Glycine max
ctcaactcttttcctttttccagctccctttaacccaaccaatttgccatgtcaagtttggaggaaccacttgttcttgacaagttaccaatcatgaataccattgacaggattcagaggttctcgtcaggttcttgccgtcctagagtagataacttgggcatgggaaactgctgaatcgaaggacgaagttgcagaacatctaacagctgcaatgaagatgatgaagagtatacagcagagacattcccatggaaaatacaaacaagagacttatcccaagatgacttcttcaatcaaaagtatctgaccaaagggaggaagtcaacgaaatttggaatgaatgatgattcaatctctgattgccaaagcagtccaaaatgccacaccacacatatgcaaggtttggcttataagtcactgaacagtgtaccaaagttcgtaaagatagtggaacctggatcaagggatggattacaaaatgagaagaacattgtgcctacatctgtgaagattgaattgatttatagactagc

SEQ ID NO: 228649 - DNA, 519 bp, Glycine max
  unsure (1)..(519): unsure at all n locations
ataatgagtgatgtacaaacatgggtgagtgccgctttgacggatgaaaccacctgcaacgatggcttccaagagatcactgctgccactgatattaaaagcaccgtcagaagactcgttattcaggtagctcaattgactagcaatgccttggctttgataaataagctagccaattcttaattaacttcaaactccaccactcttctcttgtactgttacatacacaacatggattatactcttcttgtctcaatttaattacgtgatcttcaactcctggagataggtagcaacgtacgcgtgttggtgtgaaatgttgtaaatatgtaattatcaattagttgagattgttgtcaccgctggctagtgttaatgtctcgggcctactagcgggtggacagattttagtgatgtgaattagacacttatattgnctattttctctttctttcttttttctctgggtgaatatattacgtgtatcattcatataaagtgaagctgatatggccatat

SEQ ID NO: 228650 - DNA, 503 bp, Glycine max
atatggccatatcaacttcactttatatgaatgatacacgtgatatattcacccaaagaaaaaagaaagaaagagaaaatagacaatataagtgtctaattcacatcactaaaatctgtccacccgctagtaggcccgagacattaacactagccagcggtgacaacaatctgaactaattgataattacatatttacaacatttgacaccaacacgcgtacgttgctacctatctccaggagttgaagatcacgtaattaaattgagacaagaagagtataatccatgttgtgtatgtaacagtacaagagaagagtggtggagtttgaagttaattaagaattggctagcttatttatcaaagccaaggcattgctagtcaattgagctacctgaataacgagtcttctgacggtgcttttaatatcagtggcagcagtgatctcttggaagccatcgttgcaggtggtttcatccgtcaaagcggcactcacccatgttt

SEQ ID NO: 228651 - DNA, 443 bp, Glycine max
atttctgatcccaaattgagtttgagtttcagccatggtatctgtttctctgctcttattcctatctttctttgccttctttgcaccctctgaatctcacgacaaagtctcgttggaattgtactacgaaagcttatgcccctacagcgccaacttcatcgtgaatcacctcccaaaaatcttcaccccagatcttgccccaatcgttcacctcaaactcgttccttggggcaatgccaaactccgtgccaacgccacctttgactgccagcatgggccatatgagtgcttgctgaacacagttgaagcctgtgcaattcacatctggcctcaactcagcaaacattttcctttcattactgtgttgaggatctggtgtttcagagtaagcgtgaggaatgggaatcttgttttgagaaactggatcttgattcggaacctat

SEQ ID NO: 228652 - DNA, 494 bp, Glycine max
atggtgaaacaactttagaccgcaaaattcaaaatccagaagtggctagttttttggttcaccaaaagcctcgtacaaaatcttaacaaatgaaaacaagtggctactcgccacaatgataaggcaaatgtaacaaaaaaaaaaaaacccgtaatatatgatatgtgaaaaacaggtaaccgatcctaataaatgcttataattgaagtttgcatccaatgtagatatgaagagggatatcgcgacctcttttgggccttgcattatatgagacctagacaggaaactagttccttgatatgggggggatcattttacaggcaagatgcttcatgatggatgcattgcccacacgatgcagtgccaccactgaatgcccgttgaggcagagacccttggacttggcatgtcgcatggcgaattctattgcttcttctgttgtttcagcatgagaagctctagcagaagctgcactcaacacggggaaccaaccc

SEQ ID NO: 228653 - DNA, 525 bp, Glycine max
caaatttctcattctcccatttcctctcagaaccctcgatcactcccacgcgctcctatatcctctccttcaccgtcgctctctccaacgatcacaacaacatcgtcatcccatggcaaacgccgcatctggtatggcagtccatgatgactgcaagttaaggtttttggagctgaagacaaagaggacacaccgtttcatagtttttaagattgaggagcagcagaagcaggtcattgtggagaagcttggtgagccagcccaaggctatgaagatttcactgccagccttcctgctgatgagtgccgttatgctgcttatgattttgagtatctgactgaagggaatgtccctaaaagcagaatttttttcattgcatggtcccctgacacataagggtgaggagcaagatgatctatgcatgctccaaagacagattcaagagggagctggatggaattcaagtagagctgcaagcaactgatcctactgagatgggtcttgatgtgttcaaaagccggccc

SEQ ID NO: 228654 - DNA, 527 bp, Glycine max
ggcactcaaacgcaaggtcgtataaatcacaaatcataataaaacacactggaacaagcaaagcttgttaaaaggtgcaatagaatttatgccacaacttggaaaattgagagtttgggaccataactacccaagttgaccatcccacaaactaggatattttccatgagtaactaaggcttaaggagtgctgctcccaccagaaagcctactattttctataatcattttagttggcccggcttttgaacacatcaagacccatctcagtaggatcagttgcttgcagctctacttgaattccatccagctccctcttgaatctgtctttggagcttgcatagatcatcttgctcctcacccttgatgtgtcaggggaccatgcaatgaaaaaaattctgcttttagggacattcccttcagtcagatactcaaaatcataaacagcataacggcacttattagcaggaaggctggcagtgaaatcttcataggccttggctggctcaccaagcttttcacaatga

SEQ ID NO: 228655 - DNA, 507 bp, Glycine max
gaaagaaaaagtaaagtcattgcaattcatttgatctcacatccagcactagccacctagtgcacattgcctgaatattacagcaggttatctgaaaatgagacacattgcccaaaaaaagtcagagctaccgactagaagaaaaggtttacacgtataaatcccagtcagtgtcggatggtgagctcagctctaaggtgaagtacaccattgataaagtaaagactatcttcagccatgaacgttgtccatggaattgcaaacaagtttctatatccgacggcctttcccccagtgaatacataattgcctttgtacttgctaacaaattcctctgttggccttgacctagcagcaaactcatagtcaacggcaaagctaactgagcccttttcctgcattcctaaaaacaggccaaagcaatggaaagagctctgttggtccatgttgcaatgtgctgataagaaaaacccttgtccacctaaatggaatgcctgtgaatatact

SEQ ID NO: 228656 - DNA, 463 bp, Glycine max
gcagagcgtgttcttgagtcaattcaacttctcttggatcttcttgaggcccctgacccttgcacccttgagactttccttggaagaattcctatggtcttcaatgttgtcattctttctccccatggttactttgcccaagataatgtcttgggataccctgacactggtggccaggttgtttacatcttggatcaagttcgtgctttggagaacgagatgctccatcgcattaagcaacacggattggacattgtacctcgtattctcattatcacccgtcttctccccgatgcaatcggaactacttgtggccaacgtcttgagaaggtgttcggaaccgagcactcccacattcttcgagttccctttagaactgagaagggaattgttcgtcagtggatctcaagatacgaagtctggccatacttggaaacttacactgaggactgtgctcatgagc

SEQ ID NO: 228657 - DNA, 495 bp, Glycine max
gaagaaggcacggcttaaaattgaattgatgggtaaaacaccccaattcgaagcttttccaatcaagattcaaatcatgcaaaagaaaaaaagtaaaaggctttttttttttccttttttttctctctctggctcttatcgaaagcttaatcacaaaattaaaatcatcagggacatattatttatagaactcaagtaagacaaactccaaatgagaaacaaaaagccggttcctccatttttttatccaactcttcatcctcagtttactcaacagcaaggggcacagactcggccaatttgcggtacttgagagcatagaacatctcgagatagcggcggctctcacggcggtcaaggttagacacatgcttccagaagccatagacaccagtgagagtgagaagcctttgtgagtaaatttgccatgtgtacttctcttcaataccctggagaccagcctttgagattgtttcccagggggttgggtcaagc

SEQ ID NO: 228658 - DNA, 547 bp, Glycine max
  unsure (1)..(547): unsure at all n locations
cggctcgaggagataaccacttttctctttgattcatcaatggcaaccgcgaggaccgtgaaggatgtttcgcctcacgatttcgtgaaggcttacgcctcccatctcaagcgttccggcaagatggagcttcctgagtggactgatattgtaaaaacagcaaaatttaaggaattggctccatatgatcctgactggtattatgttagggctgcctcaatgacaagaaagatttatttgagaggcggtcttggtgttggggctttccagaggatctatggtggaagcaagagaaatggaagccgtcccccacatttctgcaagagcagggggctattgcaagacacattctgcaacaattgcaaaacatgagcattgttgagattgatacaaaaggaggtaggaaaatcacatctagtggtcgaagggatcttgatcaagttgctgggcgatngtggttgctgcctgattgacatctttttgagactgatgatgcatattctaggatttatgtttgcttatcagtagatggtatcagggaaaaata

SEQ ID NO: 228659 - DNA, 551 bp, Glycine max
  unsure (1)..(551): unsure at all n locations
cttagttattccaaagtttctttacagcaacgtatggaaggatccaagccagtttggagatatataccaggaggagtatttcatgaatatcttgaaggatgacatcaagattgagaaggaacttccacctcatatgaaatctctggatgtagaagcaattggcagccagattacagatgcagatcttgccaaggaggccacacctgcagactatattaaagttgtgcttcctcttcttttgagaaatggagttgttcacttcctgggatatggaaatcgactaggttttgatccaatgccttctgaaattcagaggttaagatgcaaatgtaatttccatgctttgaagttcgcgcctacaattcaacaaattggctcgctattgatccaaaggattagaaaatatggtgctcgacgcagcatgttagacactcaattgctggngaagttcatccgcaacaatgaatatcatgaagctaaaaggggctcagcaaaatatcttgctttgcacctgaggtttgaaatagatatggtggcctattccttatgtg

SEQ ID NO: 228660 - DNA, 607 bp, Glycine max
ccttctccttctctctctctttttcgcctcattccattttcatctatcaatggctccagtagcagcagcatcttcagattcaatcaagccaagagatgtttgcatcgttggtgttgcacgtacaccaatgggtggatttcttggtactctgtcatctctatctgccaccaagctaggctctatagctattgaagctgctcttaaaagggccaatgttgatccatcccttgtggaagaagtattttttgggaatgttcttagtgctaatttggggcaagctcctgcaagacaagctgctcttggagcaggaatatccaattcagttatctgcactaccgttaacaaagtttgtgcatcaggaatgaaagctgcaatgcttgctgcacagagtattcaattaggcacaaatgatgttgttgcggctggtggtatggaaagcatgtctaatgtacccaagtacctggctgaagcaaggaaaggatcacgccttggacatgattcacttgttgatgggatgtcgaaagatggttctgtggatgtctatatgatgttggcatgggagtgtgtgctgagctatgtgcagataaccatgcatttaacagagacg

SEQ ID NO: 228661 - DNA, 615 bp, Glycine max
  unsure (1)..(615): unsure at all n locations
cactcaccccagtcacaccatggaggttgctacagcagcttctagcttcgcactcaacaagcccatgctggcattgccctcttcatctcgaactgtaaccccaatcagatgcatgaacacctccacctcccccgtcaggacctctctctctaccagcttcgtcgctccttacgccggaatctgcagcgcgtctagccctttctccggccacaagctccgtccctcctccctcaatccggcgtcgtttcttggctccaacgctaaacgaggcgtcgttaccatggttattccttttcaacgaggaagtgcatgggagcaacctccaccggacttagcttcttacttatacaaaaatcgaattgtttatttgggcatgtctcttgttccatctgttactgagttgatactagctgaatttctttaccttcaatatgaagatgatgataagcctatttacctatacataaactccactgggacaactaagggaggtgagaagttgggttatgagactgaggcctttgcatntatgacgtgatgaggtttcactatgctttgtgtgatcatgtcatttattttttttatctcacttatgttgggctcttcaactatata

SEQ ID NO: 228662 - DNA, 269 bp, Glycine max
  unsure (1)..(269): unsure at all n locations
ataccgtggttgacattgctcatctaaccaagattgatccagcaataccacccaacagggcatgcctacttagttgtggtgtatcaaccggggtaggtgctgcttggagaacagcaggtgtggagccagggtctacagtagtcatttttgggttgggaagtattggattagcagttgccgagggagctagactctgtggagcaactaggattataggtgtggatgtcaacccaganaaatatgaaactgggaaaaagtttggactcact

SEQ ID NO: 228663 - DNA, 587 bp, Glycine max
caacggtgttggtgaatatgttgatttgatgcaagatctgatcccaggaatgaaagatgggactgtgagaactgccattgatactggttgtggggttgctagctggggtggtgacttgttggatcgcgggattctaacagtttctcttgccccaagagataaccatgaagctcaagttcaatttgctctagagcgtggtatcccagctgttcttggtgtcatttctacacagagacttcctttcccatcaaactcctttgatatggctcattgctccagatgccttatcccatggacagaattcggtggtatttatctcatggaaatacaccgtatccttcgtcccggaggattttgggttttgtctggtccacctgttaactacgagcacaggtggcgtggatggaacacaaccattgaagaccagagatcagattatgagaagttgcaagaattacttacttcaatgtgctttaaattgtacaataaaaaggatgacattgcagtatggcagaaggctaaagataacagttgctatgaaaagctggccagagagtcctatccccacagtgtgatgacagcattga

SEQ ID NO: 228664 - DNA, 395 bp, Glycine max
ggcttctctccccaattcccccgctctttcattctcctcatctctctccaccaccgccaatctcctcccatgtcgccgcttcaccgcattcccccgccgccgcgcctcttcattctccgtgcaagctaagatccgcgaaatcttcatgcccgcactcagctccaccatgaccgagggcaaaatcgtctcctggatcaaatccgagggcgacatgctctccaagggcgacagcgttgtcgtcgtcgaatccgacaaggccgacatggacgtcgagaccttctacgatggcatcctcgctgccatcgtcgtcgccgacggcgaaactgcccccgtcggagcccccatcggtttgctcgccgattctcccgaagaagtcgccgaagccaaagccaaag

SEQ ID NO: 228665 - DNA, 548 bp, Glycine max
  unsure (1)..(548): unsure at all n locations
gcgcggcataacctaaacctatctttcttctctctctgtgtgtgcgcttcaacggcaaccagaagcagccatggccactgcaaggactgtgaaggatgtttcacctcatgagttcgttaaggcgtactcctctcacctcaagcgatccggcaagatggagctgccagagtggactgatattgtgaaaactgcaagatttaaggagttggctccttatgaatctgactggtactatgtcagagctgcttccatggcagaaaagatctacttgagaggacgtcttggttgggcgccctctcagaaggattaatggtggcagcaagaggaatggtactcgccctcctcatttttgcaagagcaggggcgccattgctcgtcacattcttcaacagttgcagaacatgaacatcattgaactggacaccaagggtggcaggaaaatcacttccagtggccgacgggatcttgaccaagtggctggacgcattgtggttgcaccatgattcatgatttgaaaatgccataagcatatngaggtttttgggttc

SEQ ID NO: 228666 - DNA, 284 bp, Glycine max
caactgataaaaagaatattcagagaattccaaagacagagatgactgtcattaaggaagagcaacaaccaaaccaaatagctggccacaaagaacttggtcacaaaagtctccttcagagcgatgcactctatcagtatatacttgaaaccagtgtgtacccaagagagcatgagagcttgaaggagctacgagagttgacggaaaaacacccttggaacctgatggctacaccacctgacgaaggacaacttctaggcatgctccttaagcttatcaatgcc

SEQ ID NO: 228667 - DNA, 616 bp, Glycine max
  unsure (1)..(616): unsure at all n locations
ggagaagagcactacacagaggagcaggaggaacagaatggagaggaaggaagccaagaggaggcagttgtagtggatgcagattctacagatggtgcagtactcgttaatggtaacgaggctgacgaagagtggggtacgaataatgaaggagccccgtcagcctaaaagcaattggttggggtggtgtgaaaatcaaaattttgtctctgtgcttgcgccacatcactaggtcccatcaagacagttggttccagcttctgggatttctatctgaggtcttctcaaggtgccacgaagagattttatggactggttgtttgtttcctggtgttgtggttttgtagtgccctgaattttgtcattttgcgcgtggtatgaacaatattccttagggtcagttacaatttactagagtttatatatagcacattcttttggggcttttacctcaatatactcgtgccattgtgaatgtagaaaagcggaactagggacgggtgcctgtttaaattttagatagttatttttttttaatattntttcttgatcatttttttaaattttatattttcctggattgtaaacatggatggttaatagagaaaataatgat

SEQ ID NO: 228668 - DNA, 466 bp, Glycine max
ctctcttttctcaagccttaaatgagtaaaaaagagtgaagaaaggaaagaaaggagcaccatatttttggtttgagaaacataactaagcaagagagttcaaatggggaagagagagtttcatggggtggtgttgatgtcgttgtgtttgtgggtttgtggtgtcacagcctctgtgacttatgaccacaaggccattgtggttgatggcaagagaagaattttgatctctggctccattcactaccctagaagcacacctcaaatgtggccagaccttattcaaaaggccaaagatggaggccttgatgtcattcagacctatgtgttttggaatggccatgaaccttctcctgggcaatactatttcgaagataggttcgacttggttaaattcgtgaagctcgtgcagcaagcaggcctctatgttcatctccgtattggtccctacatatgtgctgaatgg

SEQ ID NO: 228669 - DNA, 548 bp, Glycine max
  unsure (1)..(548): unsure at all n locations
gtcacgcggagaaggtgagtgagacttacggtgagatgagggaagagtatttgaaggatgctgggaatggaaaagggagttggaggagaccattcataactcacttcacagggtgtcaaccctgtagtggaaagtataatgccatgtattccgctgatgattgctggaacggaatgcagaaggctttgaattttgccgacaatcaagtcatgcgtaaatttggttacatgcgcccggatctactggataacgccatttcccctgtcccttttgattatccccgttcacttcgtcattgatcatcagtgtgaaggacccgctgagcttggatagattttactgcggcccactatttaagatggatagatgaaccatgtgcatgcgtacagaactttcatggacctgtattatcgtcggggttgtggggtcatgctcacatagtagcatatccaaccatgttaatacactacttgctacagtaaaaagataccctgcggccattctagttacatctaccctntgtttttttcccttcttttcctctcatg

SEQ ID NO: 228670 - DNA, 500 bp, Glycine max
catggatccgtgccccttcgtgcggatcctcgtcggaaacctcgccgtcaagtccccggcatcatcaaagccctcttctttctccggcaaagtccacccttcgagttcccccttcttctgcaagatcctactccagggacttgattcgaattccacttctcctagagtgtccagtgtccctctgatatcagactccgacccacaccctcactccttcgccgcctcctttgatttctccaaagcccaaatcttgaaagcctcgaagaagcccctgatgaagatctccgtctacaagggccccaccactccctcctgcgtcttcacctccgccaaactattgggcaaagtttcaatacccctcgatctcaccttggccgagtcacgcccctgcaccttccacaacggatggctctccctttccaagaacaccaacccatcccagttacttcacctaacagtccgagccgagcctgacccgcgctttgtattcccgttcgacg

SEQ ID NO: 228671 - DNA, 508 bp, Glycine max
caaagggagaagtaaaaaacacagagcaaccaccgatcaaagaagaaacaaccgcaacagatctccgtttctcgccaaacaaacacaaaatggctgccttcagcggcgacgaaaccgcacctttctttggcttcctcggagccgccgctgccctcgttttttcctgtatgggagcggcgtacggaaccgcgaagagcggcgtcggggttgcgtcgatgggcgtgatgaggccggagctggtgatgaaatcgatcgtgccggttgtgatggctggtgtgttgggtatctacggtttgatcattgcggttatcataagtacgggcattaaccctaaggccaaatcgtactatctttttgacggctacgcccacctctcttcaggtctcgcttgtggcctcgctggcctctccgctggcatggccatcggcatcgttggcgatgccggtgttagagcaaatgctcagcagccaaagctttttgttggaatgatactcatcctcatttttgc

SEQ ID NO: 228672 - DNA, 559 bp, Glycine max
  unsure (1)..(559): unsure at all n locations
gttaagtagaaagcaggggagttcaaagaagtagttttccgggccacacgtgtagcctacagtgctacaggtatagtcactctcttgtctggtcaacccaaaggagaagtttcggttgaagcaaggtcagagtcaaaaggctattttgaggaaactgtgacagattcttctggaaattatcgtctgagaggactactgcctgatactgactatgttgttaaagtggctaaaagggacgtgggcagttctaatatagagcgtgcatctccagattctattgctgtcaaggttggaactgaggatatcaagggatggattttatagtttttgaggagccggaaatgacaattataagttgcccacgttgaaggaatgggtccagatgaactacgtaaacacctgatggtagaaatcaggtcagctagtgacctanacaagatagagtcagtctttcccctaccaatntcaaacttcttccaagtgaagggcttatcaaagggcagacaccttctaaagcttcatctggtcttccatcaagctcacttaaaattgatctgat

SEQ ID NO: 228673 - DNA, 514 bp, Glycine max
aatatatgctggccttggaacgcattatgtgccatctggaaagcccaccaaaccagtctcaaaaaacgacaatctcgaacccgttcaccgttggatcgtcgtgaaatttgagtatcatgttcgcaacacaattacgagcattctcaccgttgggaatttcgatatcatgtctgaactgagagaaacacccttcgcattgtagcctttttctttcccgcagaaacccagagctgtcttggtaaaactacgatctcggtttcgttaaccgttggattattgtgaaatttggatatgttgttcgaaattcaatttcgcacgcttccaccgttggaatttgcgagataatattcgtggagggagaaaaaggaatcgcatgaagacagtataagtggaggtttcaatctcttctccgtctctctgacgtttgagaattctatcggagcagtcggaggaataacggaaagaatttcagggaaccactagagatgttgctatccctggctgaagacacgtg

SEQ ID NO: 228674 - DNA, 582 bp, Glycine max
  unsure (1)..(582): unsure at all n locations
aaaaatggtacctgtgcttggctgaggccagatggcaagacacaagtaactgttgagtactacaatgacaatggtgccatggttccagttcgtgtccacactgtcctaatttccacccaacatgatgagactgtgagcaatgaccaaattgctgctgaccttaaagagcatgttatcaagcctgtcattcctgagaagtacctggatgagaagaccatcttccaccttaacccttctggccgttttgtcattggtggccctcatggtgatgctggtctcactggaagaaagatcatcattgatacctatggtgggtggggtgctcatggtggaggtgccttttcagggaaggaccctaccaaggttgacagaagtggtgcctatatcgtgaggcaggctgcaaagagtgttgtggcaaatggccttgccagaggtgcattgtccaagtttcctatgccattggtgtccctgagcctttgtcagtgtttgtggacacttatggaactgggaagattcctgacaaggagattcttcanatgtgaaggagaatttcgacttcagacctggaatgatcaccattaa

SEQ ID NO: 228675 - DNA, 561 bp, Glycine max
  unsure (1)..(561): unsure at all n locations
taattggtgatgtgctctctggaacatcttcaagtggagatcatcactatggtatccttgaaggatggtttggtgtgcaatggtggacaggccggacatttgttgtactttttactacacttgccatatttgtacctcttgcgagctttaagcgaattgattcattgagattcacgtccgccctttcagtcgcacttgcagttgtttttctagtcattgccgtgggaattgctgttgtcaagatatttagtggaggcattgtgatgcccagactcttccctgtcacgactgatgtggcatcattcttcagactattcactgtagttcctgtgtttgtgactgcgtatatctgccactacaatgttcacagcatagacaatgaacttgaggactcctcacagatgcaaggggttgtacaaaccgcccttgttctatgctcttcagtgtatgtaatgataagcttctttgggttcctcctatttggcgagngaactcttgatgatgtactggccaatttcgataccgatcttggattcctttcgttctgtgctcatgatgctg

SEQ ID NO: 228676 - DNA, 566 bp, Glycine max
cgaaactctggtattgactcgcagtggagagagagtgttagcaccaaaaatgtcgaagttaatcttcgtgttccttgcactaattcctcttctctgcacctccttctcgccagagaaaccctcagatcggcgcatcctcgttttgctcgatgacttcgccatcaaatcctctcactctctcttcttcaactccctcaaatctcgcggcttcgatctccaattccacctcgccgacgaccccaaaattgcgctccagagatacggccagtacctctacgacgccctaattctcttttcccccaccattgaacgttttggaggatccattgacgcggctgcaattttggattttgttgattcgggtcatgatttgatcgttgctgctgatagcaatgcatctgatttaatcagggaaatagccaccgagtgtggagtggactttgatgaggatcctgctgctgtgggtgtggatcattcggcatatgcagtctctgctactgaaggagatcatacatttgatgctagtgatgaatttatcaagtctgacgtcatatttggaaagcaaa

SEQ ID NO: 228677 - DNA, 537 bp, Glycine max
gacttgggcattcaatgatgggcagtggagggccctacagaaatccccatcagtttatgatgaagaagttttcaaggctttggactttgtggtaagtgaagcaaagaaatacaaaatcaggcttatcttatcattggccaacaactgggaggcatatggaggcaaagcacaatatgtgaaatggggcaatgctgctggccttaacttgacctctgatgatgacttcttctcacatccaactcttagaagctactacaaggcccatgttaagactgtgctcaatagagttaacacattcacaaacatcacttataaggaagatccaacaattttcgcttgggagttgatgaatgagcctcgttgcacctcagatcccacgggtgacaagttacaggattggatacaagaaatggcattccatgtgaagaaaattgatccaaagcacctagtggaggttggagtagaaggattttatggcccatcaacacctcagagaactcagttcaatcccacacatatgctacacagggtggaact

SEQ ID NO: 228678 - DNA, 420 bp, Glycine max
  unsure (1)..(420): unsure at all n locations
gattctaagagagattttgctgctctttgaagaagggtgtttgcttgattttggagatgtcgctgctctcagatctcatcaaccttaacctctcagacactactgagaaggtgatcgcagagtacatatggatcggtggatcaggaatggacctgaggagcaaagcaaggactctcccaggaccagttagcgacccttcaaagcttcccaagtggaactatgatggttccagcacaggccaagctcctggagaagacagtgaagtgattatatacccacaagccattttcagggatccattcagaaggggcaacaatatcttggttatctgtgatacttacactccagctggagaacccattcccactaacangaggcacgatgctgcccaggttttcagccatcctgatgtttgtgctg

SEQ ID NO: 228679 - DNA, 368 bp, Glycine max
aaacatcttagtcttctcttcttaatttcctcactcacaaggatcaccaatgacaaagctattcaatttcctccctttcctcttcctcaacatcttcatccaaacaatttcagcccaagtagcaccggcaccagcgggacccaccaacatcacccaagtgcttgagaaagcaggacaattcacaaccttcatcaaactcctcaaagcctcacaaatggctgatagaatcaattcacagctaaacaactcaaaccgaggcctaaccgtgtttgcacccactgataatgcattctcacgcctgaaagcaggaacattaaactccataaactcacaagaccaaaggcggttgatacaattccacactctcc

SEQ ID NO: 228680 - DNA, 252 bp, Glycine max
gctgatatagttacagggactcgttatgttaaaggtggtggtgtgcatggatggaatcttatgcgtaaactaactagcaggggggcaaatgttcttgcacaaacacttttatggcctggtgtctcagatttgacaggatcttttagactttataggaaatcagtgcttgaagatatcattagttgctgtgttagtaaaggatatgtctttcaaatggaaatgatagtacgagcatccagaaaagggtaccat

SEQ ID NO: 228681 - DNA, 554 bp, Glycine max
ctcgagccgattttatactatacctacattttgataattttctttgtagttgatagccatggctacccgtggaaagcttgaggttgacattgatctcaagtccaacgcagacaagtactggcaaacccttaggaattctactgaaatattccctaaggccttcccacatgattacaaaagcattgaggttcttgagggtgatggcaagtctcctggttctatccgccacataagttatggtgaaggttcaccacttgtgaaatcatcctttgagaagattgaggctgttgatgaggaaaagaaggtagtgtcgtacactatcattgatggggaactcctccagcactacaaaacattcaagggagacatttcagtgactccaattggcgatggatgcgaggtgaagtggagtgctgtgtacgaaaaggttagccatgatatttctgatccaacccttgtcaagattttgcagtcaagaatttctagaggtcgatgcctatgttcaagccaacgcatagagaggttctattctatgcatgcctcttaataataat

SEQ ID NO: 228682 - DNA, 579 bp, Glycine max
ccttcatctctgcaaagcgcacttttgcgctttggggttcccttgttgcttgttatcaccttctgttatgctacttctactgctgcagcaacaactcaagtttcagggaatgaagagctgccaaagacaaacctaaatgggcatgatgaagaagcaaaattcggattttttcatcataaaccaatattcaagaaacatattccaattccagtatataaacctgtaccaaagccatttccagtgtataaacctataccaaagccagttccagttccagtgtacaagcctattccaaagccagtgtataagcctattccaaagccagttccagtgtacaagcctataccaaagccagttccagttccagtgtataagcctattccaaagccagtgtacaagcctattccgaagccagtgtataagcctattccaaagccagttccagtgtacaagcctataccaaagccagttccagttccagtgtataagcctattccaaagccagtgtacaagcctattccgaagccagtgtataagcctattccaaagccagttccagtgtataagcctattccaaag

SEQ ID NO: 228683 - DNA, 530 bp, Glycine max
gaaagctcagaaatcatgcttaaagcataaattaaatttaggtatagttgcatcatgcaaaaactagaaacctataatgtacaaatcaccctcaaagcccaaaatgcagcaaatgaagaaataacctgaattcaagcacacctatagtcccatcaattcaacaattctcatcaaagatacatataaaccacacagtttcaacctcctcatgttcctctccagaacatctgccttcctcaaattaccgcctccactctgcttgaattacctttccattcccatctctagaagatgatacagttctgtcacttctgtggccacctttgcctcctgattgaacttgtctcagtgtcctaggtgaatgcgaactaattttgcagttagttgaggatggcagagaatgtcgccgagtatggttgtttttttcacttccatcttgtccaaatctcggggatccttgtgccttcaactctgcctttgcagattcagttgctgccattgtacttggtagtgctggactattctgtata

SEQ ID NO: 228684 - DNA, 606 bp, Glycine max
  unsure (1)..(606): unsure at all n locations
cctagctagccacaatgcagatattcgtgaaaaccctaacggggaagacgataaccctagaggtagagtcatcggacacaatcgacaatgtgaaggcgaagatccaggacaaggagggcatcccgccggaccagcagcgcctgatcttcgccggtaagcagctggaggacggccgcaccctcgccgactacaacatccagaaggagtccacgcttcacctcgtcctccgcctccgcggcggcgccaagaagcgcaagaagaagacctacaccaagcccaagaagatcaagcacaagcacaagaaagtcaagctcgccctcctccagttctacaaggtcgacgactccggcaaggtccagaggctccgcaaggaatgccccaacgccgagtgcggcgccgggactttcatggccaaccacttcgatcgccactattgcggcaagtgtggtttgacctatgtttaccagaaggctgaggcttanggttacatttcgttnnttctagtttctggattttggaattttattattagtataatactctgtttntntgtctgtattttggtcgcatattattatgactgcctgaatgttctgccttttcatt

SEQ ID NO: 228685 - DNA, 539 bp, Glycine max
atgaaaaggcagaacattcaggcagtcataataatatgcgaccaaaatacagacaaaaaaacagagtattatactaataataaaattccaaaatccagaaactagaaaaaacgaaatgtaaccctaagcctcagccttctggtaaacataggtcaaaccacacttgccgcaatagtggcgatcgaagtggttggccatgaaagtcccggcgccgcactcggcgttggggcattccttgcggagcctctggaccttgccggagtcgtcgaccttgtagaactggaggagggcgagcttgactttcttgtgcttgtgcttgatcttcttgggcttggtgtaggtcttcttcttgcgcttcttggcgccgccgcggaggcggaggacgaggtgaagcgtggactccttctggatgttgtagtcggcgagggtgcggccgtcctccagctgcttaccggcgaagatcaagcgctgctggtccggcgggatgccctacttgtcctggatcttcgccttcacattgtcgattgtgtccgatgact

SEQ ID NO: 228686 - DNA, 530 bp, Glycine max
  unsure (1)..(530): unsure at all n locations
gctggtctaaggtttccaacattatatatttggactcccctgctggtgttgggctctcttactccaagaacacaagcaaatatgccactggggatctagaaactgcgtctgatacccatgttttcctcttaaagtggtttcagcaatttccggaattccaggctaatccattttatattgctggagagtcttatgccggagtttatgtgcctactcttgcttttgaagttgctaaaggaatccggagtggtacaaagcccgtgatcaattttaagggttacatggttggaaatggtgtcacggacgaaatatttgacggcaatgctcttatcccatttgtgcacgggatgggcctcatatccgacagtatctatgagaatttacaatcttcttgcaaaggaaactactacgatgcttactctttggacgaaaatgatgtgtgttacaagaccattganaaagttgatagggccattgatgggcttaacgtgtacaacatactagagccatgctaccatttccccgatgct

SEQ ID NO: 228687 - DNA, 355 bp, Glycine max
atcaatcaaattacagttaaataataataatcccttacatatgaattctttttggttcctttttgcgaaatcccatgcatatatgatttaatgtaaaggataaatcactaacgaaaaagctaaaatacactgctgtcacttctattcattaataatcgatcatgtatgttttattttacgccacatgatgcatttccttatattagcttaccttccaaccaacgggtgtaaaaatccaacgccttccgcggcttatattccggcacggtgtgcccagcttccttgattgttaggaaggtgaggttgttctcgtacgcttgcgagtacccaccaacttggatatttgagttccatg

SEQ ID NO: 228688 - DNA, 447 bp, Glycine max
  unsure (1)..(447): unsure at all n locations
cggctcgaggaaatttgatcaaatgtcaagtagtttattacgtaactgagctcaaatttgctggctgctcttgcaagctatgataattttgggcgggaagcccgaatgcaaccatattgtacacgtccacttgtcattttgttctgtccatcagcagtcttaagaggtcaattattccaacattgttttatgtaatgattatataaggatgttaatgtcgtttagaggttaacatccctttcttttttccaaaaaaaaaaaaaaaaaaaaaaaaaaaaaaaaaaaaaaaaaaaaaaaaaaaaaaaaaaaaaaaaaaaacaaaaaaaaaaataaanataacaaaaacaaaaacaaaaaaaaaaagggggggcccccaattagggagtttgtcacccgggaaataaattccgaccggggccctgggggggaccaatttttccctaaggg

SEQ ID NO: 228689 - DNA, 498 bp, Glycine max
tagtgagccccacatgcactccatgccttccatttcgcttcaccccaatgccaattggctcgccgcgcagagcttggataaccagatacttatttatagcacaagggagaagttccaacttaacaagaagaagagatttgggggacatattgtggctggatatgcgtgtcaggtcaatttttctccagatggacgatttgtcatgtcgggggatggtgaagggaagtgttggttctgggactggaagacttgcaaggtctacagaactctcaagtgtcacgaaggtgtttgcattggttgcgagtggcatcccttggaacagagcaaggtagccacgtgtggctgggatgggatgattaagtattggtatgtaaactctcgtgctatgcaacagttaatcacagaatcttatatggtgtttgttcaaatatgcttttgctatcacagttgcttgacttatggtctctctggtgcaacatgatataatttttgtctagc

SEQ ID NO: 228690 - DNA, 516 bp, Glycine max
ggggtgaaccatgcttatggaaattcttccaatgggactttaggtgtcagtaatgaaggtaaaatgttccctcaactgaatcaaatgatggctgggaattttaatgctcaaggaagcggggttccttggctagatctcggtaaatgaagacttatccttcattcatgcagatgagccggaagcccaaaaaagaaggtaaaaagccggcaaatgggagaaaggaaccgctgaatcatgttgaagctgagagacaaagacgtgagaagcttaaccaaaggttttatgccttgagagctgttgtccctaacatatctaaaatggacaaggcatctttgcttggtgatgccattacctttatcactgatctccagatgaagatcaaggtgttggaagctgagaagaacatgatccacaatcaggaccaaaaattgtcattgccagatatggattttcaggacagagaggatgagacagttgtgacagtgagatgccccttagatattcaccctgtttcta

SEQ ID NO: 228691 - DNA, 569 bp, Glycine max
tggaagagctcttttctgctgagatttctttgtctccccggtattctgatccagcagccggttctgtgttttcccctactcacaaatcagctgttctcaatcagtttcaacagctccaaagtatgttatcacctataaatactaatttgctgtctcctaagaatgttgagcatcctctttttcaggcttcttttggtgtctctccttctggaaggatgtcaccaagaagtgttgaaccaatctctccaatgagtgctcgtttatctgcatttgctcagcgagagaaacagcagcaacagctgcgcagtgttagttcaagagaccttggtgccaacagtcctgcctcacttgttggctcccctgcaaacccttggtcaaagtggggttctcctattgggaaagctgattggtcagtaaatggagactcccttggtcgtcagatgcgaagatcatcctcgtttgagcgcaagaacaatggggaagagcctgatctctcttgggtccaatctctggtgaaggagtcctcacctgagatgatcaaagagaagtttgcatctcctatgcctact

SEQ ID NO: 228692 - DNA, 576 bp, Glycine max
ctcgagccggtttatcataaacacgttggaatggcaaggaactacttcaaacaagaacatgatcttgagaagagaagagctgaggctgctaggattagggagaaatacccagacaggattccggtaattgtggagaaggccgaaagaagtgacatcccaagtattgacaagaagaagtaccttgtccctgctgacttgactgtaggacagtttgtctacgtgatccgcaaaaggattaaattaagtgcagaaaaggcaatctttatatttgtggacaatgtccttcctcctacaggagcaattatgtctgccatatatgatgagaagaaggacgaggatggatttctctatgttacatacagtggcgagaacacctttggggatctgatttccattcagtagccattatataaatttacaccgtttgacctctggtctccttgatctgtctgacaaattcgttatagtactcatgtcaagaaccttactctcaatgttttgtaaagttgtatataaattccgtgaacttgattaatattaaaagttccctcattcagtcctttctcgttttaaaaa

SEQ ID NO: 228693 - DNA, 576 bp, Glycine max
  unsure (1)..(576): unsure at all n locations
aaagaatacatagtaaaacaactgggtttggagaatggtaatgctgtggagatgggtacaatacatgcaggggactttatgaggcgattctgttctaatctttgtatgaataatcaagctgttaaagctgctcaggaagctgtgcagaaatcagaagaatttgatataaggaggagtcccatatcaattgctgcagcagttatatacatcataactcagctttctgatgataagaagcctctcaaagatatatcacttgccacaggcgttgcagaaggaacaattaggaactcctacaaggatctttatcctcatgtttccaaaataataccaaattggtatgctaaggaggaggatttaaagaacctttgcagcccttgaattgtagagcagaatattaccatccatattaacaatttacaagttataatgtcattagagcattctgtttcagatgtaactgaactggttattacaaatcanagtgccgttnntattcattgccgtcgatcgcaccattttttaaacccttctaatngaatactcgttgggagcaagcaacatacaatgtatgaa

SEQ ID NO: 228694 - DNA, 445 bp, Glycine max
gacagcaaaaaataactctgatgttttaccataatcaagaaattcatacattgtatgttgcttgctcccaacgagtactcaaattaggagggtttaaaaaatggtgcgatcgacggcaatgaataaaaacggcactttgatttgtaataaccagttcagttacatctgaaacagaatgctctaatgacattataacttgtaaattgttaatatggatggtaatattctgctctacaattcaagggctgcaaaggttctttaaatcctcctccttagcataccaatttggtattattttggaaacatgaggataaagatccttgtaggagttcctaattgttccttctgcaacgcctgtggcaagtgatatatctttgagaggctttttatcatcagaaagctgagttatgatgtatataactgctgcagcaattgatatgggact

SEQ ID NO: 228695 - DNA, 608 bp, Glycine max
gcagtggcagcgacgatccggctcacggtgccggccggaggagctcggccggcgccaccggttggaccggcgctgggtcagtaccggctgaacctgatggcgttctgcaaggacttcaacgcccgcacccagaagtacaaggcggagacacccatggccgttacgataacggcgtacaaggacaacaccttcgagttcaccgttaagtcgccgccggtgtcgtggtacctgaagaaagccgccggcgtggaatccggtagcagccggcccggtcacgtgaccgcgtcctcgttgtccgtgcggcacgtgcacgagatcgcgaaggcgaaacagtccgatccgtaccttcagaacatgcctctcgagtccatttctaagtccatcattggaaccgccaacagcatggggattaagatcgtcaaggacctcgattgaatcaatctttaatatatcaattgctttgttgtgttgtgctattaggattagggttagggtttctcttttaaacctcttttgaatttgctttgaagaggagccaaagcttgcacatatggtttggttattctgctaatgatgttttgatttgacaaatcttatcatatgaataa

SEQ ID NO: 228696 - DNA, 581 bp, Glycine max
  unsure (1)..(581): unsure at all n locations
ttttcccgcagtcatgggcaaggtcaagatcggaatcaacggatttggaagaattggccgtttggtggccagggtggctctgcagagagacgatgttgaactcgttgccgttaacgatcctttcattaccaccgattacatgacatacatgtttaaatacgacagtgttcacgggcactggaagcatcacgatgtcaccgttaaggatgagaagacccttctcttcggtgacaagccagtcactgtttttggacacaggaaccctgaagagatcccatggaagtcgactggagctgacatcattgttgagtccaccggagttttcaccgataaggataaggctgccgcacatttgaagggtggtgcaaagaaggttattatttctgcccccagtaaggatgcccccatgtttgttgttggtgttaacgagcacgagtacaagccagagcttgacattatttccaatgctagctgcacaaccaactgccttgccccgctcgccaaggttatcaatgacaggtttggcattgntganggtttgatgaccactggtcatttcatcactgctacccagaagactg

SEQ ID NO: 228697 - DNA, 369 bp, Glycine max
attgaaagtgtaaggttaattaaaaggtccatgtaaccattagtttcgataaaccaccgaaacgtcattactggaatctgtcttaacatggacaagtatacgagaaccacgtggaaaaatagaggacggccaaatatctactataacaatcaataacgacaagtacattagcaaatatataaaaatccaaaaactccatcctccttcacaagaggcaaagtccaaaatagagctaatgctcctaacaaggtaaatccactggttccagaaaccgatttattcagacctctcattttttgcacgagcaagacactaaatcgcaactagacaagcacataatgtgtagacaagcaactttgcagtacacca

SEQ ID NO: 228698 - DNA, 560 bp, Glycine max
aaaatttgagaaaatcacattccttgttgtttgtttccttcttttggaatttaactatgtaggggctctaagctgattttgagagtgttgttaaatatctgctatagtggtattgcattgcagaattccttggatctgtaattgagactccgtccactactgcaactgctatgggtcttgtggttgtggcatgtgtcatacatcctcttgtcatctttgatcctcacccagacaaagaacccctaagttggagtactcgaatgaagattgctgttggagctgctcgtggccttgaatatctccattgtaaagcagatccacctgttatctacagggacttgaaatctgcgaacatcttgttagataatgaattcaacccaaaactgtcagattttgggcttgctaaacttggacctgttggagacaatacccatgtttcaaccagagtgatgggaacatatggttactgtgcaccagagtatgccatgagcggcaaattaactcttaaatctgatatatatagctttggtgtgcttttgtgggagttgatcactggacgt

SEQ ID NO: 228699 - DNA, 284 bp, Glycine max
attattatatgatgcttaagtctttggttgtattatggagggtacacctacgtgtaagcacaacacttggctccacatcagcgtgcttgccacgtggtgacatgagaaattctgggagttgtgtattgaagtgagcaagctgctggtgctggagtttaggggtgatggtttattggcagggttacatgagtttgtgatggcgtgctactgtgattctttaggtttgaataaatgatatttactttataatggatattaaaaagaataatgctgttggagctgct

SEQ ID NO: 228700 - DNA, 486 bp, Glycine max
gaaagcaaggttttcacaccaaaggatctgattcattaaaagcaatagattcttcacaaccacacaccactcacttgacatatatggaacacatacataatccatatagcattacttagtggtggggcatttcttacttttatttaatgcacaaacataacaagggcaggaaggaaaaccacaaaattaaaacgaagatcatatagctgttaataataacaacaacacatgcaacataaaaaccacatgcagttgtggtagtggcatcttcttcagattggaaacgcctcaatgatggaagggagagcgttgatcttgatgatgttgtaacgcgcgaaaccggtttccttgaacagccacttccagttctcttcggtcctctctttgccaccggcgttgtgagcgagaagcatcatgtcgaatgcgatgccaacgtctgtgaagagttcgttgccttcgggtcgagaacgtgatccacattatgac

SEQ ID NO: 228701 - DNA, 569 bp, Glycine max
ctcgtcgtggatccattgtatcgattcccggtgaaggcgaatttgtccaggctgctgccttggtaagccaacccgctctttactccaaggagcttattgatggacacccagttgggcctgcaatggttcacccatctgagacagcttcaaaggggccaagttggaaagctcttcttgaaccaggggttaagcatgcattggttgttggagttggaatacaaatacttcagcagttttcagggataaatggggttctatattacacacctcaaatccttgaagaggccggtgttgaagttcttctttcagatataggcattggctcagagtcggcatcattccttatcagtgctttcacaaccttcttgatgcttccctgtataggcgtagccatgaagctcatggatgtttcaggcagaaggcagttgttacttactacaatccccgtgctgattgggtcactcattattttggtcattggaagcctggtaaattttggcaatgtcgcccatgcagcaatctcaacagtatgcgttgtggtttatttctgctgctttgtgatgggttat

SEQ ID NO: 228702 - DNA, 469 bp, Glycine max
acttctaaaggggaaaatccaaaaggctattttcactctaaaaatgcaaaattttatatttatgaaagaataatacatccatatgtttcaacatatcttcctccaaataaacttatgacaagcaaaatctgtaaagacgagagatgatggctttaacaactaaagttacggagtatataacggacttgtgttgtgtcactcattcttggcagaagcagcctgctttgctccaacagaaaagaattcagagatgacttcaaggggcatgccctttgtttctggaaccttcaaaaacacaaatatccacgagatgaaacaaacaactgcgtaaatggcgaatacaccaccaagtcctaaagagcccagcatcacaggcagcgagtatgtgatgatgatgtcttcaatccagaacactaatgcacagatagcaatgcagaggccacgcaccctagtggggaaaatctctgag

SEQ ID NO: 228703 - DNA, 536 bp, Glycine max
  unsure (1)..(536): unsure at all n locations
cttttctcttctccctttttctctctgtctctctctctcggtctcgctcttcttctcatcaagcacagagttacagactcaccgatcttccgattctctttcgtcttggtttatgagctcgaaggagagacccactcttggtggcacgcggattaagacccgcaaacgaaatattgctgcgccgctggaccctgcagcattctcggatgcagtggtccagatttatttggataatgctggtgatctggaacttattgctaagagtattgaatcttcagaccttaacttttcaagatacggtgacaccttttttgaggttgctttcactgggggtcgtacacaacctggaactaccaagcctgatgagggggaccgccacccatactctataatagagtgtgagcctaagcgtgaagtcattttaccatctgtaatctacatacaaaagattntgcggcgaaggccatttctcatcaagaaccttgaaaatgttatgcggaaattccttcagtccttggaacttttcgaggaaaatg

SEQ ID NO: 228704 - DNA, 546 bp, Glycine max
ataacacaaggcagaaagcaagctcatcctagagttttaaaaatggcagcagcctcctccatggctctctcttccccatccttggctggcaaggccgtgaagctgggcccatcagcccccgaagtcgggagggtcagcatgaggaagaccgtcaccaagcaggcctcctccggaagcccatggtacggcccagaccgcgtcaagtacttgggcccattctctggcgagcccccgtcctacctcactggcgagttcccaggtgactacggctgggacactgctgggctttcggccgacccagaaaccttcgtcagaaaccgtgagctcgaagtgatccactccaggtgggccatgctcggggccttgggctgcgtcttccccgaactgttgtcccgcaacggggtcaagtttggagaagctgtgtggttcaaggccgggtcccagatcttcagcgagggtgggctggactacttgggcaacccaagccttgtccacgcccagagcatcctcgccatctgggccacccaagttatcctaatgggtgct

SEQ ID NO: 228705 - DNA, 482 bp, Glycine max
gtaaaaagcaagtaacattaagttggattgggatacacaagataattcacattatctgaagtacattgcaataacatatacttcaccaaacacaaatctaaaaactctcaaaagtccacaagtcatccttttctttcatgctcacttgccggggacgaagttggtggcgtaggcccaggcattgttgttgactgggtccgcaaggggatcaacaaggttctccaatggacccttaccggtgacaatggcctgaacaaagaacccaaacatagagaacatggccaatctcccgttcttgagttccttcaccttaagctcagcaaaagcctctgggtcatcagcaaggcccaatgggtcaaagctgccaccagggtagattgggtcagtgacctcaccgaggggcccaccagcaatacgataaccctcaacagcacccattaggataacttgggtggcccagatggcgaggatgctctgggcgt

SEQ ID NO: 228706 - DNA, 547 bp, Glycine max
gcacttgcaatcctgggccacagatcaacacactccttcccaaaaggaccagtgatagctgaacctttaattacacccatgatattcactaccacaccagcataaactacggactacctgacaccactgtgctgacacaaccatcattcaatcaccattcaatgactggaagcacttcactttttgcagtcttggactaataatacattgtgacttgaagccggagaatattttggttaaaagctatagcagagatgtgaggttaaggtcgttgatctgggaagtagctattttgagacagagcacctttgctcgtatgttcagtccaagtcttatcatgctcctataggacaagaaggttattttgtggcttctatatgacaagaagattgatatttggtcacttggatgcatcttggcagaactttatacttataatgttgtataaattatttattttatattataatcattttacaaaattatttgagcatatatatatatatatatatatatatatatatatatatatatatatttctctaat

SEQ ID NO: 228707 - DNA, 353 bp, Glycine max
aaaccaaaaaaacccctctgggaaccatacattaataacaaaaaaacactcccccccgaaagggcccacaacggcaaagacttggggccaaacgccaaggaggcatgaaaaacaagcaaaaacaaccttggaaaaaactggaagaaacagagacattacagaaacaaaaacccctcctaaaagaattgcagggggagcccttggaacccgggcccttgaatcatagccactaaccacgggaagactagactccaagaaaacctttaaccggtcccttattgcttcaataatgccatcttctctaccccggttcctactaagaaggcgcctctccatctttttcctggaggccg

SEQ ID NO: 228708 - DNA, 504 bp, Glycine max
ggtgtggaacgatgagaaagagggatgccattcctaatgcgatgccttgatcacatttgaggacaattttttacagcaaacatacacaaaccccgtatagtgcattaagcgatatatttgttaatatatacattttttgtagtatgtacggctacttaaggatcacgagcctgaaaagtaatgacaaaacataatataaagcatgaaatatattccacgcttatgcctgttaagtattgcactaagcaatgcaacactagagatgatccaactcagcggtctttctttcgtacagcatttggatcagacatcatgtccatcatcattttctcaggtgaatcctcccaactcgcaaatgtcttcaagtcaacttttcttctttgctcagtgaaaagctcttctctcttcttgtaagagttctgcacttcctttgctactttcccaccaagtcccccaacttcaacttcagaaatcagacccttgacaggaaggaaaccctgatct

SEQ ID NO: 228709 - DNA, 525 bp, Glycine max
  unsure (1)..(525): unsure at all n locations
ttctctctctagaattctcagatttgcggggcgagatgatgcagcagccaggacccggcatggcacctcccaccatgggccagcagccgcagcaacagtaccagcagcagcctccgccgcagcagcaacaaccctacgtcatgatgccgccgcagcatcaggcgccgcagcctatgtgggccccatccgcccagcctccgctgccgcagcagcctgctagcgccgacgaggtccgaaccctctggatcggggatctgcagtactggatggacgagaactatctctacacctgctttgctcataccggcgaggtttcgtcagttaaagtgattcggaacaagcaaactagtcaatctgaaggttatgggtttattgagtttaatagtcgtgctggagctgagagaattctccaaacatataatggggctattatgccgaatggggggcagagtttcaggttgaattggngcaactttagtgccggtgagagggcgcgtcaagatgattctcctggatacaccatat

SEQ ID NO: 228710 - DNA, 517 bp, Glycine max
gttctagatcgcgagcggccgccctttttttttttttttttttttttttttttgttgatcgagtctgactcatggcggagattgaactgaaaactgcacctgctgattttcgttttcctacaacaaatcaaaccagacattgtttcactcgctacatagagtttcacagatgcttggcagcaaagggtgaaaactctggtgaatgtgagagatttgctaaatattaccgctccctttgcccgggtgaatgggttgaaaggtggaatgaacagagggagagtgggacttttccaggacctctttgaaatcatgtggcacttggatatccttctgaggcatgagaagtcttgaacattctgttggctcattttcttcagttgttgagcaattgtgaataaggcagtttgtggatattcattacttcacaaatggttgaagccattttgcttttgaagttgatataattgttctgactgtggtattttctttcttcagcattgaattgaatattaatagt

SEQ ID NO: 228711 - DNA, 482 bp, Glycine max
tttttttttttttttttactaattaatattcaattcaatgctgaagaaagaaaataccacagtcagaacaattatatcaacttcaaaagcaaaatggcttcaaccatttgtgaagtaatgaatatccacaaactgccttattcacaattgctcaacaactgaagaaaatgagccaacagaatgttcaagacttctcatgcctcagaaggatatccaagtgccacatgatttcaaagaggtcctggaaaagtcccactctccctctgttcattccacctttcaacccattcacccgggcaaagggagcggtaatatttagcaaatctctcacattcaccagagttttcaccctttgctgccaagcatctgtgaaactctatgtagcgagtgaaacaatgtctggtttgatttgttgtaggaaaacgaaaatcagcaggtgcagttttcagttcaatctccgccatgagtcagactcgatcaac

SEQ ID NO: 228712 - DNA, 558 bp, Glycine max
  unsure (1)..(558): unsure at all n locations
ggaccaactctccttgaggctcttgaccaaatcaatgagcccaagaggccctcagacaagccactcaggcttccattgcaggatgtctacaaaattggtggtattggtaccgtgccagtgggacgtgttgagactggtgtcgtgaagcccggtatggtggtgacttttggtcccactgggctgacaactgaggttaagtctgttgagatgcaccatgaggctctcacagaggctcttccaggtgacaatgttggctttaatgtgaagaatgttgcagtcaaggatctcaagcgtggttttgttgcatccaactccaaggatgaccctgccaaggaagctgccaacttcacatctcaagtcattatcatgaaccaccctggccagattggaaatggatacgcaccggtgcttgattgccacacttctcacattgctgtcaagttttctgaaatcttgaccaagattgacaggcgatctggtaaggagcttgagaaggagcccanatttttgagaatggtgatgcangtatgggtaaagatgattccaaccaagcccatg

SEQ ID NO: 228713 - DNA, 494 bp, Glycine max
aaaccataaacagtttataaaacttcgttataaattaaatgcaacttaaaacatccctcagcagcaaaggaaatggactaaaaccctatagctgcttgtgaaattcgaaatatctcagactcttcttaccatcaaaacaaaaaacagtactcatcaaaaacaaacagcaatgaaaattgaccaccgccgatcaagaacctagttttgaaagttacggctacatgaaatcggcagaaacttaaaaatataacttaaacaaaacacctaagactctgcaaggataaaactactataaaggagtaaccacgatgatgatcacatgtgctagcaaaattgcccaaatgcaatcacttcttcttggcagcggccttggtgaccttggctccggtggggtctttcttctcaacacttttgatgactccgacagccaccgtttgacgcctgtcccttacagccaaaacgacccaggggaggatactcagagaaagtttcaa

SEQ ID NO: 228714 - DNA, 540 bp, Glycine max
  unsure (1)..(540): unsure at all n locations
gcaaggtgttccacaaggttaagccctaccttgctatgatgtcccttcagtttggctactccggaatgtacatcatcaccatggtttctttcaagcatggcatgagccattgggtactctccgtgtaccgtcatatagttgccactctcatcatggccccttttgcatttgtccttgaaagaaaaatacggccaaagatgactctcccggtgttcctgaggcttgcggctctcggtttccttgagccagtgcttgatcaaaacttgtacaacatgggaatgaagaacacctcaacaacgtttgcatcggccaccgttaatgtcatgccagccattacttttataatggcactgatttgcaggttagagacagtgaacttgagaaaaatacccagcgtagccaaggtagttggaacagcagtaacagtctcaggagctatggttatgactttgtacaaaggcccggctcttcagttcataaagggacangcagcaacccaccatgaaagtggcaacagcacacaaccctctgaacaaaact

SEQ ID NO: 228715 - DNA, 548 bp, Glycine max
cacgggagtgccgttgctgcagcggttgagggagtggaacttcagcaaactactccaaatactttcattgaaacattgagagagcgcgtgttcaaaccttccctgtcaactatagtcgatgaaaatacaaaggttgctattgcattagcatcagatcctgtctacgtggctgcaaaaaagatgcgggagttgcatgtaaattcagctgtgattgtgatggaaaacaagattcaggggatacttacttcaaaggacatccttatgcgcgtggtggctcaaaatctttcccccgagtcggctcttctggaaaaggtgatgactccaaacccacaatgtgcatctctagagacaacaattcttgatgcactgcatatgatgcataatgggaagttcttacatcttcctgtggtggacagagatggaaatgttactgcttgtttggatgttttgcagataactcatgctgcaatttctctggttgaaagtagtcctggagcatccaatgatgcggcaaacacagttatgcaaaaattttgggactcggcttt

SEQ ID NO: 228716 - DNA, 582 bp, Glycine max
  unsure (1)..(582): unsure at all n locations
gcatcactgaactaacaaagcaaccctatgtcgaaggtggtttgtgtcaccggagccagcggcgccatcggatcatgggtggtcctactcctcctccagcgtggttacaccgtccatgccaccgtccaagatatcaaggatgaaaatgagacgaaacatttggaggaaatggaaggagcaaagagtcatctccatttttttgaaatggatcttcttgacatcgactccattgccgctgccataaagggttgttccggcgtaatccaccttgcatgtcctaacatcattggtcaagtcgaagatcccgagaaacagatattggaaccggcgataaaaggaacggttaatgtgttgaaggcggcgaaggaagcaggggtggagcgcgtggtggcgacttcatcgatttcgtcgattatgccaagtcctaattggccagctgataagattaagggagaagagtgttggacggaccttgaatactgcaagcanaaggggttgtattatcccattgcanagactctagcagagaaagcgggttgggactttgcgaaggagacaggttttgnatgtgcatgataaacc

SEQ ID NO: 228717 - DNA, 378 bp, Glycine max
gcctgtccttttttttttttttttttttttttttttttttattttcttttttatttattgtttggggtttttttttattatttttttttcactcccaatattttttttttagattcttccgggaaaaaaaacgccccaaatcataaattaaggaaattcttacccatcgataattaaatttgatgggaattatgatgtagcagtagcacacgtttgaccattaaaatcaaaataccagggcaaagtttcaagtaacttaagacagaacgtccaaaaaaactagataaaatgagtagattgctcgggaccttaaggcacttagcacttgacctcctttaaggcatatgcaaagtacaggaatgttggatcagcagcgcc

SEQ ID NO: 228718 - DNA, 573 bp, Glycine max
  unsure (1)..(573): unsure at all n locations
gaccgcaactgcaacctcggcgaggtcatcatccagaagaaccccgacaaccatgaactccccaaacgcatcaaaaccttcttccaaggtaccgatgagcaggtccagatggacgctgtaaccctcgagatcaacgccaccggcatgtactacctctacttcatgttctgcgacccttcccttaagggcaccaccattcagggaaggaccgtgtggcgaaaccctaatggctacttacctggcaaaatggcccctcttatgaccctctatgggttcatgtcactggcttatctgttgcttggtcttgcttggtttctgaggtttgttcagttttggaaggatattatacagctgcattatcatatcactgctgttattgctcttggaatgtgtgagatggctgtgtggtactttgagtatgccaattttaactccaccgggactaggcccatggggattacactctgggccgttacttttacctctgtgaagaagacgctgtcgcggcttctactgttggttggctctatgggttatngggttgtccgccccacgctaggcgggaaccgtgat

SEQ ID NO: 228719 - DNA, 566 bp, Glycine max
atgtgtatgacttgacacccatgaatggttatgtgtattgggctggtcttggtatctatcactctggtgtagaagttcatggtgtagaatacgcgtttggagctcatgactacccaacaagtggtgtttttgaggttgaacctcgccaatgccctggcttcaagttcaggaagtcaatattcataggaatcacatctttggattctactcaggttagggagttcatggaacgccagtcagcaagatacaacggtgacacatatcacttaattgtcaagaactgcaaccacttctgcaaagacatctgttacaagctgacggggaaatcgattccaacatgggtaaatcgactggccagactaggttcaatttgcaattgcattcttcctgaagcactaaggatttctgctgtagcgcatgatcctaattatcagcctcatgatagtgaaaagagaaggcttcgaagtggcttcaattgcttgtcctcaatctcaatgcgtcaaaaacacctttccacatcttcactggttctacagtcacccataagaggctgcttgtcgtcgtca

SEQ ID NO: 228720 - DNA, 589 bp, Glycine max
  unsure (1)..(589): unsure at all n locations
attgaatggcaatgtacaaatattttcatatcgtttgatcatatatgattttattttgtgattaagtaaaattcatgtaagatttattatcaaatattaaagaatattgaaaacaatatattaaataacaaaaatcctctttggtacgagttttttttacacaaattacgcttgaaaattttttcttgttgcaaatttgaagaaacagaaaagtaaattaacttagtcccatgcagtgtgtacaggagctcacatttgatagacaaatgccgtagttcactagagcttttctttgccatatggttcgtgatgggcaatgtatgggcctttgactcacgttttgggtccttcccacaagctccaaaactccaagtgctctgcatcatcttgctttcttggaatgcaatatgctactctttccctttcctactggttttgcttttgtgttgntgtgtgccactaatgagcacccttcttggatacaacatgagcatggngtcctctgctagaggggcatctgaagatcaaatctcacaacttccaaagtggagatataagggggtcacacaaactttgaccttgcaatgac

SEQ ID NO: 228721 - DNA, 563 bp, Glycine max
  unsure (1)..(563): unsure at all n locations
aaggagcaaatataaatatttacttcattattcagtacaactatatgctcaccttgcaatatttaaatgacagggtaggggaggaaaaacttgtaaaaacagtggactaatttgaaaagtaaggggattggttcactcctaagaacaagtattcaatgtagttttggttactggtgacctcttctgtacatgtacaaactcactcgtgtaaccaaaaggggaaaaaacaaaataattgggaatatatataagattgggaatgttcttgtgtattttctgcctcgtcctattgctacctttgtaatccttgtttgcaaagagggcagcatgatataattcttaaccattgatccacacattttaggtggaacaaatgggaacagggtaattgcctaacttcttctttgtctttgtatttggccaagcaaatgcagcattcctgttaattcacccaacaacacanacggatcaattcaataaanaataattatatatgaaaacaaacatgcacacatatatatgaggtatatatggtgaaaagtgagagagaaaaaaacataaat

SEQ ID NO: 228722 - DNA, 315 bp, Glycine max
gtgtgggtgatgtaatctctcttttgtggttcaaacgcagccttccccgttactgtactcaatttattgagatatgtatcatgctatgtgctgaccatggtccttgtgtctctggtgctcacaattctatagtaacagcaagggctgggaaggaccttgtctcctgtcttgtttcaggtttgcttacaattggtcctcgatttgggggtgccattgatgatgctgctcgctatttcaaggatgcctatgacaggagtcttacaccttatgaatttgttgaaagtatgaagaagaagggcattcgtgttccaagaa

SEQ ID NO: 228723 - DNA, 540 bp, Glycine max
gcgctcgaatttggtgaccattttcttttgaacccatagtagaacagagaagatcttcatcaagagaaggaataattttcaatttgaccaagttatctcatgaatgaatttttaatacaacttacaaactgaagatggctagataccagtagacccgtatactcgtcgaacagctaaaaactaaatcattccagcatgatgcataatttcccaaaagatgctaatttgaagcataacaagggtcctcctgccatacagaaccccctcactttgtgtaaagaacatcctcccatgggtggcggtagagtggttgtttcaacctcttctggtcaaaggtatgcccaatcagaccaatggagcgtgccaaaacaaaaagcccattcagatagccaatctccacaatttcatcaacctcttgtttggtgaacattccgctaccagcaagaagatccaagaaaagtgacccgattgcaccatctacgtttagaactaggttatttgccttggtgagggtgtagttttcaactttaacagcatact

SEQ ID NO: 228724 - DNA, 546 bp, Glycine max
acatcatttagaaccatgtctttctctaccaaattgcctttggtcctattattttcatcccttttcatccatgcatctttggctgagatggtgtgtgaggacctgccaaaggaagtgtgtgctttctcagtagcttcatcagggaagaggtgtttgttggagactgagaaggcagccgacggtggcgtcgagtaccaatgccggacatcggaagtggtggtggagaggatggcagactacatagagacagaccaatgtgtggaggcatgtggggttgataggaactctgttgggatttcatctgatgccttctttgagcctcaattcaccggcaagctttgctctcctgcatgttaccagaagtgccccaacattgttgaccttttcttcaacttggctgctggagagggggtatttttgccagaactgtgtgaaaagcacaagaccaaccctcgtcgtgccatggttgaacttgtgagctcaggagctgcccctggccctgtttctgacgtgtcagaggccattattgcatcagcacctgcccct

SEQ ID NO: 228725 - DNA, 333 bp, Glycine max
gtcaaaggacaaagtttccggtgatccaagacgtgcagtgtgcacaggtatcaccatcttcctcctcttagccggcgtcactctcctcgtcctctggctggtctaccgtccccacaagccgcgcttcacggtcatcggcgccgccatctacggcctcaacaccagcacgccgccgctcatgtcaaccaccatgcagttctccgtcctcataaagaacccgaacaggcgtgtctccatttactacgacaggttctccgcctttgtctcgtacaggaaccaggccataacgccgcaggttctgctgccacccctgtaccaggagaagcgcagctc

SEQ ID NO: 228726 - DNA, 569 bp, Glycine max
cccctatggctcgtcactccttgctcttagccctcctcctcttcgccgccgtggccaccgccgcgatggcggtggccgcgtccgacgccgacgacatcctgatccgtcaggtggtgccagatgttggcgaagccgaagaggaggacaacctgctgaacccgagcaccacttcgcgagcttcaaggccaagttcgccaagacctacgccaccaaggaggagcacgatcatcgcttcggcgtcttcaagtccaacctccgcagagccaggctgcacgccaagctcgacccctccgccgtccacggcgtcaccaaattctccgatctaactccggccgagttccgccgccagttcctcggcctcaagccgctccgcttcccggcgcacgcccagaaggcgcccatcctccccactagaggatctcccaaggatttcgattggcgagacaaaggagccgtcactaacgtcaaggaccaaggggcgtgtgggtcgtgttggtctttcagtacgaccgggagcgttgaaggagctcattatctggccactggtgagctcgtgagccttagcgagc

SEQ ID NO: 228727 - DNA, 476 bp, Glycine max
gacagtggcacgtatattagtttaattatgcaataactgagacataatcagtggcaagtattcccctgttgcagtttgaaacaaccccaccccgccaatctccatagagagttgcttatcttgcaccatttttaggaccacacatttccttggatttcccacttgtatatgtcaagcatacatacagaaattacatactacataaacaacatggtcttagcagtttcctgatcctatacggagataattttaccagtaccaaatgataaagttcacaacataaatatttatacaaactccccttagtccagtatcacatcacaaccacaatcaggcatatctttgtatttaatggctggatggatatatagcagctacagttgagaccatggaatctactccacacacatttcgacctctgcagatcttgtaatatccattctctcccagctctcgccccatgaattcttaatgat

SEQ ID NO: 228728 - DNA, 555 bp, Glycine max
ttctcgtttttactttgacggtttctagagagagaaagtttgttatagagagagaaagcgcgctgctgcttcttctgctgctgcttcgacagtgagaagagagagagaagcgctcttctccgtaccgtttctagagagagaaactgatggccggagttaatccgaacggcgtcgccgattttccggcgactccaacgcacggcggacagttcattcagtacaacatattcggaaacctcttcgaggttacggcgaagtaccgtcctccgatcatgcctgtcggacgcggcgcgtatggaatcgtttgctcgctgttgaataccgagacgaatgagctggtggcggttaagaagatagcgaacgctttcgacaatcacatggacgctaagcgtacgcttcgtgagattaagcttcttaggcatttggatcatgaaaatgtaattggtttgagagatgtaattcctgcacccttgcgtagagagtttaatgatgtctacatagccactgaactcatggatactgatcttcaccatatcattcgcttcaatcaaaatc

SEQ ID NO: 228729 - DNA, 438 bp, Glycine max
acgaagcaaataacttaagtaaaatacatgatgaacccgagaaaacagtcccaaaagaaaataaaaattataattacccgtcagggttaaaaaaaattggagattaatatcgttacttggcactttacagcagaaggacactcatcaagccgtaattgcacctacctagtcacacagattgaataaattacctagggagtttgatcggcaacaagggtgaattttcattcaacttgatcctttcgtgattgtaagaactgaacttaaagtgattaaaaaaattgaaaacgaattattatttttccttctaagcctgcttcaagtccttgagtttttctgctttaagcatactcaggattgagtgctaatgcttccctgtagatcatctcttttatttgctcttcatccaattggtggtgctcaaaacaaatgaaaatg

SEQ ID NO: 228730 - DNA, 562 bp, Glycine max
tttgcagtcactgctctgtttcaccgagtttgggcgtttagatcagaaccaaatcgtgttctcttccattggcaaacatggcaactcaaatgagcaagaagagaaagtttgttgcggacggagtgttctttgccgaactgaacgaggttctgacacgtgaattggcggaggacggttactccggcgtcgaagttagggttacgccgatgcgcaccgagatcatcatcagagccaccagaacccaagccgttctaggtgagaagggaaggagaattagggaacttacctcagtggtgcagaagaggttcaaattccccgaaaacagcgtcgagctttatgctgagaaggtcaacaacagaggcctgtgtgccattgctcaggccgagtcgcttcgctacaagcttctcggtggcctcgccgttcgcagggcttgctatggtgttttaagatttgtgatggaaagtggtgccaagggttgtgaggtgattgttagtggaaagttgatggctcagagagccaaatccatgaaattcaaggatgggtacatgatctcttttggaca

SEQ ID NO: 228731 - DNA, 483 bp, Glycine max
gagggaggaaatataacataatttatgcttggatccttgtactggagtataaaaattcttgaaaagataagacactacaaaaatctgaccacgtctaagccaatgaacactgcatactaggtactcaggtgctatgatttctacttaagaagcaacagggacctcaatattggttgccaaaacagcagcaggacgggcatattcttcctcttccttaggagtgtggattgtgacaagatcaggaaggggagttttaggaccctgtttccctttaggatcccaatcaagcatgatcttaaccttgataccaagaacaccctgtcttaggaggacatgtctcactgcagagtcaatgtaatccttgactggttgtccagaagagatcatgtacccatccttgaatttcatggatttggctctctgagccctcaacttttcactaacaatcacctcacaacccttggcaccactttccatcacaaa

SEQ ID NO: 228732 - DNA, 615 bp, Glycine max
gaaaaaaggagagtgcttagagagagagcaaaacatattattttcattttcatctttttttgagtatcaacaaatggcaaccactgtgatgaccactctcccccaattcagtggtcttagaccccaattctcagctgcccctgtgaagaacttggttgctgtgcaacccatgagtcgcaaggggaagggtgcattgggagctcgatgtgactacattggttcatccactaatctgattatggtggcttctacaaccctgatgctgtttgctggaaggtttggattggctccatcagcaaacaggaaagccactgcagggctaaagctggaggtgagggactcaggcttgcagactggtgaccctgctggcttcacccttgctgacaccttggcctgtggatctgttggccacatcattggggttggagttgttcttggtctcaagaacattggtgccctgtaaaatgcaactatataagtttagtgctagatgcatctgtaatcaatgttattatgtacttcatttcacatcactctgcagtctttctcaacttagcataatattcagtttctcccttttgctgctaatccacacccacccctatacaaaacaaa

SEQ ID NO: 228733 - DNA, 627 bp, Glycine max
  unsure (1)..(627): unsure at all n locations
gaaaaccttcttctataaagaagaccttcatccaggcaaaacaatgaaagtacaattcagcaagcctccctttcaacaaccatggggtgttggtacatggttaaaggaaattaaagacactactaaagaaggatatagttttgaagagctatgcatcaagaaagaagccattgagggagaagagaagttttgtgcaaaatccttgggaacagtaattggttttgccatttcaaagctgggaaagaacattcaagtactttcaagttcctttgtcaataagcaagaccaatacactgtggaaggagtgcagaatcttggagacaaagcagtgatgtgtcataggctaaatttcagaactgcagtattttactgccatgaagtccgtgaaacaacagctttcatggttccattggtggctggtgatggaaccaaaactcaggcacttgctatttgccactcaaatacttctggaatgaatcatcaaatgcttcatcaacttatgggagttgatcctggaactaaccctgtttgccatttccttggaagcaaggccattttatgggtacccaatttatctgtggacactgcctatcagaccaacattgtngcttaattagtccatgcatc

SEQ ID NO: 228734 - DNA, 503 bp, Glycine max
accatatatatatagagagagagaatacgaagcacactgatcacaggatgatgctctctttaagtagggaagcagatcttatcagtacacataggtaggttgaaattctagctctagcaatctagctagagaaggtagtacttgcacaacacacagcacatgataatttattttatacacaatctcattctcatggtgctcaagatgcatggactaattaagcaacaatgttggtctgataggcagtgtccacagataaattgggtacccataaaatggccttgcttccaaggaaatggcaaacagggttagttccaggatcaactcccataagttgatgaagcatttgatgattcattccagaagtatttgagtggcaaatagcaagtgcctgagttttggttccatcaccagccaccaatggaaccatgaaagctgttgtttcacggacttcatggcaggaaaatactgcagttctgaaatttagcctatgacacatcact

SEQ ID NO: 228735 - DNA, 578 bp, Glycine max
cttgcagggtggagcaagtactgtgcaacctggagcttctgctgttttatcatggagaagctcatcaaagaattctgaccaatgtttgcaagttcgacctaaatttgataattctcagccctcatactcatggggttgtgctattgctgttggttcaagttatatatatagcaaagaccaactattagatccaggttctactagactgacttctgtaacacccacttgctcattgaagcttaatgagcttgagaaaaaagatatacttgtgtgctgcaatcctagtagtggaagtaaacagttgtggtttagtgtgtgtacagatgcctcagttctcaatactgaactaaacgtacctgtatatgattggagaatatctattaactctcctttgaaattggagaaccgacttccttgtcctgctgaattttcaatctcagagaaaacaaaggaaggaaattgcattgagcggcatcatggtgtcgtatcttctcgtcagagtgtacatatctattcagctgatattcagaaacccttgtatcttactgtggatgttcagggtggctgggttatggaaa

SEQ ID NO: 228736 - DNA, 610 bp, Glycine max
  unsure (1)..(610): unsure at all n locations
ggaattcagagactgcaggatggagagtttattgttcaagcaactaaagattgtgttgcaaagacattgaaaagattagaagagaagattcatggccgagttctgaaccatttgttatatctcatgcgagtttcagaaaaggcttttcaaaggcgagttgctttaactcttgctcacctttgctctgcagatgatcaaagaaaaatatttattgattataacggtttggagttgcttatgggacttcttggctcttataaccccaagcaacaacttgatggagctgtggctttatgcaagttggccaataaagctatgactctgtctcctgtagatgccgcacccncatctccaacaccccaggtgtatttgggagagcagtatgtaaacaatgctaccttgtctgacgttacatttttggttgaaggcaaacgattttatgctcacagaatctgcctgcttgcatcttcagatgcatttcgtgcaatgtttgatggtggttatagggagaaggaggcacgggacatagagattccaaacattagatgggaagtttttgagctgatgatgagatttatatacactggatcagtagatatcactcttgata

SEQ ID NO: 228737 - DNA, 465 bp, Glycine max
gaaaaatgttcatcgagagtttcaaggttgagagtcctaacgtgaagtacacagagactgagattcagtccgtgtacaactatgaaaccactgaacttgttcacgagaacaagaatggcacttatcagtgggttgtcaagcccaaaactgtcaaatatgaatttaaaaccaacacccatgtccctaaactaggggtaatgcttgtggggtggggtggaaacaatggctcaaccctcaccggtggtgttattgctaaccgagagggtatttcatgcgcaacagagggacaagattcaacaagccaattactttgggtcgctgactcaggcatcagctattagagttgggtctttgcaacgagaggaaatatatgccccattcaagagcctgcttccaatggtaaaccctgatgatgttgcgtctgtgggatgggattatcagtactttgacctggcagatgccatg

SEQ ID NO: 228738 - DNA, 489 bp, Glycine max
gaaacatgaattaagcacaaaagacgtggataacttgatattattttattacatacatgcatagatagcctgctctcaaataagtcggcaggaacaaagatagagagattcaacgatcttcaaatttcacatttgccagaaatatataacagaaaagaggggtatgggatatgagttaagttttgatcacattcaactacactatcccaaaccgttactcttaagactttgaacttcacttgtactctaggatcatgttgttctcaggagctaatccaacacaagccctcaggatgttttccagcatagctcgctgctttgacaacgcattcaccactggtgtacccggtggaaccagaggggccttggtcaggtaactaaagatggtcgcaactgggtggaatgagtggaattttccctcattttcagctttaaactcgattcgagtgctgagctcagcaagaaggaccaagtccaagataataggag

SEQ ID NO: 228739 - DNA, 572 bp, Glycine max
  unsure (1)..(572): unsure at all n locations
cacactgataggtcctataatacaatagcactgatacaatgaagaatataattgcacctgtgcaaagtgctatgccatctccaacttttctgtggaggttcaaggtgacactctttctgatatggggctttacttgctgcaagattggttgggattctgtcatgagaatggatgcaaatctgcgagatctgtttttatatgaagtgtttttgtattacaatcctcttcttcttgtgactatgatggtttggctttggggagtaaatttgtgggtatttctgcaatccactgtaagctatgccaaggtttttgatcttgatcaaaaccaccttactcacaaagagatatggaagtgtagcacttggatgacaatcattgtccctactagcatgactgcttacctctatctctattctcatggggaagtatctttggctgcatctcaaccagtgcttctctacattcttgttgcagtaattttgatctttccctttgatattttctatttgtcttctcgntacttctttttgaggacattatttcngatagctttcccttttcagcccaataca

SEQ ID NO: 228740 - DNA, 484 bp, Glycine max
  unsure (1)..(484): unsure at all n locations
gaaggatattagtggaaatgccagagctctgaggaggttgagaacagcatgtgagcgggcaaagaggactctctcttccactgctcaaaccaccatagagattgattccttgtacgagggtattgacttctacacaaccattacccgtgcccgttttgaagagctaaacatggatttattcaggaagtgcatggagcccgtggagaagtgtttgcgggatgccaagatggataagagtaccgtccatgatgttgttcttgttggtggttctactaggattcccaaggttcaacagttgttgcaggacttcttcaacggaaaggaactttgcaagagtattaacccagatgaagctgttgcttatggtgctgcagtgcaggctgcgattctcagtggcgagggtaatgagaaagtgcaagatcttcttttggtggatgttactcctctatccactggttttgagactgcangangagtcatgact

SEQ ID NO: 228741 - DNA, 298 bp, Glycine max
ggggcaaaaacttatttcattgttcaagtaaaaacggggaaaagtccctttaaaaaaaaagagaaaaattaaatcgcaataaaaacctaatgaccccctggtatttaaacttcaaaaggggctttgacaaaatcaaaaacaacccctgaaaattttttgcttaatcgacttccccaattttggggccaacaccccttccactgccagctgcgggaccatccttattcatggttccccccggattaccaccaacaccctggaacatttttgctatgatgggattacaaatgctctccaa

SEQ ID NO: 228742 - DNA, 566 bp, Glycine max
cagagagcttggattgcagccaaggcaagttgctatatggtttcagaacaagagggctaggtggaagtcaaagcaacttgagagagactatggcatactccaatccaattacaacagtttggcttcccgttttgaagctcttaagaaggaaaatcaaacattactaattcagctgcagaagctgaatcatctaatgcagaagccaatggagccaggtcagagatgcacacaagttgaagcagcaaacagcatggacagtgaatcagaaaatggaggcaccatgaaatgtgaagctgagggaaagccaagcccatcaatggaaatatcagaacatttacttggtgttctgtctgatgatgacacaagcataaaggtggaagactttggcctagaagatgaacatggccttctgaattttgctaagcatgttgatggttccttgactttaccagaagattggaatgcttttgaatccaatgatctattaggccaatcaaccactgatgattaccaatggtgggacttctggtcctgaatgaaacagagcaaccaaaattatgtggagg

SEQ ID NO: 228743 - DNA, 553 bp, Glycine max
ctcattttgcaaaaggggatcaatcttcgtctcagaagaagtcaaggggaaggggtcgccattcatccaatttcactgaggaagaagatgaagaataccgaaaaggagaagaagatggtctagcaaacacacgtctggtgacacaaccatcattcaattaccattcagtgtttggaagcacttcagtttttgcagtcttggactaataatacattgtgacttgaagccggagaatattttggttaaaagctatagcagagatgtgaggttaaggtcgttgatctgggaagtagctattttgagacagagcacctttgctcgtatgttcagtccaagtcttatcatgctcctataggacaagaaggttattttgtggcttctatatgacaagaagattgatatttggtcacttggatgcatcttggcagaactttatacttataatgttgtataaattatttattttatattataatcattttacaaaattatttgagcatatatatatatatatatatatatatatatatatatatatatatatatctttatt

SEQ ID NO: 228744 - DNA, 456 bp, Glycine max
aataaagaaatatatatatatatatatatatatatatatatatatatatatatatgctcaaataattttgtaaaatgattataatataaaataaataatttatacaacattataagtataaagttctgccaagatgcatccaagtgaccaaatatcaatcttcttgtgatatagaagccacaaaataacctttttgtcctataggagcatgataagacttggactgaacatacgagcaaaggggctctgtctcaaaatagctacttcccagatcaacgaccttaacctcacatctgtgctatagcttttaaccaaaatattctccggcttcaagtcacaatgtattattagtccaagactgcaaaaactgaagtgcttccaaacactgaatggtaatcgaatgatggctgtgtcaccagacgtgtgtttgctaaaccatctttttctcctttttgg

SEQ ID NO: 228745 - DNA, 396 bp, Glycine max
ggaagagatggagaggcgacttcttagtaggaaccagggtagagaagatgacaatattgaaacaataaggaagcggtttaaggttttcttggagtctagtcttcccgtgattaattattatgatgcaaagggaaaagttcgcaagattgatgctgcaagacctatcgaagaggtatttgagacagtcaaagcaatttttggtccaaagaatgacaaggctgattgagcatgttcatcttgactccatggtggaaatttagaggtcatatcagtattggtggcttgttctattgtgtcacattttgttattatagtatagaaaatcgtagtttatacctgagggttttacctctgtattctaatgttatatcttgttgactcattcattgatattgc

SEQ ID NO: 228746 - DNA, 396 bp, Glycine max
gcaatatcaatgaatgagtcaacaagatataacattagaatacagaggtaaaaccctcaggtataaactacgattttctatactataataacaaaatgtgacacaatagaacaagccaccaatactgatatgacctctaaatttccaccatggagtcaagatgaacatgctcaatcagccttgtcattctttggaccaaaaattgctttgactgtctcaaatacctcttcgataggtcttgcagcatcaatcttgcgaacttttccctttgcatcataataattaatcacgggaagactagactccaagaaaaccttaaaccgcttccttattgtttcaatattgtcatcttctctaccctggttcctactaagaagtcgcctctccatctcttcc

SEQ ID NO: 228747 - DNA, 595 bp, Glycine max
gttgtgactcgttcttcttcgtcgttatcttcttcttttgttgtttgtgtgtttgttttttctctcacctgaaaatgtcttgctgcggtggtaactgtggttgcggaagcgcctgcaagtgcggcaacggctgcggaggctgcaagatgtacccagacttgagctacaccgagtcaaccaccaccgagaccttggtcatgggagtggcaccagttaaggctcaattcgagagtgctgaaatgggtgttcccgctgagaacgatggctgcaaatgtggagctaactgcacctgcaacccctgcacttgcaagtgaggtgttggagagctaaagcttcaagcagaaatggcccttagaaataatgataaaaactatatgtagtttcaaaacttcaaaattatgtagtatgtattatgttgcactctggtgttttgtgtctaaacaaacacccttagataaagtggtcatttcttgcccttgagcaagttcaagtgttttggacttgtgaatggtgtgttaaggtcattgggtgcctttttttatatatatatatatatataaaatgtttgttaaaaaaaaaaaaattttttttatat

SEQ ID NO: 228748 - DNA, 391 bp, Glycine max
accaaacatttatatatatatatatatataaaaaaaagggaaccatgaccttaacacacccatcacaagtccaaaacacttgaacttgctcaagggcaagaaatgaccactttattctaagggtgtttgtttagacacaaaacaccagagggcaacataatacatactacataattttgaagttttgaaactacatataggttttatcattatttctaagggccatttctgcttgaagctttagctctccaacacctcacttgcaagtgcaggggttgcaggtgcaattagctccacatttgcagccatcgttctcagcgggaacacccatttcagcactctcgaattgagccttaactggtgccactcccatgaccaaggtctcgggggg

SEQ ID NO: 228749 - DNA, 611 bp, Glycine max
  unsure (1)..(611): unsure at all n locations
gtgattgtttgttgttgtaactcgttcttcttcttttgttgttctgtgtttgtgtttgttttttctctcacctgaaaatgtcttgctgcggtggtaactgtggttgcggaagctcctgcaagtgcggcaacggctgcggaggctgcaagatgtacccagacttgagctacactgagtcaaccaccaccgagaccttggtcatgggagtggcacctgttaaggctcaatttgagggtgctgaaatgggtgtgcccgctgagaacgatggctgcaaatgtggaccaaactgctcctgcaacccctgcacttgcaagtgaggtgttgggagagcaagcttcaagcagagatagcccttaattaggaataatgataaactattaatgtgtagctaaaaacttatgtattatgtctgtgatggttttcgtgcactctggtgttttgtgttaaacaaacatccttagaataaagtggtcatgtcttgcctttcagcaagttcaagtgttttggacttgtgatgggtgtgttaagctcatggttgcttctttnttttntttttttaatgtttggtaattgtcgcttctggataaagttcgctaatctgaatatgaatc

SEQ ID NO: 228750 - DNA, 404 bp, Glycine max
aaaattataagcggagattcataattcagattagccgaactttatacagaagcgaccaatttccaaacatttaaaaaaaaaaaaaaagaagcccccttgggcttaacacacccatcacaaggccaaaacacttgaacttgctgaaagggaagacatgaccactttattttaagggtggttggttaacacaaaacaccagaggggccgaaaaccatcacagacataatacataagtttttagctacccattaataggttatcattattcctaaataagggctatctttggttgaagcttggtctcccaacaccttacttgcaagtgcaggggttgcaggagcaatttggtccacatttgcagccattgtttttagggggcacacccatttcagcaccctcaaatt

SEQ ID NO: 228751 - DNA, 314 bp, Glycine max
atcttgttgtttggagcgatccgagaaaaactctgtaaacatgttggtttaccaggacctccttacaggtgatgagcttctctctgactccttccgttacaaggaaattgagaatggaatgctgtgggaagttgaggggaagtgggttgttaaaggagcagttgatgtagacattggtgcaaacccttctgctgagggtggaggagaagatgagggagttgatgatgcagctgttaaggttgttgacatttgtgacacattcagacttcaggagcaaccccgcattcgataagaagcagtttgttaccttcatg

SEQ ID NO: 228752 - DNA, 425 bp, Glycine max
tttttttttttttttttttttttttttttattcaaatccttatcaataaaaccgtgaagcccaattaaaatatttctagtacacacccaaaaattcttcaaaagaaacttccgggaatctagcacgaccaaaatcataaattaatgaaattctaacccatcgataattaaatttgatgggaattatgatgtagcagtagcacacgtctcaccattaaaatcaaaataccaggtcaaagtttcaagtaacttaggacagaacgtaaaaaaaaactagataaaatgagtagatagctcgggacattaagtcacttagcacttgacctcctttaaggcatatgcaaagtacaggaatgttggatcagcagcgccgtccttgtagtaggcaaagaccaagcaagcatcattacccatgctctcaccaac

SEQ ID NO: 228753 - DNA, 555 bp, Glycine max
  unsure (1)..(555): unsure at all n locations
ttagaatacatcaagagggagaaaaatggggcactccaagcattcttcgtgaaacacataaacaactgggttacaagagcatactgccacaaggttcttcgtctctcagctgctactcaggatttaccaaagtctgtaatttgcaatgttcatggtgtgaatcccaaattcttgaaaattggagaaaagattgctgcagagagggagctagggcagaaagcctttacaaaaggggcgtatttcttgggaaagatggtgtgggcaaagggatacaaggagttgatagatttattagcaaagcacaaggctgaccttgatggcttcaagttggatgtatttggaaatggagaggatgctaatgaagtacagagtgcagccagaaggttggatttgaatctcaactttcagaaaggaagagatcatgcagacgattctcttcacaggtacaaagtctttataaatcccagcattagcgatgtgctatgcacagctacagctgaggcacttgccatgggncaattgtagttngtgctgatcatncatcaaatgagttct

SEQ ID NO: 228754 - DNA, 420 bp, Glycine max
attcgaagatactcaaaacaaagtctgaactctttctctctctcagtctcaactctgaaattctgaactaggatttggatgcttccattccctctctctctttctgttcccaaaattctcattccacattccaaattcgcccttcatggggaaaggagccggctgccttcatagcaagaagaagcccccgccggtcgccgacgatgctcccgctcccaccgttgccgccgcagcccccaccccgccgccgatctcgcctccagacaacgcccacgcgcgcgaacccgacgcgccagcgcgtgaagcagcgtcgtcgtcgtcgtctctcccgggcggcgcgaaattgaaggtcttcatcgtgttctattcgatgtacggacacgtggaggggctggcgaagaggttgaagataggcgtgga

SEQ ID NO: 228755 - DNA, 606 bp, Glycine max
  unsure (1)..(606): unsure at all n locations
gaatgaagcttctccaagatcttgtcccaggttgcaataaggtcacgggtaaagcactaatgcttgatgaaattataaactatgttcagtcattgcagcgccaagttgagtttctgtctatgaagttggcttctgttaacaccaggctggattttagtattgagagtctaatctcaaaagatatatttcaatcaaataattctttggcacacccaatattcctgatagattcctcagcaccacccttttatgggcaacaccctcagccaaacccagcagtccacaataacattcctaatggaactatgacccacaactcagtggacccattagatactggtttgtgccaaaaccttggcatgcatttaccacacctaaatgattttaatgaaggtggttctcagtatgcaaaaccattctctgaagatgacctccacaccattattcagatgggatttggccaaaatgcaaataggataacaccaatacaatctcagagtttcaacggctcaaatcaagtacccctatgaaaatcaagctctgatcaccattcattacggctgaantgaagctcggaggaataggaagactactgctgtacacaac

SEQ ID NO: 228756 - DNA, 609 bp, Glycine max
gaaaatgatttcaacgaagccctcaaacacaccaatgctggtggaaccatggacctgcacgcgttgaatgttcagatctttattaagatgcataggtcggattatgctgagaggcagcttcggatcatgcagcagattgatgaagatcacactctcactcaactcgccaatgcctggctcaatttggctgtgggtgggtcaaagatccaggaggcgtatctgatcttccaggatttgtcggagaggtatcagtccaccagcttgcttttgaatggcaaggctgtttgctgcatgcacatgggcaacttcgacgaagccgagacccttttggttgaagctctaaacaaggatgccagggatccagaaactctagccaatctagttgtatgctgtcttcacctcggcaaaccatctaacaaatcattcagccagctgaaaatttctcatccagagcatgtattggtcaaacgggtatcatcagctgaagaaagttttgatagagcgctacaatcattttcctcatgagtgtcgatgattgaatttctttaagagttgaatggtgtgagatcttccatgcaatttttacaccttatcgtggctattggattg

SEQ ID NO: 228757 - DNA, 485 bp, Glycine max
gaggaaatacagaagcagatactggagccggcgataaaaggaacagttaatgtgttgaaggcggcgaaggaagcgggggtggagcgcgtggtggcgacttcgtcgatctcatccattatgccaagccctaactggccagctgataagattaaggcagaagagtgttggacagaccttgaatactgcaaacagaaggggttgtactatcccattgcaaagactctagcagagaaagcgggttgggaatttgcaaaggagacaggttttgatgttgtcatgataaaccctggtacagctttgggccctctgcttccaccaagaatcaattcaagcatggaaatgcttgttagtgttctcaaagggggcaaagagacgtacgaggacttctttatgggaatggctcacttcaaagacatagcattggcacatattttggcacttgagaacaagaaagcagcaagaaggcacttgtgtgtggaatctat

SEQ ID NO: 228758 - DNA, 437 bp, Glycine max
ggatcatgtccatggaatgaagtaactaacccagtcccttgacttggctcgctggttcgattcgattcgattcgattctcggagatgaagaagggcttgatggatagctatggcgttgctgtgattgtgttggctttgagtttgtgtttgggttcatcatcggagcaattaaattcacgagaatgcgagaatctcggtttcatcggactcgccttgtgctccgactgcaacactctctccgagtacgtcaaggacaaagtgattatttgaatcgtctaaatcaatatcgccagagagtttggacttgtaaaattactggaaaatctggcttgacttatgaagaggctctggtgttagagaagcatgctgctgagaaagttcaacagattccggaagaattagtggcacctgctctaaggattatccattacagtaag

SEQ ID NO: 228759 - DNA, 609 bp, Glycine max
  unsure (1)..(609): unsure at all n locations
ggcacgaggaagtcaaaaaggccgtagcctgtcttctgtttggagggtcaagaaagaatttgcctgatggagttcggttaagaggtgatatcaatgtattgcttctgggtgatccatctacagcaaagtcacagtttctgaagtttgttgaaaagactgcccctattgctgtttatacttctggaaaaggctcatcagcggctggcctgaccgcttctgtaatccaagatagtggcactcgtgagttctatcttgaaggaggggccatggtcttggctgacggaggtgttgtctgcattgatgagtttgataagatgaggccagaagatagagttgctattcacgaggccatggaacaacaaactatatctatagccaaagctggaataacaactgttcttaattcaaggacttcagttcttgctgctgccaacccttcatcaggccgatacgatgatcttaagactgcacaggataacattgacttgcagacaactattctttctaggtttgatttaattttcattgtgaaagacgtcagaatgtacagtcangacangtatatagctaatcatatcatataggttcataatcaacttgtggaaggat

SEQ ID NO: 228760 - DNA, 563 bp, Glycine max
ctggaaacgatgtcattggtattgatttgggtacaaccaattcatgtgtttccgttatggaaggaaagaaccccaaagttattgagaattctgaaggtgcacgaacaacaccatctgtggttgctttcaaccagaaaggggagctgcttgtaggtaccccagctaagcgtcaagctgtaactaacccaacaaacactctctttggtaccaagcggttgattggtaggcgctttgatgatgctcaaacacaaaaggagatgaaaatggttccattcaagattgttaaggctccaaatggagatgcttgggtggaagctaatgggcagcagtattcccctagccaaattggtgcctttgttctcaccaagatgaaggaaactgcagaagcttatctagggaagtcaatttctaaggctgtaattactgtaccagcttacttcaacgatgctcagaggcaggcaacaaaagatgctggtagaattgcaggtcttgacgtgcagagaattatcaatgagcccactgctgctgcactttatatgggatgaacaagaagagggtctcat

SEQ ID NO: 228761 - DNA, 585 bp, Glycine max
  unsure (1)..(585): unsure at all n locations
ctcgagccgaatcggctcgagggagcagaggggctaaacagagaacagtacgtgtaccttgcgaagctgtcggagcaggcggagcggtacgaagagatggtggagttcatgcagaaggtggtggtggggtggacgccggcgtcggagctcacggtggaggagcgcaacctcctctcggtggcctacaagaacgtgatcgggtctctgcgtgccgcgtggcgcatcgtgtcctccatcgaacagaaggaggaagggcgcaagaacgacgaccacgtgtccctcgtgaagcactacagatccaaggtcgagaacgagctcacgcaggtctgcgccagcatcctcaacctcctcgactccaacctcgtacccttcgtcttcgccagcgagtccaaggtcttctacttgaagatgaagggcgattaccaccgctatctcgcagagtttaaggttgnggatgagagaaaaaccgctgctgaggataccatgttgtcttacaaggctgcccaggacattgctttggnggatcttccccctactcaccccatcagattgggtctcgctctcaacttctncgcttctactatg

SEQ ID NO: 228762 - DNA, 352 bp, Glycine max
tttgtttttttttttttttttttttttttttttttttttttttttttttttttttttggttttttttttttttttttaaggaaaaaaatcccctatggggcattatataatatgggacaggggtcacaaacggggtcctaaacttttttttgacctcaaaccacccccccggaaaatgaacggggttataaactaaaactattctgcacccctgggaaaaaaacccaacccacatttggctgcagatgcccccccccccgtgaaaaaaagggccctttttggggcgagttttctttttaaagggagcctggaacaaaacaacggtccctggggggggaagaaacgtttcttt

SEQ ID NO: 228763 - DNA, 418 bp, Glycine max
aaaaagaaacccaaccttgtcatatacttgggggaagagggcaacaaattttacatagaagacatggggggggccagagaaaataaagagatgcatttatatgactctggggttatttttgattttgcaaattaaattacacaatcacagccggacattacacatgagttgggcctttttcaacttaaaagcagaggataacattggcccatgacgcgacacatgcaccacctaataatcataattttacatctttacatacaaaatacaaagactttaaattttaaaaagaagaaaagaggtaaaccgctcttcttaatgaaatgaaaccaaaacccacaaacattggcttgatttttgttgttgttgttgttcccaacttgattaaacatgaaccgtttgattgaatcacttggac

SEQ ID NO: 228764 - DNA, 602 bp, Glycine max
caatatggtaatcctgataaagtatgcaagcctatggttgaagcaaagaatgctggagaggacttggtggatgcttatgccaaatacgtcaaagagtactacattggaacctttggtgttaatgtgcagacttatgaccaggagtacttgaagaaaactgctatcaatgaagacagttctactcgattatggtggtttcaagtttgcactgaagttgcattctttcaggtggctccatcaaatgatagtatacgctcctcagaaattgatgcagaataccatatggacctttgcaaaaatatctttggagagggcatctttcctgatgttgatgcaactaatttatactacggaggcacaaaaattgctggttcgaaaatagtatttgcaaatggctcacaggatccttggcgtcatgcgtccaaacaaacttcatctcctgatctgccttcctacaccatcacatgtagcaattgtgcccattgtactgattttcgaggatgtcctcaatctcctttggtccttgaaagtaatgagaagaacttgctctcacctgatgcagttcacaaagtaaggcaacagattacagaacatatggactt

SEQ ID NO: 228765 - DNA, 581 bp, Glycine max
  unsure (1)..(581): unsure at all n locations
attgttcaatccaggccttctagttttcctatatcttcccaagagttgttcagtatcctagatgattctagtgaaaaaacatttttggttggatcagcagtgtcgatgcaaagatatgtttttgatggagaggctggaaagattggtcttgaaccaaaaaacctagttgcttgcacaagtttcttgctagagcagaaactggtgaaggcctggcttgctgacaaggatgctgaagcattgagatgccagaagctgctggtggaggaggaggaagctgctcagaaaagaaaagctgagattttagagaggaaacgccaaaaaaagcttagacagaaagaacacaaggccagggaacgactcgaagatgacacagaaattaaagagaacataagcagcacaggagaggatgttttgccagctgaagcttcttctggtacatgtgactttgaagcacagaatccagatatatttgcggatcattctcctncaccacatgtaacttctcgctgcctagacactaatgaagttgtagaaggggatacagtgtcaggttatgattttgcactgatcagttatagagc

SEQ ID NO: 228766 - DNA, 264 bp, Glycine max
gtaaaacctcagtctctcactcgcagatctttcactcacccaaaaccaagctagtccgaggaagtcctctattcagaaccagatatggagacaaaacccaccgagatcagcagcggcaagatgttcggaggctacaacaagaggttcagacatttcagccctaccctcggctgctccatgaacttccacatctacttccctccatctccttctccctctcacaaattcccagtcttgtactttctctctggcctcacatgcacg

SEQ ID NO: 228767 - DNA, 568 bp, Glycine max
  unsure (1)..(568): unsure at all n locations
ctctctgcgatgcattcatttcttcgttcttctccaccatttaatacatattattatactacaaaaacataacctccagaacacatttatatattcccttgttgcatatatactttgttgttgttgttgttgttgttcttcttgtaaatggcgaatgcatctgggttcttcagcccttcggttccccacttcaaagtgagggttaagcctctcaccactgccattggattctccgccaaagtcgtttgcgttggaaacatcgaaggagctgaaaaacatgcttccaccgtttccccttcttcccaatctccaatacccaggcttgtcagcaaagggtgcaagttagttggatgtggctctgctgtgccagctcttcagatttctaatgacgatctttcgaaaatggttgatactaatgatgaatggatatctgttcgcaccgggattcgtaacggcgtgttctttcaggcaaagataacttgacaggtttagcagtagaggcagctaggaaagctcttgagatggaaaggtagaccctgatgatctngacctaattatgatgtgcaca

SEQ ID NO: 228768 - DNA, 591 bp, Glycine max
caagaaaaaacacaataactggggtggcatataaggacgatcctgccatatttgcgtgggaacttatgaatgaaccccgttcccaacacgacaactccggaaaagttattcagcaatgggtgattgagatggctgcctacgtcaaatccatcgatagcaatcatttgctggaaataggactcgaagggttctatggtgaaacaatgccagagaaaaaacaaatcaatccagggtaccaacttattggcactgatttcatttctaacaacctagttcaccaagttgattttgctaccatgcatctctaccctgaacaatggttgccaggctcaaacgaagctgctcaggttgcatttgttgacaaatggctacaaacacacattcaagatgccaaaaatgttctggcgaagctattgatgttggtgagtttggcaagtctttgaagtcatttagcgtggttgaaagggacaattacttgagcaaaatgtataatgccatatacagtagtgctagtagtgggggaccctgtgcggtgggctttttggcaactcatggctcaggaatggatgggttcgtgatggtatgaagtgt

SEQ ID NO: 228769 - DNA, 462 bp, Glycine max
acggcaaacaaatggaattctattacattatgaattacaagttccttgcatggcatacatcaaggaaaactgggaagttgttgtatgtggattgatttgccacagccttatatagacaaaccaaatgcttaatatcaacacaaacacgtgtacagaaaagaaaccactcttcaagaaaacagaaaataagaaaaactaacatattggaagaggtgccccattccactccccaaggcattccaaaagtggatcaatgatcttcccttggcacaaagcagtgaacactttgtcacactcttcacccggtgagataaccctttcaccagttagcaatgctgtccccaactcctctctcacaaacttgtacaaggggtaagacctgcattccttgatcttgtttggaattgcacattggtcattctcatatgcaactcttgcaccttccacttcctttaggcaaag

SEQ ID NO: 228770 - DNA, 593 bp, Glycine max
tttatttctatatccacacccttcatttcttaagagttcagagtcatggaccaaactcaaaatgagtctggttggatgcattctatcaaagtgacactaggatctctagatcacagagaggttaagtccttcataagcagcatcccttgtgtttcaagcaagcttagaaaatcaaatgaggaagcttattcaccaaagtttgtcagcattggacccttatacagaggaacaagtagccaccttctggccatggaagagcacaaatggcgttacatgctggctctccttcatagaactcaaaatccagtttcaaccttggatgaatgtggcactgtcattctaggcttggacgatgcagttcgtgcaagctatggaggtaacatcaaatatgaagctcatgagctagccaaaataatgttacttgatggctccttcttgctagaacttcttcttagatgcgcaccaccaaacatggttcctcaaattccaaaagaagataaccataataatggttcttcttcagatccaatactaggacacaaagaggtgtttttatctattctcaccgatttcactctactagagaaccaaat

SEQ ID NO: 228771 - DNA, 607 bp, Glycine max
attgaggaatcatgataatttggaatcattagtaattgtggcaagtgcatcagatttactactacgagccacagatggaatgctggtggatggagaagcttgcactttaccacagctgaagctattggaagcaacggcgaaagcggttcaaccagtgattgagttgggagaatctggacttggagtggcagatgggctttcaaacctgttaaagtgtcgcctaccagctacaatcagatgcctttctgatccaagtgcacatgtccgtgctctgagcagttcggttattcgtgacattttgcatactagttcaattggatcgagtcctaagccactgcaaaagaatggcatccatgatcagtacttaaattttgatgtcattgactggcgagctgacgtataaaactgcttgacatgggaagctcacagtcggctttcaaatggattgtctattgaatatcttaacacagctgcggatgacttaggctttgctatctgtatctgacatgaaatgagaccatatgtaatcatcttagtaatttatgattaggaacttaaataagcttttatgacagatttatctcagattgcataaaccttgagtatc

SEQ ID NO: 228772 - DNA, 527 bp, Glycine max
tcgactcaagatcaggtgagggagctttcctgtcatcactgtatgacgtcctccttctttgggggggggggggggtagaatgggaagacaaactaagaagtagccatgcttacaagtaaatggatagttggtgggccaagcatggttggattgggtggtaacagggggagcgtatgaggtagggttttaaggaggataaaggttgctatagaataaagtaagtaagtaaggtgtaagaggaataaaggaaggaggggagaaagaaagtaataagtggtaagaaggaaaagggactggaaggtaatggggcaggtgtgaggggcggagggtggcaagggccgtgtgatcggggagggtagcaagggaagtaggttatgagggggaaggcgcgaagggcctcgtaggagtgagtgcgaaaggtaagagggccagggcatgaatgaacgaaaaagcacaggaaagaaggatcgtgaaaaagagcggaggtggaatgagcgggccgaaaaaaagaatgatgagtggaggga

SEQ ID NO: 228773 - DNA, 565 bp, Glycine max
cgaccatatcactttggtcaccttcagatacattcgtcgcattcatccatttaacttccacaaattcctacaaattctaaccaaacccttcactactccaaatcccacaacttctctcttttttttccctccttcttttccctttttctgttgtccgatcttctgcctcctagatcttggtatttgggattgatcacctggagttggaaatggttaaaagttatggagtgttctgatttgcgaaagatatcatgttgcagtgcttagaaggacttaagcctttatttgcgtccatattgcgatgttgtgacctggatatatataaccagccaagaggccttgaagatcctgaacttcttgctagagagacagtgttcagtgtaagtgaaatagaagcactctacgagctcttcaaaaagattagcagtgctgtaattgacgatgggttgattaacaaggaagagtttcagttggctttgttcaagacaaatataaaagaaagtctgtttgctgatcgggtatttgatttatttgacacataacacaatgggatactgggttttga

SEQ ID NO: 228774 - DNA, 525 bp, Glycine max
attgtgtgttgccactctcctctcttgttgtacacttgttccttttggtttgcagaaaggaacatggaagctgtgtgtgctttttctgttggcacacttcacatcccaacagcacatgaaacatcaaactcttttaggaaatccatattcttgagcaaccaagtggcttcaccagtttcattggtttttctcaggggcagttcaaaatccaagcttttaactgccttgtcaccccctccattgacagaatccagtaaccaacctgaggctgagccagaatttgaaagtcatgcagagaaatttgactggtactctcagtggtaccctttgatgccaatttgtgaccttgacaagaggaagccacatgggaagagggtgttgggaattgatgtggttgtgtggtggatgtaatgatagggtgcttggcaggttcatgatgatgcttgtcctcatagattagcacccttgtctgatggaaggattgatcaatggggcacgttgcaatgtgtgtaccatggttggtgt

SEQ ID NO: 228775 - DNA, 604 bp, Glycine max
gtttgttgttgtaactcgttcttcttcttttgttgttctgtgtttgtgtttgttttttctctcacctgaaaatgtcttgctgcggtggtaactgtggttgcggaagctcctgcaagtgcggcaacggctgcggaggctgcaagatgtacccagacttgagctacactgagtcaaccaccaccgagaccttggtcatgggagtggcacctgttaaggctcaatttgagggtgctgaaatgggtgtgcccgctgagaacgatggctgcaaatgtggaccaaactgctcctgcaacccctgcacttgcaagtgaggtgttgggagagcaagcttcaagcagagatagcccttaattaggaataatgataaactattaatgtgtagctaaaaacttatgtattatgtctgtgatggttttcgtgcctctggtgttttgtgttaaacaaacatccttagataaagtggtcatgtcttgcctttagcaagttcaagtgttttggacttgtgatgggtgtgttaagctcatggatgcttcttttttttttttttaatgtttggtaattggtcgcttctggataaaagttcggctaatctgaattatgaatc

SEQ ID NO: 228776 - DNA, 509 bp, Glycine max
tcgcgatctaggccgcccttttttttttttttttttctttttaacaatatgaaaataacactacattaccaaactaaaaccactgcagaaggcaatgtttgtgaacacacaacagagcttctggacgggaaaaagttccccagccacacaaatcttggtttaaaaaaagaaaatatttattataaaacgttaataacattcgatggcaagttcatcatcacggaacccatcagctacagataatgaccgagttgtttttactattctgcagcactagcagcactaagatccacactgaggtcaataacctttccagttatcaatgtatacatgttgagaacgtcatccacagtcgaatgatagtgagtactagcattataacttgcagatataaagcagttgtccaaagtggggtcgttgactgggtcatatttgtcataggtatcaaaagatatctcatcaactggtcctagaaggttaatttcaggttttagtttaattgccggctg

SEQ ID NO: 228777 - DNA, 505 bp, Glycine max
actgggaacccaaaattttaacttggtagcgacagaaaagtacacgagatctccatcatcaatcaattcaaacttaactcggaagaaaagaaaaaaaaaaaaaaaagaacaaaatcccgggcaaaagttgccattttaagacttacatccacaaacaagaaacaatgattgccacgggcatgataaaacctttaactgtctttctattcaaactcactgcattcgaagcatcaaccgatgaacccgatgacccagatgaagcatcagcagcccctgcccggacatttttttccggcttggatggcgcaggagcctccgccggtgcagcagccggtgccgtcgcgccgaaaagcttcataggaagaagcaccttatccacctgatacactgagagctgagtatcactgtagatagtattggacactggtgtatcaaccaccccagttgttacattcacttggctccctgagggggtcacatttaaaggatactctccatcatcact

SEQ ID NO: 228778 - DNA, 551 bp, Glycine max
gttggctcctatgacaagatgcagagcgttgaactggattccacaggcagcgcttgctgaatactacgctcaaagatcaacaccaggtggatttctcatcagcgaaggcaccttgatctcccccactgctcctgggtttccccatgttcccgggatatattcagatgaacaagtggaggcgtggcgaaacatagtggatgccgtgcatgccaaaggcagcattatcttctgtcaactttggcatgttggccgtgcctctcatccagtgtatcaacctggtggagctccaccaatttcgtccaccagcaagcccatatcggcgaggtggaggattctgcttcccgatgggtcctatggtgtgtacccagagcctcgtgcacttagcacttctgagatacctgaaatagtgcagcattatcgccaagcagcaattaatgcaattcgagcaggttttgatggaatcgagattcatggggcacatgggtatctcattgatcaattcttaaaggatggaatcaatgatcgaacagatgactatggtggatcactag

SEQ ID NO: 228779 - DNA, 596 bp, Glycine max
gaaggaaccttagggctgtacaaggggttagtgcctctctggggacgacaaattccatacacaatgatgaagtttgcttcttttgagaccattgttgagctgatctataagcatgccatcccaacaccaaagaatgagtgcaccaaaagcctgcaacttggtgtcagttttgctggtggatatgttgctggtgtactttgtgcaattgtgtctcatcctgctgataatcttgtctcttttctgaacaatgcaaaaggagcaacagttggtgatgcggtgaagaagcttggtttgtggggtctctttacgcgtggtctccccctccgaattgttatgattggaactcttactggagcccaatggggaatatatgatgcattcaaagtcttcgtcggattgccaaccactggtggtcctgctcctgcagctgctccagctcctggttctgagctagcaaaggcatagaatgtccaatgatgacaagcaacaatgttgtacgaaacttagaaggccagtgaatagggaccataaataaatagaggactgctgaatgaagttgcttgagtggaactcaagctaggttggataatattctt

SEQ ID NO: 228780 - DNA, 603 bp, Glycine max
  unsure (1)..(603): unsure at all n locations
gattggcaaatcctaaattaacatttagtgacaatgtgaaactgagggttggcaataacaagctttctttacttagtgttgctgtcggtctcccgaatgttggtgtgcactttgaaacatggaatgcggtggtgttaggcccagtcactctgaaaggtctaaatgaagtgacttcggacttgttcagtcagaaatggtcttacaagggttggactgaaaggtgaatcgtggagccttcacactgaaagtgggagtagctctgatgaatggatacgaggatcattagtggctaaaaaacaacctttgacatggtacaagacaacttttagcgcaccggctggcaatgatccattggctctagatttgggaagcatgggaaagggtgaagtatgggtaaacggtcgcagcattggtcgccattggcctggatatatagcacatggtagttgcaatgcttgtaattatgctggattctatactgatacaaatgcctgacgaattgtggacaaccttcttagagatggtaccatgttactcgctcatggctgagctcaaggtgtaactccatggttgtgtttgaagaatggngaggtgaccctaatg

SEQ ID NO: 228781 - DNA, 580 bp, Glycine max
  unsure (1)..(580): unsure at all n locations
tatttttttgctgaatctgaatagatcagaaggtgatgtcgtgttcgtcgtcatctgggtcggaggaagacgatgagggattcgactcttaccggaaaggaggctaccacgccgtcagagtcgccgatcagttcgccgccggcaggtacatagcgcagagaaagttgggttggggtcagttttccaccgtgtggctcgcttacgatactaaaactgagtcatatgttgctctcaagatccagaaaagttcggcccagtttgctcaggctgcccttcatgagatcaatcttctttcatccattgctgaccgtgatccgtcaaattccaaatttgttattcaattgattgaccactttaagcacactggtccaaatggacagcatctttgcatggttcttgagtttcttggcgatagcttgcttcgcctgatcagatataaccgttataaaggtcttccattgaataaagttagagagatttgcagtgtgtgttgattggtttggattacttacatactgatcttggtatgatccacactgatctaaaacctganaacattcttctatgttcaccattgatc

SEQ ID NO: 228782 - DNA, 539 bp, Glycine max
cttttcagctttcattggtgtggcctagctgttttctcaatgagaaagccttcatctctgcaaagcgcacttttgcgctttggggttcccttgttgcttgttatcaccttctgttatgctacttctactgctgcagcaacaactcaagtttcagggaatgaagagctgccaaagacaaacctaaatgggcatgatgaagaagcaaaattcggattttttcatcataaaccaatattcaagaaacatattccaattccagtatataaacctgtaccaaagccatttccagtgtataaacctataccaaagccagttccagttccagtgtacaagcctattccaaagccagtgtataagcctattccaaagccagttccagtgtacaagcctataccaaagccagttccagttccagtgtataagcctattccaaagccagtgtacaagcctattccgagccagtgtataagcctattccaagccagttccagtgtacaagcctatacccaagccagttccagttccagtgtataagccta

SEQ ID NO: 228783 - DNA, 366 bp, Glycine max
aatgcttataaacaccctaatattattgcagaatttatagctggacaattaaagaatagagtttcgtttcgtaaagcaatgaaaaaagctattgaattaactgaacaggcgggtacaaaaggagttcaagtacaaattgcaggacgtatcgacggaaaagaaattgcacgtgttgaatggatcagagaaggtagagttcctctacaaaccattcgagcgaaaatcgattattgttgctatacagttcgaactatttatggggttttagggatcaaagtttggatattttctaaataaagaaaaatatattattctttatcttaaatgtgctatattttatcttaaatgtgctatatttttttttag

SEQ ID NO: 228784 - DNA, 390 bp, Glycine max
cttaaccccaactttacgttgatggaaaatgtggttcatcttatcaaatttgcagtgggctttcttggaacatataccttgagtagacttcttcaaatgaattatcaagcgcgtttatgaatcatgactgcaggtgcttatgggatcactaagcttctgtagcacgtgtctatatggcgggctgcaccttttcagaacatgacacaattgccgtttacaactcatgatgatattgtaaggggtggtattgccttggagtttgagataaacactgaagcatacgatcaaggacacaaggtggaactgcagaacaagcttttattgatggacgctatccatgaccttgctcaggttgagaacaatgagcggcttgattagatcagaattgac

SEQ ID NO: 228785 - DNA, 552 bp, Glycine max
ctaagaaaaatctaaaacttcactaacttgtacatttcccagcgtactcacgggtgagcttacacaggctgacatgcacacagaaccacatgaaatagacaaaaaaaacagagaaaataattaaataaatgccatggcaatattgcatgactttgtatacaaggcatgtcagaaaattatccagtctgaacaagtaaaccaacattgtccctcttagtacaattatgttgtccttggcctttggtatacagcaacaacttgatgaaagagaaacgaaagagaattccttcactacatcgatcttctcaacttgtttttattcatgcatgagttatgcaattccttggtccttggggaccttagtgattaaatatatattaactaactatctgcacacttgaatccatcaggtggggtcttgccacagtcaatgagaagctgaagagcaatagggatgatgatgttgatgttgagaatcttagccctaatggttgtgcagagacacactgcagcatccaaggccacaagccctgcaagcactggacaacatgt

SEQ ID NO: 228786 - DNA, 596 bp, Glycine max
  unsure (1)..(596): unsure at all n locations
atatggcaacaaatcaaactgttttaaataaaatgaaattcgcaaagaaaaaagaaacaaacattttattgggaaagaaaaacagatgtgtttgtgatctatactataatgggaaggtcaccaaaagaagtcatttgcatctttacacaaccatcaagcagatcgtattttcgttttaaacattttacaaattggtcttgggtttgacacttccagttccagctacgcgccttgtcactgaccacatggttacaaattcttctgcagccgatgggtgtattcccaccgtgctatcaaactgtgccttggtagctccacacttcaacgcaacagcaataccctgcataatttcaggtgcatcaggtccacacattgaggcttcgagaaccttatctgtctcagcatcaacaacaagcttcataacagttttttcttgtcgcccagagatggtattttttataagattgaaggttgatgtaaaaaccaacagatccccattggtttgctctattgcctgctcctcactgagaccaactacagaaagtggtggaatgctgaacactgcatanggaatattactgtagtctggcttgatg

SEQ ID NO: 228787 - DNA, 606 bp, Glycine max
aaccataacattaactcgggtacataaaatatagctactcccacagtcaagtcttagagttttgttaagttttatcacaacaatcttgaaaagaagcttactaaatcataaacgccatgacaacataaaacggacacataataaacaatagaaggattatggcagcttagtatgagattctatccagtcccatatgccttcagttctcgcttccaatacaccatgttcgaagaggaacactggtactgcctaggttctgctcttacatttttcaacagccctgggagctagaccaatggcatcagaactcttcatgatcctcagcctcttgcatgtttcaataaacatctcccagggaacatcacccacaagcatccaatcgccctctctgtcctcatatgtaagaacatattctgatccatgaagaaggtccttcagcttggtttcattcagcatctccctgcccagaattccatgagatccacatttacctgaaatcataccaaaacaagcagtaactggatccaggcagactgttcatacataaataattgaaaggtcaaagtttttcacataaaactaattctttcttactcatagtaaaac

SEQ ID NO: 228788 - DNA, 582 bp, Glycine max
  unsure (1)..(582): unsure at all n locations
attttgtggcagcagcaagcatatttgagcctgaaaagtctcgtgtgagactagcgtgggcacaaaccagtatcttacttgagaccataacatcctatgttagtgatgcagaaatgaggaaagctttcatgaaaaaattcagtgactgtcttaacaggcgagactactccattggctggaggttgaacaggaacagaacaggacatggactcgctgagactttggttgccaccatagatcaaatctcgtgggatatactcgtgtctcacggtcatgaaattggatatgacatgcatcgcaattgggaaaagtggctttcgagttggcatcgggaaggagacaaatgtaaaggacaagccgagcttttggcgcagacaataaacctatgtggcgggcattggatttccgaggatcaagtgtcggatccactgtatcagagtcttcttcaactcactaacaatctctgcaataaacttcgttgccaccaaaaggacaaggaacttgagagcagcaacagcggcacgaatgtaaacagcatgatcacccaagaagaagagtcaagaatgcangaactcgtgcaat

SEQ ID NO: 228789 - DNA, 524 bp, Glycine max
tgcaaattcctcaccctaccgtagatccatctcctcttccttcgtgaattctggttcagggtggttgccatgtatggcacttagtattttttttccctttttaggattattaggggtgggtgggttgtgtctcgcttagggttccaaagtttgtcgctttgaatggaacctcgtgttgggaataagtttcgcctgggtaggaagatcggaagcggctcctttggggagatctatttatgcactaatattcagacaaacgaagaggttgcaatgaagctcgaaaatgtcgagacagagcatacccaatagctgtatgagtccaagttgtacagaattcttcagggaggaactggaattgctaatgtcatatggtttggagtggagggagattacaatgttctagtgatggatctgcttggacccagtcttgaagatctatttaacttctgcagttgaaaactatcactaaagacagatctcatgcttgctgatcaaatgatcaaccgtgttgagttcattcattc

SEQ ID NO: 228790 - DNA, 589 bp, Glycine max
  unsure (1)..(589): unsure at all n locations
gaggaaagaaacgataccatggaaaaaattaaagatgcttgtgaaaactggggattctttgagctggtgaatcatggcattcctcatgacatattggacactgtggagaggttgaccaaagagcactacaggaaatgcatggaagagaggttcaaggaattagtggcaagcaaaggtctagatgctgtccaaactgaggtcaaggatatggactgggagagcaccttccacttgcgtcacctccctgaatcaaacatctcagagatccctgatctcattgatgagtacaggaaggtgatgaaggattttgctttgaggttagagaaactagcagagcagctgctggacttgttgtgtgagaatcttggcctagagaaagggtacctcaagaaggctttctatggatcaagaggaccaacttttggcaccaaggttgccaactaccctccatgccccaacccagagctggtgaagggtcttcgtccnccactgatgccggtggaattatccttctcttccaggatgacaaggtcagtggactgcagcttctaaagatggccgtgggttgatgtgcctcctatgcgccact

SEQ ID NO: 228791 - DNA, 543 bp, Glycine max
tgattaagctttttaaagtaaaggaaaaacagagagaactggcagaaaatgcgagtggcggaccacccgttaagaagcaaagtgccggcgagttgcgtcttcacaaagatataagcgagctgaatctaccaaaatcatgtaccatgcaattccccaatggcaaagatgacctgatgaactttgaagtttcaattcgacctgatgatggatattacttaggtggcacatttttgttttcctttcaagtgtctcccatctatccacatgaagcaccaaaggttaaatgcaagacaaaggtctatcatccaaatattgacttggaaggaaatgtttgtctcaacatcttacgagaagattggaaacctgtccttaatataaacactgtcatctatggcttgtatcatctcttcacggaaccaaattacgaggatccactgaatcatgatgctgctgctgtgttgagagagaaccctaagatgtttgaatctaatgtgaagagggcaatggctggagggtatgtggggcaaacctttttcccacgct

SEQ ID NO: 228792 - DNA, 605 bp, Glycine max
ggaactaatgatgccccagcccttcatgaagctgacattggacttgcaatgggaattgctggaactgaggttgcaaaagaaagtgcagatgtcataattctggatgataacttctccacgatagtaacagtggccaaatggggacgttcggtttacataaatattcagaaattcgtacagtttcagttaactgttaatgtggttgcattaatagtgaatttcacatcagcctgcttaacaggaactgcacccctcacagctgttcaactcttgtgggtgaacatgataatggacacactgggagcacttgctcttgctactgaacctccaaatgatgatttaatgaaacgttcacctgttggaaggaagggaaatttcatcagcaatgtcatgtggaggaacatcttaggtcaatccttgtatcagtttatggtgatatggtttcttcagtcaagaggaaaatcaatctttttactcgagggccccaattcagatctagtcttagacacgcttattcttaacacgtttgtcttctgccaggttttcaatgagatgaattcacgtgaaatggaatacataaacgtttgtaaagcatattggattac

SEQ ID NO: 228793 - DNA, 567 bp, Glycine max
  unsure (1)..(567): unsure at all n locations
gtaacattagtacctctggtactcccatttatatatatataatacttttgctgataaaaaaaacaggagattgagtttcccacagctggactcgggtctgtgccaggttctacatgtttcagtttcatttttttggtttgagccctgttttatcattgtttcaatctaaatggaaattgattcatctcactcattacatcacaggtgatggggaaggtggaattgaaatgactgagagcatgcaattgattcgtgaattttgtgaccgcttcattagttcagagaaagccacacgaacaagaatagtaatcttcttgatttaaagaattgttcttctttgtgcccctggaatgtgtttctggatgaaaagctttctctacatgtaaaaaagggtttttgtgctccttgcatttttcaaataactaggaactttttgttgttttagttntctttttcttagcatacaatctaactatgtttaatggtagttacaagtctcttgctgtataattccaactcagcatatatacatcaattatgatcgatacacctggatgccaagattta

SEQ ID NO: 228794 - DNA, 449 bp, Glycine max
gccagtaggcgtgtaccaatgttagttggaatggttgatgtcatattttctgacgttgctcagcctgatcaggctaggattttggggctgaatgcttcatattatctaaaaacagggggtcattttgttatttcaatcaaggctaactgcatagactccacagtccctgctgaggcagtgtttgaaagcgaagtgaacaagttaaaggctgatcaattcaaaccattcgagcaagtcacccttgaaccatttgagagggaccatgcctgtgtggttggtggatacagaatgcccaagaagaaaaaagatgctgctgagtagattgctttccagtagccagtatgcgtgtaccaatgttatttcatgagatttgtgttaattttgtttcgaaaccttggttataaaacagttctggtttgaattttgatagtttgatgtcagaatgcccc

SEQ ID NO: 228795 - DNA, 453 bp, Glycine max
cagcattactttggggcctcaccttgggtttcatttgtaaatcctagcacgaggctaactccaagtatgaaaagggttactttaaaggtctgggaaggagtgtgctggcatatccttcccttgcccccaccgcgcactttagagcaaattgttaggaaagacatggcaagaagggggacatggatggaccttggacttgatgcggaaacaattggttttgaaatgggtgaggacatacttggtgaactgatggaggacaccattttgagccttgtgagtgaaagtccagaaagtaaatgtttctctgcttctatttgagggaaagaacaatgagaacagcttccacttgtaaaagacaactcactgccttttgatcatgccagatgttaagggattcatatgtgtgaggtgaaatgaaagttgaataggggatgaaaatcgatcagaaagaat

SEQ ID NO: 228796 - DNA, 530 bp, Glycine max
atataaatcaaactttcattaagaatatttatgtgattacattatagctaattaaatgctaggagcaatttcagacataaaaacactagaatatcaatactatggtcactactctactaattcaagccagcttattcttccagcaggtgtcaggaactgtttcttgtgcttcttttcaagacaaagcctggtaaggtttcagcatctgagtgagtgaaccacttaggtggagggacatgatttcattggtggatcccattagcttccctcctatgaatacagctggaactggagcagtgcagccttgcctcaatagagctttctccatttctctgccttcagggtcatgatcaatctcatgaaccacaggattcacaccaagttcttgaaacagaatgttgactgcatagcagaggcaacaagagctctttgtgaaaatcaccacacccttttcagaagccaacctcgtcaccttgtccatcctgatacaccactgatcaagcaccctgtgatcttctaaatatatatat

SEQ ID NO: 228797 - DNA, 558 bp, Glycine max
atataaatcaaactttcattaagaatatttatgtgattacattatagctaattaaatgctaggagcaatttcagacataaaaacactagaatatcaatactatggtcactactctactaattcaagccagcttattcttccagcaggtgtcaggaactgtttcttgtgcttcttttcaagacaaagcctggtaaggtttcagcatctgagtgagtgaaccacttaggtggagggacatgatttcattggtggatcccattagcttccctcctatgaatacagctggaactggagcagtgcagccttgcctcaatagagctttctccatttctctgccttcagggtcatgatcaatctcatgaaccacaggattcacaccaagttcttgaaacagaatgttgactgcatagcagaggcaacaagagctctttgtgaaaatcaccacacccttttcagaagccaacctcgtcaccttgtccatcctgatacaccactgatcaagcaccctgtgatcttctaaatatatatatgtacaagaattctggtccttagacttaa

SEQ ID NO: 228798 - DNA, 579 bp, Glycine max
ttgggattggagggattgacgctgcgtctcttcctcttctctttcgatccatccctcattcctaatcctccaatccaaccacctcagcctcacactcacatatacacatatctgaacgcgtatcgtccctcctatggcttcaaagcgcatcctcaaggagctcaaggacttgcagaaagacccaccaacttcttgcagcgctggtccagtagctgaggacatgttccattggcaagcaacaataatgggtcctgctgatagtccttatgctggaggtgtattcctagtcactattcacttccctccggattatcctttcaagcctgctaaggttgcctttaggactaaggtgtttcacccgaacatcaatagcaatggtagcatttgtcttgatatcctgaaggagcagtggagccctgcactcaccatctctaaggtactgctttctatctgctcattgctgactgatccaaatcctgatgatccacttgttccggaaatcgctcacatgtacaaaactgaccgggccaagtatgaggccactgcacgcagctggacccagaagtatgccatgggctg

SEQ ID NO: 228799 - DNA, 549 bp, Glycine max
gtgaaaatgaattttggagcgaaaccccattacgtattgttgtgttgtgtggtgtgactgggatcagatctgcccctttctctgtgcaattagcgtgccctaggcctggccatgggagacgaagaagaggaggaggtgctcggttcgggtcaatcagcctccaccaacagcttgccacctcccgctgatagcacactcctcaaattgaaccatctcgacatacatgctgatgatgctgtatcacacgcttctcttgctgccaagaagaaaaagagaggcggccaacgggctgttggacctgataagagtggaagaggtctccgccaatttagtatgaaagtgtgtgagaaggtagaaagcaggggaagaacaacatacaatgaggtggcagatgagcttgttgccgaattttctgaaccaagcaatagtgaattgccccctgatcagcaacaatatgatgagaaaaacatccgccgaagggtctatgatgctctgaacgttctcatggcaatggatacttattctaaggacaaaaagaaattcatggag

SEQ ID NO: 228800 - DNA, 581 bp, Glycine max
atcccctcctcctccttactattataaatcatctataccaccttcaccatcctgaccaccaccttatgattatgattccccacctccagctaacgagcatgtacacccttcctactactaccactcaccaccaccagcatgtgcatcggcaccacctggctattactataaaggtgctccaccaccatcactctctacttctcacgcgtactactaccgactaacagcaccaccatctagctctcctcctactccctactactgccattgtccaccaccaccatctgcatgaccaccacctacatactattacaaattcgctccacctacatgtccatctccaccaccttgttactactatcaaggtgctactccaccatctcccactcctcatgcttcctactactacagattccctccaccaccaacgtcgtatcctccaccttaccactatgtgagccctccaccaccttatccatgtgcaacgacaccataccagtacacagcagcaccttctccttgcacagctactgctcccaagttcatttacaaatcacctacacctgcagttaacatatatg

SEQ ID NO: 228801 - DNA, 559 bp, Glycine max
gtgctgggagttcagaggcttcaatattttacaattctaccagttactgggatgagtacgtttggggaggtgcttggatgtactttgctactggaaattcgtcgtaccttaagcttgctacggctcctggcctggccaagcatgctggtgccttctggggaggccctgattatggagtactcagctgggataacaagcttgctggtgctcaggttcttctgagtcgtttgaggttattcttgagtcccgggtatccatatgaagaaattttaaagacctttcacaaccagacaagcataatcatgtgctcctatctaccagttttcacaagctttaatagaaccaaaggtggcttgattcaattaaaccacggtaggcctcagcctctccatatgtggtcaatgctgcctttttggctgccctatatagtgattatcttgatgctgctgatacacctggatggtattgtggacctaatttcttttcaactgatgtgctccgtaattttgccagaccccagatgattacatcctgggaaataacccaaggaaaatgagct

SEQ ID NO: 228802 - DNA, 298 bp, Glycine max
ggtgttgagtcatttgacattgatctgaaggagcagaaggtgacagtgaaaggaaatgtggagccagatgaagttctgcaagccgtttccaaatctgggaagaagactgcattctgggtggatgaagcaccacaatctaaaaacaagcctttagaaagtgcacctgttgcctcagaaaacaagccttcagaagctgcaactgttgcctcagctgagcctgaaaacaagccttcagaagctgcaattgttgattcagctgagcctgaaaacaagccttcagatactgttgttgaaactg

SEQ ID NO: 228803 - DNA, 397 bp, Glycine max
gatatcaaaatgctctttcacatccaaatagcattgaaacatagaatggaacttctccataataatacagtaaaagtcattcagaaaaaaacaagagaaattaaaatgtaaagcaacagtacagtagcaagccaatttagcttgatgcgattattctttaatccgtagacatcctataaccgagagcagaaagcaaatcggccgagtctaacttctatgaaggaaagaacatgagaatggtgtagccaatagtgcaaaaattctccaaattaaaagaagtcaacacctttagttagtatttgtagtccttgacatggagagactcggaggcaccctcagcaagggtagcatcacctttgtaagttcccaaagttgcatgtgagtttgcattgcacct

SEQ ID NO: 228804 - DNA, 580 bp, Glycine max
ccgaaaatgaacgacgcagatgtctcaaagcaaatccagcagatggtgcagttcatccgccaggaagctgaggaaaaggccaacgagatctctgtctccgccgaagaggaattcaatatcgagaagctgcagttggtcgaagccgacaagaagaagatcaggcaagaatacgaacgcaaagagcgccaagttgaaattcgcaagaagattgagtactcgatgcagctaaatgcttctcggattaaagttcttcaagctcaagatgacgtgatcagttccatgaaagaagctgcatccaaggaactgttgaatgtgagtcatcatcatcatttgaatctactgagtcatcatcatcatgagtacagaaaccttctgaaagatctcattgttcagtgtttgcttagactgaaagaaccttcagtcctattgagatgtcggaaagatgacctgcacttggtagagcatgtgctggattcatctgcacaggagtatgctgagaaagcaaatgttgatcccccagagatcattgttgacaaccaagtttatcttccacctggacccagtcatcacaattctcatg

SEQ ID NO: 228805 - DNA, 583 bp, Glycine max
acacgagcctcgaagtggatccttcgcgacacgaaaatgaccctagcacccatgttgctgctggagaaccacccaattcacctgaaccctgcgcactacatcagtgagattattagagaaggcacaaaaaatggcactgctttctttaagtgccatggacatgagcaatttgagatgacgggtttggatcctgagtataataggttgttcaatgagggcatggtgtgcactgctagggttgtgtccaaggctgtgatcactggctacaaagatgggttcaaccagattaagtccttggttgatgttggaggtggcattggagggtctctttcggagattgttagggcttatcctcatatcaatgccatcaactttgacttgcctcatgtggttgccactgctcctaagttcgatgggatcacccatgttggaggtgacatgttcgtgtccattcctagtgctgatgctatttacatgaagtggattctgcatgactggagcgacgagcactgcatcaagatcttgaagaactgcaggaaggccataccagaggagacagtataagtcataatcgtggatcacg

SEQ ID NO: 228806 - DNA, 511 bp, Glycine max
ccttgctcttttttcacgccctagctcattttcttctccgttctcttctctctgttcctcactcactcgcatttattcaccatgactaagcaacaagctaattggtctccatacgataacaacggaggatcatgtgttgcaattgctggagcagattactgcgtcatcgccgcggatacgaggatgtccaccggttacaatatcctcactcgcgattactccaaaatctcccaactggcggagaagtgtgttatggcttcttctggttttcaagctgatgtcaaagctttgcagaaggttttgtctgctaggcatttgatttatcagcatcaacacaacaaacaaatgagctgccctgcgatggctcagttgctctcaaacactctttattacaaacgcttctttccttattatgctttcaatgttttgggtggccttgacaatgaaggaaagggatgtgtcttcacatatgatgctgttggttcctatgagagggttggatatagctctc

SEQ ID NO: 228807 - DNA, 507 bp, Glycine max
gataatttagttgctgattggttcaataggtacaagatcgccttgggtgtggctcagggaatttgttatctccaccatgactgtgatccggtaatcgtacaccgtgatctcaaacctagtaacatattattggacgctgagatgaaggccagagtggcagattttggtgttgccaagttgattcagaccgatgagtccatgtctgtcattgccggttcctatggctacattgctccagaatatgcttacacccttcaagtcgatgagaagagtgacatttacagctacggagtggtgttgatggagatccttagcggaaaacgttcggtggatgcagaatttggcgatgggaacagcattgttgattgggttaggtctaagataaagtcaaaagatggcattaatgacatattggacaagaatgcaggggcagggtgcacctcagtgagagaagagatgatacaaatgcttatgattgcattgctttgcaccagtagaaacccagcg

SEQ ID NO: 228808 - DNA, 477 bp, Glycine max
cgtgccgtctcccgatttgccttccaaggaaggtttcccgtcatcactgtatgacgtcctccttctttggggggggggggggggggggggggggggggggggggggggggggggggggggggggggggggggggggggggggggggggaaaataagcggatttggccaaagggtttggcccaacgaaaagcaaaaaccatgggggttgaggttaagtttttttaaggccaaaaagggtttaaagggaaaaaacaacaacaacaaaaaaaaattggggaagtaggggaattttgggctagggaatttccccccctggggcccctaaaccaagggtttttttattattgttaattaaaggcccttttactataggccgtttttaaggatttggggaaataagggttttgggcccgccctttggcgcactaggaaattaatggtttggaggaaaccctgagttttccccggtgatcccct

SEQ ID NO: 228809 - DNA, 559 bp, Glycine max
ggctcctccatatccctccctgctcattctcctatttttgttgacaagccaagttacttgttatggttcagagaaggaaaagagtaaaactttcataatccaagtccagcacgaagccaagccttccatattcccaacccacaaacactggtacgactcctccctctcttccatctccaccaccgcttctgttatccacacctaccacaccgttttccacggcttctccgcaaagctctcaccttccgaggcacagaagcttcaatctctcgcccacgtcatcactctcatacccgaacagcttcgctcgcctcacaccacccgctcccctgagtttctcggcttaaccaccgccgacagaaccgggttgctccacgagaccgatttcggctccgatctcgtcatcggagtcatcgacaccggaatctggccggagcgacagagcttcaacgaccgcggcctcgttcccgttccctccaaatggaacgtgcagtgcgtcgccggagaaaattttccggcaggttcgtgcaaccggaaactcatcggcgcgaggtggttc

SEQ ID NO: 228810 - DNA, 379 bp, Glycine max
gatgattcctccacgttgaagaagccgcgagttgtttggtctgttgagcttcatcaacagtttatggctgttgtgaatcaacttggaattgataaggctgttcctaaaaagattttggaattgatgaatgttcctgggcttactagagaaaatgttgctagccatcttcagaaataccgtttgtatcttagaaggctgagtggagtttcacagcagcagggtaacttgagcaactccttcatgagctcacaagaagcaacatttgggggaacctcaatcaatggaattgatcttcaaaccctttcagctgctggccagttcccaatacaaagtctagccaagtttcaagctgctggacttggcaggacaactgccaagc

SEQ ID NO: 228811 - DNA, 461 bp, Glycine max
  unsure (1)..(461): unsure at all n locations
agataagaagaaattcatagctcgtgctaaatcgtatcatggttcaacattgatagcagccagtctttctggccttccggctctgcatcaaaaatttgatttgccagctccttttgtattacacactgactgtccacattactggcggtatcatcttccaggtgagacagaggaagaattttcaaccagattagccaataatttggagcagttgattctgaaagagggaccagagactattgctgcatttattgctgaacctgtaatgggggcaggaggtgtaatacctccaccatcaacttattttgagaaggtccaagccgttgtcaagaagtatgacattctttttattgcagatgaggtaatatgtgcctttggaaggctagngacaaatgttggatgtgacangtacaacattaagccagaccttgtatccctggctaaggcactatcttctgcat

SEQ ID NO: 228812 - DNA, 422 bp, Glycine max
ttcgaccttttttttttttttttttttttttttgcttaagaacaacaaattttacggtgacttgtcttataaaaacaacataaaagcaagccttttttcgaacaaacagaaaggggtcaaaaacattgaaaacaacttcactctcagtaacccattaaaaaggccattctccgcaccaaaataaaaaaagctttattccgtaaaccgcgcgtcaaatatttgtaattacaaggtgcttcaccgtggagagcaaaccaaacacactgacccattacatttcatcagttagacacaggggtctttaacattcagggtcttaaaaagtggtctgcttcaacagggaaaagcccctcgtgcttatactccccattatccccagctggggcatcctggaactgctgggtctctttaacaaggaaggt

SEQ ID NO: 228813 - DNA, 465 bp, Glycine max
gaggaaaagaaagaaagcacatgtattatctcaatggggaatatgaaaaaaatctgatcaatcagggtaacacaaacctgacatcaacgacaaacagatttcaaacttttgaattgaaacaccatcccgataaaccctacccctcccagaatggaagacacttattcactgtttctccatttatgccctttgtgccgaactttgagtgacacaattaagtgccgagcgttatgattgcacctaatccttgctctttattccacataccatgaaccctggcatgccaagtggggcttaaaacttctcgacatcagctgtgcgatcttccctggcctcggtggttgcgaggcccttgttgagaccctcgttgagttagccatgctccttctggagctccagggtgagagtcacagcacggggaaggaactcaccaatctgctcaaaggccttttcaaccaaacccct

SEQ ID NO: 228814 - DNA, 526 bp, Glycine max
cataatggaaaattcaattgatcgaaacataaaaagatcaacccaaaagagacatctttgcctgttctaatcagtgaaatagtcaaatgtgattgaagcaaaagctccagctttcacttgcagttttccacggtctgcttatctagggaaaaataaaaacaaaaaaacactacaactgaaaaagatataactttccggaatataacttccgctcactctttatccgttttgcaaacttcctagagttcatcatgtacaccctcttccttggtgtcttctccagcttccgtctttgattcagcatcggagtcattgccagcttcatcagcatcttcctcttcctcatcagcatcagagtcaactgggtcatcctttgattcctcctcttccctcttcttctcggcctcctcaaatgctgccttctcagcatccttgtgcttgccccatgtttcttcaaccagctgcttagcatactcaggatcatcagtaattaagacattgtcaaacaaagtaccagatttcacct

SEQ ID NO: 228815 - DNA, 465 bp, Glycine max
gcatcactgaactaacaaagcaaccctatgtcgaaggtggtttgtgtcaccggagccagcggcgccatcggatcatgggtggtcctactcctcctccagcgtggttacaccgtccatgccaccgtccaagatatcaaggatgaaaatgagacgaaacatttggaggaaatggaaggagcaaagagtcatctccatttttttgaaatggatcttcttgacatcgactccattgccgctgccataaagggttgttccggcgtaatccaccttgcatgtcctaacatcattggtcaagtcgaagatcccgagaaacagatattggaaccggcgataaaaggaacggttaatgtgttgaaggcggcgaaggaagcaagggtggagcgcgtggtggcgacttcatcatttcgtcgattatgccaagtcctaattggccagctgataagattaagggagaagagtgttgga

SEQ ID NO: 228816 - DNA, 448 bp, Glycine max
ttccaaaatgggtatctctcgtgattccatgcacaagaggcgcgccaccggcggcaagaagaaagcttggaggaagaagagaaagtatgagcttgggaggcagccagcaaacacaaagctatcaagcaacaagacggttaggaggattagggttcgcggtgggaacgtgaagtggcgcgctttgaggcttgatactgggaactactcttgggggagtgaggctgcaacccgcaagacaaggattcttgatgtggtgtacaatgcatccaacaatgagcttgttcggactcagacattggtcaagagtgccattgttcaggtcgatgcagcacccttcaagcagtggtatctgcagcattatggcgttgaggttggccgcaagaagaagagtgcagcagcttctcgcaagaaggaaggggaggatggtgaagctgcaactgatgaggtg

SEQ ID NO: 228817 - DNA, 547 bp, Glycine max
gggtgctctggatcacatatcggaactctttgactgctccagtggcagttccaagcacaagaagcgcaagcaattgcagacggtggaggtgaaagtgaagatggactgcgaaggatgcgagaggaaagtgaggaaggcggtggaggggatgaaaggcgtgaaccaggtggatgtggagcgtaaggccaacaaagtcactgtggtcggctacgtcgaggcctctaaggtggtcgcccgcatcgctcaccgcaccggcaagaaagcagagctctggccctacgtcccctacgacgtcgttgctcacccctacgcacccggagtctacgacaagaaagcccccttcggttatgtccgcaacaccgatgatcctcactattcccatctcgcacgtgccagctccactgaagtccgctacaccactgctttcagcgacgaaaacccctccgcctgtgtcgttatgtgaaactattctctgtatttgttatcttcgctttcattctatcttgtttttcagatcatgttggattttttctctgatgaatgatac

SEQ ID NO: 228818 - DNA, 543 bp, Glycine max
taattttttttctccattagattaccaagctctgcaactttgcttctcaacatggagtatcgtctcctacccatttttactttactcaatattgcactggtggcaacccatgctgctttaccccctgaagtttactggaagtcggtgcttcctactacgccaatgccaaaagccatcactgatatcctttactctgattgggtggaagagaaaagcagctcagtgcatgttggaggtggaggcgtgaacgtgcatacaggaaaaggaggtggcagtggcaccactgtcaacgttggtggaaaaggaggcggaagcgtaaacgtgcatgcaggccacaagggaaagccagtgcatgtttcagttggctcaaagtctccatttgattacgtctacgccgtcacggaaactcaattacacgatgacctcaacgtggcactcttcttcttggaaaaggacttgcattctggacaaagttggacttgcacttcacaggagtacatctaatcaagccacgttcttgtcacgccaagttgcggattcgat

SEQ ID NO: 228819 - DNA, 548 bp, Glycine max
attgtttgttgttgtaactcgttcttcttcttttgttgttctgtgtttgtgtttgttttttctctcacctgaaaatgtcttgctgcggtggtaactgtggttgcggaagctcctgcaagtgcggcaacggctgcggaggctgcaagatgtacccagacttgagctacactgagtcaaccaccaccgagaccttggtcatgggagtggcacctgttaaggctcaatttgagggtgctgaaatgggtgtgcccgctgagaacgatggctgcaaatgtggaccaaactgctcctgcaacccctgcacttgcaagtgaggtgttgggagagcaagcttcaagcagagatagcccttaattaggaataatgataaactattaatgtgtagctaaaaacttatgtattatgtctgtgatggttttcgtgcctctggtgttttgtgttaaacaaacatccttagataaagtggtcaatgtcttgcctttagcaagttcaagtgttttggacttgtgatgggtgtgttaagctcatggttgcttcttttttttttt

SEQ ID NO: 228820 - DNA, 611 bp, Glycine max
gaacaattaaaatacctggttattgaagctttacggggcggttgccagggacatagagctgagctatttgctgcccgtgttgcaaagtgcttagctgctttggagggacgtgaaaaggtttatgtggatgacctaaaaaaagctgtagaattggtcattctaccccggtcaatcgttactgagaacccaccagatcaacaaaaccagcctcctccccctccgcctcctccacaaaatcaagaatcaggcgaagaacagaatgaataggaagaacaagaggatgacaaggatgaagagaatgaacaacagctagaacaattacctgaagagtttatctttgatgctgaaagtggcttggtagatgaaaaactcctcttctttgcccaacaagcacagagacgccgtgggagggctggaagggcaaaaaatgttatattttccgaggatagaggccgatacatcaagcccatgcttccaaagggccctgtaaagagattagctgtagatgcaacccttagagctgctgcaccttatcaaaaattgcgaagggcaaaagattctggaaacaatagaaaggtatttgtggagaaaacggacatgaggggcaagag

SEQ ID NO: 228821 - DNA, 334 bp, Glycine max
aagaataattttgtatcacgtgtaattgatcatgtaaaaaaattacatatgaggatagaagaaacaaaatagaatggagaggaggaagagaaagtgagaagcacacacgaattaagtcataataatgaaacacattatagatatgataagggcgaagctcaaaaaactcccagcacacagcggcgaggaatgaatggacttaggcctcctcccacttgagtggattgatcactacccatgtgaagccagggttcctcttttccaaagcgtccatatgcagaagtttttaaaaacctgttatttccacccctcttgagatcaaggttgatggaga

SEQ ID NO: 228822 - DNA, 411 bp, Glycine max
gcataagaacaacaaatattacgggaacatgactcaatataacaacataaaagcaagccaatataagaacaaacagattggtgccgcataacattgttcccaaactccactcccactaaccccctattttttccattctccacaccaagctcatcaaagttttatcccgcaaaccgtacatacactattagtaattacaattttcttcacgttggagagcagagcaaacacacttacgcatcacatagcataagtaagacacaggcatttttcacattcagtctcttcacatgtggtctgcttcaacatcatcggcctcctcggcctcatactccccatcattctcggcagtggcatcctggtactgctggttctttgaaacaaggtcgttcaagttgctctctgcctctg

SEQ ID NO: 228823 - DNA, 438 bp, Glycine max
ggaggcaaacgaacctttttttccttttgcctttacacacaccactaattgaataatcgttcaactaaaaatacatatgttgatgttcaccagggccacactatgttcttttttgggggatatgggaaggggaaaaagtgggatggggggattacagtaataagcagaggcttggaatctgcccttagttttaaggccaggatataaaaatcaagcagctgggacctttctcccattttttataaagaaaattggtgcttttggaacatcaggccatgtttctgtaatgaaccccacgatgtcataagctatatccccttgaacatcaatttggtctttctcacttggacccttgacaacggaggctcctgtagcgaactttttcccgagttttttggaagcatcactgagcctgacaccgaaaagttccagtccctt

SEQ ID NO: 228824 - DNA, 414 bp, Glycine max
aagtcatctattaatctagaattatacttaaacacagacagtcaagaaccaaaagaaaacttaaaactggaacctgcaacaacctttatgccagggaagttggctgacacatgcatcataacaatccacaaagaccaaaataccatctcagttaatacaacaacttgacacatattgagaaggtgagtgacttgacaactgctgcaacatagaagacgacaagactgactgtcagacacccaaactgagcaatgcttgatgacaactctggaccttctcaaccctcaaacatgtcctagtactcactgatcattttgatctgcagctggtgaaggagatttttcagactcggttggcttgtaagcaccacaattctgtctgttgcacttggttctgaaaggatagtttatgttg

SEQ ID NO: 228825 - DNA, 503 bp, Glycine max
caccgaaaaaatataaataaaacaaaattaaacgcagccatgaatgacccatgagccacaccaatcaatttgcaaacatattcacaatcacgccaacatagcaacaacatcacccacgagcacaacaacacgcagcacatgtacctgaatcatcatcgacaacaactcctcgatgtccatttcggttcattactgcattcgccttttcaacaattcccctttctgggtaaaagacgacacaccccagaggccaaaacataacaaagaagcaagcaaataactaaaatatctcagtcctgaaacaagaattaacaaaaacaactacaaaggaacgacaattagcatgggagtcttggttgttcttcaagcgagtgtaggattctctgcaggagaagtcctccacacgatatctttaagagctggacgaagctccttgctacagaactggttatactccaaggtgtcaccgttgtccttcttaacctccaccaccaaaaacgacg

SEQ ID NO: 228826 - DNA, 483 bp, Glycine max
acaaaaactaacaaactagcaattaacatttgccgataaaaaattaaaaatagagtcactttctcttaaatagcatgacaaatggcaaacctatttcatgtgcatatatagatggaagatccactatagaactttggagaaaagacatcatctaatcaaaccattccaaaagcacgtttcgcagaatcaagggtgttggagaggagcatcgatattgtaaccggtcccacgcctccaggaacaggggtaatggctgatgccaccttaaccgcctcttcaaagcaaacatctcccgagacacaaaagccgtggccgctgggatccttaacttgatttgttcccatgtcaatcaccacagctcctttctttagccaattgccacgaactatgttggggactccaacatctactaccacaatatctgctttagaagttatatgttctgggttctttgtatacgcgtgttacacgctgactgttgcg

SEQ ID NO: 228827 - DNA, 525 bp, Glycine max
  unsure (1)..(525): unsure at all n locations
ctcgagccgaatcggctcgagctttctctctctctctctgtgagttgtggaaattgattagaattgaaaataatgtctggttcggaggacgagggaggagaagagtacctcttcaagatcgtcataatcggagactccgcggtggggaaatcgaacctgctgtcccgctacgcccggaacgagttcaacatgcactccaaggccaccataggcgtcgagttccagactcagtgcttggaaatcgactccaaggaagtcaaggctcagatttgggacaccgccggccaagagcgattccgcgccgtcacctccgcctactaccgcggngctgtcggcgccctcattgtctacgacatctcccgccgcaccaccttcatagcgtcggtcgctggctcgacgagcttaaaactcactgcgatacaacggtggcaatgatgctaggggggaacaaatgtgacttggagaatataagggcggtgagcattgacgaggggaaaagccttgcggaagcggagggtttgtttt

SEQ ID NO: 228828 - DNA, 256 bp, Glycine max
gtggagagtagagaagaagacgacgagtcaaggaaactaacaatcacagagacataaatggatgtccgatttcaattgctgcaatgcaattacaagctctttgtacccccattataaaactatacccgttttcttaaaataaaattgaagacaacattttgatttactatatagttgtaactgatcaacaaggtttggagggacccattaattaaataagccaaagcaccaaaaggggattgaagtgacaaacaac

SEQ ID NO: 228829 - DNA, 466 bp, Glycine max
accaaacattctcaaaccaaagccatgaccaatatggaatccaccacacctatactcactcctctagtgctcctcctcctcttctctctagccaaagggcttcacaaccccaaatgtgatgctgcctatcaacatgaccatgatggctcaaccctccaagtgttccatgtgttcagcccttgttccccattcaggccctcaaaaccaatgtcatgggaagagagtgtcctacagctacaagccaaggaccaagccaggatgcagtacctttctaacttggtggctagaagatccattgtcccaattgcctcagggagacaaatcacacagagccctacatacatagtgagggccaagtttgggtaccccagcacaaaccctccttttggccatggccactaccatggatgctgcctgggtcccttgcactgcctgtgttggttgctcaacaaccacaccctttgct

SEQ ID NO: 228830 - DNA, 420 bp, Glycine max
ccatgcctgtgtgtctctatcatatctttcatttctagtgcgcctttgaatattaattatatatgaatatatatcaggttcagcagctactggtggtgctggtggttttgtcttgcatgaacaccatgagaaaaaggaagttcagaaagacgatgaggaagctcatggaaagaagcaccaccatctgtttggctgaacatgataaatattcatatataattaatattcaagctccaaagtatcaccatgcctgtgtatctatatcatatgttccatttcgagtgtgcctttgaagctagcatatgaaatatatatgaatattgatcatgtgcagcagctacagatgacgctggtggttcagattgccatgaacaccatgagagatatgtaatttatataaaagatgagggaacctatgga

SEQ ID NO: 228831 - DNA, 407 bp, Glycine max
agaaaaaagaatgtttttattattaataaattttatttatatttatttatatacagatagatattctatatcttttatcttaattaatatttgacccctccttataatgcgtgataggattctctatttttaggaacttatccattccttttttaatgggcccgacaatccgaaagaattctgggggaggggttattttgtggttgacccagaatgaatagagctccacgaaatgagagaattaagaatacccacgagaaacactaatccaatgcataatgatgtaccggaaaatacaacatttttgtttttcgaccaaccttcaggagaagcaaatacaacaggtgcactaatcaaaaaaataggggagattgctttaatgcaaaaacagctaattggaaagcaat

SEQ ID NO: 228832 - DNA, 540 bp, Glycine max
  unsure (1)..(540): unsure at all n locations
caggaacttcatccccatctaatcttgaatctgatgatccttttgctgatgggcctccacgtcctaatggctcagtatcagggggatctggaatatccaccattggtcctttaggaatgccactgaacacagttgggtttaattcaatgagaagcacttcaagcaatatgggtccccaaactagcaacagttggcctgttaattcccaaagttctgcagagtccattagtttgaactcaaggaatcctatttcaacaatgggtagcctgaatagtggtggccttggacaacagaaatctcttgggtttgtaaaacaaggccaagctttcccagcatcaattgtttcatataataatgttcagtcaacagcaacagatcttggatcaatattttcttccaacaggaatgaacaaattgcacctaaacttgcaccacccccttcaaccactgtgggtagaggaccgngaagagggaagggagctgcttcaacactgggtgctctcataccaagtgacacgctgagcagccaccccttttgga

SEQ ID NO: 228833 - DNA, 532 bp, Glycine max
cataactcagtctctgttcacctgggtggagtaccctgtgaccctcttcacccaattgcgttcgatcccactctgaacaagccttgttcttccacctctctgttttggaactgcaagaggagaaggaagaggaaaaactccattatcatggcctctaatctcaggaccaacaatttcctgcgccatgtggaatcaatgaagcttcttccatcaggtgctggccacatttcgcacctgaacgctgtgatacttggtgaatctctcgccactgaagaggatgatttcgttcttccaagtgaggactttgctggccaagccaatgttcagtccccagaacagtatctgaagatgtataagagatcgattgaggaccctgctggattctggtctgagattgcctcagagttctattggaaacagagatggggtgacaaagtgtgtgatgaaaattttgatgtaaggaaagggaatataaagattgagtggttcaagggtggcatcaccaacatctgttataattgctgggatagaa

SEQ ID NO: 228834 - DNA, 568 bp, Glycine max
gaaagtcgcttactattaaatgattcgttaaatatcgtaatcactatacaatctccttcaaaagagatcaatgtagctagctcgctcttgactgtatgatggtttacacccatgtatactgtgacgtattttatattttcatgatttggattgaatttgaagcttcttacaattaaatgactcgttcaatatattgtagtcaggatacaaatctacttcgttcaccataattttgattgatttaattaactattatgttcactataattttgattaatttaattaactattaatctttgagaatagcaataatttttaatattggtttcgagtttttaacttgttcaataagaagttgcaagttttatttatgttcagcatacatttgctatttatcaacctatgtctgtattttaaatcagatgtagaattgtgcctgtattttagggttgattgatgttttgctgccattgtaatatgtagcttttagttgcacctgtacttggttcttttggggatatctgggagcttgatgtattatatataaaatgtgccatggataagctat

SEQ ID NO: 228835 - DNA, 516 bp, Glycine max
aaaatcagtgctgaagtatccttcaaccaaaaggtggtggtccataacataccaaaagtgtctaatctaacgaaacaaactcaacctgaaaactgtatcaaagccagtgcagaaaataacaatccatcatcactacgtaaactccaaaatataaaccttaagaaacaaggttgtcattaagagataacgaaacaaactcaacctgaaatctgtatcaaagccagtgcagaaaataacaatccatcatcactaagtaaactccaaaatataaaccttaagaaacaaggttgtcattaagagataaggaagccagctgatcagcagtaccgccagcctgctgctgagcaacattccttaggacgtccattgcctcagccacctttgctttcagggcttctggcgactcaagcaaatgcagaacttcagtctggtccatctcaagaagcatgcctgtcactctggcagcattatcaggctctaactgttccacaagggggtagagattctcacccagca

SEQ ID NO: 228836 - DNA, 502 bp, Glycine max
ctgaaaaccgaattatcatttattaactgtaacttgctttggaacaattcaagttcactaacaacatccatgaaatccaatcattaaaaattggaaaaccaaaccaaaccaaaccaaaccaaacttattccaacaccactcatcaaacagaaaaacaatccaaactttcaaaactcacaaactcaagaacaacttgaaattactactaacaaaaacaagaccaattggtcaaaaaccatgaatcttgatctggtccttcctgacaaggccagcctgaacgaggaagtgggagacgttcttacgctggtcgccttggagttggatgatcttgccaagctccttgtcctgcaccacggttccgttgcagcagaactccttcttgaggtccttgaggatcttctcgtagctgaactccttcttcagcccttgcactgtggtcagactcttcttcccattcctctgctgaattcgaatatgcacatactcctttgctccgggggca

SEQ ID NO: 228837 - DNA, 474 bp, Glycine max
actccgctctaacattaatgttattaaaaaacaagaatcatctgttgtcatgaggatcatgaatttacaactgatctatatcaggctcattgagaaaaatacatgttgaattcaattggactatcgatgtccaattacttctgcataatgttaaaaataattgaaaaaattagccttcatagggcctcaatctactattgtagtgtacaaaatggcgagggttgcagcccccacaagaatcaaataaaactaaaccaattgaagaagaatctacttctgaacccgttccatcttgactctgatcttttcttcgatcaaggaaatttctgtctcaagatcgtacattctgttaagggcacgcatattctcaagtacctcactcagactactatcatttttcccatcacaccttaggtgctgcatgggaccatgaagtagcttattcacaatacccatactaagggcataaattgc

SEQ ID NO: 228838 - DNA, 568 bp, Glycine max
  unsure (1)..(568): unsure at all n locations
cctgctaccattttgaagtgaagcgagagtttctgaagggtgccttgaaaagattttctcagttctttatttcacctcttgtaaagatggaggcaatggagcgagaagtacttgcagtagattcagaatttaaccaggttttacaaagtgatgcttgccgccttcaacaacttcagtgccatacttcagctcataatcatcctttaaatagattcttttgggggaataaaaagagcttggttgatgcaatggagaagggtattaatttgcgcgagcaaatattgaaattatacaaggattattaccacggtggattgatgaagcttgttattattggtggagagtctctggatgtgcttgagagttgggttgtggaactgtttggcgctatcaagaaaggtcaggcaaacccagtgttcacagtggaaggtcctatctgggaatctggtaaagtttatcggctagaagctgtcaaagatgttcatatccttgatttatcatggacattgccctgtctacacaagagtatntaaagaagccagaggattatttagctcatctccttggg

SEQ ID NO: 228839 - DNA, 553 bp, Glycine max
ggttccacaatctattgctttcatatgtgagtgaagggtctttctccagcagctttgccattaacccacttttgtaattctcaaaggaatcaccatcaagcccatccaacaattctttcaggccatttaagaagttttcaattctactttgcaagtaaactgggtggtactcagatgactgaacgcagaaacaaaacccagagatacgatatgttactcgtgggctgcattcaacaacataaccaagctgctcttttgtcctcagttgattgaaaaatggctcctccacaatttcatcaaaaagatcaattaaagctttcaatttgattgaccccagaccaaaatcttgctcaatttgaaaataaagctcaaccaccgagtttttttccgacttattcttcacattgacatctctaactaaattggcactggatgggaggcaaataacacgctcagcatgcctcaattcaatgggagtggattaactggaaaattcatcttaaatatttttgctatgccaaatgcctcttcttttgacagatttccatggcaa

SEQ ID NO: 228840 - DNA, 503 bp, Glycine max
attgcattgcagtgtaagtatttacaaagcaaagcgaagcaagcattcactgaatgcgctctatctctctctttcgatctgggtactaaccctaacccgcttcgaaccgtggcttcctcaggctcgcagaacctctctcgaagaaaaccttcttcttcttcgtcttcgtcttctcaacaaacacccgggtcgacccggatcgtttaccgagaatctcggatcccatcggaatccgatttcccgatctggcagcagaactggttcatcgcattgctcttcgtcatggctctcggattcttcgccctcgccattttcctcttcctcactctcgactctgacatcgctccttcttccaccgcctccgcctccgcctccgccgcttcctccgaaggcgtcgaggtgcaggttacttacggcacggttctgaagcttatgcacgagaagaccaaatttcggttgcattctcatgacgtgccctacggttctggcagtggacaacaatc

SEQ ID NO: 228841 - DNA, 579 bp, Glycine max
  unsure (1)..(579): unsure at all n locations
ttcattttccctcactttctcgctccccaaacgcccctctctctcctccaatggccgaccagctcaccgacgaccagatcgccgagttcaaggaggccttcagcctcttcgacaaggacggcgatggttgcattactaccaaggaacttgggactgttatgaggtcacttggtcaaaacccaactgaggcagaactgcaggatatgataaacgaggttgatgctgatggcaacggaaccatcgatttcccagagttcctcaacctgatggctcgcaagatgaaagacaccgactcagaggaggagcttaaggaggctttccgtgtgtttgacaaggatcagaatggtttcatctctgcagctgagctccgccatgtcatgacaaatcttggggagaagctgacggacanngaggtggatgagatgatccgtgaggccgatgttgacggtgatggacagatcaactatgaggagtttgtcatagtcatgatggccaagtgaggaccattccaaccataacctaaatttgaaaagcatataaagagaagagggaccagggcaagataagtttgatgagaat

SEQ ID NO: 228842 - DNA, 516 bp, Glycine max
gcatccaattgttctaggttcataataataataataataaccaaaagaagatgaaaacggagagtaacaaagcatggtgagacacagctaccgaagctactaaaaacaagggacagagcaaacaagtaggataactagggagcagagaagtagtagcaattaaagcaaacaagaaaaatagacactcaactaacaaaacctaataaccccaaatcaagatggacctaatgggaatagaattctcatcaaaacttatctgccctgtccctcttctctttatatgcttttcaaatttaggttatggttggaatggtcctcacttggccatcatgactttgacaaactcctcatagttgatctgtccatcaccgtcaacatcggcctcacggatcatctcatccacctcctcgtccgtcagcttctccccaagatttgtcatgacatggcggagctcagctgcagagatgaaaccattctgatccttgtcaaacacacggaaagccttcttaagctcct

SEQ ID NO: 228843 - DNA, 503 bp, Glycine max
  unsure (1)..(503): unsure at all n locations
gcataagaacaacaaatattacggaaacatgactcaatataacaacataaaagcaagccaatataagaacaaacagataggtgccgcataacattgttcccaaactccactcccactaaccccctattttttccattctccacaccaagctcatcaaagttttatcccgcaaaccgtacatacactattagtaattacaatcttcttcacgttggagagcagagcaaacacacttacgcatcacatagcataagtaagacacaggcatctttcacattcagtctcttcacatgtggtctgcttcaacatcatcgtcctcctcgtcctcatactccccatcatcctcggcagtggcatcctggtactgctggtactctgaaacaaggtcgttcatgttgctctctgcctctgtgaactccatctcggccatgccttccccggggtaccaatgcaagaaagccttcctcctaaacatggccgngaactgctcactcacccttctg

SEQ ID NO: 228844 - DNA, 567 bp, Glycine max
cctaccccttgctagctctataaaaggaaaagaccttaggtatccatcacagacaaataaacaatatagttattttgagtgaaggttagaagtgctacaaacaatggcagctggtcaggaagatgtgaagcttttgggagttgtgggaagcccatttgtgtgtagggtccagattgccctcaagttgaagggaattgaatacaaatttgtggaagaaaatttggccaacaagagtgatttggcttcttaaatccaacccagttcacaagaaagttccagtttttattcacaatgagaagcccatagcagagtctcttgtgattgttgagtacattgatgagacatggaagaacaaccccatcttgccttctgatccttaccatagagccttggctcgtttctggtccaaattcattgatgacaaggtttttggtgctgcatggaaatctgttttcactcttgatgagacagagcgtgagaagaatgttgaagaatcattggaggctcttcagtttcttgagaatgagttgaaggacaataagttttttggaggagaggaaaattggg

SEQ ID NO: 228845 - DNA, 494 bp, Glycine max
ctctacgaataacattatgcatgttgaaggattttataaaggaagacaaaggcttctcactacaaaacttatttggaaaaaatgaatttctttatcaactaaaatggctaaaatggaaacaagatcctaagattttttttcttccagggatttacatatagctagtatcaatttgacatgaaattcaaacagccataactcaacaaatatcttaaataagtctattttgaagcagaaagactttcatagcgggccttgaagaaggcaaaaagtgggtctctaggaggaaggacttctttcacaacagggtggctcatgaactcttggctccatttgtagagcttagggaatttctcacttgtgaatatctgcaaccctgctatttcctgaaaaattggaatccaaaatgctatgaaaatagctgcaatatctaccaacccaaatttctcttcttcaaaaaacttattgtcctttaactcatttctaagaaactg

SEQ ID NO: 228846 - DNA, 522 bp, Glycine max
cagaagttgaaaattttggttgagtgagaggcttgtctttgttccgctaccatgtctcatgagacatgcccttctgtaaagaatgtccttcttttggattccgatgggaaacgtgttgcggtcaaatacttctctgaagactggccgacaaatagtgccaaggaaaattttgagaaagttgtattcaacaagactcagaaaaccaatgcccgcacggaagcagaaatagcaatgtttgagaataacattgttctttacaagtttgtccaagatcttcacttctttgttaccggtggtgattatgaaaatgagcttatcttatccacagttctgcaggcattttttgattctgtgggccttctgctcagaggcaatgtatacaagaaggaagcactagagaacttggatctcattctattgtgcattgatgaaattgttgatggcggtatcatacttgaaactgatccaaatgttatagctgggaaagatgctagtaatagtatagattctggagcttctttg

SEQ ID NO: 228847 - DNA, 560 bp, Glycine max
ttttttttttttttttttttttttttttttttttttttttagaattagtatgcactaaaattggttcctatgaaatttttggaacatacggaatatgccaccatcctgaaatttaatagggaactaaaataacaaatcgccagaagaaaagtactggttgaatagcctgtattagcatgtcaatattaactttcactacgcaaggaacatcaacatccaggttcgacttcttgagaatgcaatgggggtttttcttataaacgtttataggaaaaacctaaagacaagtttcctccgtcattgggaaatgccctatgaattatttaagaagggaccttgcaagatgttccctggctggggccaatgcttgacttaaagtctgttcggacaaaggagctccagaatttattctattactagcaactttcccaggtataacatttggatcagttttaagtatgataccgccctcaacaattttatcaatggacaatagaatgggatccaagttttctagggcttcctttttggctacaatggcctctgggcagaagggcccc

SEQ ID NO: 228848 - DNA, 543 bp, Glycine max
gcccaagccctatacaaccaaaccctaacacacacccatttgattcagtttccatggctagcctcaaggttgcatttttggctgcagtgctctgcatggttgtggtgagtgcacccatggcacatgcagctatcacgtgcgggcaggtgacgaatagcctgatcaattgcatcggttacctccagaacggaggaacgccgccgtcgggatgctgcaacggagtgaagagcctcaatgccgccgccaagaccaccgccgaccgccagacggcgtgcaactgcctcaagtcggccgccagccaaatctccggcttcaaagccaacaacgccgcctcgctccccggcaaatgcggagtctccatcccctacaagatcagcacctccaccaactgcgctaccatcaaggtttgaagagaaagtcatggacgcaggaaaccggaaactactcactagtatatgagtagcattattaatattaagaataagatcgagggtgatgagggctccacttatatgcccctctctcttgtatgagagatttgta

SEQ ID NO: 228849 - DNA, 544 bp, Glycine max
agaacccaatattaaagtagatataactatgtgtaactcatacagagaaataacaacgcaacacaatttaaagctatccaatacaaatctctcatacaagaggagaggggcatataagtggagccctcatcaccctcgatcttattcttaatattaataatgctactcatatactagtgagtagtttccggtttcctgcgtccatgactttctcttcaaaccttgatggtagcgcagttggtggaggtgctgatcttgtaggggatggagactccgcatttgccggggagcgaggcggcgttgttggctttgaagccggagatttggctggcggccgacttgaggcagttgcacgccgtctggcggtcggcggtggtcttggcggcggcattgaggctcttcactccgttgcagcatcccgacggcggcgttcctccgttctggaggtaaccgatgcaattgatcaggctattcgtcacctgcccgcacgtgatagctgcatgtgccatgggtgcacttaccacaaccatgcagagcactgcag

SEQ ID NO: 228850 - DNA, 479 bp, Glycine max
attctctctgtgtatttccctacctctcccttcaagatgcagatcttcgtcaagaccctcaccggcaagaccatcacccttgaggtggaaagctctgacaccatcgacaacgtcaaggccaagatccaggacaaggaaggaatccccccggaccagcaacgtctcattttcgccggaaagcaacttgaggacggccgtacccttgctgactacaacattcagaaggagagtactcttcacctcgtcctccgtctccgtggtggcatgcagatcttcgttaagacactcaccggcaagaccataaccctagaggttgaaagctccgacaccatcgataacgtcaaggccaagatccaggacaaggagggtatccccccggaccagcaacgtctcatcttcgccggaaagcagctcgaggacggccgaaccctcgccgactacaacatccagagggaatcaacccttcacctcgtcctccg

SEQ ID NO: 228851 - DNA, 471 bp, Glycine max
gacaattaatcatttcatatttcacacattcataacaaacgtaggtgggatattagagtactattattaatgggacacaattgagttcaacacaaaccgaacttattttcaagggacattattacagacccattaaacatcaaaggtcttcaaatgttttgggaacacatccaacattacacaacgagcttaaaaccccccacggagacggaggacaaggtgaagggttgattccttctggatgttgtagtcagcgagggtccttccatcctcgagctgcttgccagcaaaaatcaacctttgctggtccggggggatgccttccttggcctgaatcttggccttcacattgtcaatggtgtcagagctctccacctcgagggtaatagtcttacccgtaagagtcttcacgaaaatctgcataccaccacgaagacgcaacaccaagtggagaggtgactccttctggat

SEQ ID NO: 228852 - DNA, 541 bp, Glycine max
agcttgatggagtattacagggatataatagcgattggatccttcactgccatgtcacacgggattctggtgtccacgtcagcggggaacggtgggcccagtcagggaagtttgtccaacgtggcaccgtggataacaactgtgggagcgggaactatcgaccgcgatttccctgcttacataaccctcggaacagggaaaacatacaccggagcttctctttatagcggtaaacccttgtcggattcgccgcttcctcttgtttacgctgggaacgcgagtaactcttctgtagggtatctatgtttgcaagattctctgattcctgagaaagtttcagggaaaattgtatatgtgagagaggtgggaatccagagtggaaagggtttggtggttaagcttgtggaaggggctgattgatattgcgaatagtgaagcctacggagaagagttagttgctgactctcatcttcttcctgctgcgtctttgggacaaaaatcaagcgagattttgaagaactatgtttcatcttcacctaat

SEQ ID NO: 228853 - DNA, 527 bp, Glycine max
aattcagattcaaagccattatgatacatacatacagatgcgaccattatctttttctatgtacaattattgttattattccatatataaagttttctcctgaacttcagcctacggaataaaaacagcaaagtgaataagtgagatacataataaaaacaagccgtatcgggccgggcccaaaagcaaaccacgaagagcctacaacacttgagtgggcccttttatttgggtcatacattttccacagcccatcatgtccagctgaacgcaattggactaccaaccttatgcttcccatccgtccattccaaacgtgcgaagctggtcgtcccagacggcatcgaagtgtatgtaaacgacaccgtatagtccttcttctcgtacaattccgtgaaactcaacgtattcggttccaccacaggtcttcacatttcgaatcccccaacgacatcaccgaagctttgtacgttcccggggctcccacgttagtcaaaaccctagaagactttacggtcttcagagta

SEQ ID NO: 228854 - DNA, 523 bp, Glycine max
agtctgaaatcttcatgcaagcatagttgatattgcaaacaatcttgcacaatcaatgttaattgctcggttaatatcagatgcaagaataatattacaatataagcacatttatgagccactaactttccctgaccaacaaaattagcatgctgatttgaattaattgttggaacttggaacatactcatttcttgaacagtctctctctcaaggtagcacagtaaaaacttccacatctttcattgcagggctcttgactgagtatttaaatgtccaaccatggcaggcaccagcatgttccccctttttattgagggcaacaatggctcccaaaaaatctggaaattttcttgctattcgtgttattgcatctttagcagcaagtttgggttccattcccaacctcatactctccacaacttgatagcatggaaggaagcgcatcatgatgtcaccatccccagttgcacaacatgcaccaacttcatcaatggcatatgctgaggatccagcaatggga

SEQ ID NO: 228855 - DNA, 458 bp, Glycine max
ctgaaactatcaagttctatgtatgttgaaagatcttgtgactctatggtagaggttaatattacatcttgcttttttgtatttatgaattatgattgaacccaatcaattcaagagaatggtacaatgtttcttcacagaagagttcttattctggagctacactgtttctgttgttatttctttcaaaattctaataagctggcttagtccttatgtaaaggaagaagcttgaccccactcctaccattgaaatgcacctccaccatacgaaagtgggaaggtatcacttcctccccatgcacatggacattttgtgcagccaaattgtatgccttggtttccttgcattggaatcataaactaaggctgcaagaaggccgtatagacactaacctaagggaatgttagtgatgaggatgttgtggatcacaccaacactgtttgggccaaaaagc

SEQ ID NO: 228856 - DNA, 334 bp, Glycine max
  unsure (1)..(334): unsure at all n locations
attgtttgttgttgtaactcgttcttcttcttttgttgttctgtgtttgtgtttgttttttctctcacctgaaaatgtcttgctgcggtggtaactgtggttgcggaagctcctgcaagtgcggcaacggctgcggaggctgcangatgtacccagacttgagctacactgagtcaaccaccaccgagaccttggtcatgggagtggcacctgttaaggttcaattggagggtgctgaaatgggtgtgcccgctgagaacgatggctggcaaatggggaccaaactgctcctgcaacccctgcacttgcaagtgaaggtgttgggagagcaagc

SEQ ID NO: 228857 - DNA, 466 bp, Glycine max
cccagaaatgggttttaatattataagcagagattcataattcagattagccgaactttttacagaagcgaccaatttccaaactttaaaaaaaaaaaaaaaggaagcacccttgggcttaacacacccatcacaaggccaaaacacttgaacttggtgaagggcaaaacatgaccactttattttaggggggttggtttaacacaaaacaccagggggcccgaaaaccttcccagacataatacataggtttttagctccacattaaagggttatcattattcctaattaagggctttttttggttgaagcttgctctcccaacacctcacttgcaagtgcaggggttgcaggaacaatttggtccacatttgcagccatcgttcttagggggcacacccatttcagcacccttaaatggggccttaacaggggccactcccatgaacaaggtcttggggggggg

SEQ ID NO: 228858 - DNA, 496 bp, Glycine max
tttccactatcattatttgcccattaaaaatcaatttttagctctcattttcatttttttgcaattcctccacacacaccatccaattcccgtctttgatattttaatcacagagagagaagagggtttgtttctgggttttggaaatttcagcccccatcaaagaagaagccccataatcttcgaatcgaaggcatttgattgaaaggtcgaaactttagcatctgggatcgcgcaattggggttttttttggttaaaagggtatcttcggaattcatggcaaaactgtacgtgaaggcggtgccaccggcggatctgaacaggaacacggagtggttcacgtaccctggcgtttggaccacttacatcctcatccttttcttttcttggatcctcgttctctccgtcttcggttgctcccccggcatcgcttggaccatcgttaatctcgcacactttgctgtaacatatcactttttttcactgggaagaaag

SEQ ID NO: 228859 - DNA, 485 bp, Glycine max
aaaagcaccgatataatccgatacatatacttttccactgtacagaaaaaaactcaacatatttatttgtttaataataccttagaagcagttggcaacaaaacattacttgagtatccttccagttctgccttctatacaaaggtgtgaccttttctccagaacaaaaggacaagaggctcttgagcaggtaggtggtggtggtagccaagtgtcacggacacatgcaacatgtcacttatcagcattgattccaaatatcctgaccttgtgcatgtgggggaactttgcaacaaccagcacaatcactgcaacagtgttgaagagcagcattggattctgatagtctgttgtgtgtgaggctattaagtacagcaccaaaggaacaactgtgagaaacttcctgttacgagtaagctgcttttcattgtctacctgctcccaccaagtcaatctattgtagatcccttgatcctctgcaaatg

SEQ ID NO: 228860 - DNA, 564 bp, Glycine max
  unsure (1)..(564): unsure at all n locations
cactttgttcaggaatttaagagaaagaacaagaaagatatcagtggcaaccccagagcacttaggaggttgaggactgcctgtgagagggcaaagagaactctatcttcaactgcccaaaccaccattgaaaatgattctctctatgagggaattgatttctactccaccattactcgtgctagatttgaggagctcaatatggatctcttccgcaagtgcatggaaccagttgagaagtgtttaagagatgctaagatggacaagaggactgtccatgatgttgtacttgttggtggttccaccagaattcccaaggtgcaacaactcctgcangatttctttaatgggaaggagctctgcaagagcatcaatcctgatgaggctgtggcatatggtgctgcagttcaagctgctatcttgagtggtgagggtaatgagaagggttcaggatcttctccttcttgatgtcacccctctctctcttgggttggaaactgctggtggggtgatgacagtcttgatccccaggaacactactatcccacaaagaaagacaggttt

SEQ ID NO: 228861 - DNA, 568 bp, Glycine max
actaaaaaaccagcttataacataagctttaaagcctgtatgtgtccactaaaacacagtgaaaactgaaaagggtaacatgatactgaaaacataaatcgacatgacatactaccaaatattgtctttcttgagaaactaaatccaaccaaaggacatgaaatcagacatttaaaaataaatagtaaatcaaaagcagaaataaactaaatttagtctacttcctcaatctttggccccgcaccgcttccagcagcaggaacatcatcgtccattgcaccacccacgtctggaccagcaccaccctggtacatcttggcaatgatagggttgcagatgctttccaactccttcattttgtcctcaaattcatctgcctctccaagctggttgctgtctagccactggatggcctgctcaatggcatcctcaatctttttcttgtcagctgggtcaagttttcctccaatcttctcgtctttaatggtattcctcatgttgtatgagtagttcttcaatgcattcttggcctctaccttcttcttgggctcttcatcttttgatttga

SEQ ID NO: 228862 - DNA, 580 bp, Glycine max
  unsure (1)..(580): unsure at all n locations
gtgaatcagcaccacattcacctgagctttttgtgaggattccaaagcatggcttcccttgcagcatccactgctgctgcttcccttggcatgtcagaaatgcttggaaaccccatcaacctcagtggtgccacaaggccagctccatctgcctctagccctgcctccttcaagactgtggctcttttctccaaaaagaaggctgcacctccaaaaaaagctgcagctgctgctcctgccaatgatgagcttgccaagtggtatggtcctgacagaaggatcttcttgcctgagggtctcttggaccgatctgagatcccagagtacttgaccggaggaagtccccgaaaccattggtatgacccaattgggtctagcaaggngccagaaagatttttccaatatcaggcatttgaattgattcacgccagatgggcaatgctntggtgctgctggattcatcattcccgaggccttcaacaaatatggagcanactgcggtcctgaggctgtttgttcaagactgagctctgcttcttgatggggtacctgactactcgggaaccatcccatcatctat

SEQ ID NO: 228863 - DNA, 353 bp, Glycine max
gggggtccaaggaacaaagccaaatgccttaatatttcagggatatgtattggacattaagtaagattggagaaaaacatgaagatgaatgatttagagagttggagcttttttagcagatccagaaatgacagtgagcaagttgttgccaaaagggtcactgagatgttttgcaagggttttaacaggacctttttcagtggcattagcttggaagtagaaaccaagcctgggaaacatagcaagggttccatttttaatttccttcacctttagcagggcagcttggtctggatcatttgcaagccccaatgggttaaatggaccacccggatgaagtttgttttcgaaat

SEQ ID NO: 228864 - DNA, 534 bp, Glycine max
atgagaatgaaaaacatatttcaccctaatttatttaattttttaacatacatataattgatgacattaattaaggggtagataagccccataagacatcaatttttaattctctgatagcaatagcgtaaaacacagtacgtttattttgccattaaatttagttatggtcttgactaaggtaggcaccaatttctttgctcatctcaactgtcaattccaataaggtataagggtcaggagtattgtcattttgtttctcatattccaggacccaattcacaacgctttccttttcctttggagtaacttgcaataaaaacttgaagcttttgtaatgtcccagcaggtcttcctctatgaccttaaaggtcattttattgcttttcatgtttatgccttcaaccatcttcttagccacacaaactttgccctcatgtaaataattccaggagatgacggatccctcagggccccattcacctttatgaatttaaacaaactgtacttttccagggaaaatgttggcaatat

SEQ ID NO: 228865 - DNA, 408 bp, Glycine max
ataaaacttcgttataaattaaatgcaacttaaaacatccctcagcagcaaaggaaatggactaaaaccctatagctgcttgtgaaattcgaaatatctcagactcttcttaccatcaaaacaaaaaacagtactcatcaaaaacaaacagcaatgaaaattgaccaccgccgatcaagaacctagttttgaaagttacggctacatgaaatcggcagaaacttaaaaatataacttaaacaaaacacctaagactctgcaaggataaaactactataaaggagtaaccacgatgatgatcacatgtgctagcaaaattgcccaaatgcaatcacttcttcttggcagcggccttggtgaccttggctccggtggggtctttcttctcaacactcttgatgactccca

SEQ ID NO: 228866 - DNA, 414 bp, Glycine max
agtctcaaattcattttcattcatcatgcccaaacttctatacactgcaaagtcatatctaagcaccttgaaagtcaaagcatctatataattcatcagctgtagaggtaacgaaatgtaactcaaaaaatttgattacttttttacaacatccttgaatgaaactggccaaaccctgcacgttccttaatgacaaaatacctagattagaaggatgagggtcctattgaagagtatccagcagcttttctttccttcagtgttgaagccaaccagaccaggcccttataaagaccatcttccttgagtgcacaagtgccatgtatgggccattttctattctttagatcaaagagacctagtccttcacatacttccattggcgtcatagcccctctcaagtcttgtttgttg

SEQ ID NO: 228867 - DNA, 516 bp, Glycine max
gggtggaataagaagctggaattaatcacaaatattacactgtaacaaaatatacaatatggaaagaaagaaagaaagtattttttttaacggcacacacctgtggtcagaactcacgagagaaaattctgacctggatcatcatattggaaaattaagtcggcaacatctttgtctctttcgttgaattgaattttccacatatattacgtacacacacgttacagggtttgtccgaaagtcactgaaaatctctgcagatccttgctatatatatcggaaagttgaaaagctggtgtctgattctgataatggtgccatgtagcacatgactcgtctgttatgaaacctgtttctggtttaacctcactatagatagattgagaggtatgaatttgatgattctgcgctgtgttgtttcccaaaataaacggggtattaagatactcagaccatttcagatcttcttgttctgcttgtagaggcatttgatcagcatctttgttgatgttaaca

SEQ ID NO: 228868 - DNA, 592 bp, Glycine max
ataactagaaacagtgtgatgaaaatgaaggtccttgttttcttcgttgctacaattttggtagcatggcaatgccatgcgtacgatatgttccctctccgaatgaacactggctatggtgcccgtactccggaagtgaaatgcgcaagttggaggcttgctgtggaagcacacaacatctttggctttgagaccattcctgaagagtgcgttgaagcaacaaaggaatacatccatggcgaacaatatagatcagactccaaaacagttaaccaacaagcttacttttatgccagagacctcgaagtccatcccaaggacacatttgtgttcagtatagatggcaccgtactctctaatattccatactacaaaaaacatggatatggggtggagaaatttaaatcgaccttgtatgatgaatgggttaacaagggcaatgcaccggcactgcccgagactcttaagaattacaacaagctggtgtctcttggcttcaagattatattcttgtcaggaagaacactggacaaacaggccgtaacagaagcaaacttaaagaaggctggctaccacacatgggaaaaataat

SEQ ID NO: 228869 - DNA, 279 bp, Glycine max
aaggaacaagggcccctattttttttttgcccccaaaggaaaaaccacttatgggaggcttttaccagatttgggggcccccagtggtaacaacattaaggggagcgagggcccctttttgaccccctttttttacattttgagggatgggggccacctttcttggtgaggggggaaggaacaccctgatggctcacagggggttaggaagcctaaagggcctgtttttccctttggggccccccaggggaacgctccattgggtttcaaagcatccca

SEQ ID NO: 228870 - DNA, 551 bp, Glycine max
ataactagaaacagtgtgatgaaaatgaaggtccttgttttcttcgttgctacaattttggtagcatggcaatgccatgcgtacgatatgttccctctccgaatgaacactggctatggtgcccgtactccggaggtgaaatgcgcaagttggaggcttgctgtggaagcacacaacatctttggctttgagaccattcctgaagagtgcgttgaagcaacaaaggaatacatccatggcgaacaatatagatcagactccaaaacagttaaccaacaagcttacttttatgccagagacctcgaagtccatcccaaggacacatttgtgttcagtatagatggcaccgtactctctaatattccatactacaaaaaacatggatatggggtggagaaatttaactcgaccttgtatgatgaatgggttaacaagggcaatgcaccggcactgcccgagactcttaagaattacaacaagctggtgtctcttggcttcaagattatattcttgtcaggaagaacactggacaaacaggccgtaacagaagc

SEQ ID NO: 228871 - DNA, 392 bp, Glycine max
aaggaacaagggccccttttttttttaagcccccaaagaaaaaacaaccttgggaaggctcttacctgacttggtgaccccccgctgaaaccacattaaggggagcttgggcccctttttgaaccccttttttttcatattgatagatagggccccgcttttttgttgggaggggaaggaactcctgaatgttttcccggggatttggaagcttaaagggcccgctttcccccttggggccccccgggggaaccccccattgggccccaaagatccccacaatgggggttccccgccttattaaattctctctccctgggggtttgtatgaaaccgcctttgggggggaagggtcttgggggctccttaaaaattatttttcccacgtgggg

SEQ ID NO: 228872 - DNA, 565 bp, Glycine max
ctaaaacatctccagtgggttcttcttcttctattacaacaacgtcgtccaagaccatgaccatggccatggccacgatcctgctcctgttcacggtcttcgcggtttcatcggccctagacatgtcgataatctcgtacgacaacgcccacgccgccacgtcgcgcagcgacgaggagctgatgtccatgtacgagcagtggctagtaaagcacggcaaggtgtacaacgcgctcggagagaaggagaagaggttccagatcttcaaggacaacctgcgattcatcgacgaccacaactcccaagaggaccgaacctacaagctcggactgaaccggttcgcggatctcaccaacgaggagtacagggccaagtacttgggaaccaagatcgatcccaaccggaggctcggcaagaccccgagcaaccgatacgcgccacgtgtcggcgacaaactacctgaatcggttgattggaggaaggaaggtgctgttcctccagtcaaagaccaaagaggctgtgggagctgttgggcattctcagcaatcggtgcagtggaaggaat

SEQ ID NO: 228873 - DNA, 471 bp, Glycine max
agccagaatatcgggcaaatccaaataatgctgcattgtcacatagtctacataacctgggaaactaacagcaatcaaatatgttcgccatttggaattggaatttgaatacaaatacagcgcatcaataatataaccctatgtacacagccaatatctgactgaaatttgatacagaatagtctcaatttgtatcataataaaatggcacagagaaatttatgtgaaggtaaaggggaagtgtatcagctggggttttaattcttcggctttcatttacttcatcattggctccttcctgcacgttcacatttcctttatctgcttaagcactgctgaccttgttcttacccccaaaggtccaatggggtttagccggagtacgcctcaatgccttcactccgaatgggttgttcttgctcttgagacaagttccaacataagtgttgcagatgggatagtcgttagggc

SEQ ID NO: 228874 - DNA, 476 bp, Glycine max
ctattgtactgctggtatctcagggggtcacattaacccagctgtgacatttgggctgtttttggcacgcaagttatctctcactaggacagtgttctacatgatcatgcagtgcttgggagctatatgtggtgctgctgtggtcaagggattccaatcaaaccaatatgagaggcttggtggtggtgccaacactctcaataaaggatactccaaaggtgatggccttggagcagagattgttggcacatttattcttgtttacactgttttctctgccacagatgccaaacgaaatgctagagactcgcatgttcctattttggcaccattgcctatcggttttgcggtctttctggtgcatttagctacaattcctatcactgggactggcatcaaccctgctagaagtttaggtgcagcccttgtatacaacaaggaccaagcttgggataaccattggatcttctgggtag

SEQ ID NO: 228875 - DNA, 474 bp, Glycine max
ggggactaatgaactgtgtaaatagggatcatatttaataccataaacttgtacacaaacatattttacagtgtacttacactccagcaaatctaaaccaagagtctttgttatgtgcatggaagatattataagtagaaacgaaataaatcacaccagccacattttccataagttcaattgcatgtccaagaacataagttttgaactgataaattatataaattaataagataggtagaaattttgtagtggcagcagaaataggaacatctttgttgtgagtacccagttttaggctaaaccgggcactagttttcagcctttgcttcaatttttcattattttgacttgaaaggaatggccctgagcactatctgatggtataaagctgcaagtgctgccccaataaaaggccctacccagaagatccaatggttattccaagcttggtccttgttggatacaagggct

SEQ ID NO: 228876 - DNA, 561 bp, Glycine max
tcttcttccccgcagcgccgcacagactcatcaaactcgttgtgactgcagctgcacagattttcctcttctctgtgcctttgcgagaacgcgcgtttggtttcaattcaatggcgggaggtaaagcgaagaaagaaaaggggaagccccatcagcagcagaagcacatgccctaccaaggcggaatatcgttccacaaatcaaagggtcagcacattctcaagaaccccttgctcgtcgattccattgtggagaaggccggcgtcaagagcaccgacgtcatcctcgagatcggtcccgggaccggtaacttgacgaagaagcttctcgaagccggcaagaaggtcatcgccgtcgagatcgatccccggatggttctcgagctccagagacggttccagggtacccctcactccaatcgcctcacggttatccaaggtgatgtgttgaagactgaacttccttattttgacatttgtgttgcaaacattccctaccaaatatcttctcctctcacattcaagttactcaagcacgaacctgcttttagggctgcaatca

SEQ ID NO: 228877 - DNA, 517 bp, Glycine max
  unsure (1)..(517): unsure at all n locations
agagaaaacaaacacagactatactaataaaaaatattcgcaaaaggaaaagtttgacaacacaaaattgtaaaatccaatctcaaacagttaacaaaaaagcaacccaaactaaacaatcaaggtgcttgttgttttcaacatctactcttccagtattgttcccttctcactaacataaatgccatcgagaaatttcctgatatccttctttttaacatggcatttctggttaatgagagcacaggacctagaaacaagttcaatgtcgttcccatccaaaatcaattcatctttaactttttcagatcgaacaacggaaacaccgttaagaaggtccacttttctcaccttcttttcgccaaggaaatttctgatctcaatagacttgttgtcgttgccgatgcttgcgttgatgggaaaatgggcataaacgaacctcattttgtagcggtagcccttggtgacgccggtgatcagattctccacgtggctcanggcggtgcgaatggcggcg

SEQ ID NO: 228878 - DNA, 450 bp, Glycine max
agccagggcaaatgaaacgacttgagtcattatggattttaataaccattgtcatcgacataagtaacattagatgaaataaggatttcataatagaaaaacactggttgaagcataaaattgtttattcgtgaatgtgcataaaagcacaataagacaccatacacgaaacacatccttgttagagccagaagccgcctcattcacctatagttgcggtatacgggagtatacatgcaactctcagcacacttcacaagattctgaggacgaggaagacgggtagccaagcccagttcgtatgccttggcagcaacatttgcagctatattagccgaaattcttttgatattagagaatggtgggtaaatcaagccatttttgtagttctcctcactcacttgtttagccaaggattccgaagctgctaaaagcatatcgtcatgtact

SEQ ID NO: 228879 - DNA, 551 bp, Glycine max
tgctggaactgcattcccaatggcctgcattgagttcgcaggaaggtcaagacgatttcattaaaatattgcaggagttctctaagctctttggcgcgtttaatattgcggattttataccctacctcgggcgcgtagatccacaaggtttgaactccagactcgctagggcacgtggcgcgctcgatagcttcattgataagatcatcgacgagcacgtgcagaagaagaataattatcagagcagtgaaattggtgatggtgaaacggacatggtggatgagttgctggcgttctacggcgaggaggcgaagttgaacaatgaatcggacgataatttgcagaactctatcagactcactaaggataacatcaaggctatcattatggacgtgatgttcggaggcacggaaacggtggcgtcagcaatcgagtgggtcatgtcggagctgatgagaagcccagaagaccaacagcgggtccaacatgagctggcggatgtagtgggcctggaccgtcgggtcgaagagtccgaatttcagaaactcact

SEQ ID NO: 228880 - DNA, 484 bp, Glycine max
aaagtgagaactttgaaataaatctgggacactttatggcggctattatgaaaggaagaacgttcaaatgcattgcataggcataactaaaccacatttgacattaaacaagaagctaatctccgtctgttgccggttgggtcaccccacactgcaccaacaggctagtcaggtcttctggggagcaaactggatacttgtctttcccagccggtgacaaaaaaacctgtgcaagttcaagcttatccgaggtcagacttgtgctggccatagtcttacttaataccttaagtgcaagttgaacagtttctttccttgtgatatcatccttggtggcctgtttcacaattgactgaggtgactggttggtggcaccaataggtgtagctttccaaccaccataattatcactggggtcacttgtgtaaagctgaaagcccatatgtcggcccctaccagaaaagaggaatgtgactactaatgg

SEQ ID NO: 228881 - DNA, 567 bp, Glycine max
  unsure (1)..(567): unsure at all n locations
gaaagaaacacaaatcacaatcgctatggctaggtacgaccgagcaatcaccgtgttctcccctgacggccatctcttccaggtcgagtacgccctcgaagccgtccgcaagggcaacgccgccgtcggcgtccgcggcaccgacaatgttgtcctcggcgtcgagaagaaatccaccgccaaactccaagactccaggtcggtgaggaagatagtgaatctggacgaccacattgcgctggcctgcgcggggctgaaggccgacgcacgcgtgctcataaacagggcacgtgtggagtgccagagtcacaggctcaccgtggaggatcccgtcacggttgagtacataacgcggtacattgcggggctccagcagaagtacacgcagagcggcggcgtgaggccctttgggctttcgactctgattgtcgggtttgatccctacactcactcgccctccctctaccagacggatccctctggcacgttctcggcgtggaaggcgaacgccaccgngaggaactcgaattcgattcgggagttcctggagaagaaactataggacac

SEQ ID NO: 228882 - DNA, 525 bp, Glycine max
gaacttcaataataatgacatgcaattaaatatgaccaacactaatggcagtacccaaaaacaataaagcagtcattttaagttaggccaacatctagcaagaacaattcacgagctaaataaaagtaacataaaatcatgtctccttagaaagggtattctttgcagcctcagcagccgttttctttgcatcaatctcagacacaatggcatcaatttttagcttcagtgagtacagccaatacctagcaagaacaatgctcgcataacacaaaacagaaaattatgtctccttaggaggggctttcttagcagcctctgcagctgccttctccgcttcgatctcagcaacgatggcatcaatttcggcttcctccagttgacgcagaccctgctccttagtcatcaccgcaacttctatgttcttccctccactctcaacaacttcaagcaatgcgcgaatagccaacctgacagtcttctggccagaagtgtccttattgttcttttcaggaactcccgatc

SEQ ID NO: 228883 - DNA, 432 bp, Glycine max
agatgtcgttggtttcaagcatgttcgggtgtggagtggtgatggcggcgtcgcaagcaatgggaattggaaggagaagcgatggtggattgacgatagtgtgttcgtctaggccgcagaagaaagcgacggcgcatcacatgaagactcggcctcggaagacgcaggcatgggatagaaaccgcaagcccaccgtctacgatccactccctcctcttcctcctgattggaccctcgttattcccgctgacgcttcttctgctcccgttacgcctccgcctccaactccctctgcctagtcactctctcggtactctctctcgttttcatgtagtcttatctttaattccagcagcttttctttcatgttttcatctcaaatcaaaccttcatcatttgttttggatcaataaatgtttctgaattctctct

SEQ ID NO: 228884 - DNA, 304 bp, Glycine max
ggagcccttgcatccaaattatcaagactgcgaccatcccagctaagctttgcaagagggagagcaccaagcaatttcacaattccaaaatcaagttcccattggtctacaagaaagttagaccacctaccagaaaagctgagaccacatacaaggccaaaaaagccacacttgtttttgtaacgtggtgatgaatgagttacaaatacttggtgtctatcaggcgtttttagtagagacgtacccgttggttttatactgccattttgtggggggggctttaaaaattattggggggggtttt

SEQ ID NO: 228885 - DNA, 311 bp, Glycine max
aaagataaacccaatgaaaatagtctaaaagaaccttaaacaaaatctggcagtaaaaaaccaacgggtacgtctctactaaaaacgcctgatagacaccaagtatttgtaactcattcatcaaccacgttacataaacaagttgggctttttggccttgtatgtggtcttcagctttctggtaggtggtctaactttcttgtagaccaatgggaacttgattttggaattgtgaaattgcttggtgctctccctcttgcaaagcttagctgggatggtcgcagtcttgataatttggatgcaagggctcc

SEQ ID NO: 228886 - DNA, 550 bp, Glycine max
  unsure (1)..(550): unsure at all n locations
aaaagtgcttatagagaagcttggttatatgagataacaagatcatggaattggaagctgatcatcaaaatgggattcgaagcagactcaatttccctctgcagctgttagagaaaaaggacattgatgacgtcacggaacaaccttgttccaccaccagcgtggtaactgctactactactgctattactactactactacttcagataacaacgacctccacttggcggagcagtccaagaagcctccgccgaaacggagttccaccaaggaccgccacacgaaggtcgatgggcgaggccgccggatccgcatgccggcggcctgcgctgccagagtgttccagctcacgcgtgagctgggacataagtctgacggcgagaccatcgagtggctcctccagcaggcggagcccgccgtcatcgccgccactgggacaggcaccattcccgccaacttcacctccctcaacatctccctccgcagctctggctccaccatgtcngccccgtcgcactacttttcgcggaactacttcaaccctagcac

SEQ ID NO: 228887 - DNA, 562 bp, Glycine max
  unsure (1)..(562): unsure at all n locations
cagttcttctttcctcaaccttctttcttcttatatatcgaacatggctaagtatcattcaagtgggaaaagctcttccatgactgctatagccttcctgtttatccttctaatcacttatacaggcacaacagatgcacaatccggngtatgttatggaagacttggcaacaacttaccaacccctcaagaagttgtggccctctacaatcaagccaacattcgcaggatgcgaatctacggtccaagcccagaagtcctcgaagcactaagaggttccaacattgagcttttgctagacattccaaatgacaacctcagaaacctagcatctagccaagacaatgcaaacaaatgggtgcaagacaacatcaaaaactatgccaacaatgtcagattcagatacgtttcagtgggaaatgaagtgaaacccgaacactcatttgcacaatttctagtgcctgcattggaaaacattcagagggccatttctaatgctggcccttgaaaccaagtaaaagtttccactgccattgatactggtgccctggcagaatcattc

SEQ ID NO: 228888 - DNA, 355 bp, Glycine max
gggaccattaaaaagagaacttttatttaaagctaattaacttagccccggaaggggcccttccgacttcaaaagggcggataaattaaggggttattccgggctcttttaaaacaatttttgaagtgtcatttggactcggggcccctattttaacccaaattatgcttccgctaaaaattaagtgcaattgagcggggttttgggctggttacttatagggaaaaagagccccccaaatttttcaaaccctgggtggtgtttggttttcataaaacacggacaacaccataatttcaaggggggccccccgccctttggggggtccttgtttttcattacgaaccaaattggg

SEQ ID NO: 228889 - DNA, 378 bp, Glycine max
gggacttgtatggctcagatgcaccttcaccctacaaccctcttcagagcaagttcttcgagacatttgctgctccattcacaaagaggggattgttactcaagtttctgatattgggaggtggttccacccttgcatacttcagtgcaactgcctcaggtgacattctaccaatcaagaagggaccacaactcccaccaaagctcggtcctcgtggcaagatctaatttgatttgtatcagaactccatctatggagttcctttttaattattttttttctggtttgcataatgtgtaagtatacttacagactactattcaaagatgcttctttcccgtctaatggagtggcattgatttggttttcaatggaagc

SEQ ID NO: 228890 - DNA, 378 bp, Glycine max
gcttcaattgaaaaccaaatcaatgccactcaattagacgggaaagaagcatctttgaatagtagtctgtaagtatacttacacattatgcaaaccagaaaaaaaataattaaaaaggaactcaatagatggagttctgatacaaatcaaattagatcttgccacgaggaccgagctttggtgggagttgtggtcccttcttgattggtagaatgtcacctgaggcagttgcactgaagtatgcaagggtggaaccacctcccaatatcagaaacttgagtaacaatcccctctttgtgaatggagcagcaaatgtctcgaagaacttgctctgaagagggttgtagggtgaaggtgcatctgagccatacaagtccc

SEQ ID NO: 228891 - DNA, 515 bp, Glycine max
cctatggtgggaaaatgggtgagatttctgaggtggaaacaccgtttccacatagagctggtaacatttataaaattcaatactctgtgacttggaaagaggagggtgaagatgttgctaacagatatctagatcggattcggaggctctatgattatatgacaccttatgtgtcaagttcacctagaagttcatatatcaactatagagacgttgatataggtgtcaatggacctggaaatgctagttatgcagaggctagagtctggggtgagaagtatttcaaaagaaactatgatagactggtagaggtaaagaccaagggttgatccaagcaattttttcagatatgaacaaagtattccatcacttgcatctggtctaagcataatgtcagaatagaagatgccttcaagatgtataaaaaaaaggttgattaggacaaagttattaaacagctgtttggaaaccagtcagattacgtcaagtgtgccataaaatttgattggttagag

SEQ ID NO: 228892 - DNA, 485 bp, Glycine max
ctctaaccaatcaaattttatggcacacttgtacgtaagtctgaactggttttccaagacatgcttgcttctagataactttttgtcctgaatcaaaccttttattttatacatcttgaaggcatcttctattctgacattatgcttagaccagatgcaagtgatggaatactttgttcatatctgaaaaaattgcttggatcaaccttggtctttacctctaccagtctatcatagtttcttttgaaatacttctcaccccagactctagcctctgcataactagcatttccaggtccattgacacctatatcaacgtctctatagttgatatatgaacttctaggtgaacttgacacataaggtgtcatataatcatagagcctccgaatccgatctagatatctgttagcaacatcttcaccctcctctttccaagtcacagagtattgaattttataaatgttaccagctctatgtggaaa

SEQ ID NO: 228893 - DNA, 583 bp, Glycine max
gaagaacaccccgtacttcttaccgaggcaccactcaatcccaaggccaacagagagaagatgacccaaattatgtttgagactttcaatgtgcctgccatgtatgttgcaattcaggctgtcttgtctctgtatgccagtggacgtactacaggtattgtgcttgattctggtgatggtgtgagccacacggtgcccatatatgaagggtatgctcttcctcatgcaattcttcggttggaccttgctggccgtgatttaacagagtacttggtgaaaatccttaccgagagaggatactccttcagcacctctgccgaaaaggaaattgtccgtgatgtgaaggagaaattggcatacgtggcccttgatttcgaacaagaaatggagactactaagagtagttctgcagtggaaaagagctatgaattgcctgatggacaggtcattacaataggttctgagagattccgttgcccagaagtactgttccagccttctctgattggtatggaagctactggaattcatgaaacgacatacaattccatcatgaaatgtgatgttgatattaagaggatct

SEQ ID NO: 228894 - DNA, 563 bp, Glycine max
  unsure (1)..(563): unsure at all n locations
caatgtgaagaagtttggttatgattaacgaaataattttgatatgtagattaaataaacacacgaagtacaaataaacattggtctctctaatcacaaaggagattaagtccattgtggtgtgccttcatgactgaattataccaaagtactacccttaacatactcagtaaaagccagagcaatcaaacccaacatagcaaatcttccattccacagttctgcatctgaggacatgaaccctttggacttagactccacgctgacaccttggaagagtggaatcaaggaagcaagggtaaggaccacacttgtccccaagaaccatgggatgccaccattggatatttgttctaacacaccttgccctttggctacttccactgccattgcagccacaaacccaatcatggccaaccttccattgatcctctcaggtgctggcccactgaatgccaacacatcagaaaacttagtgctcacctttggtgaaggagcagagactggctgtggcttgggttctactgatggtggcggtgtaactggnngtgcaggctcacttg

SEQ ID NO: 228895 - DNA, 514 bp, Glycine max
acgccactctagaacatcattatttatttatttatttatttatttatagctcttaacacatataattccctggatacaacatgtatactggtcatattcaactctagagagctttatctgatatgatcatccttaacatattcaaagatagctaaatacttaactgtataatatatcacacaaacgtagagtgacatatatagagtaaataataaatataagtttaatttatacacacaaactatgagtatataacatcgttatccaaatattcaacaagaatttactttattaccgcatcatgttaaaatgttgcgataaagtggtgaaatcctattgaatgcttgtgtcaagatgctttgtaggatcaaagtgtgtataaattaaactggttatctatatatatatatatatcccacactttaattataagaaggcttaattaattaacaagttggaaagggaatcccacaagaagcaacggtttttcgggcattaggagagttaacatact

SEQ ID NO: 228896 - DNA, 404 bp, Glycine max
  unsure (1)..(404): unsure at all n locations
aagaaatttaagtgaggagctagagaatgatgatgaagtctgctatgtgtgcagtggtggttgtagcacttcttcttctggcggaggtggggcccatggctgaggctgtgacatgcaccccaacagagttgagtccgtgtcttccagcaatcacttccggtgctaaaccttccaatgcttgttgcacgaagctgaagcagcaaaaaccatgcttatgtggctacctcaaaaacgctagcttgancagtatggtaacctcttctaatgcccgaaaaaccgttgcttcttgtgggattccctttccaacttgttaattaattaagccttcttataattaaagtgtgggatatatatatatatatagataacaggttaatttatacacactttgatcctacaaagca

SEQ ID NO: 228897 - DNA, 471 bp, Glycine max
agacgcgaatagaaaaacatttttataagaaaatttctgagatgttatatctcctttatggtacattgtacagagaggagctgttccagccctctagtagacaggaacataggacgaaccatgcaaattcattttcacgctcaaattaatccaagctcaagttaatattattcgaattccaaaattattaattgcaagggctattaacagtacaccaccatgaagctgacaaattggttttgaggatgcaaccctgaacttgatgtctttcttgccacgtagtatgtactttgttatttatttccaagggagtttaaaagtatctttccaccatccttgttttgagcaatttgcaacgattttgtccaaccgtgcaatgacctgagaaaatgttggcctcacaacaggtgttggatcccaacattcctcgatcaactcttttaactctggaggataatgttttgttttgat

SEQ ID NO: 228898 - DNA, 549 bp, Glycine max
  unsure (1)..(549): unsure at all n locations
ctcttattgatacggatggcagcaccattggcatgtgttgttgggagtggtttatccatacagagtaataaaattggcaaggacgtcaatggaagatatctcttctcatatcataggctttcagtactgagtaaggagtcaaagacaatatgtataaaggcttccttggatcaaaggaagcatgaaggtagaagaggatttctgaaattgttgaatgtgggagttggcttacctgtattattaggaggtgggaaagcttatgctgatgaacaaggaccttcctcctccagaatgtcttattctagatttcttgagtatttggataagggtagagttaaaaaagtggatctgtttgagaatggaaccacggctgttgtggaggctgtttctcctgagttgggtaatagggtgcaggcgagtgcgtgttcaacttcctggacttagccaagagcttcttcagaaattcagggaaaagaacattgattntgcagctcataatggccaagaagagacaggttctccattagctaacctgattgggaacctggc

SEQ ID NO: 228899 - DNA, 497 bp, Glycine max
cactaaggttacattatgtactaattgtgaagaaacttacattttccgttgccaacacaagaaaaaagaaataaagaagcaagctaggatcttgtcattactaaaattggagccaggggtatattacaaatatttcacaatttcagaaaattcagtaagtggaaagctacactacattgcagtggcatataggcaattcaaacagcaactggtgagggagttgaaggagggacccgattttcagcaggaatttcaacaaactcggacaggagagctcggaattcatctccagacattgtctcagtctccaatagaacttccacaatcttgtcaatcgcctcgcggttgctccttatttggctcaacgcaatttcatatgcttcatctgagagtctcttgacagcagcatcaatgtcttcagcaagctcttttgacattgagtttcttgccatcattctcatgataacatcactttgagctgatgagtccacgagtga

SEQ ID NO: 228900 - DNA, 427 bp, Glycine max
attccaaatacggaagcaatgttccgttgcttttaatgaactcattcaacactcatgatgacactcaaaagattgttgagaaatataaaaactcaaatattgagattcatacgtttaaccagagtcaatatcctcgtttggttgttgatgactttttgccattcccatccaaggggcagacaggcagggacgggtggtaccctcctggccacggagacgtcttcccatcattagtgaatagtggaaagcttgatgtgctattatcacagggtaaggagtatgtgtttgttgccaattcagacaacctgggtgctgtagttgacttgaaaatcttaaatcatttgattgagcacaagaatgaatactgtatggaggtcactcccaagacattggctgacgtgaaagggtggcactctgatttcttatg

SEQ ID NO: 228901 - DNA, 456 bp, Glycine max
gggaaaggaaacatgatcggatcctccttgagtccttgtaagaaatgtttaaaaacaaaattatgagaaatacaaagcttagtcttcagacatgctcagtagaaactgcctttttatttttacccctaccaaactagaagcaatacacaaattttagtttaagactggcaatactcaaagattgcacagtcacatggatttcaaaactcatcatcagctttctctcacagggcctcagggccattaatttccttgtctgcgatcacagctccgtcaggtatttccagcttcacacccggttttgcaagaatacttgcttttcccttaaggattacaccagctccaaaccatacattgcctgccacttttagactgtcaagctcaacaatactggggattgacttgaaccggctcaagaaattgcttacctctttaaattctggccccaatttaatg

SEQ ID NO: 228902 - DNA, 549 bp, Glycine max
  unsure (1)..(549): unsure at all n locations
tatattctctcactctcttactctttcactctacttctctctcctattgcggctagggtttaggtttttctttcaccgtctccgttccttcaatcttcttattctctttcatctctgatggagacgttgcgggtttagttctaaggggtggttctggccttgggtttttggaacgtacggtgtcgttttggggttgggaaaacaaattctgagagatggcaaccacgaacccttttgatttgttgggtgaccacgctgaggacccttctaagctcatcgccgccgagcaactcaaggcggcggctgcggcctcggcggccaccgcggctcccaagaaggcgccggctcagcagaacaagccggctcagctccctaccaagccgcctcctccggctcaggctgtgagggatgccagaaacgagccagttcgtggaggccgtggaggtggacgaggtnggggacgtggatttggacgtggtcgtgggtttagtcgtgactcctcgaatgatgagaactcattccctaccagcagagctccttataatcagg

SEQ ID NO: 228903 - DNA, 476 bp, Glycine max
gatgcaaaactgagatgtctatctataaagaaaaagggaactcaacaacatcatttatgtcttacccacaccatactcccccaaaatatcaaacgcagtaaaagtaaagcacaagggggaacaggcttcaagggtacaggaccgtatgaagaacaacaacataaatttacactttcaaggcataaaattaaatgaaccttccaatccaggaaatccaattaccatagttcttttcctgattaagttcaaataagagaacccaaaattgaaaataggacagggatatgacaaaagggttctagcaaggcctcacttggcacccaagtttgggaaatgcccaggatcttcaatggatggagcaggtgcattgttggtggaactttcacggtaaacaccttcgccttcgccttcaccttgtgaaccacgggcacgacccctaccacgccctggggtatagtatgcttccccctcagcag

SEQ ID NO: 228904 - DNA, 591 bp, Glycine max
tggatttagagagttatcaaaagaagataaagttgggacctatggaaatactttagtacgtgattcttttgatgagccagactatgctctaattgatacactcttttcacttgcggaagcctacttgtttgctcaactggttgattttaaggattgcaatcctgacaagattcaggagggtgttgattatgctcgcatgtacaaagatgttcgagctgcagttgacttgtgccaccgtgatggaacattgaagcaaatggttgctatagaaccaaagcggtatattaatgaagactcctcaatagtgcccatgcttgaaatgctcagagactctggacaagcaacgtttttagtgacaaatagtttatgggactatacaaacattgtcatgaatttcctctgtggatccagtatggcagatgtcagtaacaatttcggctggctttcaatactttgatgttgttatcactggcagtgcaaagccaggattttttcatgaggaaaatcgtgccaccctatttgaggttgtgcctgagactggaatgctactcaatacagataatggctctcctataccccaggtgggtaata

SEQ ID NO: 228905 - DNA, 581 bp, Glycine max
cagtgttctgggctttggctttggtaagcctctgtggccagctaccttccaatgcccaagcacctgcaactgcgccggcaaactcaccacctacaaccccagctgcaacatcaccatcttccggcacgccactggcggtaacactaccaccaacagtggtggcatcccctcccaccacaagtacaccaccaactacatcccagccacctgcaattgtagctcccaaacccgcacctgtgacaccaccagctccaaaagttgcacctgcttcaagcccaaaagccccaccaccccaaactccacaaccacaaccaccaaaagtatcaccagttgtaactcccacatcgccacccccgatacctccaccacccgtttctacgccaccgccattgccaccaccaaagatagctccaacaccagccaaaacaccccctgcacctgcaccagcaaaggcaacaccagcacccgctcctgcacctacaaagccagcaccaactccagctcctgttcctccaccaccaacattggcaccaacgccggtagtagaggtaccagcaccggcgccatcgtcacataagcat

SEQ ID NO: 228906 - DNA, 513 bp, Glycine max
caaaatatcttcataatctatcagagcagttgctactgtattgtggaacaatttgtgatctatacataaaccaaaaactaacatgtttgtatcaaaagaatattcaggcactaaattagaaatttgttcaactcattcggatctaataattacttcaagtgcccttcccttctgtatgattataccaaacgaaagatccatatcattgcttacaccccaggaaggatatactgcaatactccatttaactcaatttcatcgacgcaaatttttctgcaagatccatagcttcgtttacatgtgatgcctctgtaccctgacccgtagcaagaccaccttttcctttaccacatctcccttttagaggccccaaagcattactcagccaatctgccacatccagcttaccttgacctcctttctctggcaccccagcacaaactacagccttgttagtagattcattcgtgctaaaaaccatcacagataagcctttctggtccatgacttttg

SEQ ID NO: 228907 - DNA, 586 bp, Glycine max
caaagcagggtttctcaactctctttctgatggacaaaagctcgagctcttacagttccatgttctttcagactatgtctctagctccaactttgatacactgacgaaccctgttagaacactagcaggggctaaacctggaaaggtggaactgaatgtgataagttacggagggagtgtgaacatctcaacgggtgaggttaacaccaccatcactggcattatatataccgataagcatcttgctatttataaggtggggaaagtgcttcttcctacggacttctttgcagttaccaaggcacctgcaaaatcaccctctttggctccagaaccttcaagtgacaccgcaaaggcacctaaagctgataaggacgagtcatcatcttcagattcgtcacaggttaatcccactgaacagaactctggcaccgagaagatcgctgtgtacggaatgtggatgtcacttggacttggagtacttctatgagtgtgatgacaacataaaccagaaccaggaaaagatcatatctgaattttccacgttgtagctagttgctacaccatatgctatatatatttaata

SEQ ID NO: 228908 - DNA, 650 bp, Glycine max
aaaagatggggttcactcccacaagttttgcaacttgctttctcataatagcacctctgggtgtgctatggtgttggaagctactaaagtgggtgtggctgaggccaaagagattggagagagcattaagggcacagggccttcaggggaatccctacagcctcttgattggggacactaaggaaatgtacacagtgctcatgcaagctgccagatctcaacaatctacaagttcttttctctctaaggataaggatgcagcaccacatatcacaacctttaaccatcacattgtcaacaaattcggcaagaattcatttttttgggaaggtaccaaaccaaaagtggtaatcactgaccctgagcaaatcaaagaagtcttcaacaagatccaagactttgagaaacccaagttgagtcctattgtcaagttgttgggctctggacttgcaaatttagaaggcgagaaatggcgtacacatcgaaagattattaaccctgctttccatttagaaaaattgaaggttatgttaccaatatttcttgaatgtcgtgacgatatggtttccaaatgggaaaggttgttgtcttcaaatgacaaatcccaaattgatgtgtggcctttccttcaaatttaacatgtgatttat

SEQ ID NO: 228909 - DNA, 608 bp, Glycine max
cattaacatatacaaattctctgtgttttgttgtttacttgtgttaattgtgttgttgtggtaggaaatttaagtgaagagagaatgatgatgaagtctgctatgtgtgcattggtgcttgtggcactggttgtggttgaagtggggcccatggctgaggctgcggtgacttgcaacccaacacagttgactccttgtcttccggcaattaattcaggttctgcaccttcgagtgcttgttgccagaagctgaaggagcaaaagccatgcttctgtggctacctcaaaaaccctagcttgaagcagtatgttaactctgctaatgccaaaaaaaccgttagttcttgtggtattgcctatccaacttgttaagcacctcttatatatatatataaaatgtgtgaacaatatatatatattgattaaaaaatatagtttaatttatatacacactgtgatgctataaaaacatcttgacacaagcattcaatagaatttcaccactgtatcatgacattttactataatgatgtggtaataaagaaattcttggtgaatattttgtataaagatgccttatactcatggtttctgtgtataaattaagc

SEQ ID NO: 228910 - DNA, 587 bp, Glycine max
  unsure (1)..(587): unsure at all n locations
agaaaagttagggttcacaacttttccttttccttttgcttgcgaatctgaatcaaataatcaatcatccattcattattcatcatgtcgtcggcgaagaaaatcacgctgaagagttcggacggcgaggctttcgaggtggaggaggcggtggcgctggagtcgcagacgataaagcacatgatcgaggacgactgcgccgacagcggcatccctctgccgaacgtgacgagcaagatcctggcgaaggttatcgagtactgcaagaagcacgtcgaggccgcgaatcccgaagacaaaccctgcgaggacgatctcaaggcctgggacgctgaattcgtcaaggtcgaccaggccacgctcttcgatctcatcctggctgctaactacttgaacatcaagagcctgctggaccttacatgtcaaactgtagccgacatgatcaaggggaagactccagaggaaattcgcaagacctttaacattaagaatgacttcacccctgaggaggaagaggaagttcgttcgggaaaccaatgggcatntgaatgattttggtaatctcaaaaaatctgaatcaaagatct

SEQ ID NO: 228911 - DNA, 497 bp, Glycine max
ggatctactgtcaacggaaatagtcttgaatataaaacaaacaagtatatagcataggcaaatctacaagagagatctttgataaacaaacaagcatagcataaatccacatggcagatctttgattcagattttttgagattaacaaaatcattcaaatgcccattggttttcccgacgaacttcctcttcctcctcaggggtgaagtcattcttaatgttaaaggtcttgcgaatttcctctggagtcttccccttgatcatgtcggctacagtttgacatgtaaggtccagcaggctcttgatgttcaagtagttagcagccaggatgagatcgaagagcgtggcctggtcgaccttgacgaattcagcgtcccaggccttgagatcgtcctcggagggtttgtcttcgggattcgcggcctcgacgtgcttcttgcagtactcgataaccttcgccaggatcttgctcgtcacgttcggcagagggatgccgc

SEQ ID NO: 228912 - DNA, 559 bp, Glycine max
aataagattcaggccgagtttcgatggttggatattgttgatgagttcatattgttaggtgctgttccatttcctattgatgttccccgcttaaaggagcttggtgtccgtggggtcatcacattgaatgaatcatatgagactttggttccaacgacattatattatgctcatggaattgatcatctggtgattcctactagagattactgttttgctccttcattgaatgacattttccgtgctgtggatttcatacatgaaaatgcattgtctggacgaactacatatgtccattgcaaagctggacgtggtcgtagcacgactattgttatttgttatctggtgcaccacagaatgatgacacctgatgctgcatattcttatgtgaaatcaattcgaccaagggtgcttctagcttcctctcagtggcaagctgtccaagaatactactaccatcttatggtgaggaaggaccgtggatgtgctcctacagccaatctatttgtaaaaacttctcaggtggcagcaggttcacgagatcctgtgatgtttgatg

SEQ ID NO: 228913 - DNA, 507 bp, Glycine max
gccgtggccccagaaaaacattatgatttccaccgagtacgccttcggggactccaagagatacgaggggtcctcggagttcgtgaagctgaggtaccacatgggaccggtcctcacgaccaacatgactgtgcacaccatctggtactgcaagtgggagcggaaccagaagaagatcatccgcgagttcataaactgaatatccgcggcgaactccgcgcacccctccgtggccgggtggtggcgcaccgtacagctgtacacggaccaaaccggggccaacatttcaaaatcggttcgactcggcgaggagaagaacgaccggttctattgccacgggaaatccctgacccgctgatccatacagactgtgataaagagcgccatcacagccaaagcgaggccgttgccgatcaaccctaagagtgggttgtacctcttgctcacgggcgatgacatgtacgttcaggatttctgcacgtcggtgtgtgggttccactacttcac

SEQ ID NO: 228914 - DNA, 404 bp, Glycine max
ataataactatgatataacaataacaataaaattacattatttgcatcaatgaacaaacttaactaccttaacaaaattaccagactcccacaaaacccacaagaacaaagcccaaagcaaaggtttaaagaagagaagaagaaatatctggtcctgacgagatgatcaatgatcaagcgcattaggtccagtacagtaattgagaacgtggctccacacccactgaacaaggaacctccgtctgatcccattcatgttatacgtggcgccatctcgagcgtccaaaacctgaccggtgtaggatccaccgccgccagtgccgtaaatcccctcacacagatcggcaatctcgacggggaaagaagggtcctgacccgcataccaagcattggccaaagggttt

SEQ ID NO: 228915 - DNA, 453 bp, Glycine max
ctgacggagttatctttgtcttgcctgttatcagtggcaccgattataccatgaggatttttaactctgatggtagtgagcctgagatgtgtggcaatggagtgcgatgctttgccaaatttgtttctcagcttgagaatttacatgggaggcatagttttaccattcatactggtgctggtctgattattcctgaagtcttggaggatggaaatgtcagagttgatatgggggaaccaattcttaaagcctcagatgtgcctactaaattacatgcaaataaggataatgctgttgttaaatcagaactagttgcagatggagttatctggcatgtgacctgtgtcagcatgggaaatccacactgtgtaacttttagtagagaaggaagccagaatttgcttgttgatgaattgaagctagcagacattggcccaaaatttgaacatcatg

SEQ ID NO: 228916 - DNA, 528 bp, Glycine max
aagaacaagcttttattccacctctcatacaaatattattcagcaattcctaattccatattgggtttaacaatgggggcaacatattaaaggggcaaagatccgtaataaactacatcggctgagcctgtcatataaacatgattatcttcctccctccattcaatctgaagaggtcctccaggtagatcaaccgtgcaattcctcccagcacgaccctcaagaactgctgcaacaacagtagcacaagctccagttccacaggctagggttgctcctgctccccgctcccagacacacattttcaagtgagaattagacaacacttgtacaaactctgtgttagttcgtgcagggaacacctcatgatgttcaaattttgggccaatttctgctagcttcaattcatcaacaagcaaattctggcttccttctctactgaaagttacacagtgtggatttcccatgctgacacaggtcacatgccagataactccatctacaactagttctgatttaacaacagca

SEQ ID NO: 228917 - DNA, 502 bp, Glycine max
  unsure (1)..(502): unsure at all n locations
tgctcattcaaacttgtgtattaatcatctggtgaggaatggaagccctgctcagaaagagaaatatttaccaaagcttatttctggggatcatgtgggagctttggcaatgagcgagcccaattctggttctgatgttgtcagcatgaaatgcaaggctgatcgtgtagatgggggctatgtacttaatgggaacaagatgtggtgtactaatgggccagttgctcaaacattagttgtctatgctaaaacagacataactgctgggtcaaaaggcattactgcattcatcattgagaagggaatgcctggattcaatactgcccagaaattggataaacttgggatgcgaggaagtgatacgtgtgagcttgtctttgagaattgctttgttccagacgaaaatattcttgggaaagaagggaaaggagtctatgtcatgatgtctgggctggatctggagagancttgtttgcagctggtcttttgtatatgcagcatg

SEQ ID NO: 228918 - DNA, 526 bp, Glycine max
acttaagttattattatctgtgtcaactgctgttgatagttttacaacattgttttctaagatggatgatcgctttgaagattttcaaagtatataaaaatgtaatatggcagaattttattccttggaccaatgatcaattctcgtttgatgaatgtagcattagtttaacaaacatctgcaagggaatttcccaaggggctcaacaccatccacatataaggtatggtggcatgttattgctccttgaagagttcacgtccaataatcattcttctgatctcactagttcctgcaccaatctcgtagagtttggcatctctcaagagacgaccagtaggatactcattcacataaccattcccacctaaacattgtattgcctgcaaagcaacctgggttgctctttcagctgcacaaagtatagctccagcacaatcctttgggtcaacttttccgttgtcacaatcccgagctactgaatacacattagacctagaagactgtaatgaagtatacatgtcag

SEQ ID NO: 228919 - DNA, 445 bp, Glycine max
ggagcccgtggagaagtgttttcggttttctaagatggacaagagcaccgtccatgatgttgttcttgtcggtggttctactaggattcccaaggttcaacagttgttgcaggacttcttcaacggaaaggagctttgcaagagcattaacccagatgaagctgttgcctatggtgcagcagtgcaggctgccattctcagtggcgagggtaatgagaaagtgcaggatcttctgttgttggatgttactcctctctcccttgggttggagaccgcgggaggagtcatgactgtgttgattgccagaaacacaaccattgccaccaagaaggagcaggtattttcgacctattccgacaacccagctggtgtgttgattcaagtctatgaaggtgaacgtacgaggactcgtgataacatatgcttggcaatttgagtatctgga

SEQ ID NO: 228920 - DNA, 475 bp, Glycine max
gcaacttatatcattgttaagttgaaacggggaaaagtacattaaaaaaacgagaaaagtaaaatccaaatccaaaacataatgacaagacaggttattatctaaacttcaaaagggtcttcgcaaaatcaagaacaacccatgacaattggtctgcttaatcgacttcctcaattttgggtccagcaccgctttcactgccagcagcaggaccatcctcatccatggctccacccgcatcaccaccagctccttggtacatctttgctatgatggggttacaaatgctctccaactccttcatcttgtcctcgaattcgtcagcttcagcaagttggtttccatcgagccattggatagcctgctcaattgcatcctcaattttcttcttatcatcagcagacagcttggaagcaatcttatcatctttaattgggttcctcatgttataggcgtaattctccaatgtattttt

SEQ ID NO: 228921 - DNA, 597 bp, Glycine max
  unsure (1)..(597): unsure at all n locations
cttccattttctctctctagataggtataaatggctactccgccggtggtaaggtttccgatcttcacggcggtgagggcggtcggcgttgccgttactgttcttctgctgacgtgggccgtccatttcagaggaggcctcgctctcgtctctgataacaaagatctcatctttaatgtccatccagtgttgatggtgattgggcttgttctaatcaatggtgaagggatgcttgcatacaagactctatctggaactaaaaacttcaaaaaatcagttcatcttgcgttacagtttgccgctctcattttgagcttgattggtgtctgggctgcttggaagtttcacattgacaagggcattgacaatttctacagcctgcattcatggctaggccttgcatgccttttcctattcaccatccagtggggtgctggctttgcaacattttggtacccaggagggtcaagaaatagtagagctgccttattgccatggcatgtgttctttggtatctatatctatngcttggctatagccacaactgctactggtattctagaaaaagctacattccttcangtcaacaacatcata

SEQ ID NO: 228922 - DNA, 484 bp, Glycine max
gcacaaaacatttatattcactaatagaaggaaaatacacatagtaaataaaatagaacataaaattaaacctggatacacgtttaatgaatttgttttcatacatccatgtaaccttgtattaaagatgatacaaatgttaatgttcctcaattttgaatcatatagatgatggtcactcgtttccccttatgacatcagctttaccataaactggagtaacaattccaagaatcacaaagccacctaaaatgactatcagaatgcctaaggaattgaccagaagtgcctcattggaatagcgtgatatgatgttgttgacctgaaggaatgtagctttttctagaataccagtagcagttgtggctatagccaagcaatagatatagataccaaagaacacatgccatggcaataaggcagctctactatttcttgaccctcctgggtaccaaaatgttgcaaagccagcaccccactggat

SEQ ID NO: 228923 - DNA, 540 bp, Glycine max
  unsure (1)..(540): unsure at all n locations
aactagtcctcactgtcactgcgtcacgaaccctaattccctttcttcttctctttttgctttcgatctttctctcttcttcaattcagtggcagaggtggctgaattcacgtgatttccatgagtggctccgttttccttgaatcggacacggcgactgttcacggttcgcagtttccgaaattgagcttgattcctcgtcggcggtgatcgtcggtgcatgcagcctcggatgggtaatgtgcgagtttgatccatctattggcggcgttttgagttaattttgcttctgaccgggaaatcatggcgcagagtaattgggaagcagataagatgctngatgtttatatttatgattatttggtgaagaaaaagttgcacaacactgctaaagcattcatgacagaagggaaggtttctcctgatccagtagcaattgatgctctggaggttttctctttgagtggtggtctgttttctgggatattctcattgcgaggacaaatgagaaacattctgagactgctgcagcatatttag

SEQ ID NO: 228924 - DNA, 605 bp, Glycine max
  unsure (1)..(605): unsure at all n locations
gaaagttgtttaggaaagaatatctcttttatggttacaaaactaagcatcaagcaaccattagatgcttccaagaattgtgactctggtggcgtgttagaatctgacaattgcaaattaggttcatcaaaaggagttgttgatccaacaaagagttactgtcaatcggagattactttttgtccaagtcctcagaatagtttctattcagaagccaaggaaagttttgtcaatactggagccagtgaatgtgtgagtgttgataagtcagttgaaagtggagaagttactaattcctgtgaatttaatgagagcagaaagaccagcatctgtagagggagtactggaagtgacgttagcgacgagagcagcactagtagtttgagcagtactttgtataaaccccacaaggcaaacgatataagatgggaagcgattcaagccatccgagtccgtgatggggtgttggaaatgagacatttcangttgttgaagaaattgggatgtggagacataggaagtgtatatctagctgagttaagtggcacagggtacttgtttgccatgatagtaatgaacanaaccgagctggcagtcctaagaag

SEQ ID NO: 228925 - DNA, 477 bp, Glycine max
cactgaactaacaaagcaaccctatgtttaaggttgtttgtgtcaccggagccagcggcgccatcggatcatgggtggtcctactcctcctccagcgtggttacaccgtccatgccaccgtccaagatatcaaggatgaaaatgagacgaaacatttggaggaaatggaaggagcaaagagtcatctccatttttttgaaatggatcttcttgacatcgactccattgccgctgccataaagggttgttccggcgtaatccaccttgcatgtcctaacatcattggtcaagtcgaagatcccgagaaacagatattggaaccggcgataaaaggaacggttaatgtgttgaaggcggcgaaggaagcaggggtggagcgcgtggtggcgacttcatcgatttcgtcgattatgccaagtcctaattggccagctgataagattaagggagaagagtgttggaccgaccttgaatact

SEQ ID NO: 228926 - DNA, 495 bp, Glycine max
aaaaaaaaaaacgtgattcgctcttcttttcgatttaaccacaaaaccaacaaacgagaagaggagtgagagaagatggggttgtcgttcacgaagctgttcagcaggttgtttgcgaagaaggaaatgaggattctgatggtaggtctcgatgctgctggtaagacaaccatcttgtacaagctcaagcttggagaaatcgtcaccaccatccccaccatcggatttaatgttgagactgtggagtacaagaacatcagcttcactgtgtgggatgttggtggtcaggacaagatccgtcctctgtggaggcattatttccagaacactcagggtctcatttttgtggttgatagcaatgatagggatcgagtggttgaggcaagggatgagttgcacaggatgttgaatgaggatgaacttagagatgctgttttgcttgtttttgccaacaagcaagatcttcctaatgcaatgaatgctgcagaaataact

SEQ ID NO: 228927 - DNA, 539 bp, Glycine max
agagcaaaaacttgttcaattttctaatcctcattcaactatcatcaccaacaagcactccaagaacaaaacgcacggaaatattcaaccaaaaatcaaactaacaaaatgaacacaaacaaggcacgcacaagagggtccaagagttccaattatagctaaaagtattagctaatttaagcaatcatacaaacccaagttacacaaaagaagagaatacttctagcaagcattctgctattacaacattgacaagaaaggataagcatctttctccaagaaccgccatactcagcaggaaatcaccagacaagaccaaaaattttcaaatgtctcatgccttgctggcaatgttgttagaaagccagtccaaaccctcatagagaccctctccagaagttgcacaagtgctttggatataccagtggcgttgacggagtgaatgaagtccaagcttgtcagttatttctgcagcattcattgcattaggaagatcttgcttgttggcaaaaacaagcaaaacagcatctctaagttca

SEQ ID NO: 228928 - DNA, 404 bp, Glycine max
ctcgagccgatggtggttgatcgggactcgacatcagaaaaacttgtttttaataggactgtcaccttaaagggcagctatagcaaaggtggaaagtagggtccctgaatattgattagaagtaacaaggtgggacaggcaggtctgcgggtaatacttgtttaaatagctacttataatgcatagttttttctttgagggggtggggggttatgtacaaacatatttactggccacttagccatgtacattttcttaagggattactcaatagttccccaattatttaattattttgtttggttggttttgtaaaaaaaaaaaagaaaataaaaaaaaaaaaaataatgataaaaagggtcttcaaggctttcatattaacaagttagggggggctctaaatc

SEQ ID NO: 228929 - DNA, 547 bp, Glycine max
caggaacagaattctgtacatttatatttttagaagatcacagggtgcttgatcagtggtgtatcaggatggacaaggtgacgaggttggcttctgaaaagggtgtggtgattttcacaaagagctcttgttgcctctgctatgcagtcaacattctgtttcaagaacttggtgtgaatcctgtggttcatgagattgatcatgaccctgaaggcagagaaatggagaaagctctattgaggcaaggctgcactgctccagttccagctgtattcataggagggaagctaatgggatccaccaatgaaatcatgtccctgcacctaagtggttcactcactcagatgctgaaaccttaccaggctttgtcttgaaaagaagcacaagaaacagttcctgacacctgctggaagaataagctggcttgaattagtagagtagtgaccatagtattgatattctagtggttttatgtctgaaattgctcctagcatttaattagctataatgtaatcacataaatattcttaatgaaaagtttgattta

SEQ ID NO: 228930 - DNA, 508 bp, Glycine max
gtatataaatcaaactttcattaagaatatttatgtgattacattatagctaattaaatgctaggagcaatttcagacataaaaacactagaatatcaatactatgggcactactctactaattcaagccagcttattcttccagcaggtgtcaggaactgtttcttgggcttcttttcaagacaaagcctggtaagggttcagcatctgagtgagtgaaccacttagggggagggacatgatttcattgggggatcccattagcttccctcctatgaatacagctggaactggagcagtgcagccttgcctcaatagagctttctccatttctctgccttcagggtcatgatcaatctcatgaaccacaggattcacaccaagttcttgaaacagaatgttgactgcatagcagaggcaacaagagctctttgtgaaaatcaccacacccttttcagaagccaacctcgtcaccttgtgcatcctgatacaccactgatcaagcacc

SEQ ID NO: 228931 - DNA, 606 bp, Glycine max
acaaaaacatgttggtgaatgtgtactttccaacctatggagcccccaagagggtgctggtgtgtctgattgagaaggaaattgagtttgaaacagtacatattgatctcttcaagggagagaataaggaacctgagttcctaaagctgcagccatttggatcacttcctgttattcaagatggtgattatactctctatgaatctcgtgcaataatcagatactttgcagagaagtataaagaccaagggacagacttgttgggaaagacaatagaagaaaaaggtctagtggaacaatggcttgaagtagaagctcataactttcacccaccactctacaatttggttattaatgttctgtttgccccattaacgggtgctccttctgaccaaaaagtgatagaagagagtgataaaaagattgagaaggtgctggatgtttatgaggagaggctgtcaaagagcaagtacttggctggtgactgtttcagccttgctgatcttagccacctgccatttggtcactatttggtgaaaccaactgggagagggattttggtccgagagaggaagcatgtgagtgcttggtgggatgatatagtaa

SEQ ID NO: 228932 - DNA, 499 bp, Glycine max
gacaaaaaatttgttataaacctacatataatacatattagagtaacatataaagctaagctgtatacattaactgccacatcccccacccccaaggaacttgtaataggatgggtggggataataatactaaagatacaacaattctctgctatgttatacgcgattgggccattacaaaatatataaatttcagacacaaaatactttggcccgtaaaggaaatcagcatactgtgcgcccatagcacaaacaagcaaggtaaaggttttttgaccatttttccttaacatgtgtgcttggaaattgagatgtacgcagagttttctgggtttcatctccgggcctgcgcctaggaatgctcagtataagagcagattgatcccatgtagcagcagttgctggaatcctataaccattatcccatcgcctggggattccctcactaggatagagaaaatcaagttcaacaacctacatttaaaagatggataatgag

SEQ ID NO: 228933 - DNA, 635 bp, Glycine max
cactgcacctggttaaggatagagtatttcatgttacagtctagttgcaaaactttggtgcagtggttggtagcagcattgctcattgccttgttgggtggtgcacaagctgttgcaatatgtaacatagactcaagtcaattaaacttgtgtcgtgctgcagttactggtcaaaaccctccaccaccggatgagaaatgttgtgcagttgttcgccaagccaatttgcgttgcctctgcagttacaagtctaccctaccttcatttggaataaaccccaaaaatgctttggccttgcctggtaaatgtggtctgcaatggcctcctaattgttgagtgtagtgaagcagtcaatgaaggtcacggactcatggtcattacaagcaccttagtcttcaatattgctttcaggtgtttcattaacactgaagataaattttaagacagcatttgatatctctcgaataacggtgcagtttattttaatcagtatgtaatgtccaaaagtttgctagcagatgtgtacgtgtattaatgtttgatgttgcagaggtatttgaagaatatcattactcttttccctctatatgtctaaacctgtatatgtataataaaatgtctggtttttggactct

SEQ ID NO: 228934 - DNA, 523 bp, Glycine max
agagtccatatttcagacattttattatacatattacaggtttagacatatagagggaaaagagtaatgatatatcttcaaatacctctgcaacatcaaacactaatacacgtacacatctgctagcaaacttttggacattacatactgattaaaataaactgcaccgttattcgagagatatcaaatgctgtcttaaaatttatcttcagtgttaatgaaacacctgaaagcaatattgaagactaaggtgcttgtaatgaccatgagtccgtgaccttcattgactgcttcactacactcaacaattaggaggccattgcagaccacatttaccaggcaaggccaaagcatttttggggtttattccaaatgaaggtagggtagacttgtaactgcagaggcaacgcaaattggcttggcgaacaactgcacaacatttctcatccggtggtggagggttttgaccagtaactgcagcacgacacaagtttaattgacttgagtctatgttacatattgc

SEQ ID NO: 228935 - DNA, 386 bp, Glycine max
attaatatattctcggataatgccgtctttcacatgcaagagttcaggcattccaagctccaattggaactcttctcatgtgcatctttataaacttcatcgtggaataacaccagctatgattcaggacagttgtttcagccaattatactcagtggattgcaattgtctcatccaagggaacttgtcatctttttgttttgacaccctttgggggtgatactggtttccaattattatttcttagggtgaagaaccgcccctactcctggtttttatatgccttggagtatactccagcttcatatttttaaggcaatcctctgcctccccaagcacctgtggtcctttttgtggctagctggaaaaaatataataaattttgg

SEQ ID NO: 228936 - DNA, 397 bp, Glycine max
cggctcgagcggctcgagaaagcactttattgcaaaaaagtaacaaaaagtgagcatgggaaattccttggtcttcttattgttcctcatcacattgttgtttgtgggcaatgttcaatgcaacccaaactacagagaagcattggctaaatccttattgtttttccaagggcagaggtcaggaaggcttccttctgaccaacatatcaaatggagatccaattctggtctctttggatggtcgccttggcaatggggatttaagtggagggttctattatgccagagaacatggggaaattaactttccattggcctacaccacccacatgcttgtctgggccaccattgaatatgggaagagaatgggaccccaaataaaagaggcaagagctgc

SEQ ID NO: 228937 - DNA, 469 bp, Glycine max
agcgtaaagcacagtaagtatattggatactaattacaataagttacatttttgtgtgaaaggactagaattataaatgatgcaccactaacttagttgggtgcagataaaatgacatctagacttaaccttgtaatttaggtgaatgaaacattagcggataccggcaaagtatgccaaaggtccaacaaaagcagcattgatgtaagttgcaggctcagaatgactgtaatcactgcggtcatctggaaatccgtcattttggtttggacctccgactatggctgcaaccaatatgttaggattaggattcatcgaatggaaaaatgggttgaaacctccatcacaccctatgctttgtggatgagctgctattgaaggcaaggaagatcctctgtggtgaattctcttgggaaagtatggaccatagcctaccatgtaagacaattttattgggtttgcacctaaa

SEQ ID NO: 228938 - DNA, 448 bp, Glycine max
cgcctcgctctgctttcttcctccacgtttctgtttccgttatcattcctcgctctcatggcggtcctgacaatgagatcaaactcgtagtagtgttttactaccagtcttttttctcctcctttagctttcgaaaaaaaaaaaagaaaaagaaaaacagagagggacattttattattatataaataatactacatctttgttgtgttggtgagatcaaaagcgaaaatggcaccaccgttgttcaattggggggtgaaggacactcacaggggaacccctgtggtggtgaagatggagaacccaaattggtcgatggtggaactcgagggtcccgaagaagaagacttaatgctaacaaattcaccttcttcgggcgtttcaagagacaaagggaggggcaaaaatgccaaacagctcacgtgggttctcctgctcaaagcgcacc

SEQ ID NO: 228939 - DNA, 625 bp, Glycine max
  unsure (1)..(625): unsure at all n locations
gaagaaagtttgaagaagacagtaagtttcaaagttgcatgcatagcaagtcttgagaaggccttgcatgagctgcgtacagaaagtgctgaaacaaaggttgcagctgagagtaaatttgttgaagcacgccaattaatagatgaagcacagaaaaaatttacagaggctgaagccaaggtgcgtgctgctgaatctttgcaggcagaggctaagcgatatcacaatgttgcagaaaggaagcttcatgatgttgaagcacgtgaagataatctcaggcggcaaatcatatctttcaagtccgattgtgatgaaaaagataaggagatgattattgagaggcaatccctttctgaaaggcaaaagggtttgcaacaagaacaggaaagattacttcaatcacaatccttgctgaaccagagagaggaacactntttgagtaggtctcaggaactgaatcgtcttcaaagagagttggaggacacanaagtgaaatttgaaaaggaacatgaagccctatatgacgagaaaaccaccctaaaactgaagggaggcagcctaatacaacaagaagaggaactngctaaatggaaatctgagctgagcaagaaagaacaagagttac

SEQ ID NO: 228940 - DNA, 543 bp, Glycine max
  unsure (1)..(543): unsure at all n locations
catcaagaagctcttactcagcttcaaactttgccttctcagctttgagcttctctgcctcagccaaaagctccaacttctgagatcttacaagggcaatctcttcctttagtttcacttccaaaattgacaagtcacccgtttcacttttcatggcttccagtttctccttttccatatcaacttgtcttattttatcttccaatgattccaaagacttctgcacatcttgttttgcctgttcaacatgatctttctccttctgcaaaagcactttatttaactcaaagtccttctcagcagcactcaacctttgatctttttcttcaagagcacttgacaggtccttcagatccttctccttctcactcagcgaccttgacagaacttccaactcatgctgcctttccaggatttgatcctcacaatgtttaagatcaacctccttcaactcccaagcccgtctcttttcctcaatttcattttcaaccaatttgcgctgcattngcagctcaacttccaagttatattttttggttctca

SEQ ID NO: 228941 - DNA, 434 bp, Glycine max
  unsure (1)..(434): unsure at all n locations
cgcgagatttatgatacatatggagattatgctcttaaggaaggaatgggtggtggtggcggtggccatgatccatttgatatcttcagttcattctttggtggaagtccgtttgggtcaggtggtagcagtagaggacggaggcagaggcggggagaagatgtggttcatcccctgaaggtctctctggaggatctttacctcggaacttcaaagaaactctctctttcacgaaacgtgttgtgctcaaaatgcaatgggaagggctcaaagtctggggcttcaatgacctgtgctggttgccagggtactggcatgaaggtgtctattaggcaccttggtccttctatgattcagcaaatgcagcatccttgcaatgagtgtaagggtactggagagacaatcaatgacagagacaggtgcncacagtgcaa

SEQ ID NO: 228942 - DNA, 545 bp, Glycine max
gccatcagaaggtttttttattgtattaggatgtcttgtgaaataatttcttggacaataatgctacagtgtttggttgctaaaatcgtctgagatatcaaacactaaatatgtttagacccgcacaaacggctaaaaaataagatgatcgagatcatcacatgtctactctagcgctcctgtggctcattactgctgagcgcactgcactctctgagcaccaccatgcatatcctcatcctcatcatatgcctcctgctgagcttgttgcctcctccttgtctcttcctccatgttcacatcatggagtgtggtctcctcacactcatccagctccatgtctgacaactgtgatgttggctttgatggcagaacagcctccaaagccttcacctgatcaagactcagggtatcaggaaattccactgagaaatgaatgtaaaagctttcccttcaggaagtgcctctggtagtttggcattccctcatcatttattgccttgaatgactcaggcttaacaacctccccagggtttgatttgatc

SEQ ID NO: 228943 - DNA, 585 bp, Glycine max
ctcttatctctagctatatatttaactttttctgtttccactcatcgatatctaacgctttagtcttgcaattgatatataattatcatccaaaacatgtgaccaacaaacaacacttttgcaatttttgtcatcttctgctgtgccatatcctttgccttcgcttctgaccctgacacacttcaagacctttgtgtggcacttccctcttcaggtgtgaaggtgaatggatttgcctgcaaggcagagtcaaatgtgacagaagctgatttcttctttgctggtttagccaagcctggagttatcaacaacacagtgggatctgtggttactggagctaatgtggaaaaaatcccaggacttaacacattgggggtgtcattctcaagaatagactacaaagctgagggacttaacccacctgacacacaccctggtgccactgagattgtgtttgtgttggatggacaactagatgttggatgcatcaccacagccaataaactcatctcaaagtcaattaagaagggcgaaatctttgtgttcccaaaaggtgtgttgcactatcagaagaacaatggggat

SEQ ID NO: 228944 - DNA, 430 bp, Glycine max
ggaaactgatactgagtcataacccttcaagaattattgggaaaagttttgggaaagtagacttaaaagactgaatcttgctctctctcttgaatatgattaagctcaacttaaaattaagtcttcttaggagcaagcttggccttgatgtcatcaaccttcttagtatcaatctggaaagcctgagcaagaacatcatcaggcacagttggggttgaagtgaaaagagctgcagctatagacactgggccagggagttggctgttgaaggcaaaaagcacaaaagcaggcttatccccattgttcttctgatagggcaccaaaccttttgggaacacaaagatttcacccttcttaattgactttgagatgagtttattggctgtggtgatgaatccaacatctagttgtccatccaacacaaacacaa

SEQ ID NO: 228945 - DNA, 440 bp, Glycine max
cgctaaatacggtaagagttcatttatttggcttggtccaacaccaagggtattcatcttggatcctgacaaattcaaagaaatggctactaaggtctatgattttcaaaagcccgacactagtccacttttcaagcttctagcatcagggtttgcaaattatgatggcgacaagtgggctaaacacagaaagatcgtgagtccagcattcaatgtagagaaaatgaagctcttggtaccgatattttgccagagttgcgatgatttgatcagcaaatgggagagtttgttatcttcgttaatgggtcttgtgagttagatgtgtggccttttgtccaaaacgtgtcaagcgacgttctggctcgtgcaggctttggaagtagctatcaagaagggaaaaaaatattcgaacttcaaaggaaatgattcagcttacaatg

SEQ ID NO: 228946 - DNA, 459 bp, Glycine max
aaaaatcaaacatgataaaggttatataagggggagtaattacaccagtaacttaggcaaaacaggtatatattgatcttggaaatagatttgaagtgaaggttcagatctatcgtctacataagaaactagcaggaataggaaaactaaaattgcaaacacgcctcaaatgaagaagccttatttagactaaaaagggcattctagagtttgcgtaaaatgagatgagccccacgctcaggctgaagagtgataataaaggagggggcatgatcataggagggggaaaaatggagggagaaacgttgcaggatcattgacacagctacttttgcttctaacaagccaaagttttgtcctatgcaaagtcgaggaccccatccaaatggcaagtaggaaagcttgccttttgttgcctttgatactccttccgagaatctttctgggttgaattccccg

SEQ ID NO: 228947 - DNA, 531 bp, Glycine max
  unsure (1)..(531): unsure at all n locations
ggcaactggaaacccacaaaaaatgactcattgtccaaaagggtacccggatttggtgccacaataaacttgctctatggggatcaaacttgtggtcagggatcagataatgaggccatgaacaacatcatttcacactatctttattatcttgatctcttgggtgttggcagagaagaggcagggcctaatgaagttctctcctgtgctgaacaagctgcttttaagccctctggctcaccatcttctgccacaaattgagcattccttggctgagattcttggccggtccattcttgaatctttcaaaaaattcttaataaagaaagcaacaagtagacaagatatttcaactactttggccttcaaatgagagtgaaatgagtttggagtggacactactcattgttaatntgtgtatagattatattactttgccatatatcttggctgttgatgtttcctttctcttctataattcgaatatattttggtatataatgtatgtatacatttgagtatttgatcatt

SEQ ID NO: 228948 - DNA, 502 bp, Glycine max
aatgatcaattatttaattgtatacatacattatataccaaaatatattcgaattatagaagagaaaggaaacatcaaaagccaagatatatggcaaagtaatataatctatacacaaattaacaatgagtagtgtccactccaaactcatttcactctcatttgaaggccaaagtagttgaaatatcttgtctacttgttgctttctttattaagaattttttgaaagattcaagaatggaccggccaagaatctcagccaaggaatgctcaatttgtggcagaagatggtgagccagagggcttaaaagcagcttgttcagcacaggagagaacttcattaggccctgcctcttctctgccaacacccaagagatcaagataataaagatagtgtgaaatgatgttgttcatggcctcattatctgatccctgaccacaagtttgatccccatagagcaagtttattgtggcaccaaatccgggtacccttttggacaat

SEQ ID NO: 228949 - DNA, 639 bp, Glycine max
gttgcgctgaggagcgcggcgaagcccttaaggctggtgtttgaatgcattgggaggtttttccttcaggggagcaaagcttacacgaagaactcgccgatggttcccgcaaggcaggtttcggtgctggttcttggagcactacttgctctctggctgcgttgggaatgagaaggacgtggaggcttcattgaagagggaggcggattccgccgcggttgcgtggaggaagaggatgtttgttgaagggggtttgctgaaggcagctgaggttgatgccaggggtttgattctcttcgtcgccggcttcgggattcccagtgttttcaaggatgaggatatatacaacttggtttgtgtcagcaatggcagagatttctccgatgccctgctccagtctcagcccctgcttagagggtttcagatgttgcagatgggatgatgaaaaagggcatggcccgtaaagctgttgatttggcttatacctttgggtttgaagagaaatattcttctcagacagctctgacttcatttctgcagaagtctgaagaaacttggaagaaagccaaacaagacgcacgtgattttcctagtgcacttgaggtagcacatgaaaaatatttggctgctttgcaatct

SEQ ID NO: 228950 - DNA, 537 bp, Glycine max
ctcctcttctgccctccactctaacttctctctcctctctctctctctacaaatccttctttcttctcttcgctgctcactgtagcgtagccatggctttcagagttggaggagcgggaggaggaaatgcctcttctggcatgggtgttgctgagcatagcgtaagcacgttcctggaattgcagaggaagaaagttcatcgctatgtgatttttaaaattgacgagaaaaagaaagaggttgttgttgaaaaaactggaggccctgctgagagctatgatgatttcactgcatccttgcctgaaaatgattgccgatatgctatctttgactttgattttgtgacatctgagaactgccaaaagagcaaaatcttttttattgcatggtctccttcggtagcccgcattcgccctaagatgctatatgcaacatccaaggacaggttcagaagggagctgcagggcatccattatgagattcaggcaacagacccaaccgagatggatcttgaagtcctcagagagcgtgcaaact

SEQ ID NO: 228951 - DNA, 571 bp, Glycine max
ggattatggttctactgtgaaattgcttttggattttgagttactgaaccagatgcatggggatgatgcatatggtgcttactttgattttggaaatcatacagagaaggttcaacttaaatggaaagaactggaggatggacaaaattatgctactcgccaacttctccgggatgttatggatatgcctgtattgagattggttcctcacattggttatgttagtttattcccgttcatgggaaggatcattccatctggatcacggattctggaaaagcagcttgaactcatttcaaatcgcagcctcttatggaccaactatggattacgttctcttgccaaaacaagttgcttgtacatgaaacacaacacagagcatgaccctccatactggagaggcccagtttggataaacatgaattacagaattctttcagcactccaccattactgcaaagagaatgggccatatcatgagaaagctaaagccatctacgaagaattgagaagcaatttaattagaaatatagtgcgcaattatcaacagactggatttttgtgggaacag

SEQ ID NO: 228952 - DNA, 505 bp, Glycine max
  unsure (1)..(505): unsure at all n locations
gcagtcgccattattgtgccagcgaagtattcatttttcaatatcgtttagtggatcttgctccaatcaatattcgattgctggttagggtttacggttttctgaagggaagggaagagaatggggtttctggttccgcttttcttacacatcgtcgctttcatttgcaccattgcagctatcgctctggccgttcttcacatttacaggcaccttctcaattacaccgagcccacttatcaccgttacatcgatcggattattttcatggacccggtttatgcactaatgtcattcttgtcccttgtaatacctgacagtctcaatctattttaattctatgcgggaagtctatgaagctcgcgtaatttataattttctatcactgtgtctggcatgggttggtggtcctggagctgttgtaataagtatgagtggtcgagttctgaagccatcattttgtctgatganctgttgctttcctcctataccgctggatgggcgt

SEQ ID NO: 228953 - DNA, 486 bp, Glycine max
gcgacacgaaaatgaccctagcacccttgttgcttctggagaaccacccaattcacctgaaccctgcgcactacatcagtgagattattagagaaggcacaaaaaatggcactgctttctttaagtgccatggacatgagcaatttgagatgacgggtttggatcctgagtataataggttgttcaatgagggcatggtgtgcactgctagggttgtgtccaaggctgtgatcactggctacaaagatgggttcaaccagattaagtccttggttgatgttggaggtggcattggagggtctctttcggagattgttagggcttatcctcatatcaatgccatcaactttgacttgcctcatgtggttgccactgctcctaagttcgatgggatcacccatgttggaggtgacatgttcgtgtccattcctagtgctgatgctatttacatgaagtggattctgcatgactggagcgacgagcact

SEQ ID NO: 228954 - DNA, 588 bp, Glycine max
cacaccaaaggtctgttttcattaaaagcaatagattcttcacaagcacacaccactcacttgacatatatggaacacatacataatccatatagcattacttagtggtggggcatttcttacttttatttaatgcacaaacataacaagggcaggaaggaaaaccacaaaattaaaacgaagatcatatagctgttaataataacaacaacacatgcaacataaaaaccacatgcagttgtggtagtggcatcttcttcagattggaaacgcctcaatgatggaagggagagcgttgatcttgatgatgttgtaacgcgcgaaaccggtttccttgaacagccacttccagttctcttcggtcctctctttgccaccggcgttgtgagcgagaagcatcatgtcgaatgcgatgccaacgtctgtgaagagttcgttgccttcgggtcgaagaacgtgatccacgattatgacttttcctgtcttctctggtattgccttcctgcagttcttcaagatcttgatgcagtgctcgtcgcttcagtcatgcagaatccacttcatgtaaatagcatcagcactaggaat

SEQ ID NO: 228955 - DNA, 518 bp, Glycine max
ccgtgaacatgaaagaagaatgaagattttccgtttttcgctcttctgttggaaaagtgaaaaccagaagtactaacgaaagagaagagcgatttagaagtgatagaagatggggttgtcgttcacgaagctgttcatcaggttgtttgcgaagaaggaaatgaggattctgatggtaggtctcgatgctgctggtaagacaaccatgttgtacaagctcaagcttggagaaatcgttaccactatccccaccatcggatttaatgttgagactgtggagtacaagaacatcagcttcactgtgtgggatgttggcggtcatgacaagatccgtccactgtggaggcattttttccagaacactcagggtctcatttttgtggttgatagcaatgatagagatcgagtggttgaggcaaggcatgacctgcacagaatgttgtatgaggatgaacttagagatgctgctttgcttgttcttgccaacaagcaaggagcttcctaatgcaacgaatgct

SEQ ID NO: 228956 - DNA, 476 bp, Glycine max
attaacaaaacgcatggaaatatattcaatcaaaaatcaaacaaacaagatgtaagcaacacagcacgcacgcacaagagggtgcaagagttccaattatagctaaaagtattagctaatttaagcaatcatacaaacccaagttacacaaaagagaatacttttagcaagcattctgctattacaacattcgctagaaaagataagcatttttctccaagaaccgccagactcgcttgaaatcaccagacaagaccaaaatttttcaaatgtctcatgctttgctggcaatgttgttagaaagccagtccaaaccctcatagagaccctctccagaagttgcacaagtgctctggatataccagtggcgttgacggagtgaatgaagtccaagcttgtcagttatttttgcagcattcattgcattaggaagatcttgcttgttggcaaaaacaagcaaaacagcatctctaagt

SEQ ID NO: 228957 - DNA, 513 bp, Glycine max
ggagcttccactcctagcacttcatgctctctttgcactaagcttttgcatctcaattttcttggcatcgtgtgatgatgattttctatccgtgaaaaagaattcaagttcatctccatttcctagcaactttctttttggaactgcatcttcttcatatcagtgtgaaggagcttacttgactgatggtaagggactaaataactgggatgttttcactcataagccatgcactataatggatggaactaacggtgatgtagctgttgatcattaccatcgctatcaggaggacgtggatcttatggattacatcggagtcaacagttatcgcttttctttatcatgggccagaattttgcccaagggtagattcggcaaggtgaactgggctggcattgatgattataaccagctaggtgacacaattgtctctaaagaaatagaaccttttgtcacaatgtcacattatgacattcctctggaacttgaggaaagatatggagggttggc

SEQ ID NO: 228958 - DNA, 442 bp, Glycine max
attaaagatatttatatcattatacatatatggtttctcttctctttcatttttttcacaaccaaactaggaaaaagaaatacggtaataacttatataatcaactcactttctattcttttttttttctttctattttttccctttcactttctttcctaaactaaacatgccattaaagaaaatgactgcttattttcttccttgaaagtaaactatatatcattccattgttcgtcactcttgagtatgctgaggtcttgtgctaatatttcatgcatttctgctggatactcccctatgataattgggtccaaaaaccaattcatataaaatgattgagctcgctcagcagctaactggtctttccaggagtggctgacgggttcaaacaatttggatttaataacaactccaattttccctccctgttttttatgat

SEQ ID NO: 228959 - DNA, 495 bp, Glycine max
gagaggcaccatggcgacactggattcttacgtgaccatggttccggccggcgaaccctgcaccagcgccggtccttcttcgtccaccaagaagccgaagcgattcgagatcaagaagtggaatgccgtttctctctgggcttgggatattgttgtggataattgcgctatttgccgcaaccatatcatggatctctgtattgagtgccaggccaaccaggctagcgccactagcgaggaatgcactgtagcttggggagtttgtaaccatgcttttcacttccattgcataagccgatggctcaagacccgtcaagtatgtcctctagataatagcgagtgggagtttcagaaatacggtcactagaactttgatgcggctgagctacttccatcttggacatttggattgtagcatttctatcaactgtatagctctacatgttgtctttgcttgcctattggagttttattcaaaagagtcacttctaatgc

SEQ ID NO: 228960 - DNA, 494 bp, Glycine max
atattccataaatcttgtcattgagtgaattaacaccaccgttttgccacattgttagagaaggatatgatcgaattaggaactgggggcgtaactatatgcgaaagcatttagaagtgactcttttgaataaaactccaataggcaagcaaagacaacatgtagagctataaagttgatagaaatgctacaatccaaatgtccaagatggaagtagctcagccgcatcaaagttctagtgaccgtatttctgaaactcccactcgctattatctagaggacatacttgacgggtcttgagccatcggcttatgcaatggaagtgaaaagcatggttacaaactccccaagctacagtgcattcctcgctagtggcgctagcctggttggcctggcactcaatacagagatccatgatatggttgcggcaaatagcgcaattatccacaacaatatcccaagcccagagagaaacggcattccacttcttgatc

SEQ ID NO: 228961 - DNA, 441 bp, Glycine max
cgagtatattgaagtgataattgaggatgaccagaattgtggtaaacctacgaggctgatagtagatatagactttaggtcccaatttgaagttgcgaggccaacacaaaactacaaggaattgacagactcggtcccagtgattttggttgggactgacaacaatctgtcacatagatcgtggacttactctactaggcagctgcttgcctctgcctatcgtgactagcaagatcctggctaagggtatcgagtactgcaagaagctcgttgagctcactacttctgtacacatgaccctgcggggacgatctcaaggccagtgacgctgaattcgtcatgggcgaccaggacatgctcttcgatctcatcctggctgctgactactagaacattatgagcctgctggaccttacatgtcaaactgtggccgacatgatc

SEQ ID NO: 228962 - DNA, 461 bp, Glycine max
gtgattgttgtgactcgttcttcttcgttgttatcttcttcttttgttgtttgtgtgtttgttttttctctcacctgaaaatgtcttgctgcggtggtaactgtggttgcggaagcgcctgcaagtgcggcaaccgctgcggaggctgcaagatgtacccagacttgagctacaccgagtcaaccaccaccgagaccttggtcatgggagtggcaccagttaaggctcaattcgagagtgctgaaatgggtgttcccgctgagaacgatggctgcaaatgtggagctaactgcacctgcaacccctgcacttgcaagtgaggtgttggagagctaaagcttcaagcagaaatggcccttagaaataatgataaaaacttatatgtagtttcaaaacttcaaaattatgtagtatgtattatgttgcactctggtgttgttgtgtctaaacaaacaccctta

SEQ ID NO: 228963 - DNA, 489 bp, Glycine max
aatattatatatttgagattcataattcagattaactagccgaactttatacagaagcgaccaattaccaaacatttatatatatatatatatataaaaaaaaggcaaccatgaccttaacacacccatcacaagtccaaaacacttgaacttgctcaagggcaagaaatgaccactttattctaagggtgtttgtttagacacaaaacaccagagtgcaacataatacatactacataattttgaagttttgaaactacatatagtttttatcattatttctaagggccatttctgcttgaagctttagctctccaacacctcacttgcaagtgcaggggttgcaggtgcagttagctccacatttgcagccatcgttctcagcgggaacacccatttcagcactctcgaattgagccttaactggtgccactcccatgaccaaggtctcggtggtggttgactcggtgtagctcaagtctgggtaca

SEQ ID NO: 228964 - DNA, 595 bp, Glycine max
tggaaaccatgttatttctgcacgaaattgtcccaattttgtgcgattgctcaattttgctcaggatgttaattttgccatggaagcctcaaggaaatcacggaatgcttttgtagctgctaattctagcctggctgtggacaagattgcagatggtatctcctctatcaagaaggctcttgattttagctttcaagatgtggaggaattactacgtttggtaaaggttgctgcagaggccattaatcgataaaggatccatttaatcaaagatgatcctagctcgttaagaagatgtgtttctttgtcatgtataatatcttcactctgacaaaaagacagtctgaattaaattgtgaaggggaagattcattttgttggatcttgatctggtcttgccatctggtgaaagctattactgtctctatacatatttttgccatacacagatggaagtctcagtttacagtcagaggaattcagttgctctctttgtgtacaagataaaatctttgcaaatcttgagatacgtggaggcacttgaagtaaacttctgtatgcagattctgagctacttttttgtgcgggatgatgc

SEQ ID NO: 228965 - DNA, 479 bp, Glycine max
  unsure (1)..(479): unsure at all n locations
atgatttctttttcatcttaggacccagagcagagctagctagcttcctcaacatgtttttgtggctctctaatttcatccgttcttggcctctactaatctatgctgccacttgggttactgtaatgacgtttacggtggcagtggcttcactctccacagaggtggcatttgtctccgccatatcttcctctgagaagtgcaagagtgatgggtcccttgttagagttagggttccggtggaggagacaccgtgtttcccagctcatcttttcaccaagtcccacatcgatgtcatcgttccaccgatctttgcagcgctcgttgtagctgcttctgcttgcgtagtaaaagttgtgggcctatgggagcatgattaaacctactcatgcaactaaaactttctattctttgtggaatcaaatttattcatgtgaattntattctctgttgaaaaaaaaattcatttaaaagttcta

SEQ ID NO: 228966 - DNA, 535 bp, Glycine max
  unsure (1)..(535): unsure at all n locations
gggtttctcttcctcccttggagaaaattaagagttcccgctgcgacgccgttcgtgcatttttgaggtgccgctgtcatgtttgggcgtggtggaccaaggaggagtgataactccaaatattatgatattctcgggatttccaaaaatgccagtgaagatgaaatcaagaaggcctatagaaaggcggctatgaagaaccatccagataagggaggagatcctgaaaagtttaaggagttaggtcaagcatatgaagttttaagtgatcctgagaagaaagaactgtatgaccagtatggtgaagatgcccttaaagaagggatgnggggaggaggctcgtttcataatccatttgatatatttgaatcattntttggaggagcaagctttggtggtggtggtagttcccgaggtagaagacagaagcatggtgaagatgtggtgcattctttaaaggtttgcttggagggaagtttataatggcacaacanagaaactatctctttctaggagcatattatgcccaaaatgt

SEQ ID NO: 228967 - DNA, 530 bp, Glycine max
cggctcgagcggctcgagcggctcgagtgttaatttaagagcatcactgaactaacaaagcaaccctatgtcgaaggtggtttgtgtcaccggagccagcggcgccatcggatcatgggtggtcctactcctcctccagcgtggttacaccgtccatgccaccgtccaagatatcaaggatgaaaatgagacgaaacatttggaggaaatggaaggagcaaagagtcatctccatttttttgaaatggatcttcttgacatcgactccattgccgctgccataaagggttgttccggcgtaatccaccttgcatgtcctaacatcattggtcaagtcgaagatcccgagaaacagatattggaaccggcgataaaaggaacggttaatgtgttgaaggcggcgaaggaagcatgggtggagcgcgtggtggcgacttcatcgatttcgtcgattatgccaagtcctaattggccagctgataagattaagggagaagagtgttggactgaccttgaatactgcaagcaaa

SEQ ID NO: 228968 - DNA, 441 bp, Glycine max
aaagaatggcatcagcaacaataaggtttgcagttttcacgggagcaaacaaagggataggatttggaatatgcaagcaattggtttctaatggcatcacagtggtgctaacagcaagggatgagaaaaggggtcttgaagctgttgaaaagctgaaagagtttggtgtgtctgatcaagtggtgtttcatcagcttgatgtgactgaccctaaaagcattgaatcccttgcaaatttcatcaaaacccagtttggaaaacttgatatcttggtgaataatgcaggaattcatggagcatatgttgaccgtgatgctttagctgctgctggggaaaaagttgccaatgttgattggagaaaaatctcaactgaaattttgaagctgccgaagcaggcattagaacaaattactatgggagtcaaattaatgtgtgaagcac

SEQ ID NO: 228969 - DNA, 516 bp, Glycine max
aacaaacagatttttttatatccaaaattagatttctcaaattagtaatgtcattgtaatatctagaattcactatagggttgttctcatcaatgatgggcagccatcagtgatcagacatgtggcttattttcttgttgtgctaggtacaaatttgatacatgtcttatcatgaaaccatgcttattatttatcctcttcaagtacacaacagtctttggatcagaatggtgccacttcacttcgagaaaagaatagaccagaaggacctccattaggtagcagagccaaccttacaacactttcagcaccttcatcaacactaagatagccagtattgtagttgagatctgttttcacaaagccagggcaaacagcattgatgcagaaagatgggtacttcttagcaagaatccttgtgtaggcagtcaaagcagcttttgagactatatatgcagaaaaagcatgtggccaccctttggtttctaatgaaccctctttaaatcttttagaaac

SEQ ID NO: 228970 - DNA, 520 bp, Glycine max
agtgatttcagtgagtgatcggtgttttcttgatttcatcataatcgtcagcgtcaattgaagaagatgccgatcagaaacatcgccgtcggaaggcctgaagaggcgactcaccccgacacgttgaaagcggctttggctgagttcatctcaaccttcatcttcgtgttcgccggctcaggctccggcatcgcctacaacaagctcaccgacaacggcgctgccacccctgccggcctcatctccgcctccatcgcccatgcattcgccctcttcgtcgccgtctccgtcggcgccaacatctgcggcggccacgtcaaccccgccgtcaccttcggcgccttcgtcggcggcaacatcaccttcctccgcggcatcgtctacgtcatcgcccagctcctcggctccatcgtcgcctccctgctgctggccttcgtcaccgcctgcactgttccagcattcggactctccgctggagttggagttggcaacgccttggtggtggagatcgtgatgacct

SEQ ID NO: 228971 - DNA, 464 bp, Glycine max
agtagtcagtggtgggaagctgctcgtgggtgtggctgataaagacaacctcgtaaacaaggccagcgattccaccaccgatgagaggcccggcccagtagatccagtggttggtccaggtccagctcacgacagcaggcccaaatgtcacagcggggttcatggccgctccagagaaggccccacccaacaaaatgttagcgccgacaatgaaaccaatggcgatgggagcaataattcccaaattacccttcttggggtcaatggcagttgcgtagaccgtgtacaccagaccgaaggtcatcacgatctccaacaccaaggcgttgccaactccaactccagcggagagtccgaatgctggaacagtggaggcggtgacgaaggccatgaggagggaggcgacgatggagccgaggagctgggcgatgacgtagacgatgccgcggaggaaggtgatgttg

SEQ ID NO: 228972 - DNA, 588 bp, Glycine max
  unsure (1)..(588): unsure at all n locations
ccaaaatgtgcttgcacttcttggtgtttcgcctcatggtcaggacaaattcgtccaggtcgaaggcggctttgcctgcgcacgcgacttggtgcaacatatcagagctaaatatggtgactactttggcattacaatcgctggttatccagaggcacatccagatgttatagaaagtgatgggttggctacaccggagggttatcgaaatgatcttgcttacttgaagagcaaggttgatgctggagcagatctgattgtcacccaattattttatgatacggatatattcctcaaatttgtgaacgactgtcgccaaattggaataacgtgtgctattgtacctggaattatgcccattaataattacaagggctttatccgcatgactgggttatgcaaaacaaagataccagctgacattatggctgctttagagcctatcaaggacaatgaagaagctgtcaaggcttatggaatgtacctgggaactgaaatgtgcaaaaagattttagctcatggaaataagacattgcatctntatacactaaatatggagaaatctgcattggcaatactaatgaacct

SEQ ID NO: 228973 - DNA, 573 bp, Glycine max
  unsure (1)..(573): unsure at all n locations
cgctcttataaaatctattcttgttgactcttcttcacccccatctcgcgttggtgcaaagcatccttcgcttcaatctctctctctctctttgcgctttctgcaaaccgaacatttcatctccaaagggatcaacaggtcgaaggagaaatggggctgacattcacgaagcttttcagccggcttttcgcgaagaaggaaatgcgaattctgatggttggtcttgatgctgctggtaagaccactatcctctacaagctcaagctcggagagatcgttactacaattcctaccattgggttcaatgttgagactgtggaatacaagaacattagcttcactgtttgngatgttggtggccaggacaagattcgtcccttgtggaggcactacttccagaacactcagggtcttatttttgttgtagacagcaatgatagggacagagttgttgaggccagagatgagttacataggatgttgaatgaggatgaactgagagatgcccgattgctttgtgttgcaaacaaacaagatcttnctactgcaatgaatgctgctgagattactgac

SEQ ID NO: 228974 - DNA, 585 bp, Glycine max
  unsure (1)..(585): unsure at all n locations
gaaagcgaaacgcatagaatttaaagttgggaaaagaaaaagaaaagttagggttagggattttgagagatggcatcgactaagaagatcaccctgaagagttcggacggtgaggccttcgaggtggaggaggcggtggcgctggagtcgcagacgatcaagcacatgatcgaggacgactgcgccgacagtggaatccctctccccaatgtcaccagcaagattctggcgaaggttatcgagtactgcaagaagcacgttgaggcgaacagtgctgatgagaagcccagtgaggatgtgctcaaggcttgggacgtggatttcgtcaacgttgatcaggccactctcttcgatctcattctggctgcaaactacttgaacatcaagagccttttggaccttacttgccagacagtagcagacatgatcaagggaaagactcctgaggaaattcgcaagacatgtaacatcaagaatgacttgccccctgaggacgaggagngaagttcgtanggaaaacccatgggcgtttgaataaagtttatgattctgctgcttttgaaaattcaaatgaaagatatgccc

SEQ ID NO: 228975 - DNA, 475 bp, Glycine max
atgttcaaaagatctttttctccactttaaaggatggatatctaggaggatcagaagtgtttgacaatgaattaacaataaagctgagataccagattcaaaagcattcctcccaccatattcaactattacttacaatttcaagattgcccaagttcaaaaaagaagacaagtttgatacgcgaaacataaataaaacaaacaaaatagtcagaaacataaactagaaactatagggcatatcttttcattgaaatttcaaaagcagcagaatcataaaacttattcaaacgcccattggttttccctacgaacttcctcctcttcctcaggggtgaagtcattcttgatgttgaatgtcttgcgaatttcctcaggagtctttcccttgatcatgtctgctactggctggcaagtaagggccaaaaggctcttgatgttcaagtagtttgcagccagaatgagatcgaagaga

SEQ ID NO: 228976 - DNA, 566 bp, Glycine max
cttgagaagtctcttctgttcccaacctctcaaaatgtcctccatggcttcctccaccgctttcttcacacccctccatgatttcactcaagccagaacaaccccatcaccccctttgcctttcatcaaatcctgctttgcttcctccaagtcaaccttttttcaccctgccctttccctacaaacctcttccaactttcccaggctttttggaaagcctaagtttttctctgttcatgcaagggctgccacagaaaaaaccatttatgattttactgtcaaggatattgacagaaaggatgtttctcttagcaagtttaaggggaaaggttctattgattgtcaatgttgcttacgatgtggtttgacatcatcaaattactcggagctgtcacgcttgtatgaaaaatataagaatcaaggtttggagattttaactttcccctgcaatcattttggtatgcaggaacctggatcaaatgaggatattaagcaatttgcttgcactcgatataaagcagaaatttccaatttttgataaggttgatgtcaatggaccatttaca

SEQ ID NO: 228977 - DNA, 540 bp, Glycine max
gaaagagagttttttatactatattcaatcattttggggtaatacagtataattttcttccctaaactgataatttctttagtaaagacaccaaagtaaattgcatagctatacttattgctcatcttcagttttaacttattgtgcacacatcactcggttcgtgctcttacatacagctctcgtttgtgttctgaattacactcaggcagcaagtaacttctggatatccttctcaatttgaaaaggagacgttgttggtgggtatctttcaataactttaccatttttgtcaaccaagaatttctcaaaattccactttataagatcacccaaaaagcctccagcactcgatttcagaaactggtacactggagttgtaaatggtccattgacatcaaccttatcaaaaattggaaattctgctttatatcgagtgcaagcaaattgcttaatatctttatttgatccaggttcctgcataccaaaatgattgcaggggaaagctaaaatctccaaaccctggattcttatattttt

SEQ ID NO: 228978 - DNA, 535 bp, Glycine max
gcccaagataatgtcttgggataccctgtcactggtggacaggttgtttacatcttggatcaagttcgtgccttggagaatgagatgctcaaccgcatcaagaaacaaggccttgatatcacccctcgtattctcattatcactcgtcttctccctgatgcagtaggaactacctgtggccaacgtctagagagggtatatgatactgaatattgtgacattctcagagttcctttcagaacagaaaagggaattgttcgcaaatggatctcaagattcgaagtctggccatacctagagacttacactgaggatgtcgcccttgaacttgccaaggagttgcaagccaagccagatctgattgttggaaactacagtgatggaaacattgttgcctctttgttagcacataaattaggagtaactcagtgtaccattgctcatgctctagaaaagaccaagtaccctgagtctgacatttactggaaaaaatttgaagagaaatatcatttctcatgccaatttactgctgatc

SEQ ID NO: 228979 - DNA, 541 bp, Glycine max
acccaaaacttattctaaatataaaaacaaacgacacttttttttagactctttaaatccaaaagctgatcacaatcaaaatcaatggcgttatttatgaaagctccataagacttcaaacgaccaaaagccggtttctccattgatgttctcttcaaacatgaatttactcttcaatagcaaggggcacagactcagccaatttgcggtacttgagagcatagaacatctcgaggtaacgtttgctctcacggcgttcaagattggtcacgtgcttccagaagccatacacaccagtgagtgtcaagagcctgtccgagtaaatttgccatgtgtacttctcatgaatacgcttgagtccaccctgggagattttgtcccagtgagatggatcagccttgctcttctcaaagaactcaacaaggatctcagcagcatggtcaccatggtaaggatcaatgtggtaaccagattttccatgcacaatgatctcagcaggaccaccattgcatgtggcaaacgttggcaacccacaagtcat

SEQ ID NO: 228980 - DNA, 547 bp, Glycine max
caacaatctaaggtctccgagttactcttccctaacccgttcctacatggcaacaacaggctcagaaccttggtccttttttctcatcttcgttttcctgtgacctttttcttcctttcaaacacacatacgaaagtcctccttttttcttgtttccttttgtctttctttctttcttggtggcagaaaaaaatgggtattggagagaagagtccaagcaagagtttcaatctgcaccatcaccatcatcgtgaagggaagaataagcaacaagagttcagaggggtcccaaaagggtgcatggcaattaaggttggtcaaggagaagagcaacaaaggttcgtagtgcctgtgatttacatcaaccaccctctcttcatgcagcttctcaaagaggcagaggaagagtatggctttgatcaaaagggcaccatcaccatcccttgccatgttgaggaattcagaaacgttcgtggcttgattgatagggacaagtcccttcatcatcatcaccaccaccatgttgggtgtcttggcttctgaattc

SEQ ID NO: 228981 - DNA, 613 bp, Glycine max
  unsure (1)..(613): unsure at all n locations
gactcgctgagtctcctcaactcggatttattcctctgaacgccgattctcaccgcaattcggtttgttcggatccgatgggtagcatcgtggaagacgccgacaccgacacggtggtgtatgtggcggtcggaaagaacgcctacaagacgcagcaactgttgcattggacggttaagaatttctccggcaaagaaatttgccttcttcatattcaccagcctcactctctcaattcgttctcagacagaaatctctctgggtatgaaccaaaagaccatgcaaccaaggctttccaggagcatggaaatcaaacagtgcacaaacttctagaccaatacgttctcactctggtccctgcaggggtacgagcctacaaattgttgattgagatggatgatattgagaaaggaatcacaaaagctattgctcaacacaatattagatggcttgtaatgggagcagcagcagacagatataacttggnggaatatagtaagcatacttctgacatagagactggccctgcatattggtgctcaatgcaatacagattgccagcaatgtgaaatatcaaatcagaatcgattcctgtgggtgcactgaatatttc

SEQ ID NO: 228982 - DNA, 562 bp, Glycine max
gaataaattaatttggtttagcatctattcatccatttcaatctcgttcctgtattcgtctgtcattcccttggtaacattcataaagacaagattacattcttgaataggaagagaaagggggggtagggatgatacacaaactatactatggtcaaaacaaaaatgccaataattaatgggtatatatatggcttataatcctgtagctggtaatttcatttgaatggctagccttctctttcatcatcttttggtcttgttgaagagcttgaacctgaggccattccaatgacttggctgtgtgtgaacctttgtaactgaatcatgcgcgcataaatcccatccgggtgatttttcaacaactgtgaatgggagccttgctcggctactttcccatcatcaatcacagcaatcagattggcattcctgactgttgatagcctatgtgcaacgatgatagttgtttttcctgaggaggcgcggtctagagcctcctgaacagacctctctgattcagcatcaagtgcacttgtggcctcatcaagaagcataagttcag

SEQ ID NO: 228983 - DNA, 617 bp, Glycine max
ggcagtgtttcttcataacttttccattttcatggtggtaccagccatcaccgatgtcacaatggctgctctttgtcccggacaagatgaatgctcacttgccatctacatcactggttttcaacaagcgatgataggactgggcacgcttgtgatgatgccactcttgggtaatctttcggataagtatgggaggaaggccatcctcacagtccctatgatcctcaccatcattcccgtaggcatattagcttacagcaggacgaaaaaattcttctacgtctactatgtgtttaagatacttatttcaatgatttgcgaaggaagcgttccttgcctcggtctagcttacgtggcagataacattccagaaagtggacgaagcactgcgtttggaattctttcgggaattgcgtctgccgcgtttgtgtgtggcaccttatcggctcgatttttatctactgccttgactgttcaagtttccacacttatcgcggtgattggagcactatacatgcaatttttccttcgagattcggccattgatgacaaacacctttatactccgatcatttcacaagaaaatcccattatatctaaggtcaatggaaaactgg

SEQ ID NO: 228984 - DNA, 482 bp, Glycine max
ggcaagttgaaatatggaggttcatgatttgcttcacggactccgtggccttgaaatccgtcatagagctgcgcatagccgacataatagaccgttatgggaaaccactatccttgtcacaaatcgtggagaacatagatgatgcaccctccccagatgcctctcttctacagagagtgatgagagtgatggtacgtagaaagatcttcagtgcagaacaatcagagactggagagaccctctacggcttgacacgtgcctcgaagtggatcctgcgcgacacaaaaatgaccctagcacccatgttgctgctggagaaccacccaattcacctgaaccctgctcactacattagtgagattattagagaaggcactaaaaatggcactgctttctttaagtgccatggccatgagcaattcgagatgacaggtttggaccctgagtataatagattgttcaatgagggcatggtgtgcact

SEQ ID NO: 228985 - DNA, 540 bp, Glycine max
gaacttgagctttttattatatatatatatggagcgaggagagaaaacatcacataaagcaagttttgcacaccaaagtactcattcattaatagcaatatatagattcttcacaaccacgcaccactctcttggtatatatggaacacgtatataacccatattacttggtggtggggcgcttcatacttttatttaatacacaaacataacacgggtagggatgaaaaccacatcacacgaagatcacatagctgttaataataataacaacacatgcaacataaaaccacgcacatgaagtgtagtggcttcctcttcgttagattggaaacgcctcaatgatggaaggaagagcgttgatcttgatgatgttgtaacgggcgaaacctgtttctttgaacagccacttccagttctcttccgtcctctctttgccgccggcgttgtgagcgagaagcatcatgtcaaatgcaatgccaacgtcggtgaagagttcgttgccttcgggccgcagcacgtgatcaacgatgatcactt

SEQ ID NO: 228986 - DNA, 553 bp, Glycine max
gtgaaagaggcaggaggaatttgtctgtttcatattactgaccaaaatggagcaatagcatcatattatggagatttcccagcaaccgtgataagctcaaaagatggcgtcacaatcctccagtatatcaattcaaccagcaatccagtggcaacaattctaccaacagctacagttcttgattataagccagcgcccgtggtgccaaacttttcatcaagagggccttcatcgctttcaagcaatattctcaagcctgatattgcagcaccaggagtgaacattctcgctgcatggattggaaataacgcagatgatgttccaaaaggaagaaaaccctcactatacaacataatctcagggacttgcatggcttgcccacatgtttcagggcttgcagcagtgtcaaaacacgaaaccccacttggagtgcctctgcagtcaaatctgccatcatgacttcagcagttcagattaacaacttggaggctgccataacaactgattcggaagggtagccacaccttatgactatggagcaggggaaatgaca

SEQ ID NO: 228987 - DNA, 449 bp, Glycine max
gtataacttaacttgcatttattcatcactggttttaatttcactatttagttaatacaaatggacttcgaaccatatatttgccgttactccaagtaatagatccaaacagatcttccttcaaagaggtcaaagttgaggaaaaaataacttggtagccaagttttttactactctttgtaaactgaagtttatctggagtcactgtgacttttactccactgggagcttccacaacgggagagtacgctgtttcatcttcttcaccaacgtttgtgacagttctactcacgttcacggctgctttgccggtgaagtttactgctatggaagggtagttgatgttggagatgagatcagaacttgaatccttagggcaactgaaattagcagggacagttctggagatgactttaaccgtggttatgttaagtccaatgtaacacaag

SEQ ID NO: 228988 - DNA, 478 bp, Glycine max
gaggaatttgagttcagcgttttctttttacatcaactcatacataccatagaatttgtacttggagcagtctctaatacagcttcttacctccgtctatgggcccttagtcttgctcattcagagttatcaagtgtattctatgagaaggttctgatgatggcatgggggtacaataatgttattatcctgatagtgggtctcattgtcttcatttttgctaccgtcggagtgttacttgtcatggaaactctcagtgcctttttgcatgcgttacgtcttcactgggtggagtttcaaaacatgttttatgagggcgatgggtacacgttccaccctttctcgttctcgtggctggatgatgaggaatgatatgctctaaaatcacattgataagaacgaggagttatatagctctggacctgtagtgattctttcatgtgatgtaactagtcagcgatcggtatatgtgggcatg

SEQ ID NO: 228989 - DNA, 500 bp, Glycine max
  unsure (1)..(500): unsure at all n locations
aattcctatacaaataaagatatgaatattaagtttatcttggaagttataattattacacgcagacacggttgcctagctcatacaaagttactcccctaattgagaatatttatttcctcaatggataaataaacaaaacggcaccacgtttgatgaaaaagctcccaggattccaccacatacaatgcccacatataccgatcactgactagttacatcaaatgaaagaatcaatacaggtccaaagctatataactcctcgttcttattaatgtgattttagagcatatcattcctcatcatccagccacgagaacgagaaagggtggaacttgtacccatcgccctcataaaacttgttttgaaactccacccagtgaagacgtaacgcatgcaaaaaggcactgagagttttcatgacaagtaacactccgacggtngcaaaaatgaagacaatgagacccactatcaggataataacattattgtacccccat

SEQ ID NO: 228990 - DNA, 465 bp, Glycine max
ttttctgatccttcttattagcatttcatgaagcatctacaaacgccctaggaccactaggctccattatattatcaattattcaacgtggcaataacttattggtcatttcatgaaagagataagatattgcatggtcataccaccatgtcctttttttttgtgatttacgttccatatattcatcctttggtccattctttggttcagtattcagattacattgcaaaaatggcatcattcaccatgacagcttccatccttggcggcccagccgtcaccaaccggttggcagtagcaacgcagaggagatcactcgtagtgaatgctgccaaagctgttgaagcggaaaaggtcagttatgacaatgacatggatggtagcaatggaaggaggaacttgatgttcgccgcggcggcggcggctgctgtttgctctgttgctgggatggcagtggcagatgag

SEQ ID NO: 228991 - DNA, 548 bp, Glycine max
atgattatgctgatttttcttccaagatcttgcatttgaaaggagacaggaaggactttgactttgtaaaatccagtctctcggcagagggatttgatgttgtttatgacataaatggacgtgaggcagatgaagttgagcccatactggatgcgctgcctaatctggaacagtttatttactgctcttctgctggtgtctatctcaaatctgatctattacctcatgcagagacagatgcagttgatcctaagagcagacacaagggaaagcttgagacagagagtttgctgcaagcaaggggtgttaattggacttctataaggccagtctatatctatggacccttgaactacaaccctgttgaagaagtggttcttccatagattgaaagccggacgcccaattcctatccccagctcaggactacagataacccaacttggtcatgttaaggatttggcgacagcttttatccaagttcttggtaatgagaaggccagcagggaagtattcaacatctcgggagagaagtatgtcacgtttga

SEQ ID NO: 228992 - DNA, 493 bp, Glycine max
ggtacatatcagcataagacaatttattatatatatattttaaaaatactgaacgaaaagctcatgaatatttcacaacttcctaatgtagaaaatccgaacagcttttctacatataagtgaaatactgaaaattgaaatagaaaagtttatacactaacaagactctttccaagaattatgtcatctgttgagaaatcagcctctttccggtatgttcctctaccaaagtccaggttgtacgagtctgcaagaccctctacaagcccaaattcaggttcccacccaagcactctctttgctttctcaattgatgcaaagaaatgctggtcacggaatggaaatgatttctttttcccaaagtcaaaatctttagggttgtagtgaatgatctctggctctgggaacccaccagccttagcacatgctcttgctaatccgtcaaacgtgacatacttctctcccgagatgttgaatactttcttgctggcct

SEQ ID NO: 228993 - DNA, 555 bp, Glycine max
actatataaacaaatatatagttgagattgttgtttttcgtcctggagaacggaaagtgggttgactgagaagccttgcagaattttcaccttatgcaacaccacaggatccacgccaaatgcttacttctattggtcagttgcttaagaaatacatgacttggaagaagactggagaagagatgaactttacctatgttgagtgcttgttgtacacatttcatcacttagctcataaggttcctaatgcgacaaatagtttatgtggatacaaaattgttactggccagccatctgataggcttggagaggacttttcagagcattataatgattttactgagagattgaataatgttgaggagttcacccgggcttacaatcaagaaattaactcaaggaatggatgaaaacaacaaatctatggccggtgctaaaactgatgaagaaaaggaaaaaattaaaactaaaaagcagaatgctacaactgggttgcggacttgttataacattttgacaatgacaaagccattgcacgcccaagtgccttctttt

SEQ ID NO: 228994 - DNA, 535 bp, Glycine max
gcactcttcatcaagctccgctccaacttaggggttaatgagggagatccttcacgtgcagggagggcaatgcgggaaccagatcggttccaagttctgggaagtggtgtgcgacgagcacggcatagatccgacggggaagtacgtcggaaactcagatctgcaactcgagcgcgtgaacgtctactacaatgaagcctggtgcgggcgcttcgtgccacgcgcggtgctgatggacctggagcccggaaccatggacagcgtgcggaccgggccgtacgggcagatcttccgccccgacaacttcgtgttcgggcagtccggcgccggcaacaactgggctaaggggcactacaccgagggcgccgagctcatcgactccgtcctcgacgtcgtgcgtaaggaggccgagaactgcgactgcctcaggggttccaggtctgccactcgctcggcggcggaacgggctccgggatggggacgcttcttatttccaagatcagagaggagtatcctgacaggatgatgcttactt

SEQ ID NO: 228995 - DNA, 583 bp, Glycine max
ggtcaatattccaagttctggaatgatgtttggtttttccattaaacttggtatcatcgaggatgccaccaacagaaatcgtttggcaaaactgctcagatttgagagcaccaagtctgagggtaaattgacatctctggatcagtacatatctagaatgaaagctgggcagaaggatatcttttacataactggaaccagcaaagaacaactggaaaactctccattccttgagcggcttaagaagaaaaattttgaggttattttcttcacggatccagttgatgaatacttgatgcaatacctgatggattatgaagacaagaagttccaaaatgtgtccaaggagggtttgaaactcgggaaagattcaaaagacaaggaactgaaggaatccttcaaggaccttaccaagtggtggaaaactgctctttccaaagacaatgttgatgatgtgaagatttccaaccgattggacaacactccttgtgtagtggtaacatcaaattttggttggagtgctaacatggagagaatcatgcagtctcaaactgtgtctgatgctagcatgcaagcatacatg

SEQ ID NO: 228996 - DNA, 530 bp, Glycine max
ggtacggcaaaattcctttggatagtatgattacagtaagactaaggttctcctttaacaacttgtgaaataaaaaactcatgctagagaaggcttttacggtctatcttaaagctgaaaccatgaaaaacaaagggaaccgacagcaccgtcattaaatagtggatgtcatgcaaatctacaactcgtccttggcatcatcaacatcaccatcatgaaccgcatcagcttcaggctttgaatcactttcagcctctacttcggtgtcatcttcctcctcaactgttgcttcaggactgatgtccaagctggtcttaactgaatcataaatacgggaagcaaaatccttgggatcatcaagcaggaagccactttcgaagagtgcggtctggtacatcaactgtgctgtatgtttcacaccctcatcctcagggttctttactactctctctcggagctccttgataatagggtgcctaggattgacctcaagaaccctcttgccgcgcatgtatgcttgcttgctagca

SEQ ID NO: 228997 - DNA, 598 bp, Glycine max
aaacattcctctcttatctcttgctattttataaacttttcctgtttccactcatcgatatctaacgctttagtcttgcaattgatatataattatcatccaaaacatgtgaccaacaaacaacacttttgcaatttttgtcatcttctgctgtgccatatcctttgccttcgcttctgaccctgacacacttcaagacctttgtgtggcacttccctcttcaggtgtgaaggtgaatggatttgcctgcaaggcagagtcaaatgtgacagaagctgatttcttctttgctggtttagccaagcctggagttatcaacaacacagtgggatctgtggttactggagctaatgtggaaaaaatcccaggacttaaaacattgtgggtgtcattctcaagaatagactacagagctgagggacttaacccacctgacacacaccctcgtgccactgagattgtgtttgtgttggatggacaactagatgttggattcatcaccacagccaataaactcatctcaaagtcaattaagaagggtgaaatctttgtgttcccaaagggttggtgcactatcagaagaacaatggggataagc

SEQ ID NO: 228998 - DNA, 559 bp, Glycine max
atatagaattaatttttgtttactcttaacatgtaccataattccgcgatacaattatattataatactcgataccacatcaatgaggaaaatgtaacaccataagtgatactgatactgagtcataacccttcaagaattatagggaaaagtatagggaaagtagacttaaaagactgaatcttgctctctctcttgaatatgattaagctcaacttaaaattaagtcttcttaggagcaagcttggccttgatgtcatcaaccttcttagtatcaatctggaaagcctgagcaagaacatcatcaggcacagttggtgttgaagtgaaaagagctgcagctatagacactgtgccagggagttggctgttgaaggcagaaagcacagaagcaggcttatccccattgttcttctgatagtgcaccaaaccttttgggaacacaaagatttcacccttcttaattgactttgagatgagtttattggctgtggtgatgaatccaacatctagttgtccatccaacacaaacacaatctcagtggcaccagggtgtgtg

SEQ ID NO: 228999 - DNA, 561 bp, Glycine max
  unsure (1)..(561): unsure at all n locations
cagcttggccagcaacaatcatacacggtttatctggtcaaactggcggaggcactggaccaatgaacaacttgggattggagatgttatcgagcatgtttggtggacttggagctggtagcctagcggttccaaatagatcaaatgagccgccagagcagctgtatgcctcccaactttcacagcttcaagagatgggattctttgacacacaagagaacattagagctcttatcgccacttcaggtaatgttcatgcagcagttgaacgactattggggaactctggtcagtagcagacaatgttggcaaattccttttggcaagttctcctctgtcgatttccaaggttagccactttgaaatcagtggtgtataagtgccttgttggatattaaataaaatcagaaatctgtccaaattatagtggccagagctgaatggtgtaggttatatatattggactgtgattgttccttctaatggtccaatgttcttatgtacatacttatatngaaactagttttagacgcagcagggcgatcttttaatatttcaaat

SEQ ID NO: 229000 - DNA, 480 bp, Glycine max
  unsure (1)..(480): unsure at all n locations
accaagatggactctttttctttgattttcaccttccgccagaataccctgatgttccaccgtcagcatactatcattctggtggttggcggattaaccctaatttgtatgaggaagggaaggtttgccttagccttctaaatacatggacaggcagaggaaatgaagtatgggatccaaaatcttctagcatccttcaagtcctagtttcactgcaaggcttagtactcaactctaagccttacttcaatgaagctgggtatgataagcaggttggaacagctgaaggagagaaaaattcattgtcatacaatgagaatacctttttacttaactgcaagactatgatgtatcttatgaggaaaccacccaaggattttggagtgctcatcatagaacattttaggagggcggngtcataaaatccttaaggcttgtgatgcttatatgaaagggtttcttggattgggctcgctgact

SEQ ID NO: 229001 - DNA, 571 bp, Glycine max
agaatccttggcaggccagttaacaattgtcaccataacatatctcaggcttggaattgatggcaacattaggttctacacttacttccttgatgtgcgtgatggtgtatggcaagtgacctacactctatttgatagagattctgatgagagtgagtgccaattgcctgagagatgtgggaaatttgggttgtgtgaagataaccaatgtgtggcttgtccattggaaaatggactacttggttggagcaacaattgcactgccaaggctgtgacatcatgcaaggctagtgatttccactactacaaaattgaaggagttgagcattacatgagcaaatacactacaggggatagagtgagtgagagtacttgtggaaacaaatgcaccaaggattgcaagtgtgtgggttatttctaccacaaggagaattcaaggtgctgagtagcttatgatcttcaaacccttactagaggggccaattcctcacatgtggggtatattaaaggtgcctaaatagtaaaatattaaaaccttgattttgcgttttatacagttttacttcaatta

SEQ ID NO: 229002 - DNA, 553 bp, Glycine max
aagccattcttttcaaaactttattacaaacttctttattggacatccatgtccttctcttcacggaggacagaatcataccataactttatttcaacttaaactagtattaggaattaattgaagtaaaactgtataaaaccgcaatatcaagggtttaatattttacttattaggcaccttaatataccccacatgtgaggaattggcccctctagtaagggtttgaagatcataagctacccaacaccttgaattctccttgtggtagaaataacccacacacttgcaatccttggtgcatttgtttccacaagtactctcactcactctatcccctgtagtgtatttgctcatgtaatgctcaactccttcaattttgtagtagtggaaatcactagccttgcatgatgtcacagccttggcagtgcaattgttgctccaaccaagtagtccattttccaatggacaagccacacattggttatcttcacacaacccaaatttcccacatctctcaggcaattggcactcactctcatcagaatctcta

SEQ ID NO: 229003 - DNA, 500 bp, Glycine max
aaagagagtccccagctcaactctctatttgttgttgctgcatttttcattttctaggcttagtcattagatagaaagagaaggaaaaaaaaggctattatggcaggaggaggagctccagctaaagcagatgagccacagccacatccaccaaaggatcagttaccaaatatttcttactgtattactagtcctcctccatggcctgaggccatacttcttggttttcaacattttcttgtgatgcttggcacaactgtgttgattcccactgctcttgttccccagatgggaggtggcaataatgagaaggcaagagttatcgaaaccctgctttttgtagctggtattaacacattgttgcaaacaatgtttggaactcgattgcctgcagtaattggagggtcttacacctttgttccaaccacaatctcaattatccttgctggccgattcagtgatgaaccagatcctatagagaaattcaagaggataatgag

SEQ ID NO: 229004 - DNA, 573 bp, Glycine max
gaaagaattctagtgtacgagtatatttcacaaggggctctcagtaagcatcttttccattggaagagccatgatctggagcccctctcttggaagaggagactcaatattgccttggatgttgccagagggatggagtatctccatactctggctcaccaaagcttcattcacagagatcttaagccgtcaaatatcttgcttgctgatgatttcaaagcaaaagtctccgattttgggttggtaaaacttgctcctgaaggggaaaaagcatctgtagtgacccggcttgcagggacgtttggatatttggcgccagaatatgcagtgacaggaaaaatcactaccaaagcagatgttttcagttttggggttgtgctaatggagttgttgactggattaatggcacttgatgaggatagacctgaggaaagccaatacttggcagcatggttctggcatataaaatcagataagaagaaactaatggctgctatcgatcctgcccttgatgtaaaagaagaaacatttgagagcgtctccatcattgctgagctagcagggcactgcact

SEQ ID NO: 229005 - DNA, 564 bp, Glycine max
  unsure (1)..(564): unsure at all n locations
tatttttcttcctcagtagtgtcatttacgcttctcttctctgcagcaactatgcctaaccctaaggtcttcttcgacatgaccatcggcggtcaatctgctggccgcatcgtgatggagctctacgccgacgtcactccccgcaccgccgagaacttccgcgcgctttgcaccggcgagaagggcgtagggcggagcggcaagcccctccactacaagggctcgtccttccaccgcgtgatcccgagtttcatgtgtcagggtggcgacttcaccgccggaaacggaaccggcggcgagtcgatttatggcgccaagttcgccgacgagaacttcgtgaagaagcacaccggtcccggcatcctctccatggcgaacgccggtcccggaaccaacggatctcagttcttcatttgcacggagaagacagagtggctcgacggaaagcatgtcgtgttcggacaggtcatcgaaggaatgaacgttgtcaaggacatcgagaaggtcggatccagctccggcaggacctnncagcccgttgtcatcgcccactgcggtcaactc

SEQ ID NO: 229006 - DNA, 517 bp, Glycine max
agaaaccgaagagcaaagagtattattaggcgaattatagatgtcctaattttattgaaggtagctcatcatgttttttttatgcttctcataacagactccattcactcactctatgaaccccaaccaaccaaccacatgatactgatattgaaaaggaaaggggaagggtttcgaaatgatatccttaacaccacaatcccctaaacgacgacacgagaaagaaaagaagagaaaaaaaaggctaaaacgacaccgaaagaaataacacagattcagagattaaagccgcgggtcaacgtcgtctaagagagttgaccgcagttggcgatgacaacgggcttggaggtcctgccggagctggatccgaccttctcgatgtccttgacaacgttcaatccttcgatgacctgtccgaacacgacatgctttccgtcgagccactctgtcttctccgtgcaaatgaagaactgagatccgttggttccgggaccggcgttcgccatggagaggatgc

SEQ ID NO: 229007 - DNA, 551 bp, Glycine max
caatgactctctcttcatcatcattggttggccattctatcaagcttgccccctccacccctgagcttggtgttggaagggttagcatgaggaaaacagcctccaagactgtttcctcaggaagcccatggtacggcccagaccgtgtcaagtacttgggcccattctctggtgagcccccatcctatctcactggtgaattcccaggtgactatggttgggacactgctgggctttctgctgacccagagacttttgccaaaaaccgtgaactggaagtcatccactccagatgggccatgttgggagccttgggctgtgttttccctgaactcttgtcccgcaacggtgtcaagtttggcgaggccgtgtggttcaaggccgggtctcagatattcagtgagggtgggcttgactacttgggcaacccaagcctgatccatgcacaaagcattcttgccatctgggccacccaagttatcttgatgggtggccgtgagggttaccgtattgctggtgggcctcttggtgaggtgactgacccaatctac

SEQ ID NO: 229008 - DNA, 275 bp, Glycine max
attgggagaggagtcatacaaggatatgtactttgttcatgcaactgctacgtgataacctgaccctctggacctctgacatgcaggacgatggtgcagatgaaattaaagaagccgcacccaaaggtgacggtgaacaaaattaaacataccatactctctgcttattagtcattgaacttcccttctgtaatgttttcaaagggagaaggtgttgaatgctaatctcagtgacactgagatgctgaccagatttggtcttaatttggaaatgc

SEQ ID NO: 229009 - DNA, 274 bp, Glycine max
  unsure (1)..(274): unsure at all n locations
aagaaaatatgcttgtcagaaacgcgtataaatggaaggacaaactaaaatagcccagtacatccacaattcataacgaagaacacgaatgcccaaaatctcagtaacattgagattagcattcaacaccttctcccttctgtaatgttttcaaagggagnnttnntgtctngttagtggccccgtcagcgaggctcattgcgtaaccctcctactttgggggaggttaccgtactgtgatgtgctccatagcccccaaaggattacgatgcaa

SEQ ID NO: 229010 - DNA, 479 bp, Glycine max
tttactagcacctagctaggttctcaattctttggttacttaatagtagttcctttttaactatctttcttcaatggctgactcagcctcagcctcagcctcttcttccagaatgtggtgctccatccccgaaaggtttcagctgcatgcggccatgttggccctgcagtttggctatgccggcttccatgttgtctcaagagctgcccttaacatgggcattagcaaacttgttttcccagtctaccgcaacattatcgcttttctcttgctcgttccttttgcctacttcttggaaaagaaggagagacctgccattacattaaacttcctcttacagttctttcttctggctcttgtcgggattacagcgaaccaaggtttctacttgcttggcttggacaacacatcccctacctttgcatcagccatgcagaactctgtcccagccattacatttctcatggcaggcatactca

SEQ ID NO: 229011 - DNA, 459 bp, Glycine max
acgacaaaatttgttcatttaatactctgagctataaagagggaatcctaccataaaggctaactccaagataaaaattgttatcaatggtagcatacattacataataaagaagggtgtcgaaaggaaataaaaaatacataacatcgacaaccgagtctagctaagcaatgcgggagggatggagcaaaaagtgaggaagatgctgttccaaaacgaccactagctctctaccatgggtcacttcatccaaaaccctatttccaaccctcctagcggcttcaaccagttgtcccctaagccgttgtgaaaacaagcagccacctgtcttgacacactctctataaagtgggaggtaagcaattgccaccgtcagtggggccggaagatctcttaagcaaataggagactcaccccatttaatgattctcacaaggttcatgtaatgctcttgcccta

SEQ ID NO: 229012 - DNA, 526 bp, Glycine max
  unsure (1)..(526): unsure at all n locations
gcaaaagggtagtaattggttttagagttagtgagaatggaaaacgtttcggttcttttgtgtaataaggaaaaggatcagatggatttgcctcctgggtttaggtttcacccaacagatgaagagcttattagtcattacctttacagaaaggtcactgacaccaacttctcagctagagccattggagaggtggacttgaacaggtctgagccttgggatttgccatggaaggccaaaatgggagagaaagagtggtactttttctgtgtgagggacagaaaatacccaactggtttgaggactaatagagccactgaatcaggatactggaaggctacagggaaagacaaagagattttcagagggaaatctcttgtgggtatgaagaaaactttggttttctacaaaggaagggctcccaagggagagaaaactgattgggtcatgcatgagtataggcttgatggtaaattctcttttacaacctgccaaaactgcaaaggtnattataataataactaat

SEQ ID NO: 229013 - DNA, 577 bp, Glycine max
aaagtgctgtgttctgcggctctgttttttgttattcacttccggcaccgctgtttcccatagtaaggttatttccacacactcagttgtatgacacgtgtctcttgatctgtcagatttcgtcgtcgtcgtcagtacgcctccctcggccagtaaataggaaaacaagggttcacaatgtccggcccaggggtacagttgcacatccaagatcaccatgtggtgatggataatggcatagtccaagttaccttatcaaatccagatggaattgtcactgggatacgatataatggtgttgacaatttgcttgaagttctcaacaaggagactaatagagggtactgggaccttgtttggagtgcgccaggaagcaaaggaatgtttgatgtgattaaaggaacgtgttttaaagttatagttcaaaatgaggaacaggtggagctttcatttgcaagaatgtgggatcattcactagagggaaagtttgtccccttaaatattgacaaaagattcataatgctccgtggttcatcaggcttctactcttatggaatttatgagcacctaaatggat

SEQ ID NO: 229014 - DNA, 445 bp, Glycine max
agcaccaattttatatttgaatttatgtgtaaaagtatttgaggggggttcatatacacacacaacgatggcaacaacaaaattactgaaaaaacagagaaaaaaaatataagatataacgtatacaacgctcacagataaatatattctgatatgataacagtgcactaatatttagtatcatttattcccaaaggttaacttaaatttcttcacaaggggggccttccaaacgaatataatcatacatgataccttggaagggactggtgcatcttggttgcgaaaaatatatggtatttgtgccatcaacaagaagagaacctggtatattcacatggtacagtcaatagatcccttgaattccatgtcttgaaattgagtttgcccttcctattaatccactggaaaatacggggtcgccttgcattggggatcattttac

SEQ ID NO: 229015 - DNA, 556 bp, Glycine max
cttcgcagaacgatgaaggaaggcatctatcgattatcgacgaaggtttcgacgagttcgatccctgatagtgttaccagagaggaccctacgaccaaatacgaattgctcaatgaacttgggaaggggtcttatggagctgtttacaaagcaagggacttgagaacctcggagatggttgctatcaaagtaatatcgttatctgaaggggaggaggggtatgaggaaatccgtggtgagattgaaatgttacaacaatgtaatcatccaaatgttgtccgttatcttgcaagctatcagggagaagagtatctttggatagtgatggagtattgcggtggtggtagtgttgctgatttgatgagcgtgactgacgagccacttgatgagggtcaaatagcatatatctgtagagaggcactgaagggtcttgattatttgcactcaatttttaaagtccatagagacattaaaggtgggaatatcttattaactgaacaaggagatgtcaagctaggggattttggtgttgctgcacagcttacaaggactatgt

SEQ ID NO: 229016 - DNA, 303 bp, Glycine max
gtaaaaagcaagtaacattaagttggattcggatacacaagataattcacattatctgaagtacttcaccaaacacaaatctaaaaactctcaaaagtcatttcgttctttgacgctcactttccggggacgaagttggtggcataggcccaggcgttgttgttgacagggtcagcaaggtgatcggcgaggttctccaatggaccctttccggtgacaatggcctgaacaaagaagccaaacatagagaacatggccaatcgtccgttcttgagttccttcaccttaagctcagcaaaagcc

SEQ ID NO: 229017 - DNA, 565 bp, Glycine max
aaaaactcattttttgaattcagtcagaccaattcaattaaaaccaaagcaggtacactctgtaagtggatgtgtaagacgaacaactggacagacacacatagtagtacaatgtaaatcatcaaacaataggtccaaccaccaggaatattaaaggtacaattcaagtaagatcatcctcctcaagttctttggctttcagcttttccttcacccttaagagaagtgtggtcttccaagaatccagaggggtcatactatcaaattccttgacaacatcagtaaactttgcaacatcttcttcatcaattgcagcagcaatgtccgccaacaatctatattcacgtgttcctgaaaatgttggatccagttcctgatatcgttctaatgcattggttatagcaacaacgtcctctttacagagttgacagatgccagcattaagaaggtgtgctttaactccatacttcagcaaattattgttgagggattggcgagctatctcttcataatgtcaatcgacttctgatattgttctagctgagcagcaaactgggcaactttt

SEQ ID NO: 229018 - DNA, 384 bp, Glycine max
aacaaccctatcattatttttataagccacatgataggatttaatattagtaacatttgacatggaacatatttgcgattctcaagaatctcaaccacaactaaaccagaacaacaaacaaacagtaaagcatagaaaaattggtgtcttcaaaatgtttgacaaatggatacagccccttcacttgcagatactttctggtggcatgcaaatttagctgtattgaattcatgaagtgtcaacaagtgtatcagattgtgctccccattcagtccaagatccatcataaactgcaacatcagactttccaagacgatgaagaccccatgccagaatgcaagcagttacgcccgttccacatgaagtcacagctgggctttccac

SEQ ID NO: 229019 - DNA, 529 bp, Glycine max
  unsure (1)..(529): unsure at all n locations
gatgcatgaacacaaattgaatttgctgctttattactaataattattgcaaacacaacaacagggtacaacacaaaaatgccacaataaatagaaaagcaatcatacacgaccatattaatctatgaacaaataaattaaagagatcactaaaaatggactgtacttttcacatttacttggcatttacatttcaaatctctctttcctgtttggatttgtccgtcacttgaacacaataagatcaggacgtgcaagatggccatcaaacaaatagaatcaacctgatctgaatcataaacattgtagcatagagatgacacattcagacttttattcaaagaacttagacaggaagatagatgtttcacttggctcaaaatagagcttgcctttattcctcgatgaaaactagaacatgattcatcatgaatggtgctttcacaatttgagcttacttgtagataggtggaggtggngaagcatagatataaaccggaggtggaggtgatttgtaaatgtacttggg

SEQ ID NO: 229020 - DNA, 566 bp, Glycine max
  unsure (1)..(566): unsure at all n locations
agaaagtatcatgcttgattactgattgatggacagtctaaataacaatgtaaaaccatcgtagttcctctgtacatgaaaatagacggatcataacaatcatgcccaaatcactctcaaaattcatccattcaggattacacgagaaggacacaggcttatccatgtcattggatacaaacttagtagccacgaattgtattgatgatggtgttgtgccacgggtcagagaggtgctgcaataggttctcaaatggtcctttgcctgtcacgttgtgttgaactatgaatcccaagaatgccaacatagccaatctcccattggcaagttccttctccttggcctccaaagtaggtgcaaagttcaaggggttaaacacactaccagggtatccacactcatgttggggcaagctgtattgcttgaagatggggtcttggttgacagagccagggttcttgatgtcctgccatctccggatctcgacgtagtggaacaagatgaactcgatcacaaagagggtcgacgatgaagcanagtactncgatttcccagcatcatacca

SEQ ID NO: 229021 - DNA, 450 bp, Glycine max
aagaacgaggcaagccaacaaactaacttaaacgagattagatggcaactgaatgttgtccaatacagtttctaaagtggctgcaacatcccgcaggtaaaaactaaaacagaagcatttttaacacatacatatgtccaaaaatcaattacaagccaattttcttaaaggaagaaaacacagtcacggacacttagcagtatttgcctatatcccaattaatgctactaccagcagaaaacctaccctccctaacaaccccatctattgaataaaaaaaggaatctgaaaaacaaaaacaccaaccgcagccaccaatcatcttcatctttccaaccaccaactcaagcacgctcaccacgaatccttcttgccagctgaatatccttgggcataatggttacacgcttggcgtgaatggcacacaggttagtgtcctcaaagagccca

SEQ ID NO: 229022 - DNA, 545 bp, Glycine max
cactctaaaaatgcaaaattttatatttatgaaagaataatacatccatatgtttcaacatatcttcctccaaataaacttatgacaagcaaaatctgtaaagacgagagatgatggctttaacaactaaagttacggagtatataacggacttgtgttgtgtcactcattcttggcagaagcagcctgctttgctccaacagaaaagaattcagagatgacttcaaggggcatgccctttgtttctggaaccttcaaaaacacaaatatccacgagatgaaacaaacaactgcgtaaatggcgaatacaccaccaagtcctaaagagcccagcatcacaggcagcgagtatgtgatgatgatgtctccaatccagaacactaatgcacagatagcaatgcagaggccacgcaccctagtggggaaaatctctgagcaaaggatgtttggaattggtccataacccatcacaaagcagcagaaataaaccacaacgcatactgttgagattgctgcatgggcgacattgccaaaatttaccaggc

SEQ ID NO: 229023 - DNA, 543 bp, Glycine max
  unsure (1)..(543): unsure at all n locations
gattgcatgtaacacacaacttgaatttctgctgcgtttatgtactaaggtaattatttgcgaaacaccaactaacatggtgtacacacacataaaattgtccacacatataatatgaataagcaattcattacacccgaccattattaagtctatgcaacacaataacattaagagagaatcacttaaataatggacctgtcacttttcacactttatcttggcactttatcatttcaaattctctcttttcctggtttggatttgtgccgtcactttgaacacaataatgatcagggacgtgcacagatggccatcaaaacaaatagaatctaacctgatcntgaatcataaacacttgtagcatagangatgacacacttcagacttttattcaaagaacttagacaggaagatagatgtttcacttggctcaaaatagagcttgcctttattcctcgatgaaaactagaacatgattcatcatgaatggtgctttcacaatttgagcttacttgtagataggtggaggtggggaagcat

SEQ ID NO: 229024 - DNA, 369 bp, Glycine max
aaaacacaatatgccagcatacagttgataattatttttcagctccccaaattgataacaaacggtggtaacattaaggggacaatagagttcaacacaaaccaaccttattttcaagggtcattacagacccattacacataaaatttttttttaaaaggttggggaaaatccaacatcgaacatcacacagaaatcagctccggtttaaaaccccccacgaagacgcaacaccaagggcagagttgactccttttggatgttggagccagggggggcccttccatcctctagctgttggccagcaaaaataagcctttggtggcccggggggattccttccttggccgggatcttcgccttcacatt

SEQ ID NO: 229025 - DNA, 532 bp, Glycine max
gacagcaaagaagattctaaatgttattaattgcatcaaagtcctgatagaacatagtgacgtacactggataaacactccaaaaaccaactacagcaataaacactagatgggatgctgcaattacttgtgcaaagcacaaaggcaattcttttcacctacgtctgatgatatacagtagggttgatccttgccatcttgaaaccaggtagcacgcttctccagaagctcgttcagaaaatcatcaagcttctcaatagtgatgtttggcatcaccaccacatgtgcgatattccccttgcatgctaactgccacttgcgtataaattcctcatcatgtggcctctcaaacacaaccgtgctgctcagttcattaagcattgcaccaatcccagcctcaacaaggcggcctttgaagtagtgtgcatttcgcaggcatttctgtacttctttctgaaaacctctatatcctttccgattcaaggtataccagaagaatatgggagcatggccattccgactaccccatgat

SEQ ID NO: 229026 - DNA, 347 bp, Glycine max
ataaacgtaaaaaaaataattcgcattctttaggctacgttaaatacaaatgggcaacatccgcattttttatgatactaaagtaatatttacggtacaaagttactaatgtaacatcaccggtagcttcccagttaataaagggatacacacattgtaaaactacttatttgccaaggcacagagaagggggtaagcccttgcctagattagaaccatattggttgggggaccaaactttagaacagaattaggaatgaacttggtcccttcgatttaaaagggaccccccttgggtatttttggggacccttaacttaaacttgtttttcttttggccccttttg

SEQ ID NO: 229027 - DNA, 544 bp, Glycine max
  unsure (1)..(544): unsure at all n locations
ggctcaacaaatacaaatattgatgcaacatttagataattgcagacattttgtcctctattgtatgttacaatctgctgtgatacaggaaacagggtattctacataaccatcggggggttgggtgataatgagtagcatgtatctctaaatctgcttttacagggcaaccgaatacaataaagataccaacaaaaatatcatattaaatagaaaaggaaagcgcagcattctcatatggaaacaacacttcacgagcctagaaacgggcattgcttccttgcatgctctggaaccaatttcaccaaaatctcagatgggactcctttcagttcatgggatttgaaattaaatagtggcggaaggaatcggccatttggcaagcgagtatttggatcacgaagctcgtcgaagaaaggatgcgtcaaggcatcaaaagctgtgcaccgcaagttaggggagtattgtagtagtcttgataccaaatcaacagcctctggaggcatgcgcttatggaagatctngtgccatggatgtgctttaa

SEQ ID NO: 229028 - DNA, 503 bp, Glycine max
atagataaaaaaaaagttattagaattacagatataccctttattgataataaaaatgttatgtttacatggtagacaattatcatcctttatcaggttgcctacccttacactttggaaccttttaaatcatcaatcacagcttgttttttgttgatgcaacaatcgaacccatactttgatggtttgagatctcaaaccacaaagccatgagtgcaagtgacacatctcgttcaataaaaactagataactaataaagtatagtttgtagtaataaataaataagcatactcttttaaatgaatctatacgtctggacgctcattctgatcaaaaatacgattatggcaagtagggttgcaagggtaggcacaatctatctcacggaagggccttcgatcataaaaccaatcacccactgcctttgcaattgatgtcttggccaccactggggagtcatttctcagccatgtctcttgtattccagtttggcagtgtgcat

SEQ ID NO: 229029 - DNA, 128 bp, Glycine max
tcgcgatctagaactattgatttcccaatctaaaaaaaaaaaaaaaaaaaaaaaaaaaaaaaaaaaaaaaaaaaaaaaaaaaaaaaaaaaaaaaaaaaaaaaaagggggggcccgatctaaaactagt

SEQ ID NO: 229030 - DNA, 588 bp, Glycine max
aaagatcccaaaatacatcctcagtaagatcctcaaaaagagctggtgcatgttacttctatgtcgagaagaactgattatgtgggaacaattaacttagataaccgaaaagcaatacaaacatctatacaatctgccgtacaacaagcattaagatattatagttagttctccaacatccacaatagtaaactctgctttcgtccttcgatgacacaacttactgttcattccgaagcaaaatcaaaaaagggctccagcgtcttcaataagcaacctatccacttcctaatgctgcaaatagtgagcctccagctacaggtgttacttcctactgctacaattatctcttccttagccagaataagatacaatctttcagcagtgctacaatattgtccttcgcattcgaagcttcatgaaacttttcagtctctgccgctatcttcatcaccgccatcagcattaacatcaacggtgaaaccatactcctgatcacaacccaagtatgaatcacacatgaaataaagcgaataggatttccttccagcatcagcaggagcatcaaattccagtttggcttttaat

SEQ ID NO: 229031 - DNA, 542 bp, Glycine max
  unsure (1)..(542): unsure at all n locations
gatagaaatgcatgaaagattactaattccagagaatattcaataccaaagcatatatagaaataaaaaattaacaaaaaataatcccaaaaggaaaagtttgacaagttaccaaaaaagggtctccaaaccaaaaaccaatacaaatgttttcatcctctactcttccaatattgttcccttctcgctgacataaataccatcaagaaacttccggatatccttgttcttaacatgacatttctggttaatgagagcacatgacctagaaacaagttcaatgtcgtttccatccaagaccaattcatctttgaccttttcagatctaacaaccgacacgccctcaagcatgtccactttcctcaccttcttctcgccgaggaaatttctgatctcgatggacttgctgttgttgccaatgctagcgttgatcggaaaatgtgcgtacacgaatctcattttgtatcggtattccttggtgacgccggtgatcaaattctcaacgtggctganggcggtgcggatggcngcggaggttttac

SEQ ID NO: 229032 - DNA, 515 bp, Glycine max
aagcacaaaagacgtggataacttgatattattttattacatacatgcatagatagcctgctctcaaataagtcggcaggaacaaagatagagagattcaacgatcttcaaatttcacatttgccagaaatatataacagaaaagaggggtatgggatatgagttaagttttgatcacattcaactacactatcccaaaccgatactcttaagactttgaacttcacttgtactctaggatcatgttgttctcaggagctaatccaacacaagccctcaggatgttttccagcatagctcgctgctttgacaacgcattcaccactggtgtacccggtggaaccagaggggccttggtcatgtaactaaggatggtcgcaaactgggtggaatgagtggaattttccctcattttcagctttaaactcgattcgagtgctgagctcagcaagaaggaccaagtccaagataataggagcagctaacagtgaatcctcacatgtgttgtgcaacac

SEQ ID NO: 229033 - DNA, 532 bp, Glycine max
  unsure (1)..(532): unsure at all n locations
acaacaaancctaatatgctgtcatcaatatatattgcccactaaaaagtttatgacacccaatctcgtatatagaattatacgtaagaaatactcaggtattatatgcttaaatgtggtgcttccatctttcaggattagaagacaaaagcatacagcattgcactagctagtagcgacttttgcacttttccatggctctaggtgctagcccaattgcttcagaactcttcattatcctcagcctcttgcaagactcagtgaacatctcccacggaacatcaccaactagcatccaatctccatccttgtcttcataggtaagaacatattctgaaccatgaaggagatccatcaatctactttcacttaaattttcccgacttgaaaccccatatgagccacattgactgagtgtaaaacaactaaacatcttttcaagtgccaaagagaggtccttgtaagtggtaaaactattcagatccactttcctcaaatatggggcgcnctccatgctgactntaacataaag

SEQ ID NO: 229034 - DNA, 591 bp, Glycine max
  unsure (1)..(591): unsure at all n locations
atatataaagcacttctgcacaccaccaacctcttgaattctcaccaaattaaacagtagtagcacactttacaaataaattaagagaagaaaaaaaaagcatagaatggagagagagaaaaaaaagagagatagaaaaagaaacatgaattacaaaggccatgacttgaatcagatcaaaattcactggaaagaggtgcatggtcagagcgaatgaagacattgccgtagataaggccagccaaaccaccaccaataagaggtccaacccagtagatccagttgtcatggaagtcaccactaacaactgcaggcccaaaggagcgtgccgggttcatcgagccgccagagaatggccctgctgccaagatgttggcaccaacaatgaaaccaatggcaattggtgcaatggttcccaatgatcccttcttagggtctgctgctgtggcatacactgtgtacaccaaaccaaatgtgatgatgatctcggtcacaactccttcaacagctccaaccccagaagccacactgtggattggagttggcaagcctnctgtgacatagttgagaagaaaacatgccacgatggag

SEQ ID NO: 229035 - DNA, 489 bp, Glycine max
ggattcaatatcgcggatcacaaatatattaaattcaagttttcaatctccaatatccagtaatctttcaacaatttatccttgaaggagggtttttaaccagtcacaacagaaaattctaaacacaacaggcacaattaagcgttcaacacaaccaaccaaaaagaacccaatttcaatttcaaatgtgcaatctgaaacagcttgctataggcaaacttcttctatggcctttccggtcatatgacatcttcatgcatagtttaaacggaatatgtcattcaacacataatagcttccctgaggtgttggtatcaaatggaacatctggctgaacttgagagtgtgctgttcgccggcgagctgaaggtttccgctgacgaagacgagcatgccggcgttgacgccggagggctggcagtccacggtggagattgagtggtggcactgctgaaaagggagggaggtgagctcggcaacgatgttgga

SEQ ID NO: 229036 - DNA, 431 bp, Glycine max
gggaaacaaatttaaaacagtttgaattcgaatattatagattacaaccaggaatcaagtgctagatcgagactgaaaaattacaaattaaaatgattcaaattttcaacaatctttcttgaagaacaagagcattctctattcacatcagtaatgaaaacctaactacaactacagagcataattatcaaaactaaaaaagaaactacaaaacagagaggccaaaagataatctaaatttgataataaaaaaatcaagaaaagcgaatccctatttaagagtcatcgtcagcagcagcgcccttggatgagccaccggccttcttgggaaggagaagattgtgaatgttgggcataacgccaccgttagcgatggtgacgtcaccaagaagcttgctcaattcttcgtcgttcctcaccggcaattgaat

SEQ ID NO: 229037 - DNA, 446 bp, Glycine max
aggaaaaaaaatcacgaccgaattcatattcagaacatcgataatttacaacaacttaactcgggctcattctttattgagaaagaaattcagttcttatactgaatctcatgcacatttctaaatcattctctcattctcaaggtctataccattaatgctccctccatatttctaccaacctattcaatgcaactactggggatccaccttcagtcattgcttcgggggcactggttttcattttgaaaatcctctggctaatctcttttcccctatccgagttcatgagctccttgactcgggcacccaactcgggggaactcactaacccgttattgttttggtccaccggcaaccccacctttattttcttcaccaaaatcaccctattcagcttctgctccgcgtacaaaggccacgccaccattggaaccccttcacaa

SEQ ID NO: 229038 - DNA, 491 bp, Glycine max
  unsure (1)..(491): unsure at all n locations
aattataaaggaaatatcatttattcaaacctaaagaaacacagtaacacaccatcacaaactcatgtaaccctgccaataaaccatcacccctaaactccagcaccagcagcttgctcacttcaatacacaactcccagaatttctcatgtcaccacgtggcaagcacgctgatgtggagccaagtgttgggcttacacgtaggggtaccctccataatacaaccaaagacttaagcctcatataataatattaataaaggaaactaaagaaataaaaagaaaaaaaaaaaagaggcttttcaacatggcatgcaaaatggtagacctgatccccacaactaggaccatttttaaacttgtttttctcactcacactgtccataggtctaagcttcagtcttctcaacaggaacctctactggggtttcaactgactcagctggtttgctctcttcctctgnggctgctggtggtgctgctgctgctgat

SEQ ID NO: 229039 - DNA, 470 bp, Glycine max
ggccccgaaccagaaaataaatttttaaacatgaaaaattacaagttttaaactggtctaatacataacatacattccgggaataaacacaagttcagtaatttgttcctcaacaagttttaaagtccaagggaaaagccagcttatttgcatgaagttgttaatacacaaacccctcataagttataaaatcataaacccttaaaaccaggaagatcaatcccctggaatggggttttcacttaaccacacttcaaattttgcaatttaagggtcattttttggacaaccttgccattgctataagttatgcagcttttggttgccaggcaattatgcttggtggggtgtattcttgggactaccgcaccatttgggaggccagttaagtttattttcaaggcctctttaaagggaaagaagggaaattctgcctctcccattttgtcatttttggtaaaaggggcagg

SEQ ID NO: 229040 - DNA, 453 bp, Glycine max
actgcaaaagatgtactagatttggttttgtccaacgtcaatgatcaatcagttgatcttacgttaattaaatttgatcatttaacttgatcaccacattttaaaggcattttaacttggtgttatatttgtgctctgtatatgccctgtttagtctgctatttctgaatggttctgcccatctgtggtttggttttccgttctttcctctctttctcctgtgatttcttttgggttcaagaagcaaggctgatgggttgaagatagcaaccttgcccacatccgatcagttatcacaaccctcttctctccctcgtttatcagatggaatggaatgtaacaatttctgccattaactgggcccacggtgaagcctgtgtatcctgccattgcaccatgaacagcactttgggcaaggagggtgcagtatacattatcagatgcattacttgg

SEQ ID NO: 229041 - DNA, 501 bp, Glycine max
  unsure (1)..(501): unsure at all n locations
cataaaagttaaaattcaataaaaaagcatcaaataagttttaaacagataaatggatgaaagcaactacacatttagtccacttcctcaatcttggggccagcaccacttccaccagaaggagcagcataatcatcctcggctgccccagcaccagcaccacccatgtcaggaccagcaccaccttggtacatcttggcaatgataggattgcagatgctttccaattccttcattttgtcctcaaattcatctgcttctgcgagctggttgctgtctagccactggatagcttgctcaattgcgtcctcaatcttcttcttgtcagtaggatcaagtttctcaccaattttgtcatccttcacagngttcctcatgttgtatgcatagttttccaaagcattcttggcctcaaccttctttttgtgctcttcatcctcagatttgtacttctcagcctcttgaaccatcttctcgatatcttcctttgacagtctaccc

SEQ ID NO: 229042 - DNA, 549 bp, Glycine max
acaaagccaaaataaattactcatttatttcattttcatgccctactagaccagacaaaccgactattcaagctttcatcttaatcttaattaaaacacagatcatcatatatcataattttagataataacgacattttctctctctatctttcgcagtacacgtggacggtcgagatcaaatcaccaaatccggtcccatcgaacggccgagaacgaatcatcaaatcctccgcagcttctccgctttgatcacggggttggcacgtgcaatctcctctctccccaccgtcttaaaatcgaacccgcacgcgtgcttctccgagtacctgtgggccccgcagaacgtcaatccgcacctgcacttgaacccggtcagccccacgcgccttcgacacgtggacaccggttcggttgcgcaccgaacctggcttgggaaatgaactcgacgcctcaccgcaccgtgaccgaacctccgccaagacgcggcggcgattcgatgagacatccccaacgtgggagtgacgtggagacgacggttcacgagga

SEQ ID NO: 229043 - DNA, 458 bp, Glycine max
ggaaaatctcaaacttttaccatcaaaacaaaaaacagtcctcatcaaaaacaaacagcaacgaaaatgtttccgccgatcaagaacccagttttgaaggctacgggtacatgaaatcggggggcccttcaaaatataactgggaaaacaaacccctaagactttgcaaagataaactcctggaaaggaacaagtttttttgaaaccccgttgatgatcacatgggctagcaaaattgccaaaatgcaatcacttttttttggggggagcctttgggaccttggctccgggggggtctttcttttcaacacttttgatgactccaacagctacgggctgacgcatgtccctcacagcaaaacgaccaagggggggatactcagagaaaggttcaaccaccatgggcttggttggaacccttttaaccataccagcatcaccatttcttaaaaatttgg

SEQ ID NO: 229044 - DNA, 317 bp, Glycine max
ggagagagagaatttaacattgtaacatgttgagagtcatacaatacatcatttacatccatttttattgcacaaataaggatccatttccacccattggccattcatagagaatgaataacaacaaaaagtaaacaaagataataagccctttcttcacttgatgtagtaaggaagggccaagacctaaaggaggaagtaggcccaaataacacccgaaatgcctccgaaaaaaaagcctccggtgaacttggcccacccatcaacagtttggagctgatcgggctccttcttgcggcccgtcaaggtcagtgacg

SEQ ID NO: 229045 - DNA, 385 bp, Glycine max
aaagaaacaaataagtattattcaagagaaaacatccttcacatgccatggctatgtattgatatttgcactcaaagctacggcaaacaaatggaattctattacaatatgaattacaagttccttgattggcatatcaaggaaaactgaaagtggttgtatgtggattgatttgccacagcctttatagacaaaccaaatgcttatttcaacacaaacacgtatacagaaagaaaccacttgaagaaaacagaagaaaacaaaactaccaaattggaaggggagcaccattccactctccaaggcattccaaaagtggatcaatgaccttccttgggcccatagcagtaaaaactttgtcacactcttcacccggtgagaaccc

SEQ ID NO: 229046 - DNA, 553 bp, Glycine max
aattaagcgttgctcctgaaggatccaagagctttgattgcagaacctctaagaatgtattgatggtagattgcagccaccgcagctccaacaaacggtccaacccagtaaatccattggtcgtcccaggctttgtcgttgttgaagatcacagctggtccgaaactccttgcagggttaatgccggttccagtgacagggattgtagccaagtgaaccatgaagacggcaaacccaatgggaagtggtgctaacacaggaacatgagagtccctagcgttcctcttaggatcagtggcggagaaaacggtgtagacaagaacaaaggtaccaatgatctcagcacccaaagcggtacctttgttgtagccatcgctgacagtgttaaccccacctccgtacctgttgtagaacgatttctggaaccctttggccaacccagcaccgcagattgcaccggcacactgtgctatcatgtacaacaacgccctcaccaaagacaccttgcgtccaggaacaacccgaatgtcaccgcagggttgatgtgtccccc

SEQ ID NO: 229047 - DNA, 541 bp, Glycine max
atagaaacttctgtgctatacatagcacatatatttgataacaatcatcattcaaaaaccacacatgtccgacagaagacgaaaaagtagacatcaaacacacgatatttcagacactctaataatcatcatctccttcaccatcatcatctccatcaccagactcggcaccaacctcctcataatccttctcaagagcagcaaggtcctcacgagcctctgagaactcaccctcttccataccttcacccacataccagtgcacgaaggccctcttcgcatacatgaggtcaaacttatgatcaatcctggagaacacttcagccacactagtggagttcgaaatcatgcacacagccctctgcaccttggcaaggtcacctccaggaacaacagtaggaggctgatagtttataccacacttgaacccagtggggcaccaatccacaaactggatggttctcttggtcttgatggtggccacagcagcattcacatccttgggcacgacatcgccccggtacatcaaacaacacgccat

SEQ ID NO: 229048 - DNA, 604 bp, Glycine max
  unsure (1)..(604): unsure at all n locations
aacaagcattaatagaatttttatttctcacacaataaatacaagagattctgcaaactgaaaaagggatttcttactaaagcaaactcaaacaagaacaacttccactcatttggcatctaccgtagtagaacaggatcaaaagcagctctctgatagaacacacgtatgtattatattgaacatcttgcacagtggttcatttctcacagctattgcaacttaaaatacttgcaaagcttctgcaaattccaaactttctttttctcccttctttatggatatgacaaagtgatcagatcatgaaacaataatcaatccattgaatttgaatctgatttttggtttggatcgatgccaccattcttcatcttaggaagggacaacaaataggccaaagcctactaattaagcgcttaaaactgcattagtggttggtttaagtgtgatgttagtaacatcagcttgattattaaagggtgttctttgtacgaagaagcatgccccaataacaatgtagcacagcaggagaacaagggccttcatgtagtgagaagtcccatcctgtaaagngaacctgtgactattattgcaacgcaaggga

SEQ ID NO: 229049 - DNA, 476 bp, Glycine max
aagaaaggtgaaccatccggaaaggaatatatttagaaaattgaccacgcggaagagatggtaaacatcatcgtcatcatacaaggaaaattttcgcaacagactcagcctaatcaagttgtcttaaaactacatgagacaaaatatactttgtttcaaggtgggggaggaaaaggtttcaaaaacaatggaattgacatgacagatgagttaaagactaacacaaaaacgagaaggcattggtaaagggacggcttttccttgttctgtcgttgtagaaaaatgatggacgatactctttttctatcaaatcctttagatcttgaagagtaggccaccatgtgtagcaaagaagggagcaaacacaagagactcaaccgccatgagcttaataaggatgttaagtgaaggtccagatgtatcctttagagggtctccaatggtgtcaccaataacagctgccttgtgacaatctg

SEQ ID NO: 229050 - DNA, 553 bp, Glycine max
  unsure (1)..(553): unsure at all n locations
gcaagccaaaccccaatccattgttccaaaacatagtgaaaagacaaatataagcattcaattaatgtattaagtattcacacaatgacactaacactaacacgaagagaaggccataaacccctaaaaggggagagcccatataacaagtgccaactgaattcagttaaatatacacaatatatatatatatatatatatatatatataatattccactgcatcagcgacgagaatcgagaaacaacgataatgatgatagtattattactgataaattaacctcgggccttgagttcagcaaggcggcgagacaagtcatcctcgtcgaccttgtcggcttccttggccggaacggcgtgagcggcgggctgggggaggccgacggagacctcgaggccgtagtcgtcggcgacctgctgcatgaggctgttgacctctccttcnggagtggagagggaggtnggatcccgccatggcgctctccatgaactcggcctggacctccatgttcacgaactgcttctcgaacgagtccatggtctccgacatc

SEQ ID NO: 229051 - DNA, 387 bp, Glycine max
  unsure (1)..(387): unsure at all n locations
tgaattatcgtacntcgatncncaaaancttaataatgggttagacgccgctactactcagcggccgccttccttccttttttttttaaacaacaaattttggtttatacccctgctttacctactatgggcattggtatgtttgccaaatctacaactcttttccaccaaaaaataccacacattacattcatgcccatatccactatcgaaattcatttatgcacgaatacacacaaaagacacaggccaatggactgtactttttacaaactcaagagccaccaattgcattgcctttgtcgtggttgcacttgtccgacacttgaacacaataagattcagacgggccattacgtgcatcttcgtgttgaaccatccttcccc

SEQ ID NO: 229052 - DNA, 492 bp, Glycine max
cacaccaaaggatctgattcattaaaagcaatagattcttcacaaccacacaccactcacttgacatatatggaacacatacataatccatatagcattacttagtggtggggcatttctttacttttatttaatgcacaaacataacaagggcaggaaggaaaaccacaaaattaaaacgaagatcatatagctgttaataataacaacaacacatgcaacataaaaaccacatgcagttgtggtagtggcatcttcttcagattggaaacgcctcaatgatggaagggagagcgtcgatcttgatgatgttgtaacgcgcgaaaccggtttccttgaacagccacttccagttctcttcggtcctctctttgccaccggcgttgtgagcgagaagcatcatgtcgaatgcgatgccaacgtctgtgaagagttcgttgccttcgggtcgaggaacgtgatccacgattatgacctttcctgtcttctctg

SEQ ID NO: 229053 - DNA, 450 bp, Glycine max
ggcgaatgtttctaggtgttttacatgtcatttcttacagcgccacaccaaggaacaaaatgtccacatgatataaaaaggtagaaaggtagttgagttttggcaacgtaaagaatatgtaaaataacatataatacattcagtggaacttgagactggtcaagatgttgttgtgcacggggtcagccaaatgatctaggaggttttggtatgggccaacacctgtgacaagagcttgaacaaagtaacccaagattgccaacatagccaaccttccattcttcacttccttgagcttcaaatccttcaaggactttttattcttaccaaagcctagtgggttgaagaaaggtcctcctggataagctggctcaccagaacctccaagacccttctttagtcctaggaagtattgtttgcccatagagcctggtttggcccaatcttgga

SEQ ID NO: 229054 - DNA, 477 bp, Glycine max
agcaaagctctcaatatttattattaaaaaaattagaaaactatataattacaaatattacaatggaagaagcaacgaggtcgaccctgagttagtaataataataaaatgaggtcagtgttacttcagtatacatatctgcataacctaactaagctgaaatgtcaagcgctcaggatttcttcacatcgcgtctcacaaggctgtttctggttctggctttaaaaagttatgatattccagctgagtcatctcccctccatgtactggatcaaattggcatctatagaagcttccatccataccaagaataatgactgtattcttttggagaccaaatgcaactgtgtaatgagagccctcttgtaagtgaaactgagcaactgaccactcagaattgaagtacttgggcaacacccctttcaatttaatgaaggagcgagaagagctagatggggtaatggcagcatctgaatt

SEQ ID NO: 229055 - DNA, 479 bp, Glycine max
ggcagtgggtttcacattaaaatcatatgaatggttaacagctcaagtttaaaactggtcaatgaagaaggggaaactcaccccataatgaggtttgatggacttacaacatcaatttccgcttaaattgacgaaataaaaaaaaaattttattgaaaagaaataagtaaaaaagaaatgtttttccccaccatcacaacatgcctccattttatatctcaaaatctgaagtcaggatccacatccattgcccagcagaatttcgccagcagagatttgttgaaaatcttttcaataggaacctcatgccttttgcaccaggcaactgtaatcctagggtcaaggtagtttatcttggatgtgcctaatgccacaggtttcagatcttcttttggcttcatatcacggtgcattttctcaatttttgcattggtttgagatatttttttttttagcattttgggactcaagttcttttt

SEQ ID NO: 229056 - DNA, 379 bp, Glycine max
tgaattacgagctcgatgcgaaacctaattatgttagacgcgctactagtcagtggccgcccttcgtccttttttttttaaaataaaatgttgctgttacacaaaaataactgtcggctgtggactaggcagtattgaaaccgcgacatcagggtactctacaaacatgccattttaaatattacaggaaccgtacccgaccttataaatttgtgaacaaatgacccaacgcgatcactgatattggcctgttacttttgacatatacttggcttttacatttgaaacatatgcttcctgcttggattagggcgccgcttgaacccaatatgtccaatgcctccaaaagggccatcaaacagaaaaaaattagcctgta

SEQ ID NO: 229057 - DNA, 483 bp, Glycine max
agcatccaaattcatatacttcatgattccaatatcctcctaaaacaggtggaccagtctatcatgagtctacatatcaattatattctttattcatatgaaaactacttctaaaatactactattgaaaccatatataccttataccgatgatatgagtcgtctgctacatctccattacttacattttttattttttctgcatgccataagtggaaattatacattaaaacgggcaatttacagtcaaaccctgttgatgatgaatctttcgatgctttcgttgaccagtagcatatgcattgattgttctgtgaaacaaatggacataactcccatctttcttagcacctggaagattttccggatgtgtgtagcaaattccttggtctccttccagtgttgggatgaactcattgataaacatgtagctgaagatagatagtgctttcactttctttgcaaatcctccatgtcaataag

SEQ ID NO: 229058 - DNA, 500 bp, Glycine max
caaatataatatactacatataattgaaacagacatcatcttggggaagaaacatacatacagctaatgagtttaaattttacaacatcatcatcatcacaagccttaatgggcatatactctggtttttatttttattttcccttgaaaacaaagattcatacacacatacatacataggttggtttgaatagctaaaagattactatcatacatgctttcacgattgagaaagttgcttaatcttttcctcgagctggaccttattggctcccacaagcctctcaacttcctttccttccttccaagccacgaacgtcggcatcgccctcaccccatactcctccgccacaccagataattcttccacgtcgatattgacgtagtcagcgtttggatactttgcggccatctcgtgaaacagtggagtgatgaatttgcaagggccacaccaagacgccgtgaaaaaaatcacaactggcttaggggagtctttgatc

SEQ ID NO: 229059 - DNA, 557 bp, Glycine max
aaataaatcgagattgaactcggaactttctttctttacagaaaaagaaaatgttaaaaaaaatacaaaaaaacaccaattaataccaaaaaagaaaagaaatcaacgaaggaacaacagctgttttagctggcctcctaagtaaagaattgtattcttctccttctcttcttttcttttctcttttctttttttctttttcttttcttccttccttttagccccaatttcccttcttcttctaatcttcttgaccaggttctttcttcttttttttccctgtctgttttaatctgtgacttaaaacctaccacactaaaaaaagaaaaaaccctttccgaaaaagaaaaaaaaaaggggggggaaacaaaataaaataaaattaatttacaggtttgccgtgattgtagccgtaataggaaaggtaccacttgacgaacttcttcaacccggtttgcaaatcggtggtgggcttgtacccgagttctctccgggccgaactaatattcgcgtgagtaaacggaacgtcgccgtttccaggcatgtccacaatattc

SEQ ID NO: 229060 - DNA, 503 bp, Glycine max
aaactgagcaatgaagatgagaccgctcaatctttcactaataactgcaagagtaaattaaaactctcgcaaaacattgatatcgttacaaccactgatccaagtgacccttattttagaatacagttacacgcacaagtgcacaacacaagaccataggtaaaaacataaatggcatgaacaatgagtcaaagcaatggcagaacaataatattaacgccaccaccacttgtaacagtgcactcagttcctctgcagtagcagagaaattagacatagcccctgctcttcaaactctccactgcatccttgatgatttgctcaacaggagtgaattctagacctaaatcaatcagcttctttgatgcatcctttccacttgctctcaacaaccctggttgggtatcctttggcaacttagccacatcgtattcagggtataactcagcaaccttgtccacaagatcactaaagtgacgaatagattccacacacaagtgcct

SEQ ID NO: 229061 - DNA, 505 bp, Glycine max
atgcaaaaatagttcattcttattctattctcttagtatatatgtgtataatacttataatggaccatcctctatacaaaagtaccagtaatacattatatataggttgttgaatatccaagcgccctccgctatatattcattttgttttgtctttcggactctcttcttaagtccatacttaatataactttcaaaccaaccgaaacctctaattatctattgtctctgtgagtgatattcttgttgcattatttgctattaatctccttttatgccggcaaagcctcgaaagtgtcattgaaggtgtcttgttctcgggcacattcagctcaagacggaacttgggaccatcatagtggtgaaggattggcctgaaggaatcttcctccagtggttcacaagttttcctagttatcactcgtacctgagcggggaaacgagattcaccagggcacttcttattctcccaagctgatggatcaatatttgtccctccaaactt

SEQ ID NO: 229062 - DNA, 548 bp, Glycine max
acggaggaacgtttttctgctattttctcatatccttccaacaccatttctttacatatatatatagctgttatagaggggacaagtcccgacaagcaaaaacggaaaagataaaagcaatccgaaatatcctaagagcaaatatgcctttattccactacctacgcatcttctagaagacacgatgctatcacacgggtttgcgcttttcctacgtacggtgcatgtatgcatgatgcatgatgccagccatgctatacgttccttcctcttgggcctttggtgcttacttcctgcagacccatcttactacgatttcttttccagcatactaggaacaggattatatatatagccgataaaaacaaagaagcaagattttccaagctacagattttcatctggaatgcgcaagaggataatggaagaataactaagcatgggatacatattggcgtccagaaactgagcatactgttgtatggcaatatctcttccaggaaggtcaggagtgaggaaatcatatggtgtaggcttgctggtgtcta

SEQ ID NO: 229063 - DNA, 311 bp, Glycine max
ctaacttattctattacaattgtaaaaaaaagaagaaatgaaagacgaaataaagaagaggagattaattacatattaattacatatatttaatacttaattggatctataatcttcttcacccttttccgtgtcaataactagattgaaaaaaaagggaatatcaatgcatctggaaaaaaacgattgatctttatcaagagacccgccaaagccccgaaccataagagactaactactggggccacggaaagatatgtttttagatctcgtattacaaatcccccttttaaagtcttttttttttcaaa

SEQ ID NO: 229064 - DNA, 486 bp, Glycine max
aataattaattaattggatatcccattatacagtatcctttccaaaatatcatgagacataaaaataaaaaacaaagaagcctggtctctgttcatacaacattatatcacagattgccaatcattttataaactagggcgattcttaatttagcacaaagaaatgacattcaaagcccacctccatgagaggaagaataccacccatcaaacctataatggatatcagggctcatctagctggtcctggacatcagaagtccaaagggtgaggttgtctcttaaaagctgcattatgagcgtgctgtctttgtaggattcttctcccaaggtgtccagctcagcaattgcttcctcaaaagcctgtttagccatggcacacgctttgtcagactggttgaggatttcatagtagaagacggagatgttgagagcgagacccaatctgatggggtgagtagggggaaagatccccagaagcaatgt

SEQ ID NO: 229065 - DNA, 472 bp, Glycine max
gtgataatatacatagcattatatatgagctaacgattagaggtcacttcaagcatacaataggatcaaattttcatggaagtctcgatactaatatatagctattcaaccaaaaagtataaaaaccagtacataattagataccacaaaacactaaacatcacaacttaacccacactcaatagtcttggaccaggaccaggaccagtaaagcaaactaagtcaagagtgaagctcccctagcgactagacctcaagatcataagagccataacagcctaaaatgtcatgaggctggtagcagatggaaagctcatctcaactcctgctcaagcacctacttagatctttgtctcatctttcggcgcttcctcttcaacctcctcatgcgcttcttcttccacttagctctcatcttgaacgactaaggctctcacgcttctctcaacgatggcaaatttctgaagaaaac

SEQ ID NO: 229066 - DNA, 584 bp, Glycine max
gaaaaatagagtattatagatatgaaaaacataattaaacattccaataataacacaaacaaaacctaaataactctatctaagatttatcatatcctaacacagcacgcgcagcgcgtatgaattggaacacagcaaaaatgagcacaacaatccccaccaaagtggaacttgctctccaagggtctctaaagtacaccaaccacaacgctgccatggtgcggttccagatgttctggtagtgcttgttgagttcatttatagtctcgtagtaacacgttgtgtttgccacaacgtgtttgcttagtccattaacgagaaccgccacttgcttatcactcccaagttcatgcacaatcactttcttctcaaccagcaactccacatcaagctgagtgtgtataagagagtcaatcagagaaacatagttgcaaatgtagggcttctcaggatagtgacactgctcaaaggcaatgaggttcctgaacacacattcggttgtgtggtccaccttcaactgggggatcctaaaacgtgccttgaagtggtttcagtatggcaagcaaccaaagcaaagaaaggaa

SEQ ID NO: 229067 - DNA, 540 bp, Glycine max
aataacaacatactagcatatcattaaggacttaatgaagaaattaagtaaactagttccacaagaatttctgtcttcatacaagacaaaagaaccaccaaatgtatgtaattcagtaaatattgtgctaccttgtactacttgatctaattggtattgttgcctttacacccatgagttacaagttctcaagtatgcataacaaacgatttcatagggaacaactactaccaatgctggaaactgaaaattcaagaatctgcaatggggaaaacagatccaattcgatcacccaatcgatagcacttgatattaaccccatatggaccaagctgaatgtggttatcctccctaccaacatagaaacacagggtatacaaagcaatttcaaattcagggctcactccaaccaaagtgctggatacagattttaggacaccattccattcaaactgaatagtcagaagctgagcttcagagtcaggagtttctccccgtcgacggggaaaaatatatccttgataatcaactctccccttt

SEQ ID NO: 229068 - DNA, 486 bp, Glycine max
aataatatataatctgccatatcgttattattattattattattatcattgctaagtagctacagaagataaaaaaaaactcaacgaaactacaatgagaaatggtttcatttcattattattcttcaaaatgggagactcttggaagtgagtgaagcaaaatgggtagatgtaacaaaatcgtgacgcaagttagccctcttgacaatcttgatcatattgctctgcaaactctgctgcactaactgcttcaccgctttcttttcctcactcatgatcccatcttcctccaccaagcaccctttcgacgaagaagaagaagatccacaaataggagcagagacacccaagttaaagtttccaccgtaacttccagaaacctgtttccctttgtctatcctcaaacactccaatattctggaggctctcttttgagccagcgtggttcccaccagcgttaactcaagcagcgacgacactatccct

SEQ ID NO: 229069 - DNA, 505 bp, Glycine max
attactattgcttcttatgaactagccttccaaaccatgatcaatatctctctcctagctatcctgagacagaaggattcacaggaaaattccttgctatttaatctctaaaagaaacatgcttgctcttttgcttctaccagtataccagccatcatagaatgagtcatctgaaaggttcaacaggtgcagattcttcaagaaagtgtgctgcttgaaaacattcggcagcttcaactaatgatgatgctgtaccctcagccttgtgaagaaggccaagattataccaagcagaagcgttgaatctgtcgtgccgtagcgcatccatcagaaagcttttaactgctggatttgatttattactgcatcgtttaagaactacagcagtggagattatgctaaggacatggccaggatcaatgtccaaggcatcaccaaaagcttttagagccctcttgtattgacactttgcttcgtacactatgcctattgcatgacatctgga

SEQ ID NO: 229070 - DNA, 508 bp, Glycine max
ctacagtatattagttaattacacctttagccttttttcactggttcataagacgtatccctcaaccaaaaaaatacaaaggttgtgggggaactcttctttggttgtcttttgtttttttttaatgaaaactaaaagcctaattataataacaatatcaatcaacatgctgcagaaggattggcgaaggggttgaagaagtgaggcttaggggccatggagaatgatgtcttgggggaaccgccggcaccgttgacggcgctgccgccgagcctctcgcaagaggggcacatggcgagtgttgccgcaggcataggcatgtacaacggctgagccagtttcagtgccttcagctcttgaagctccttctgtaaccgtctgttttcatctgttaatgtttcacaacatttctttaggaactcgcagtccacctctgtctgcttcagctttgttctggctctcctgttctggaaccacacctcaacttgtcgtggccttagatttaact

SEQ ID NO: 229071 - DNA, 508 bp, Glycine max
cctacattgcaccacctggccaatatttcatataggatactgtattggaacttgagtggcaaggtgtcaaaaagaaattcaccatgcttcagacttggcccgtacgtacaccaaggcctgttgcatcaaaacttgcagctgatactcctcttcttactggtcagcgtgttcttgatgcccttttcccctcagttcttggcgggacttgtgccatacctggagcttttggttgtggtaaaactgtcattagtcaggctctttctaagtattccaattctgatgccgttgattatgtcggctgcggggaacgtggaaatgaaatggcagaggttctaatggactttccccaacttacaatgacattacctgatggtcgtgaagaatctgtcatgaagtcgacaacactagtggctaacacttcatacatgccagtggctgctcgtgaagctttaatttatacaggaatcacattagctgagtatttcagagatatgggttataatgtcag

SEQ ID NO: 229072 - DNA, 576 bp, Glycine max
gaaagagcaagtctcgtttcttattctcaataaacaaactgaggatgactgaaacacatgattatagctacacatgagactagatcaaaagccaaaccagcaccaagaaaggaaataaatgtgatatgaatgaatcgaacagtcaaatatgagaacactcgggacgttgcaaccctgcgatgctagactgcgtcttacaattggaaataacacaatatttgagcaaactaccaaatcttcaatcatcaatcatcgggtttcgtcctcaaggttgcggaaaccattagtcaggtcctcatgtaacttctgaaatttcgcaaccaaagcagcttccccttctgctggatcctcaaatttctgagacactaatcggtagaacagatctcccatacgatgcttgataagggtgtaagatatcttctgaccatctgaaccagctcccctctctactgcctgatttgccaaattgtagaaatggataatgttgcgcatcatccaaacagacttgtagaaggggcagaatttgtcatatggtgtaaaggcattttgagcaagataatcctctctcaaaagctt

SEQ ID NO: 229073 - DNA, 423 bp, Glycine max
catcttcttaaaagttaaaaaggccattgtccttaatctcacagagacagatagaatgagtacggtgggagaagggaaggtgagtagtaatggtcatggatgttgcaaatcaaggccaggctatgcttccccactggaagccatttctggtcccagagagtctctcatttatgtaacctctgtgtacacagggaccggattagagaatccagactatttgtcgacagtggatgtggatccaaactctgcaacttatttcaaagtcatgcatatgcttactgttccttatttaggtgacgaattgcatcacacaggctggaattcatgcagctcttgccatggagacccctcagcagaccgacgatttttcatcgtacctgcactcgtatcaggtctagtatattgcgttgatgtgaaaacaaa

SEQ ID NO: 229074 - DNA, 559 bp, Glycine max
  unsure (1)..(559): unsure at all n locations
gttcacacacgtattaataagttgattgtaaccacaaaggtagaaatacaacactagacaaagaggtttctaagatgagcttaatatatttatgcaattgcaaactgtcttcaaaaagttgaagattcacaagagcattatttatagcatagtagctcattacaaccatatgacagatccgtttattaaagggaaataatgacacgtatgtttaaatccatatatctgaagtacagtcaccaccaggatatctcatctcatgggcaagagaaggaccatcaggctcagttccaaagtccacaaagaagttggggttgattttcagtccacctttctcagtatcaacatcaatctgtattatgtgggagcctttctggacaagctctggataaaattgtttgtcccaagtactaaatagtgagttggtagcatagagccgcttcccatctaaactcaattgaatcatctgagggcccnctctcaacttgtttccctgaatctctggaacttcagctggccatgtttcaccatcaatagntatagctactacagggctttc

SEQ ID NO: 229075 - DNA, 527 bp, Glycine max
  unsure (1)..(527): unsure at all n locations
ctcgagccgaatcggctcgaggttcatggtgattcctggccctgctgagaaacctatgattgtggtgaactacaagggggaggagaaacagttttccgcggaagagatatcctccatggttcttatgaagatgaaggagattgcggaggcgtatctaggttccaccataaagaatgcggttgtcactgtgcctgcttacttcaacgactcacaacgtcaagccaccaaggacgctggtgtcatttctgggctcaacgtgatgcgaattatcaacgagcctaccgcggctgccattgcttatgggctcgacaaaaaggccactagctctggggagaagaatgttctcatttttgatctcggtggtgggacttttgatgtctctcttctcaccatcgaggagggtattttcgaggtgaaggccactgctggtgatactcacttgngaggtgaagattttgataacagaatggtgaaccattttgttcaggaattcaagaggaagaacaagaaggatattagtggaaatg

SEQ ID NO: 229076 - DNA, 514 bp, Glycine max
gaccatatgagcaaaaacttatatcattgttcaagtagaaacggggaaaagtacattaaaaaaaaaagagaaaaataaaatcgcaataaaaacataatgacacgctgttatctaaacttcaaaagggtctttgacaaaatcaagaacaacccatgagaatcttctgcttaatcgacttcctcaattttgggtccagcaccgcttccactgccagctgcaggaccatcctcatccatggctccacccgcatcaccaccagcaccctggtacatctttgctatgatgggattacaaatgctctccaactccttcatcttatcctcaaattcgtcagcctcagcaagttggtttccatctagccattggatagcctgctcaatcgcatcttcaattttcttcttatcatcagaagacagtttggaagcaatcttgtcatccttgattgtgttcctcatgttataggcataattttccaatgcatttttggcctccactttttttttatgcttcctcg

SEQ ID NO: 229077 - DNA, 548 bp, Glycine max
  unsure (1)..(548): unsure at all n locations
cctcttttaacaatccacacccaaattttagggttccgaaatggacgctggcggaaagatcaagaggggcgccggaggtagaaagggcggcggcccaaagaagaagccggtttcaaggtccgtcaaagccggtctccaattccccgtcggaagaattggccgttatttgaagaaaggaaggtacgctcagcgtgtcggtaccggtgctcccgtatacttggctgcagttctcgaatacctagctgccgaggtgcttgagttggctgggaatgccgcacgtgacaacaagaagaacaggattattccaagacacgtgcttttggcagtgaggaacgatgaagagttggtgaaattgcttgctggagtgacaattgcacatggtggcgtgctttcaaacattaaccctgttttgttgcctaagaagaccgagagggcttccaaggaacctaaatctccattcaaggctaccaaatctcctaagaaagcttaagnggttttattgtattttatttgaatatgtaaatcagtctttagatgctttttatgtg

SEQ ID NO: 229078 - DNA, 356 bp, Glycine max
ggacccccaaaaaaaaataaagaagattttattaatgtagcaaactcctacatgcgagacgataggaattacagggtttgcaataaataattttttttttcacataaaaagcatctaaagactgatttacattttcaaataaaataaaataaaaacccttaagcttttttaggagatttggtagccttggatggagatttaggttccttggaagccctctcggtctttttaggcaacaaaacagggttaatgtttggaagcacgccaccatgtgcaattggcactccagcaagcaatttccccaactcctcatcgttcctcactgccaaaagcacgtgtcttggaataatcctgtt

SEQ ID NO: 229079 - DNA, 496 bp, Glycine max
aacgacgcgaaactctcggcgaagcttttcgatgtggttgctttcactcacgtgatgcgcctcgcggcgcaggctggggttcgctacgccatggagaatccccactcgtacgtacacagcaacatcgcgggcctcgtcacgcttctcgaggcctgcaaaaccgcgaaccctgagcccgctatcgtctgggcctcgtccagctccgtctacgggctcaacgagaaggttcccttttccgaatcggaccagaccgaccagcccgctagtctctacgccgcaacgaaaaaggccggtgaggaaatcactcacacctacaatcacatctacggtttatccatcaccggtttgagattcttcaccgtgtacggaccctgggggagacccgacatggcttatttgtgtgtcaccaggaacatcttacaagggaaacctattaccgtttaccgcggtaaaaaccatgtcgacctggctagggatttcacctacattgatgata

SEQ ID NO: 229080 - DNA, 513 bp, Glycine max
cccttcttcttcttgaccaggttctttcttcttctttttttctatctgtgacttaaaacctaccacactaaaaaagaaaaagaaaaaaaaaacccttcccgaataaaaaggaaacaaaacaaaatttattaatttacaggtttgccgtgattgtagccgtaataggaaagataccacttgacgaacttcttcaacccggtttgcaaatcggtcgtgggcttgtacccgagctctctccgggccgaactaatattcgcgtgagtaaaaggaacgtcaccgtttccaggcatgtccacaatattcctcttcgccttcaccttcaaatgccgctccaatatactcacaagagtaggaacagtaaccggcgaagtattccccaggttaaatattctatacggagcgggtccacgcttcttcccacccgacccggtactcttagccgaagtattcaacgacccgacgcaacccttacaatatcatcaatgtaggtgaaatccctagccaggtcgacat

SEQ ID NO: 229081 - DNA, 474 bp, Glycine max
acagtcagtcccgagttgactcggttgttggccgtggtgagtcgcgattttattgactcggccatgctttgactcagtggttttaactcgaaccccgccatgctcatacgcgcgcgccattttccaaacacttcacaccgttccacgcgatctcttccttcgcacgccaccgagttatgcaattttcgactcagtccctcctcgagtctgactcggtctaggttgttattggtattttctctccctgcagtggtggcctcaatggactccaacaacgcgctgtaatacgacagcgtctccgccacgcgcgccaaaaacggcgccgtgtttgcgtttatctcctgctccacaattgtcaccacgcgcggcgccagacgctttacgcgccgcaggagctcgtcccgaggattctccgtggagacgctctcgtcgggaatcttgttcaggttgaacgcgaagttcaccatgagaacc

SEQ ID NO: 229082 - DNA, 469 bp, Glycine max
tgctggaggagcctccagttgaatcttaggatgttaggagcaaacagagggctcaaatgctagaagacttggaaacagaagccttgatgcgtcaatggggtttgaatgagaatgcttttcatcattctccaccgaaagattttgctggttttggaagtccaattcatttaccacctgaagagcctaccacattgcctcctcttgatgatgggttgggcccttttcttcagacaaaagatgggggttttctacgcactatgagtccctcaattttcaagaattctaaaagttgtgggagcttaatcatgcacgtatccaaccctgttgtggtacccgcagaaatgggttctgggataatggaggttttgcagtgtttggcatcagtgggtattgaaaagctctcaatgcaggcaaaggagttaatgccgctggaagatatcacagggaagacaatgcaacatatagcatg

SEQ ID NO: 229083 - DNA, 473 bp, Glycine max
  unsure (1)..(473): unsure at all n locations
ctcacaccatcttcacctcattttcattattctctgtcactgtcatagggacatacatacattttgaccttcacacatcaaaccaacaagaactttctattccttaaaccatggtcgagcctgcagtagcagcaagctcagaattatcagactcaacacgaaacaccaacaccaacaccccttcaccctcttcctcatcgtcgttatctccgtcgccatcaccgtcatcatcaagctctaaaaagcgagcgagagacaacaacaatagtagaaacaacagcaacaagcattctgtgtatagaggtgtccgaatgcgcacgtggggcaaatgggtgtcggaaatccgcgagccgcgaaagaagaaccgaatctggctcggcaccttcgccaccgccgagatggcggcgcgtgcccacgacgtggcggcgctgacgataaaaggctcatccgccatccttaacttncncgaactc

SEQ ID NO: 229084 - DNA, 534 bp, Glycine max
  unsure (1)..(534): unsure at all n locations
cgagaaccaagacacccctgtccgatataatcaatcccaagaaccggagaatcatgggtgctggaggccctgatgacgaggacaataggtggccaccatggctgaaacctcttctcaaagagagcttctttgttcaatgcaagcttcacgctgattcgcacaagagcgagtgcaacatgtattgcttagattgtatgaacggtgctctctgctctctctgcctcgcttaccacaaagatcaccgtgctattcagataagaaggtcttcataccatgatgtgattagggttaatgagattcagaaggtgttggacatcacaggggtccaaacctacattatcaacagcgcaaggggttgttttcttgaatgagaggcctcagccaaggcctggtaaaggtgtcaccaacacttgtngaagtctgcgagcgcagccttcttgattctttccgattctgttctcttggttgcaagattgttgggacttcaggaacttccagaagaagaaanagtcagcggcatgggatcagacacag

SEQ ID NO: 229085 - DNA, 660 bp, Glycine max
  unsure (1)..(660): unsure at all n locations
gtgtccccgtgcgnnnnaacttttnngatttcgntgangcatacgacaaagcccggaattcggtcgagcaaaacttgccattttcacaagtatttttggtgtctttagagattcttcttcgggtgggtttgacagataggtcattttgtgccgtgcatggtgatggtcttctctgattgaaattccacacactgcctcctctctccaatttggtacaccggttagatggtatgcagcagttgtgtaaggtctttggttgttcaagctggaaccttcgtcaacagagtgagaatcaacgaatttgggaggagtttgctggcggttcatagtttttctcattggccgattcgtgaatacaagacaatcacagggatgatggttgatacgggttctatgtcaagcgctggaccccttgttgatatgatgccagagaaagatgatgatggtcgatttgctagtggagggtggaaaagtgaacatggaagacttagctgtggttattcaagttttaggggaaagagagtgacaatggaagatttttatgatattaagacattgaagattggtggccaatcaatatgctcatttggaatattngatggtcatggtggttctcgagctgctgagtatttaaaggagcatcttcttgataatctcttg

SEQ ID NO: 229086 - DNA, 467 bp, Glycine max
caaaaacttgattgggcagacctttactatattaccacccttccaaaacactctagagggccccacttatttccacaactccctcttcctttcagagacactctagaggcttactcacaggaaataaaagatctagccatagttattataggccttatgggaaaagctttgaagattcaagagagggaaataagagaattatttggagatggaatacaactaatgaggatgaactattaccctccatgccctgaaccagagaaggttatcggcctcactcctcattcagacggaatcggactcgctattcttctacaactcaatgaagttgaaggtcttcatataaggaaagatggctcgtgggttccggctaaacccttgattaatgctttcattgtcaatgcgtggtgacatattacagattataactaatgggatataccgaagcattgagcatcgggcaacag

SEQ ID NO: 229087 - DNA, 444 bp, Glycine max
aatcatgaatttattaaaaataaattttcaacaagttatacaaacttattagaaaaaagtttaaaaagagtttaggtgatccccaatttatttttacatatataggttcaaacagactctctaaactcttctacacactctaccaatgccctaacatatggaaataacaaccaagcaatggcacacgaggatacaattaacaaagtataatgacactaattttaatgcatggattgaagtgatcttgaacagtgatgctatattctcatgacttctatgtaggcctttccatcgagtttgcgagaaaataagcccttgaagtagtcctttactcctatgcttttgaatcgtggtggtgtttgttcagtgatcaagcttggtgcaggacctaccacaccatctgaacttggactatagaatgttgcaaatgaaagtctttctttt

SEQ ID NO: 229088 - DNA, 552 bp, Glycine max
aatcaccaaatcaatcacattaccacattcacgggcttgctcgaaacaatatccatagcacaggcttaaagcgtcttacaatattacagaaattgaaattaaaaaaggaaaccttaatatcttcctatgggagacaatcctgttcgagtagaatagattattttttcttgcctcctttggaaacacccttgcgccttgaggggataacaatctctcccttgagaacaggaatctccatgatctctttgagctccccgaacttcttgcggaacttctcgacctggtcgtcgctgaccatagacgccgaccggcttccgaggtagaaggggtggttccccgaccacacgtccaccacgtattccttctgggtcccacctgtcgtcagcaccagctccccgttgcagtacaccttcgattcctcgtagaattgcgggtgtatcttcttcttcttgcaccacacaccgcactgaaccgctctccgaacatttttagtgggagctgctgcaactggaagaaagggttttccttgcacgaatgtgttggtcacacact

SEQ ID NO: 229089 - DNA, 294 bp, Glycine max
aaatgacaaatgaatttcatgtacaaataaatgtctttatatattataatacacataaatccgcagtcaaaccaataactgacttttgacagaaattaacagaaaaaagttacaaaacaacccaatttgtaagaactgtagctatagctataaagaggacgatagctcatgcccttttgtttaattgtcattgcatttccatttagaagttggaacacatgttagatagtgacaccaatggcagtgatcatatccattctcaccccggataacatcactagagcaatagatacc

SEQ ID NO: 229090 - DNA, 434 bp, Glycine max
gcaaagattaaaataaaacaaccatatatgaaggggtcaatgggcaacaaagacaacaacagatcacagattgtatctaaaagcaagcattgtctagcaatccaacatggttaaagctctaaaaacagaccaactaaaacagttaaagaaagcattgtctagcaagcaagccatttacacactaccacctgagttctaaaactgttaaaacaaatcctcgtactagcctactgctgtgatcaattcacaataaccacaaacttagttttcagtaaagggcaacatgaattcagaaggccaaagagagctcaatccttggcggttctgttgatcaaggacttgtgaatgtgaggaatgacaccaccaccagcaatggtccctttgataagagtgtccagctccttatcttccctgataggcagctgcaaatgcct

SEQ ID NO: 229091 - DNA, 629 bp, Glycine max
  unsure (1)..(629): unsure at all n locations
ccaaaccaaaaccatcactgcacctttttcttcttcttcttcttcttccagtgcccgcatcatcaagagaacaacaatggaccccaacgagctgaagcgcgtgttccagatgttcgaccgcaacggcgacggaagaataacgaagaaggagctgaacgactcgctggagaatcttggcatcttcattcctgacaaggagctcggccaaatgatcgagaggattgacgtcaacggcgatggctgcgtcgacatcgacgagttcggggagctctaccagaccatcatggacgagcgcgacgaggaggaggacatgagggaggccttcaacgtcttcgaccagaacgccgacggcttcatcaccgtcgacgagttgaggaccgtcctgtcctccctcggcttgaagcagggcagaacccgtcaagactgcaagaacatgatatccaagttgatgttgatggagacggcatggtcgatttcaggagttcagcaaatgatgaagggggtggcttcagtgctctcattaaattcattttttcacaccattaatctatctattccatacatcnttgctttgttggtcttgatatagtttcagagaaataatacatgatcgatcacaagggtaatgg

SEQ ID NO: 229092 - DNA, 616 bp, Glycine max
  unsure (1)..(616): unsure at all n locations
caaattgagtgatcgtgatggcaccatttgcagagaagaagccagcggagaagaagcccgcggaggagaagaagtcgacggtgggagacaaggctccggcggagaagaagccaaaggccggaaagaagcttccgaaggagggaggcgccggcggagaagggaagaagaagaagagaaacaagaagagcgtggagacatacaagatctacatcttcaaggttctgaagcaggtccaccctgacattggtatctcaagcaaggccatgggaatcatgaacagcttcatcaacgacatcttcgagaagcttgcccaggaatcttctagacttgcccgttacaacaagaagcccaccatcacttcaagggaaattcagaccgcggtcaggcttgtgctgcccggtgaattggccaagcacgccgtctctgagggtaccaaggctgtcaccaagttcactagctcttgaactgactattatgccccttcgcttcgactangtgtctctgtaggaatatgttttatgttgaagtgttggtttattntttctttntggtgaaaagcaattgtnagtgaagaatatgggatttgtgatccttctttgtatgggatagtgctata

SEQ ID NO: 229093 - DNA, 375 bp, Glycine max
aggaataatatacgtctctgtattagcaactaattccatacaaagaaggatcaacaaatcccatattcttcacttacaaattgctttcaccaaaaagaaaaaataaaccaacacttcaacataaaacatattcctaacagagacacctagatcgaagcgaaggggcataatagtcagttcaagagctagtgaacttggtgacagccttggtaccctcagagacggcgtgcttggccaattcaccgggcagcacaagcctgaccgcggtctgaatttcccttgaagtgatggtgggcttcttgttgtaacgggcaagtctagaagattcctgggcaagcttctcgaaaatgtcgttgatgaagctgttcatgattc

SEQ ID NO: 229094 - DNA, 655 bp, Glycine max
  unsure (1)..(655): unsure at all n locations
cttagctttcctttcctgttcatacttgtttcttcaatttcatttcttttattactttgtcctctttgcattccaaatggccactgttgaggttgcacaacaaacaccaacaactgtgacagaaaatgaagcaaccgaggtaaccaagattgaggaaactaccccagaacaaccagctacccaggttactaccaccgaagaaccaaaggaagaaaccaccaaagaagcaaaagaggaagaagaagccccagttgagactaatgaggcaacagaagtgacagaggaagtgaagcctgaggtagaagagaacccagcacctgagagaacagaagaagaagaagtgaaagaggaaactaaagaaaccgaatcagcaccagtggaggaacagaagcaagaggagaacaaaccagctgaaaccgttgaggaaaccaaaacagaacaagtttctgttgagaagactgaagcttaagcccatggatacggtattattgaagtagatgaagnttcttgcatttntattttaattaatattaatgttattattggaatggtaaagtcttgggtatggctttacganatatatatatatatatatatatatatatatatatatatataagccctgctgattnngctcatgtcagcatgcatgcat

SEQ ID NO: 229095 - DNA, 570 bp, Glycine max
gcaggcgagttgagagagaatgggattgaagattgggtatgttgagttcgaggagtcgccgccggacgatttcgatccggcgcatccgtacaaggacccggtggcgatgctggagatgagggagcacatcgtgagggagaagtggatccaaatcgagaaggccaagatcattagggagaagctccgatggtgctaccgcatcgaaggcgtcaaccacctccagaagtgccgccacctcgtcaaccagtatctcgagtccacccgcggcatcggttggggcaaggacggtcgtcatccttctctccacgctcccaaggttgagcctgttgaatctgattgactgtcctgtggataaataaataaaaaagaagggaagactgtttatccaactgatcatattgctaaatcggaactgggttggaggagtgcttatttgcaggattgtgtcatgttgttttatttagttgaacttttgcaactcaactgtatttgcttagcctcgctattatccttggctattagtcttattttgctcgtaccattaaatgtaacaagttgaaatgcttgagt

SEQ ID NO: 229096 - DNA, 547 bp, Glycine max
  unsure (1)..(547): unsure at all n locations
attgttgaacaagggtttctctgtctgtttctttactttctctcgtttcaatcgaaaccaaaacaaaaacatgggcagaaaattcttcgtcggtggcaactggaaatgcaatgggaccactgaggaggtaaagaagattgttactactttgaatgaggctaaagtccctggagaagatgtcgtagaagttgttgtgagccctccttttgtgttccttcctgttgtaaaaagtttgctgcgccctgatttccatgtttcggcacaaaactgttgggttcgcaaaggtggtgcttataccggtgaggttagtgctgaaatgcttgttaatttgggaattccttgggttattattggtcactctgaacggaggcagcttttaaatgaatcaaacgagtttgtgggagataaagttgcctatgcacttcaacaaggtctaaaagttattgcatgcattgnggagactctcgacagcgtgagctggtacaacaacggctgtgtttctgagcaaacaaaagcaatgcagctaaatatcaaatgggacaatgtg

SEQ ID NO: 229097 - DNA, 527 bp, Glycine max
caaaggaaagcgtgtttattcagtactaaacagagttcaaaacattggccacaaagcacagatccaaaactcaaaaacagcaatttccgaagcagcttgaaaggcagcattatatcagttcctaactacgaatttcaattcttcttcacagtggcagcatttatgatgtccacgaactccggcttcagggaggcaccaccaaccaaaaatccatcaacatcgggctgtgcggccaattctttgcagtttcctccatttacagaacctccatagataattcttacagatgcagcaacttcggcactcacattgtcatgaacccatttcctcaaatcagcatggacctcttgagcctgagcaggagtagcaacctttcctgttccaatggcccaaactggctcgtaggccaaaacaacattgtcccaatttgatatttaactgcattggttttgtttgcttagaaacaacagccgttgttgtaccagcttcacgctgttcgagagtctccccaatgcatgcaataactt

SEQ ID NO: 229098 - DNA, 592 bp, Glycine max
  unsure (1)..(592): unsure at all n locations
aagaatactcataataatatagtggcttgcatatagctagtaataatattaatattgtgaagctagctctaagccatggctaatgaacgtgatctgttctcggcggagattgtgaaccgtggaattgaatcgtcaggaccaaacgctgggtcgttgacgttttcggtgagggtgagaaggcgcttaccggattttcttcaatcggtgaaccttaagtacgtgaaattgggttaccattatctgataaaccatggcatatacttgttcaccataccggttcttctcgtggtgtttagtgctgaggttggaagcctcagcaaagaggacctatggaagaagctttgggaagacgcgcgttacgaccttgctacggttcttgcttcctttggggtcttcgttttcaccttgtctgtctacttcatgtcgaggccacgtcccatttacctcattgattntgcatgttataaacccgatgatgaactcaaggtgtcaagggagcagttgatggaggtagcaagaaaatcaggcaagtcgacaagcgagtctggagttcagaagagatgctgtgtcnctcgaatcgcgacagactaca

SEQ ID NO: 229099 - DNA, 446 bp, Glycine max
ataggtaatagccatccatgaactttgatatcaatcatcctatgaagaaacagagaaattaaacaaggaggcatccatatgcctaatgaggaattaaaagtatagaatttcaagccaggaataattaaatgagaaagaaacagaaaacagatgtaacatttttgaagaccaaattagtactacccttattgatcctaaccataccctcactgataataagattcataacactagtgccgtcaaattctgcttcagttgttgagaggtgcaggatatctgttgatgcaatcaagccaagggttcctagaaggcttggtgactcggcgcatggcgcgccaaaccacactgttgcacttgaagccagagccaaatgcgagttgccaaacacggtctcctcttctaacactctcttttgcttccatgtaagccaactcataccaaatgct

SEQ ID NO: 229100 - DNA, 469 bp, Glycine max
aaagagaacaataatgtagttaaattcatggggcaaattggaatattaatatatatatatatatatatatatatatatataacaccctgatgattctacaataaaaagtacaaattagctgggggctaccattttacttaagccacttcagcgttccctagaaattcaaaatactacaactttacgccccccaagtttaattatcaaacccacccaatcagaaaaagtaaaacccaacaatatctaagtcacaattaaaaagttgtcactcactatccagtcaaacgaccatgtttagtaataagtaaataaatggggggaaccaaaacaaaaaggatcatgataaaaaatatatataagtttgtcattgatgttgatgacatgggtgatgattatgattagggtttttttcagacccggaaattttttccggtgaaagtttgaccgaattgccaattgggtggagcga

SEQ ID NO: 229101 - DNA, 356 bp, Glycine max
aacaataatatagagatttctcgatacatatgactattaacatcaatgattcaatgttccaaggggaaaaatccttcaaatgtaaactttaaaaatacaaaaagaaaatgggggaaaaagagatcatcacaatcactcccttgctacaacacaacctactaagaagatatagatgaaccacggatggccaaacgcaagaaatgcctctctctaactgtctgccccccacacaaaatatgatgcatcaagctaaagaatagaccctcctttaatgatacttcctcacctcttatccatggcaatatcgttaacatgacatgacacagacccataaaaacaactggtgcgaaaaaata

SEQ ID NO: 229102 - DNA, 610 bp, Glycine max
  unsure (1)..(610): unsure at all n locations
ggctatgacaccagaattcaagaatttctcaaattcaagtacttagcaactgctcagcggttgcacagagtttgttagaaaaaggctacgaacttgtatctggtggaactgacaaccatttagtgttggtgaacttaagaaacaagggtattgatggttctagggttgagaaggtactggaagcagttcatatagctgccaataaaaataccgttccaggggatgtgtctgctatggttcctggaggcattcgaatgggaacccctgctctcacatctaggggatttgttgaggaagattttgaaaaagtagctgaatactttgatgcggctgtcaagttagccttgcagattaaggaaaataccaatggttgatcctaccttaccttcgtacatctgaattgttatatttgcagttttaaaagcatagccagtgtcttaacgttacgtaaatcacttttcttcttgatggttacatcaacttcaggtacaaagttgaaagattttgtggcagctatgcaatcagatgaacaaattcaatctaagaatgctaatctctgtcatgaagttgaggattatgcntagaagtttcccactattggttttaacat

SEQ ID NO: 229103 - DNA, 528 bp, Glycine max
aaattgaggaggaattaaggtaatttatttcaaatactagtacaaattcaccaaatagcaaaatccacatgctcgacctcctttttgctacatcagcagtacgatcacaaggaattttcaccatgaaatcaataatatatttgaaaagctgaagggaaatttctcccttttctctttcatttaaaccattgataatatcattctcattttcatccaagactccggtactatccattgagcaacgtgttgttattaattccaaaagcttccaaataatactccagaagaagttccatctgtcgcctttcacttaccatacttcattgtttctatgttaaaaccaatagtgggaaacttcttagcataatcctcaacttcatgacagagattagcaatcttagattgaatttgttcatctgattgcatagctgccacaaaatctttcaactgtgtacctgaaagtgatgtaaccatcaagaagaaaagtgatttacgtaacgttaagacactggctatgcttttaaaact

SEQ ID NO: 229104 - DNA, 496 bp, Glycine max
gggagaattatagcatacaaaatcatttaatagaaggccttacaatttacactaagaatttcctctaattatacaaaactcacctttcaatccccactacataggaacagcctcaataagcctagcaaagtaaaattgagtagtggttaagcctctcttccttatggtccagccaaccttttgcaatgctctctctacatctgcctcggagtgaagatatgcccttgttgcctttgaaggaccagggaacaactctccaaccctctttagcagatcataataaaacgtctttggggcaaaactcaaaatcaatcgcttgttggccaatgatgcaaggtgtgcaatcatcccatcagctttactttgggggtaatgaattaaaacatcaagggagaccaccgtgtcatacttgccatctaagctcttcaaatccttcactacaaacttttggcatcacaggcgccggaaccatctttactggttacaagctgttctt

SEQ ID NO: 229105 - DNA, 567 bp, Glycine max
  unsure (1)..(567): unsure at all n locations
tatgattactgggacatcccaagctttctgtgctgttcttatcattgattcgaccactggtggttttgaagctggtatttccaaggatggacagactcgtgaacatgctctgctttcattcacccttggtgtgaaacagatgatttgctgctgtaacaaaatggatgctactacacccaagtattccaaggccaggtatgatgaaattgtgaaggaagtctcttcctacttgaagaaagtaggatacaaccctgacaagattccttttgttcctatctctggttttgagggagacaacatgattgagaggtccacaaaccttgactggtacaagggtccaactctgcttgatgcacttgaccagattagtgagcccaagaggccctctgacaagcccctcaggcttccccttagngatgtgtacaagattggaggtattggaactgtgccagtgtgacgtgttgagaccggtgtcttgaagcctggaatggtggtgacttttgcaccaactggactgacaactgaagtcaagtctgtggagatgcaccatgaatctcttacagaggc

SEQ ID NO: 229106 - DNA, 535 bp, Glycine max
aaagaaaaagcaaaccaagccaaaaattgaacactacaaatagaaagttgacatttaataaaccaaagcaacacaacgcagcaaagtcctgaaactcgctgcgcttaacaaaaatgtaatcaggggttccgacaaacacaacacattaaaaccacagataaataaaagcatttttgccaccgtcgatcaagaacccagttctgggaacaacagttgcgagatgatggtggagacttcaaactttgtccgaaaaacaagctacctagaaaagaagacacaagagtacagaaaagaaaccaacatttattgtaaccaacatcccctgatgaaccagcccgcacgattcacttcttcttctgggcagccttggtgaccttggctccggtaggatccttcttctcaacgttcttgatgactcccacagcaacagtttgacgcatgtccctaacagcaaacctaccaagtggaggatactcggagaaagtttcaacaaccatgggtttggttggaatcatcttaacaaaaccagcatcac

SEQ ID NO: 229107 - DNA, 504 bp, Glycine max
caaaaattgggaaagggaatattacctttcagactttttcttatcacgagctatgtgttgcaactcggaactttcaccctgacaatatgattggcgaaggaggctttggaagggtgtacaaaggacgcctcaaaagcataaatcaggttgttgctgtgaagaaacttaatagaaatggattccaaggaaacagggaatttcttgtagaggttttgattttgagtctcttgcaccaccctaaccttgtcaatttggtagggtattgcgcagatggtgatcaaaggattttggtatacgagtacatggtgaatggctctttagaagatcaccttcttgaactatctccggacagaaagcctttggattggcgtactagaatgaacattgcagcccggtgcagctaaaggacttgaatatttacatgaagtagcaaatccgcctgtgactataccgtgatttcaaagcatcaaacatactattagatgaaaacttcaaccctaagct

SEQ ID NO: 229108 - DNA, 540 bp, Glycine max
ggcatcattaagaaattttatagaatgattctcaaacttcattagcagctgctttttcattcattgtccttttgtgtaatcctctactgttttcaggttcgttttgttaactacattccccatgctcgaaaaaagtctcttttgaacggtgttgtcttcccacttgtatatgcctctttgctaaaacatcaagagctgtaactacgtcactaatcaaaggtcgggtatcagcttcctcctgaatacacattgctgcaactgctagtgcttggtgtagaccctttgttgggtagttccctttcagcaatggatcaaccattgatgaaaatttccttctgtctttgaatagtggttgtgcccaagtgaccaagttttgctcttcagatggtcttgactgatcaattgctcttcttcctgtgatcatctctagaaacactactccaaagctatatatatctgattttgtagtcaattgacctgttgaggcatactcaggtgcacagtagccataagtttccattaccctgggggatacatgag

SEQ ID NO: 229109 - DNA, 553 bp, Glycine max
  unsure (1)..(553): unsure at all n locations
ctcaattcccctctccattttgcagcttccaaatgccacaacgagattgtggcattgttgctggagaatggagctgatgtgaattccagaaattattgtggccagaccgcattgatgcaagcttgtagatatgggcattgggaggttgcacagacacttttactcttcagatgcaatgttataagagctgattatcttagtgggaggacagctcttcactttgcagctgtgcatgggcatgtaagatgtattagacttgttgtggctgactttgtaccaagtgcaccttatcaagctatacatgctggcacagctgttgacaggggtggtggatcaaatgtgaaaggcaaacatgagcatagtgccctttccaagtttgtaaataagactgctgatggaggaatcactgcccttcatatggcttgcgttaatgggtactntgatatgtgtacaactgctgcttgatcttaatgcacatgtgaatgctgtgacatataattatggcacatcaatggatttaataggggctggaagtactccattgcattatgct

SEQ ID NO: 229110 - DNA, 479 bp, Glycine max
ttttttttttttttttttttttttttttttttttttttttttttttttttttttttttttttttttttttttttttttccccaaaaaaaacgggtttttaaaccggccccaccaggttccaccccccaaattggggcttgggaaccctaaaaaattttggccaggcttaataaccgggggccccaaacttaaaccagggaaaaaaaggcctcccttttttttttcccctaaaaaaaaaccctttccgggaaaaaaggaatcccctttccaaaaaatcccaaaaaaattctcccgaaccggaaattaattcccccccccccccttaattttaaaaaaagggccttttccgggggggggttgggtttctaaacccccaaaatggggtttttacccccccaaacacccggggcccccaaaaggatctggaaaacatttttttttttttaaagagaccccgattttacttattgggggctggt

SEQ ID NO: 229111 - DNA, 505 bp, Glycine max
gattaaactgagcaatgaagatgagaccgctcaatctttcactaataactgcaagagtaaattaaaactctcgcaaaacattgatatcgttacaaccactgatccaagtgacccttattttagaatacagttacacgcacaagtgcacaacacaagaaccctgggtaaaaccataatgggatgaacaatggggcaaagccatgggagaacaattaatattaacgccaccaccacttgtaacagtgcactcagttcctctgcagtagcagagaaattagacatagcccctgctcttcaaactctccactgcatccttgatgatttgctcaacaggagtgaattctagacctaaatcaatcagcttctttgatgcatcctttccacttgctctcaacaaccctggttgggtatcctttggcaacttagccacatcgtattcagggtataactcagcaaccttgtccacaagatcactaaagtgacgaatagattccacacacaagtg

SEQ ID NO: 229112 - DNA, 425 bp, Glycine max
gggaacccagattactgataaattcaatccatataaataaaagggccgctggggaaatctcaaatacatatttttttcacataaacaatcactaacagactactggtttttaaatgctgctcaagaaaaacttttattcaacgaaaagggatccataatggaggggtaaacttccttacgttttccatgttaatcatatggaattgggatatatgctgcatcacagatgaaaggaatgtcagcttacataccaacaagagcgccccttatgctctccaagacagtaaagagataaccaattgattcggcagtccaaaaatgctttcccagtttaccccagttgagggataggggcattcaacgggtcacagtccctataacctgcagggaaatctccaataacattcccatcacaacatgaaatt

SEQ ID NO: 229113 - DNA, 463 bp, Glycine max
gtgtagcacaccatgtgtcatttatgctaccctatggtttgtttgatattggtgctgggtcactggctaattcattgactctcttcccatacattgatgaaatatctgagaagctggactatataggcataaactactatgggcaggaagtggtttcaggtgcaggcctgaagctggtggaaaatgatgagtacagtgaatctggtcgtggggtataccctgatggcttataccgcatgctgcttcaataccatgaaagatacaaacatctaaatattcccttcatcattactgaaaatggggtttcagatgagacagatttgattcgccggccatatctcttggagcatttgcttgctatttatgctgccatgacatggggtgtgcgtgtacttggttacctgttctggactatttctgataactgggagtgggctgatggatatggtccccagtttggact

SEQ ID NO: 229114 - DNA, 444 bp, Glycine max
agttaaaagaagagcatcactgaacttacaaagcaaccctatgtcgaaggtgggttgggtcaccggagccagcggcgccatcggatcatgggtggtcctactcctcctccagcgtggttacaccgtccatgccaccgtccaagatatcaaggatgaaaatgagacgaaacatttggaggaaatggaaggagcaaagagtcatctccatttttttgaaatggatcttcttgacatcgactccattgccgctgccataaagggttgttccggcgtaatccaccttgcatgtcctaacatcattggtcaagtcgaagatcccgagaaacagatattggaaccggcgataaaaggaacggttaatgtgttgaaggcggcgaaggaagcatgggtggagcgcgtggtggcgacttcatcgatttcgtcgattatgccaagtcctaattg

SEQ ID NO: 229115 - DNA, 525 bp, Glycine max
gataggaaaatgaatacttgaattatttccaccgactgaatatccaaaagtgacatagctcagaacgtaacaaataatgtgaaacatgaaaaagaagcttttatggccaacacgaataaaaacatcatcatgaatagtattttacaatgatacatgcttatttggttgagggcatgcaagcaaaacacaatatgaggaggcaagagaaaatttgattactctcccaagaaatgcacttgatcatggtgttggtgtctgcacattagagtcagattcatgagaggattgcctgtggtggttcttcaactcaggatgcttaatctcctccaacattctaacaacttcatccattctaggcctattatcagaccccttagccacacatgccagtgcaatctgaagcatctgcaccatctcctcttcaacatattgccctctcagaagctcctcatcaaacacttcagcagtccactcctctctcacaacagaccttacccaccttggaagatcaaccacatcttcata

SEQ ID NO: 229116 - DNA, 505 bp, Glycine max
ggaagcattacgtggaggcttttagatacgagcttggaacattaatgaagaccttaagcttggcaaccaagtctttgaaaaattggatggcggggaaagaggcaaagctgccacgaatagcactgctctcaagtgcagaaatagttcctgagccacttggtcttgttctcataatctcatcatggaactttccctttggactttccttggagccactgatcggagcagtagctgctgggaacagtgtggttctaaagccttcagagttgtcccctacttgctcttctcttttagccactttcctcccaacttacttggacaataatgccattaaggtcatccaaggtggaccagaagtggggaagctactcttgcagcaaagatgggacaagattttcttcacaggaagtgcaagggtggggcggattgttatgtctgcagcagctgtgcatctgacgcctgtgactttggagttaggtgggaaatgtccagcactaattgactc

SEQ ID NO: 229117 - DNA, 463 bp, Glycine max
  unsure (1)..(463): unsure at all n locations
acccaagtctaactaggcatataacacatacagaatcaaatagaacacacttatttaagcatcataaacctagaaattaacactagcttggaatcaccaatccttattaggggctcacttgaaatagataagtgaaggaacataatgcacatcagttacaagcctgaaatagtgaccgttttgatttctttaagccgagcagaactagaagtattccaaggtagtctaaattgtaagacacctcaagtagttggagcttatcaagagtccatggagggaacctaaaccaaaaatcagtcaagtaacttcttctagccacagccttatggtgactgaacgcatcaaaggagaactttccatggtacttgccaaacccacattcaccaactcctccaaatggtagggtatccgctacgtactacacanagatatagactagttaccattcaatcacaagcagctt

SEQ ID NO: 229118 - DNA, 548 bp, Glycine max
  unsure (1)..(548): unsure at all n locations
cttgcatgaattcaagctattacgtttttgcaagtactcttcgtgttatgggggaccgagttctgctatggcaataagatttgtgatgaaattgagcttaataaagcccagtggagcgcactttttcagccttatattttttttgaggcatacaaaaactatttacaagtggacataattgcatcagacacggatgatttactagcatggaggggatgggtagaatctcggttgagaatgcttaccctgaagatagagcgagatacaaatgggatgctgcagtgccatccttacccacatgagtatgttgacacattcaagccatgtgcacattctgcatttttcatgggcttgcagaggaaagagggagtaagaggtcaagaggggcagcaatttgatatacgtggaacagttgatgaattcagacaagaaataaatatgtacatgtactggaagccagggaatggatattttgtttctcatgttcgtcgagagcaactccctgcattngtttttactgatggttacaaacgcactctaatgccaag

SEQ ID NO: 229119 - DNA, 429 bp, Glycine max
caaagaaagattcttttcggggggtgattctttttatagagatatgagaaaactgttattacaaacaaagaaaaacataaatatttccaggatattcattcctcaagcaatcgaattacttggtactttgtgctaactttacttatgaaatctctttctgcagattcttccactgtttcttttctcaaaataaagaaccaaaaaaatcagagaataataaaagcctcattgttaaaatgctcatatatataatcagaaggctgcccatcctgaagctgtggtcgatccagaggtggttgttgtgggaagatttttctgtagttgagaaaaatctgataaagcgttggtagaatgtttcacactttcgtatgtccctttaggaccagtagcacgactggtggaagcagtccgagcagcaactggatcatt

SEQ ID NO: 229120 - DNA, 567 bp, Glycine max
  unsure (1)..(567): unsure at all n locations
actctctctcaccaaagccttcctatatcgaaaaaaaaaagaagagcaattgtccctggccaaagaagaagaagcaaacaatggccgatcaacttaccgatgaacagatctccgagttcaaggaagccttcagcttgttcgacaaggacggcgatggttgcatcacaaccaaggagcttggaactgttatgcgttcattggggcaaaacccaactgaggcagagctccaggacatgatcaatgaagtggatgctgatgggaatggtaccattgacttccctgagttcctaaatctcatggccaggaagatgaaggacactgattctgaggaggagctgaaagaggcattccgggttttcgacaaggaccagaatgggttcatctctgctgctgagctccgccatgtgatgaccaacctcagggagaagctcaccgatgaagaggttgatgagatgattcgcgaggccgatgttgatggcgatggccaaataaactacgaggagnttcgctaaggtgatgatggccaagtgatcatcacattatgggcacacaaacctaaatgaagaa

SEQ ID NO: 229121 - DNA, 475 bp, Glycine max
ggcagaaagtgaagagacattaacattacaaccctttttttggataaaattacaagacaaactaagaaggttcagttccactacagcctagtagcaggacttgccactaattgacattttaaggttggattcaaaaaccatcaaataaaaatgtaggaagaagaaaggtcaaggactactacatcactgttataccacccaaacccttggccttcctcctacccctttttttgtcgtttccttttaatcaacatttcttcatttaggtttttgtggccataatgtgatgatcacttggccatcatcaccttaacgaactcctcgtagtttatttggccatcgccatcaacatcggcctcgcgaatcatctcatcaacctcttcatcggtgagcttctccccgaggttggtcatcacatggcggagctcagcagcagagatgaacccattctggtccttgtcgaaaacccggaatg

SEQ ID NO: 229122 - DNA, 552 bp, Glycine max
cttcggttacgatatcggaatttcatgtggggtgacatccatggatccgtttctgctgaagtttttcccgtcggtgttccggaagaagaattccgacaaaacggtgaaccagtactgtcaatacgacagccagacactgacgatgttcacgtcgtcgctgtatctcgccgcgttgctgtcgtcgttggttgcctccaccgtcacacgtaggttcggccgaaaactctccatgcttttcggaggcttgcttttcctcgtcggtgcccttatcaacggttttgcccaacacgtgtggatgctcatcgtgggtcggatcttgctcgggttcggtatcgggtttgccaatcagtctgtgccactctacctatctgaaatggctccatacaaatatagaggagcattgaacattggctttcaattgtcaatcacagttggtatcctcgtggcaatgtgttgaactacttctttgctaaaatcatggtggctggagatggagattgagtttgtgaggtgctatggtccctgcccttataatcacaataggatcactag

SEQ ID NO: 229123 - DNA, 530 bp, Glycine max
gagaaaataaccctttttaatttataggaacaattcaatacattgacaccaccaatagtatgatttaccaacaaaagctaaaacgctagtcattgagaaaaataaacaagtaactacacttctttgatagcagttcccctccccatctcaacaccattgccataatcatcattctccacgaatctggaccagaaggggtgtgccttccaaacctggttcatttcttcaatgggaatgcccttggtttcaggcaagaagaagtagatgaagaatgtcatgatcaacacgaaaaaggcaaagaagatgaacaagccgaacttcatgtggcaaagcattgtcaagaagacttgtgcaatcaagaaagtgaaaaacatgttcaccgacacatttatactttgagcagccgaacggatctccaagggaaagatctcactaggcaccaaccaacctaggggaccccatgaccaggcaaatgctgatacgtaaatgcaaatgaagagaaccacaacaactgcttaccattttggcaa

SEQ ID NO: 229124 - DNA, 375 bp, Glycine max
gaaaacaagaagattgctccagagctttacccctatggtagcagaggaccggttggagcacattacctttctgcaaagcacaatgtaagatggggagatcttggcgaagactaataaatggcagagctctcttgtgatcaagcacactcattatcagtttcttttccatcacattataggacagctccgtgcttgccttgccatctgttggaaggaggaaatttcgtatagaatgatagcatactttttaatgcactatagcctgtgctttccacactggtggcaagttgatttaaaataatgactattgcatagtatgatagaaactggaccagaattcagaaatggaagaaaggcaaaatttcttattgattg

SEQ ID NO: 229125 - DNA, 375 bp, Glycine max
caatcaataagaaattttgcctttcttccatttctgaattctggtccagtttctatcatactatgcaatagtcattattttaaatcaacttgccaccagtgtggaaagcacaggctatagtgcattaaaaagtatgctatcattctatacgaaatttcctccttccaacagatggcaaggcaagcacggagctgtcctataatgtgatggaaaagaaactgataatgagtgtgcttgatcacaagagagctctgccatttattagtcttcgccaagatctccccatcttacattgtgctttgcagaaaggtaatgtgctccaaccggtcctctgctaccataggggtagagctctggagcaatcttcttgttttc

SEQ ID NO: 229126 - DNA, 554 bp, Glycine max
  unsure (1)..(554): unsure at all n locations
caaatacaaacatggcaatgaagaatttcttgtgggttgttctgtccctttctttgggccttggagtggccaatagctttgattttcacgacaaggatttggagtccgaggaaagcctgtgggacttgtacgagagatggaggagtcaccacacggtttcgcgaagccttggtgacaagcacaagcggtttaacgtgttcaaagcgaatgtgatgcatgtccataacaccaacaaaatggataagccttacaagctgaaactaaacaagtttgctgacatgaccaaccatgaattcaggagtacctatgctggctcaaaggttaatcaccatagaatgttcagagacatgccacgtgggaacgggaccttcatgtatgagaaggttggtagtgttcctgcttcagtggattggaggaagaaaggtgctgtaactgatgtaaaagatcaaggccattgtggtagttgtgtggcgttttaactgttgtagctgntgaggcattaaccaaatcaagacgaatagctagtctccttgtctgaacaaagcttgtggact

SEQ ID NO: 229127 - DNA, 508 bp, Glycine max
gctagcactcaaatcatataaaatatttatttctttgggatgtaataagcataaatatattgatggatacactggcattgaatctgagatactaatagaaaacaacaaccaaagctaattagagtatgattttgtgggaagcattcaaacttcaaaagttaatttttaggagatgatgaaggtcctgttggattattggaggagtttttgattgggtaggaagccaacatagctatgccacaaagtccctcctttttagatatgttcctttgcattctgatgtaaccctgttctccccattctggtccccaagagttcctcactatccagtaactagtcccatcaacagttgctccataccccacaatcgccacaccatgatttagcttcgtgctacaatcaccagtaaatactccctcggagtagaactggaaatcagaatccccggcatcaatggctacagaaacaaggttggttggcaacagctttgagcaatgcattttcatcg

SEQ ID NO: 229128 - DNA, 537 bp, Glycine max
cgcagaactatccttctctttctcttttatccacgccccaaatcttaggggtgtcacgggataaaacaaccccaattcctcgaactcttcgattcgattacccaaccccacacgctgattccacatcctccatgagatttggttgattggatcgtacgatggcggcgccgaggaatgtgacggcgacgagggacgaagagaagggcgaggacgatgattcgccctccgcgaagaagcccaaatcggagaggttcccgctgaacacgtgggaattcgccgtcgccgtcgccgtcttcttggtgttctccaccggcctcttctgcatttacctcaccatgccctcggtcgcttacactaacctcaaactcccccgcaccctctccgatcttcgcctcctcaaggaacatctttcgacgtatgcgagtaaccaccctgcgcagttcattcttgggtactgctccacctacatcttcatgcaaactttcatgattcctgggacaatcttcatgtccctcttggctggggcgctttttggag

SEQ ID NO: 229129 - DNA, 554 bp, Glycine max
attaaaaggggttgttttagaagattacaatatacacgataaattgataatcatcatttattcttctctcataaaaacaaaaaatgctgacttaaatctattctttccttccagtttcttctctccttcagttattcatttcagcccattagtttgtatcttttctcttcgacacctgtaactcccaattgtatttctattatcgtatggaggggcatctcaatatctgcaatttctttcaaaggcctgtcagtaaaataagcatataatgccctcaaaactgcctggtgagatatcacaacaacaggtgctcgttgtcgctcaagttcaataattacaggttctaacctttgaataacatctaagtaagactctccacgaggataacgatacctaagtttgtccttattgcgggattcatactcctctggcatgttcttcttgatttcttcatacgtcatcccatcacacacaccagcatttatctcatcaagtgcgcgccattgtatctttggaaacccaacaattggacctgctgtcaaaattgttcgctg

SEQ ID NO: 229130 - DNA, 558 bp, Glycine max
  unsure (1)..(558): unsure at all n locations
agataaatagagtgtgtgaataatatttagtagttgtagctggggagagtggaacattgtcagcttcataataaagatgacaatgaagctggttttggtagttgttgttgaagttgcatgcttagtttctgggatcttgtcctttggatctgagacactctctgagctttctttcttagaaaatgatgtcgtctcaacaacaagaccttcctcttcatctcaacttcaacctcaacctcaacctcaacctcttatggtggacctcactctcattcatgaagctgattctaaaggagctgtctgtttggatggaacggtgcctggataccatttgnatcgtggatttggatctggtgcagatagttggcttattcatttggagggaggagggatggtgtaataccattcagaaactgtgtctatagaaaaaatacctcgtcgtggatcctcaaaatacatggaaaatcaaataccattcacgggaatattgagcaacaaacctgaagaaaaccctgatttctttaactggaatagagttaaattaccgtactgtgatgg

SEQ ID NO: 229131 - DNA, 521 bp, Glycine max
aaccaagaattgtccttccataataattaatgaatgttgattgttgaatactcattgcaattacaaggattaaagtgtaatgaggagacaacaaattttgttcacttaaagttaaacaccagattatggcagctgttgtcacatgggtaagcacagtcaatagctttgacaacttctcgatcaaaataccagtctccaacagcaactgcaattggcttgtcctcgataaggggagagtcatcagcaaaccatgtctcctgtctctcagactgacaatgagcaaaacaagaatttatgaatagcccagtttgagatgagcttgagaagtctttaatgtcacccagcatttgatttctgaagtcttgaaggaactgcatttgagatgagctacaatttgcatggttcgatttgcattcattccaagaaccaaggcggtcagctgaaagtggggctaaactggcttggacctgccacacatcataagcagcattgagtagaaacaatggggtctcaacatgttc

SEQ ID NO: 229132 - DNA, 602 bp, Glycine max
ttcgagaggaattcatttgaattagggttactctttttcttcgtttcatcatggacgctcagagagctctactcgacgaactcatgggtgcagcgcgcaacttgacggaggaagagaggaaggggtacaaggaagtgagttgggacgataaggaagtgtgtggattctacatggtgcgcttttgccctcacgatctctttgtcaacacgcgcagtgatctcggaccttgccccagaatacatgacccgaagttgaaagaaagttttgagaaatctccaagacatgatgcatatgtaccgaaatttgaagctgaactttctcaattttgtgagaaattggtgatggacttggatagaagagtaagacgtgggagagaacgtcttgctcaagaggtagagccaacaccaccaccaccactgacagccgaaaaatctgaacagctatctgtgctggaggagaaaattaagaaccttctggaacaagttgaatctcttggtgaagcggggaaagttgatgaagctgaagctcttatgagaaaggtggagacacttaatgctgagaagacagccttaacgcaaccctcaaatgataggtgttgatgc

SEQ ID NO: 229133 - DNA, 563 bp, Glycine max
cctccgttcttctgcctctctttcccgagctaatctttcctcttcattagctttctccttagcagtcttaaactcatttatgaagtcgcgaaccattccataaccaacatgctgctttcctgtgacatgagactgagtcctttctgcagcatcatttgccacaagaaacgaaccacatatttcacagagtgccatcttcttctcctgaccaagcatcaacaccttatcattttgaggttgcgttaaggctgtcttctcagcattaagtgtctccacctttctcataagagcttcagcttcatcaactttccccgcttcaccaagagattcaacttgttccagaaggttcttaattttctcctccagcacagatagctgttcagatttttcggctgtcagtggtggtggtggtgttggctctacctcttgagcaagacgttctctcccacgtcttactcttctatccaagtccatcaccaatttctcacaaaattgagaaagttcagcttcaaatttcggtacatatgcatcatgtcttggagatttctcaaactttctttaac

SEQ ID NO: 229134 - DNA, 560 bp, Glycine max
aggggaagagaatgataacatggtctaatcttaaaacattttacacaagatttgtaatcaaactaaagattatgcaaagtgacgtaaataaataataaaaaatgcattaatctgttactagctaaagtagaacaatgtggtgttgcctatggattttaggatcagctgctcaatcaaagagatcattcttatttggaagcattgaaatgctaatcaagctggtacctggtaattctgctggaacagttacagcctactatgtaagttcactggatctcagagatctcaaaaacactaaaatatgttcttttgaacaaccaaatctatcaaactcccgttactaaatgaagtgtccatgtttctcactcaaaatccatacagttatcctctgcaggaagccagcatgacgagataagatttgaattcttaggcaacagtacaggacagccatacactgtccacactaacatatacacacaaggaaaaggaagcagagagcaacaatttttcctctggtttgacccaactgctgattttcacaattacaccattcactggaa

SEQ ID NO: 229135 - DNA, 559 bp, Glycine max
  unsure (1)..(559): unsure at all n locations
tcagcgcgtatcgtccctcctatggcttattgcgcatcctaaggagctcaaggacttgcagaaagacccaccaacttcttgcagcgctggtccagtagctgaggacatgttccattggcaagcaacaataatgggtcctgctgatagtccttatgctggaggtgtattcctagtcactattcacttccctccggattatcctttcaagcctcctaaggttgcctttaggactaaggtgtttcacccgaacatcaatagcaatggtagcatttgtcttgatatcctgaaggagcagtggagccctgcactcaccatctctaaggtactgctttctatctgctcattgctgactgatccaaatcctgatgatccacttgttccggaaatcgctcacatgtacaaaactgaccgggccaagtatgaggccactgcacgcagctggacccagaagtatgccatgggctgatttgtgtttggataatgtatattgaaatggattgcatctatgaaanactttgtgggtttgcttttcacttcctggtttctgggtaagaatatg

SEQ ID NO: 229136 - DNA, 438 bp, Glycine max
gacacaaataacatcctggtcatgcgtttgcatcatgataaaaacatcacaggggttgttgaacacagttattttttttatcaaattaagacacctcccttccctagccccttataacaaaaacataattttacccagaaaacaggaagtgaaaagcaaacccacaaaagttttcatagatgcaatccatttcaatatacattatccaaacccaaatcagcccatggcatacttctgggtccagctgcgtgcaggggccttatacttggcccggtcagttttgtacatgtgagcgatttccggaacaaggggatcatcaggatttggatcagtcagcaatgagcagatagaaagcagtaccttaaagatggtgagtgcagggcttcactgctccttcaggatatcaagacaaatgctaccattgcttttgatgttcgg

SEQ ID NO: 229137 - DNA, 461 bp, Glycine max
ccgaaactcagtgccccggtcaatgctcgtggccattccaccaacccatttacgggccccagacgccgccgttagtcgcgcctaacggcgacgtcggagttgacggaatggttattaacttggccactcttctcgctggcaccgttacgaaccctttcaacaacggttacttccaaggccccccgaccgcgccgttggaggccgtttccgcttgcacgggcgttttcggtagcggatcgtacccgggttatccgggtcgggttctcgtggataaagcaaccggggctagctacaatgcgcatggtgcgaatggaagaaggtacctcgtgccagcgatgtgggacccgcagacttcgacatgcaagaccctcgtctgaagactggcacgtggcgatgtgttgtgtaatggttgtagatatgggtcgttgggaacggaagcactgaagcaggggaatggatat

SEQ ID NO: 229138 - DNA, 451 bp, Glycine max
aaaaaaaaaatatatcacattaatcatgacatccgttttttaaataaaaaaaaaacttattcctcgtttttcacaatttatataacattccacttcttcctttatagtagtctttggcaaagagagaatttacccctttttacccgtcacattaaacaacaaaagcagaggtttaatagaatttttagaaacacactcagaaaccgaatccaccaccacctctattatccattcccctgcttcagggcttccgttcccaacgaccaatatttacaaccattacacaacacattgccacgtgccagtcttcaaacgagggtcttgcatgtcgaagtctgcgggtcccacatcgctggcacgagggacctttttccattcgcaccatgcgcattgtagctagccccggttgctttatccacgagaacccgacccggatacccgggtacgatcc

SEQ ID NO: 229139 - DNA, 228 bp, Glycine max
aaaaaattgaaaggcttataagattttaaaaccataatgtattataacaagatcctaaacataaagccagaacgaaacctcaaagaaaatccaaaattgacaaggttcacatatttgaaatcatccagaaaagaaatccgttttaataaatttaaaaagggcacagtttacctctcaattataactggaaatctttagtttctttttccagtaaacggtctttttttt

SEQ ID NO: 229140 - DNA, 554 bp, Glycine max
ttcctcactcacacaaatggttaagcttatccatttcctccttttccttttgatccaagcaatttcagcccaaacaccagcagcaccagcgggccccaccaacatcacccaagttctagagaaagcaggacaattcacaaccttcattaaactcctcaaagcttcacaaatagctgatagaatcaattcacagctgaacaactcaaaccaaggcctaaccgtgtttgcacccactgataatgcattctcaagcctcaaagcaggaacattaaactccataaactcacaagaccaaatgcagctgatacaattccacattctccccactctctacaccatctcacagttccaaaccgcaagtaaccccttgcacacgcaagctggaaacagtgatgatggagagtatcctttaaatgtgaccacctcagggaaccaagtgaatgtaacaactggggtggttgatacaacagtgtccaatactatctacagtgatactcagctctcagtgtatcaggtggataaggtgcttcttcctatgaagcttttcggcgcga

SEQ ID NO: 229141 - DNA, 494 bp, Glycine max
attgcaagaaccattcacattcttccataatcatcaaagccatcaacgggcttgactgggcaactagctggaagatgaagcaagcaactcttttcttcttctcactcttcctactcctttcctccaccaccatggccatttcaccagcacctgcagcagcaccaaaagccacagcaaaaactcctcctaccccaaaggcaacagcaccatcaccaaaaccattagttcccacaatacctcagtctccagactctcctgactcggtccccgacgacatcaccagaatcctgaaaaaggccaaaatgttctcagtcctaatccgcctcctcaaaaccaccgaaatcatgaacaacatcaactcacagctcataacagccaagagtggcggcataaccatccttgcaccagatgattctgccttttccaacctcaaagcaggctgtctcaactccctaaacgaaggccagaaaatcgaacttgtgcagttccacata

SEQ ID NO: 229142 - DNA, 452 bp, Glycine max
atcttcatcagccttagcaatttcagcctctgttggccatgtctgctctccagcaagaggatcaggtatattctcaaccactaaggcttcctggttttgaggatcaggagctagagaaccaatgacctctgcatcatgcatttcatcagcatccattagggcctgatttttccttgaattcaaaggacaaggatctttaagaacttcaattttagacaattggaaatctcctgcacctgaaacatgaaccaattgattgactgagaggttaccagaaccaaggtaaccagtgagaaacagggggcatttttcagaggtgccatcatattctgcatcaaccttttgagacaagaggtatgatcgttgagttctccaatgaggaactttaagcctttgctctttaaagagccacaagaacttgtgtagctcatcctttgtatcagctggataaa

SEQ ID NO: 229143 - DNA, 453 bp, Glycine max
atgaaatcggttcctgtttaacaaaatgtagcaaacagaaaaggataaaaagaacgatgctttacttaagaataatcgaaatgaacaaaggtgataaacaaaggtgaacaaaagtgaaagaatttacacacacaagtggggagtcagtttagcataaatgtttcaagccattaacaaaggtaaattccctacaagggcatcatctcaaatgattctcactttcatagagctaaagggcaactgcagcaatttagtcataggataaattctgaagattactgaggattgggaggacggctattggcagcagaaacccttgagccccattcaagcaattctttactggtgtcatccttatgaacaatcacctcaatgaagcataaggagtctttcttgggttctgtggctgtggcaattgcttcaactagctttcttttacagaacaccttggca

SEQ ID NO: 229144 - DNA, 505 bp, Glycine max
gaaacattgcgtgtgattacattctttctagtggtctttcgggaggcaaaatctgatggcaatatcaatggatacacaattccaaaaggttggaaagcgcttgtgtggttcagatcagttcaccttgatcctgaaatatatcctaatccaaaggaatttaacccttatagatggaataaagaacacaaggccggagaattccttccctttggaggaggaagtagattgtgtccggggaacgatcttgccaagatggaaatagcagtttttcttcaccatttccttctgaattaccgatttgaacagcataatcctaattgccctgtgagatacttaccacatacaaggcccatggacaattgcttgggaagggtcaggaaatgttcatctacaacaacctaagagcacatgtctatggctatttttaatttgaaaatccatctccatgttttccctcagctaaatgcttccaggtccactttgagctacgttggcatagcttcac

SEQ ID NO: 229145 - DNA, 506 bp, Glycine max
  unsure (1)..(506): unsure at all n locations
gttgaagctatgccaacgtagctcaaagtggacctggaagcatttagctgagggaaaacatggagatggattttcaaattaaaaatagccatagacatgtgctcttaggttgttgtagatgaacatttcctgacccttcccaagcaattgtccatgggccttgtatgtggtaagtatctcacagggcaattaggattatgctgttcaaatcggtaattcagaaggaaatggtgaagaaaaactgctatttccatcttggcaagatcgttccccggacacaatctacttcctcctccaaagggaaggaattctccggccttgtgttctttattccatctataagggttaaattcctttggattaggatatatttcaggatcaaggtgaactgatctgaaccacacaagcgctttccaaccttttggaattgtgtatccattgatattgacatcagattttgcctcccgaaagaccactagtgagaatgtaatcacacgcaatgtttn

SEQ ID NO: 229146 - DNA, 581 bp, Glycine max
  unsure (1)..(581): unsure at all n locations
cccatttccataatcactttttcctactttcttctccatccatcccttgactaattaatgatccctcacaactaccaatggccgaagagaaacaccacaagcaccgcctcttccaccaccacaaggacgaggataataagccagtagaaaccgatactggttacgacaacacatcatattccaagccttctgatgactatgactctggtttcaacaagccatcgtatgagtcttctggcggtggctatgaaggtggttacaacaaaacatcttattctagtgatgagccagcttctggtggtggctatgaaggtgggtacaagaaaacaggttattctggtggcattgatgagacttctggtggctatggcgctggtggtggtggatactctgacgtcactgatggtggctacggcaaccaagtggtggctatggcgccgtggtggggtggtgtgtaccctgacactaccatgatggtgggtacagcaaacaagtggtggtgggtatgatgtgangttgactataagaaggaagagaagcnaccacagcatcttgagcaccttgggtgagtaggtgctgca

SEQ ID NO: 229147 - DNA, 421 bp, Glycine max
caagtaatctcaaaccatttgagtatatattattttatgtacttaacacttaacacagtacacatgcatatatagagcaacacatttcaaggaaacattctccaaaccatactgatctcccaaaataaactggaagatgattaacttaaagacacacatatatatataagccaaaagcatatatatatataagacaagtagaaggaatatgctcataattggttgcttatgcttcagccaaagagatggtggtgcttctttccatgagcttcctcatcttgctcctttgcttcctttttctcatgatgttcatggaaggcaaacccaccagatcccactgcagctgctgctgcaacctcctcttttatcttgtgcctgtgagcatgctctgggtctttctctgccttgtgcttctcatgca

SEQ ID NO: 229148 - DNA, 552 bp, Glycine max
  unsure (1)..(552): unsure at all n locations
ctccaaatcacggtccaatataaagttcaagaaggggtctaagtattgctggggagtcaaatgtgtcagttaaagcaaggaaatctaatggtgacagtgatccattgccacgttgcgttgttcttgacattgaaggaactactactcccatatcatttgtttccgaggttctcttcccatatgcccgtgataatgttgggaggcatctatctctaacatatgatacccccgagaccaaagctgatatcaagttgcttcgttcccaagttcaaagtgaccttgaacaagggattgcaggtgctgtgcctatccctccagatgatgctgggaaacaggaagtcattgctgcacttgttgccaatgtggatgctatgattaaagctgatagaaagatcactgccttaaaagagttgcagggtcatatatggaaaactggctatgagaataatgaattggagggaatagtttatgatgatgtaccagaagctctagaaaagtggcacgccttgngtataaaggtatacatatattctagtggtagcagattggctc

SEQ ID NO: 229149 - DNA, 519 bp, Glycine max
ggagaaactcaacgcaaaatacattacattacattattttaattttttttaattacattattttaattaagaagtgaacgttacactattcttagtaatgataacacatttaatgtcattccagaagactgcaattggtcttagatctccgagaaggatttgattgtcttgaagccatgattgtcagggaggggtccatttccaggtcgaatagaaattatcaccttcaaacctgcagccgttgcagctgtggcttcttgatatacatcagtgacaaataaaatatctgatggtttttcaacaccgagtgactcagaaatttcaacataactgcgtgtctctcttttgttccccactgtagtgtcaaaaaacccagataaatattttcttaggtccccatgggtggtttttccaaatattagcctttgagccaatctgctaccactagaatatatgtatacctttatacccaaggcgtgccacttttttagagcttctggtacatcatcataaactatt

SEQ ID NO: 229150 - DNA, 581 bp, Glycine max
  unsure (1)..(581): unsure at all n locations
tctgtctcttggtttggagactgcctttggtgtgatgactgtcctgatccctaggaacactacaattccaacaaagaaggaacaagttttctcaacatactctgacaaccagcctggtgtgcttatccaggtctttgagggtgaaagagcaaggaccagagataacaatttgttgggcaaatttgagctatctggcattcctcctgcacccaggggtgttcctcagattacagtgtgctttgacattgatgccaatggtatcttgaatgtctctgccgaagataaaaccactggccagaaaaataagatcactatcaccaatgacaagggtagattgtcaaaggaagatattgagaagatggttcaagaggctgagaagtacaagtctgaggatgaagagcacaagaagaaggttgaggccaaaaacgctttggaaaactatgcatacaacatgaggaacaccgtgaaggatgacaagattggtgagaaacttgacccggctgacaagaagaangatgaggatgcaatngagcaaagcatcagtggttagacagncaccagcttgcagaagcagatgagtt

SEQ ID NO: 229151 - DNA, 576 bp, Glycine max
gactaaagacaagatatgtcatttaacaagacagaataattcctacaggtaaagtgcataacaattgagtataccatctaataatgaaaataacgcaaataacataatgcttaaagcaacgttcatatcagaagggaaaaatagtttgaatcccatccaacaaaaatcatgcgattaaaatccaattaaaaaagcataaagtaaaataagtttttaaaacaggtatctggaggaaagcaactacatttagtccacttcctcaatcttggggccagcaccacttccaccagaaggaggagcagcatactcatcctctgctgcaccagcaccacccacgtttggaccagcaccaccttggtacatcttggcaatgattggattgcagatgctttccaattccttcattttgtcctcaaactcatctgcttctgcaagctggttgctgtctaaccactggattgcttgctcaattgcatcctcaatcttcttcttgtcagccgggtcaagtttctcaccaatcttgtcatccttcacggggttcctcatgttgtatgcatagttttccaaagcgttttt

SEQ ID NO: 229152 - DNA, 596 bp, Glycine max
  unsure (1)..(596): unsure at all n locations
gtgcgtgggagggtccgaataagcacttcgttggagaaagtgattctcgttctgttctgctactcacaagagcaacaacaacaacatcagaatcagaaacagcaatggccaacactaacttggacgatgttccctctctggatctcatgactgagctccttcgtcgcttcaagtgctcttccaaacctgacaagcgtcttattctcattggcccacctggatctgggaaaggcacccagtcaccaatcataaaagatgagtactgcttatgccacttagctactggtgatatgttaagagcagctgtagcagctaagacccctcttggtgtcaaggctaaagaagctatgaataagggagaacttgtttctgatgactcggttgttggcattatagatgaagcaatgaaaaaaccttcatgtcagaaaggtttcattcttgatggttttccaagaactgtggtccaagcacagaagctngatgagatgctgcnaaacaaggagttaaaagtgataggtgctcaatttgcaatgatgatgcaatcctgaggagcgaatactgtcgctgatacacccatcagtggcagacctacatac

SEQ ID NO: 229153 - DNA, 409 bp, Glycine max
ccaaaaccaattgatttttttattcatcaaagttgctcttcgaatctgggtttgaaaacagcccggggatcaaattggcaacaaaagttttcctatagccaaaaaaaaaaaaaaacaattgcagttacagccccgagatcaaaagatgaactttgttttaagacagcactttttccacttcaactgtcaccttttgggggggtttctcagcatgaaaattagcaccagggcccttttttgaatagtaatcaatacccggttcggtttgcttgggaaatgcctccagtcttaacttaaaaacagctgcagggtcatccttgcgctggataaggggttcaccagtaacattatcaacaccaagaaccttagggggagcaaattttgtttggtaggttctgccactggatgg

SEQ ID NO: 229154 - DNA, 580 bp, Glycine max
  unsure (1)..(580): unsure at all n locations
attggaaatgctatttggggtggagccaaattgtctgatgttcttgaactcattggaattccaaagttgactagtgtcactgaatttggtggaagacatgtggaattcgtaagcattgataagtgcaaggaggaaaatggaggcccatacaaggcttcaataccactcagtcaggccacaaatcctgaagcagatgttctactagcttatgaaatgaatggtgaacctcttaacagggatcatgggtatccattacgtgtggttgttcctggtgtcattggagcccggtctgttaaatggctggaagatatcaatatcattgaagaagaatgtcagggtttcttcatgcaaaaggactacaaaatgtttccaccatcagtgaattgggataatattgattggtctacccggagaccccaaatggatttcccagttcaagtggtgttatatgttctcttgaagacgtgagcacaataaagccctggaaggtaanaattagtggatatgcagcatcaggaggtggcagaggcattgagagagtaaatgtgtctggtgatggaggcaaaacatggatggaagc

SEQ ID NO: 229155 - DNA, 503 bp, Glycine max
acgatctcaaattatttcctcgaagaaacgaagaacagatattccatgaaaaactctgagaaacccaaggatttttcttataatcccttgcctatagcttatttgtataaagacttttttacaactgattgcgatgcctgttcaggtgttttcaggggttcattagttcaaacagagaagcttcaaaatccaccaagcattgttgggggagagagtcataaaggctcgattgggaagttggtgctacttttacaggtttgagtaactcgcttgaactttcactcgatgccatgaagtgtttaaaatacctctaaggttccaaatgtcttcaaccttttcaggttggacatttgcagcagaatctaccgcttttgcaattatctcagtgctgtgaaggatatcagctgtgacttcaaacagcacccatgcccatttgtcactgctggcatgttctgatatataaggaaccccacttttctgaattcttgaggcttccatccatg

SEQ ID NO: 229156 - DNA, 545 bp, Glycine max
  unsure (1)..(545): unsure at all n locations
ctcattccttcatttttaaacctagcttcatctccctccactcaccataacatggcatgagaagcaaatgctgccaacaccaacttctgtgtaaatgttagcaacaatggctacattagtgctaatgaccccttgaactggggtgcggcggcggaggctatggctgggagccacctcgacgaggtcaagcgcatgctagaggagtaccggaggcccgtcgtcaagctcggtggagagaccctgaccatctcgcaggtcgcggcgatcgcggcccacgaccagggggtgaaggtggagctggcggagtcctccaggaccggtgttaaggccagcagtgactgggtgatggagagcatgaacaagggcactgacagctcnngcgtcacaccgggttcggtgctacctcccaccggagaaccaaacantgcggtgccttgcagaaggagctaattaggtctttgaatgctggaatattggcaatggacagagtccaatgcaccctaccccaacagcaaccagacagctatctagtgagaataacacac

SEQ ID NO: 229157 - DNA, 501 bp, Glycine max
acggcaaacaaatggaattctattacattatgaattacaagttccttgcatggcatacatcaaggaaaactgggaagttgttgtatgtggattgatttgccacagccttatatagacaaaccaaatgcttaatatcaacacaaacacgtgtacagaaaagaaaccactcttcaagaaaacagaaaataagaaaaactaacatattggaagaggtgccccattccactccccaaggcattccaaaagtggatcaatgatcttcccttggcacaaagcagtgaacactttgtcacactcttcacccggtgagataaccctttcaccagttagcaatgctgtccccaactcctctctcacaaacttgtacaaggggtaagacctgcattccttgatcttgtttggaattgcacattggtcattctcatatgcaactcttgcaccttccactttcttaggcaaaagggtctttaactcttcctcaaatgttgcaatcttttggaa

SEQ ID NO: 229158 - DNA, 487 bp, Glycine max
gctaaacaaagtcctacagccacagacatggccaggtgcatggatccatcagctagtgaaccagaaacgcctaactcctcaaatgcacctactccatggctttgagtctcaacctaagttggaagctgataatgtaccatctacctccgggacagctaaaaattgtgtgtttaaactaggtgacagggtaaaatatagttcatcttctgggggcttgtatcagcttcagactatttcttcaagcaatcgcatattcaggggtccagctaatggaagtcgggggaaggttgtcttactttttgatgataatcccttgtcaaaaattggcgtaagatttgataaacccatacctgatggagttgatcttggaggtttgtgtgagcctggtcaaggatttttctgcaatgtgactgatcttcgattagaaacagtggcattgaagaacttgacaaatacttataatacattgttgaggttgtggttagtg

SEQ ID NO: 229159 - DNA, 489 bp, Glycine max
aatatctctttaattggacggtgtgcagcagttacacacaaattctttagatcgcttccggaatatccatcagtcatacttgcaattgcatccatattaatatcagaagacaagtcctcttttgccagtataacttttaatatttttgctctatttggagcatcgggcaaatttaccattaatctccgaggcagcctccgaatgacagcctcatctaggtcaaaaggcctattagtggctgcaagcacaagaactcgctcagtatcctttgtgcgtaagccatcccagttcaccatgaattcatttttcatctttcgcatggcctcatgctccccaggattttccctcctgcccaacatgctatcaactttgtcaacaaatatcacgctaggagcaattttactagccagggaaaaaacagctttgacatacttttcaccctcaccaaaccacttagatgtgatacttgacatggaaatgttgatgaaa

SEQ ID NO: 229160 - DNA, 296 bp, Glycine max
tttttttttttttttttttttttttttttttttttttcattttatttttttttttggttttaggttttattttttttcataaaagttataatttttatatttgatataaaaaaatcatttatttttatttttttaatataatatgtttatttcattttaaaaaaaagaagaaaaatcaccattttttacgagacacaacaaaaaggggtgtgataaaaaaaaaagaaacaaaaaaaaaaattatttgaaaaaaaaaaaaccaaaataggaaaaaaaacacatccaataaccaatgt

SEQ ID NO: 229161 - DNA, 448 bp, Glycine max
tgctttctttggccatgttggcagtttgacctcttgtggttatggggtggctacagggggacgcttatcctggggcttatgctacagcaaggaattgagtcctgataaattctactgcgatgactactataaattaacctacccttgcactcctggcgcagcatactatggccgtggtgccatcccactttactggaactacaactatggaaaagccggggaagccttgaaggtggatctgttgaaccatccagaatacatagaacaaaacgccactctagccttccaggctgcactctggcagtggatgaccccaccagagaagcacctaccatcaccccatgatgtctttgttggcaactggaaacccacaaaaaatgacacattgtccaaaagggtacccggatttggtgccacaataaacttgctctatggggatcaaacttgt

SEQ ID NO: 229162 - DNA, 507 bp, Glycine max
gttcagaaaatccttaatgatcaaatactcaattgtatacatacattatataccaaaatatattcgaattatagaagagaaaggaaacatcaaaagccaagatatatggcaaagtaatataatctatacacaaattaacaatgagtagtgtccactccaaaacttatttcactctcatttgaaggccaaagtagttgaaatatcttgtctacttgttgctttctttattaagaattttttgaaagattcaagaatggaccggccaagaatctcagccaaggaatgctcaatttgtggcagaagatggtgagccagagggcttaaaagcagcttgttcagcacaggagagaacttcattaggccctgcctcttctctgccaacacccaagagatcaagataataaagatagtgtgaaatgatgttgttcatggcctcattatctgatccctgaccacaagtttgatccccatagagcaagtttattgtggcaccaaatccgggtaccc

SEQ ID NO: 229163 - DNA, 553 bp, Glycine max
  unsure (1)..(553): unsure at all n locations
tgcaaatgggacttgtttaggacctttcactgaaggtgaatggatggttgagcagggtgccggtgtgaatgaggctacaggtctaatatattttactgggaccttagatggtcctctggagtccaatttgtattgttccaaactttttgttgatggaagtcaaccacttcaggtccctgtcagacttacgcacagcaaggggaagcacattgtggtccttgatcatcatatgcgaaattttgttgatattcatgattcccttggttgtcctcctagggtgttactgtgctcgttggaagatggaagtttaatcaagcctttatatgagcagtcatttacaattccaaggttcaaaaagcttcaacttgagccaccggagattgttgaaatacgggctaatgatggcactacattgtatggagccctatataagcctgatgcttcaaggtttggacctccaccttacaaaactatgnatcaaatgttatggtggtccaaagtgtacagcttgttagtaactcttggcttagtacagntngatctgagagcacaa

SEQ ID NO: 229164 - DNA, 508 bp, Glycine max
aaaggcttattcagttatttgatacccagaagagtttcttgttagggtgtgtgaagtgggccaaaatagccatcaaagtagcttatcagctttaaggcaagaagaaacaaaaccaattcttttgggtaaaagaactttagaaaaccactttgcccattcaactaaacacaacaatgaaagatgaattaaaaagtcatgttacagattcctctgaatgaagtcccacatcctcccttccatgtaaactcggtcactatgacgccgaggcatgtgccgttcatctgggaaaactattagctcatatgattttccagctgccacaagtgcattgataagtcttgcagtgtgcctaaagtgaacattctcatcaatcatgccgtgcacaagcaacaaccgccctttaactggtgcacttggttcataacagaaccgctttcatatcctgacttgttttcagatggcaaccccatgtacttctctgtgtaaaacgtgtcatatccatcccatg

SEQ ID NO: 229165 - DNA, 572 bp, Glycine max
cagaaaccctagaagagcaacaggttccagaaaccctggcggctgcaaaccacgcggaagtgaacggcggcaatgaaggaaacaacgaagaagaggaagaggaggatctcactctcgaagaagagcccgtggagaagcttctggaaccgttcacaaaggagcagctccactctctcgtcacgcaggccgtggatatgtttcccgaattcgtcgatagcgtgcgccggcttgctgacgtggaccctgcgcacaggaaaatcttcgtccatggccttggctgggacgccactgccgatactctaaccgccgtgttcgggaaatacggcgagatcgaggattgcaaggccgtcaccgacaaggtctccgggaaatcaaagggttacgcctttatcctcttcaagcacagggacgatgctcgcaaggcgctgaaacaccctcaaagaagatcggaaaccgcaccacctcgtgccagctggcctccgccggccccgttccggctccaccgccgaacgtgacctcggtgtctgagtacacccagaggaagatttttgtgagcaatgtgaatgctgaga

SEQ ID NO: 229166 - DNA, 538 bp, Glycine max
tcctttctctgtctccatcgtttcgctttgcacaagcactctctctttcccttacggggtttgaggtttcaacgctccaactatccatggcaaaccgctggctcagacccgaggtgtatccactgttcgctgcggttggtgctgctgttgggatctgtggattccaactggttcgtaatatctgcatcaaccctgaagtcagggtgaacaaggagggaaggaaggcaggagttttggagaactttgctgagggagagaagtatgccgagcacttcctgaggaagtatgtgcgcaacagaactccggagattatgccctccatcaacagcttcttcgctgacacaagtcgcaactaagttgctttgaataaacaaaggttaatgtgagatattaattctattgtggttacaaacagattttatcatgcatttgtaaaactaaatttggttgttgctatctctaaccgtacagtgggtttgctgtggttgagaataataatactgattctaatgcattaatgatggctgctgtttcaatg

SEQ ID NO: 229167 - DNA, 434 bp, Glycine max
gatgaaaaacccaacaaaataacgatattttaactcaagaagtgccactaattaaagttattataaaaccagcttattagagaactatacatataaaatactatataactctaaaattgattctaattctatagtgatcttcaccctataaatacaatacagagagtaggtaggttttgaattactttattgatatattaacaaatacttatcaagaaaactccctgctttcaacatctagacatattaatctaaccatagcatcgaattggatcattgcatcccttagaagcagattgcttggaaccaaatctccctcctttctcaaggtactgttgatggtattcttctgccctgtagaacttcttggcaggaaggatctcagtaacaatcttcctgttcagcttcttctgttgttgttccagagactctat

SEQ ID NO: 229168 - DNA, 334 bp, Glycine max
gggtcctgagagtatagcggtgttgtctgcaactgtttgtgttgatagtacaattggggtattggccgaggctcatgttattgtgaatgactctggttatcatcagctcgtgagccattggttaaatactcatgcagtgatggaaccatttgccatagcaaccaataggcatctcagtgtgctccaccctatgtataaacttctttatcctcactaccgcgacaccataaatatcaatggacttgctaggcagtccctgattaatgcagatggcattatagagaaatcatttttgcccggaaagtacttcattgagatgtcttcatacgtctac

SEQ ID NO: 229169 - DNA, 454 bp, Glycine max
aaatacaaagtgaaagtgagaacacactttattatatgaaaaccgagagcatccaaatacaatagtgcagaagttcaggcaataattacgcatagacatgcataaagtctatgttattcagaagtacaacatagataaggaaaccacaaactctttttaattagatagagatactgttgggaattcctttgaaagtcaacccttcctcacttgaacgatggagcaaagtgtatggcagctgaactggcccagtccggtttctcagacttggatcactgttccttgcattgatttttccttcaattccagtcagtttgcttccaaaccttttgaaagcttctaatgccttcttatcagtagtccaatttggagtctccctctcttcaggtatatctcatcagaagcatgccttgacaatatctctatcactgaaagatcaataagggtctcaaac

SEQ ID NO: 229170 - DNA, 562 bp, Glycine max
  unsure (1)..(562): unsure at all n locations
gctttgctcaagtctcagcgatatgttggcatacccagcaagtttcatagcaagcgggttagctccttcttacctcttcatcttggtcaacctcgtcataggcaccatagccatcacttctcgcttcagttccacgcccaaaaaccaacaagcccaccacccccaaccactcagctccttcaatacccatcatcaccaacccaactgcactcagccccaactccttccaataccctcactgttgcagcgagtcacgtccttcaacctctccctccacaaacaccaacccacacctccagaaacacaacatctgcatcccgaaccccaaccccaacctgaaaagccgccggaactgcttcggactccctcactcttggagcgactcangtccttccataatctttctctccacaaacatgtccaacccgagccagagccagagccagaacctgaacctgaaaagccggaactggttcggagtccctcgctcttgcagcggattcagtccataaacttctcccatctctacagatccgacttcagtcaccgagatgatgaggat

SEQ ID NO: 229171 - DNA, 427 bp, Glycine max
aataatatcaaatttattatcaatttgtgtatgcctacacaagtctattattaatattagacaaacatgacatgattactaagacaagaactttgccacaccaacctagtagcacgcagtactatacaaacatttgaaaaccaacaaactttaacgtcagaacaacttgaggcaacgacgcaggcgcaaggaagattagggcgggtttttctttactcatgatgagttacctcctctgtaacggagaagggaatcaatcctctgcaacctcaactgtttcttgaacctgttgatgaaatcgtcagctttggcgtctacttcttcgtcttctctccacgacgtcgtcgtttcaaccggcctcgccgtctgcggcctccgcttctcgacctcctcccactcgctatccgtcaaaccccctctcacgctc

SEQ ID NO: 229172 - DNA, 486 bp, Glycine max
aatagaaacctctcagcccctctcttatcaaatggccaccgtaatcgacggcaaaggcgttgggcaaaccatccgatctgaaatcgccgacgaggtgcgccagctctctcaaaaatacggcaaggttccgggattagcggtggtgatagtagggaacagaaaagattcacagagctattttggaatgaagagaaaggcatgcgctgaattgggaatcaaatccttcgatgtggaccttcccgaacaagtctcccaagctgaactaatcaaacaagttcaccagttgaatgctaaccctgacgtacatggtatattggttcagctcccgttgcctaagcacataaatgaagagggaagttctgactgaaatcagccttgagaaggatgtagatggttttcatcctttgaacattggcaagcttgcaatgaaaggcagagaccccctgttccttccctgcactcccaaggccatgtattgaactatta

SEQ ID NO: 229173 - DNA, 551 bp, Glycine max
gttgtagaaaagcaatattttaatgttaagaactgattcttacattagaactgatcttacactggctacaagcgtttcttaccaccaaggaatagctatgctctaaatccaatctaaaatatggtcagtacccacatcgagaatgtttcttcggagatagggaaagggcaaatacatagtttcgattggaccagttctacttatccatcgaaagcgatccttgtgattttgtagaatacattcatctacctaaacagaaacaaaagtgtggataaaaccgattctcaaagaatttcaaactaatagtacataccttttatttattcaaattaaaggaagatcaattattttgttcaatgtagcgcttggctccatccaaagtattcttcagcaacattgtgactgtcattggacctacaccaccaggaactggagtaatccaaccagcaactttagatgcttccccaaaatctacatctccaacaagccttgtacctgacttctttgttgggtcatcaacagcatttgtgccaacatctatcactgcagct

SEQ ID NO: 229174 - DNA, 506 bp, Glycine max
gagagagagagagagagagagagattacaacttcaaacctcatcaccacacagaggggtagggagagagagagaaaaaaaaagagagtccgttagttaatttcagtttatttattttatatttttaaaaagaagagaaaaagcaatggtgacagaggaagaaatatctgaagcggttcagtctctgctgcgggaatcaaaccctagtagattcacgacgctaaaccaggtggtggaggagctccaggccaagctcggccacgacctcactcacaaaatcgatttcatcaccgcgcagatcaacctcctcttcggatcccgacaaccgcaacaaccgccgcaaaacccgcataggcagttacaacagcctaaggaccattttgcccctccgccaaaccctaattttcactctgcccctgtcagtgttggctttcagttgcagaatttctcttcttctaacgctgttgtcgctgctgctactgctgctgatgcttcgcgcattgaagc

SEQ ID NO: 229175 - DNA, 545 bp, Glycine max
agaggctaggttagctcgggtctgttctggattgtcatcccgtcttcaagaatacggatctgaaaatgcacagttggaggaacttctcacttcagagagagagctgagtaaatcatatgaagctagcataaaacagctacagaaggatctgtctgaaagtaaaagggaagtgacaagagttgaatcaaatatggttgaggctttggcagcaaaaaatgctgaaattgaggcacttttaagttctatggatgctgttaagaggcaggctgcattgtcagaaggaaatctagcttccctgcaggcaagtatggaatcaatgatgagaaatcgagaactaagcgaaacaaggatgatgcaagctctaagagaggagctagcatctgctgagcgaagagcagaagaaggagcgtgtcgcacataatgctaccaaaatggctgctatggaaagagaagtggaattggagcacagagcagttgagtcatccactgcacttgcaaggatacagagagtagcagatgagaggacagcaaaagccacagaactt

SEQ ID NO: 229176 - DNA, 570 bp, Glycine max
  unsure (1)..(570): unsure at all n locations
gtttctgtcactaaaactactacattatctgcagctaaaacaacaattacatctggagcctgtacacctttgtcaagatctactgcaagatcttctacaccgacaaccaagcctaccttacctgcatccagacctacatcaagggcatcaaccccagctcgccgaccgtcaacaccacctaatgtacccactgtatcttctccttcagttaagacttcttcagtctccaagtcagctcctgtgatatcaaggcagccagtaccatcccgtggcacttcaccaactgtgaaatcaagaccatggaagccatcggagatgcctggattttcacttgatgctccacccaatttgaggacaacgcttccagaaaggtcactgtcaacaactagggggaggcctggagcacctaatctacggtcctcatctgttgagcctgcttctaatggtagaccaaggcggcaatcatgctctccttcaagaggacgttcctccaatggcatttctcgtccaactggaagctctatgccagcagttaatcgtgcatactccaggcanatgacaatgttagtc

SEQ ID NO: 229177 - DNA, 530 bp, Glycine max
  unsure (1)..(530): unsure at all n locations
ctagttctgtccgagtatcagatcagagtattgtacaatgaggagattttatggtactaaacaaggtacactacttttgtaccttgtttcaaatgggtgagtggtgtagtgaacaaattaaatgaattgaaagcaaaaatcgaggtgggaaagagatgatgttggagacaaatatagaacacgcccttaccctatcccttctaagctttaagacaatgatcatcattctagcaaaagacgctgtggttgaaataaccaaaagccagaaaggtgatagaaaatatcagagaattcttctctgtacttgggaccaaattatcggtactattcatttagcttacagttttgaagatagggatgattgtacttgacatacttggtccagtaagaccgatactttgtcatggcaatttctaaccatggcttcatattaccattgtagtgtacaactgctgcattctcaatctctgatcgatccaaactttnattataacccaaaccaagtacatgccatgatttatctagtggat

SEQ ID NO: 229178 - DNA, 548 bp, Glycine max
ctcacgcatttcctcgtttttttcttcccttttctctttctccggcgacgatctgggattggggccactcctctcgccggcgagcccttactcttccctcctccgtcgagccctctccgattcgaatcgttcccagcctcgcaccaccatgaatcccgaatacgattatttgttcaagcttttgctgattggagattctggtgtaggcaagtcatgtcttctcctgaggtttgctgatgattcataccttgacagctatatcagtaccattggagtggactttaaaatccgcactgtggagcaggatgggaagactattaaacttcaaatttgggacactgcgggtcaggaacgtttccgaacaatcactagcagctattatcgtggggctcatggcattattgttgtttatgatgtcactgaccaagagagctttaataatgttaagcagtggctgaatgaaattgaccgttatgcaagtgaaaatgttaacaagcttctagttggaaacaagtgcgatctcacggcaaatatagttgtgtcctatg

SEQ ID NO: 229179 - DNA, 395 bp, Glycine max
cgagggacaaagaacaaggcaaatactgctattcaccaatattcctaattttgtacaaatgttttttcttttaaaatcaaatacatagaaaataatggaagttttaacaacggcttaaccgataagaggaacaaatcatgacgaacaatcttgatatgaaagcaatgtgaaaagcttggttttaaatgccactgagacacatgaacttttaaaccccaaaaactttcgttctctttaagtcgagcagcaaccagccttttggttcactggcttgcctcgaaattgaactggtggaggcctcgcattgttcactggctggcttgccattctgtttttaatttcagcagccatggccatgaaagcctgttcaacattggtggcatttttagcactag

SEQ ID NO: 229180 - DNA, 476 bp, Glycine max
atttctctctgcactcaaattcgtttccttactttttccatttacactcactcacgcgcgagcttcaaaaccaaaaccaaactctgttctaacctccaaacttttatgccattcatgactcataacatcatagaaaaagaagaactactcacgaaccgcgaccaccaccgacaataaaaggacaacaacgtcagtgtttaaaagcatgaaaatgctgccacctcccaccgccggaggtgcctcccacagcggcgccggtgaccgcaccgtggtggtgggcatgaagatggactctcacagcaccgagttgctcacttgggctctgttcaaagtggctcagcccggtgatgttgtgcttgctcttcatgttcttgggaatgatgaaattgtgaatcgagaagggaaatcctcgttgttttcacttgtcaaagcatttgactctattcttgccgtttatgaagggattctgcaatttg

SEQ ID NO: 229181 - DNA, 358 bp, Glycine max
ccttgcttggttatagtgctcagggtgcttgcaaatttggattttacgagttcttggggaagtactagtctgatattgctggcccagagtatgcaagcaagtacaagaccttgatctaccttgctggttcagcatctgctgaggttattgctgatattgctctttgcccatatgaggctgtgaaggtccgcgtgcaaacttagcctggttttgcaaggggtttgtctgatgggctcccaaaatttggcaaaactggaaggacccttaggctggtccaaggggtagtgcctttttggggaccacaaattccatacaccatggtgaagtttggttttttttagaaccttggtgggccggt

SEQ ID NO: 229182 - DNA, 316 bp, Glycine max
cggacaatgggggtggagagaacctaaccggcaaaattatttctttcccccccacaaagttttcaccaggggggggggggaaagcaaaaccctccccccaaaaattcaaaattcttaaaaataaaaaaaagggaaaccagggttgaactttaaaaaaaatttatcccccccagcttgggttcccctcaagcaactttatttagggggcctttttttattttagggccctattaccggggtttctaaggttcggacaaaattgggggtggtcattatgggaaattttatgcctttgctagctcaaaaccaaaaactg

SEQ ID NO: 229183 - DNA, 435 bp, Glycine max
catgttcaacattattgactgtaaattttcaaggatacgtagtggctctttaattgctccatgttacataagcaaatggtccataattacatttataaatgtgttaacccacaaaagggattatctattgaatataactatttacattattattctttgattctcacctgaattacatgatacaacatctcagcaccagccccttttgatcaatcctgccatcttcattgccttcaggtggctgagctagcttccgattttgtggagacatcatttctttcttcaattgcatcaaaatgtcttccattgtacactctctttgccaattagcaagcataggaaacaaatgtggctcaaccactccagttttttggttgacacaagtcatgttaatcctagtctgaaatctaacagctggtggattgtctggataat

SEQ ID NO: 229184 - DNA, 424 bp, Glycine max
atcttttctctcttctcacagcctttttcactcactttaggtgaagatgtcgactggggctaggaggagactgatgagggattttaaaagattgcaacaagatcctcctgctggcatcagtggggctccccaagacaataatattatgctttggaatgctgttatctttggcccagatgacaccccttgggatggaggtacgtttaagttgacacttcagtttacagaggattatcctaataaaccacctactgtgcgctttgtttctcgaatgtttcatcctaacatttatgcggatggcagtatatgcttggacattttacaaaatcagtggagccctatatatgatgtagctgcatttcttacctcaatgcagtcattgttgtgtgatccaaacccaaattcaccagcaaattctgaagct

SEQ ID NO: 229185 - DNA, 414 bp, Glycine max
gatacgccatcctatgttataatgataaagttgtaaccaaagacaaatgaaccacacaacatggagaaaataaggtggaacattaacacgtaaagtgtgagcaaacacattgtcagggatgacaagaaaatcataatggtcctttttgaagtctggtggttattcaaccatatccttttgacaaccttttgattgccacacaagccctatcttatctataatgattaatcagcagtccaactttgctcaacaatctcgcgtacttttctgttgtattcgcgcttgttttcgctgaacatccgagcagcttcagaatttgctggtgaatttgggtttggatcacacaacaatgactggattgaggtaagaattgcagctacatcatatatagggcttcactgattttgtaaaatg

SEQ ID NO: 229186 - DNA, 590 bp, Glycine max
  unsure (1)..(590): unsure at all n locations
gggaaactggggcacttaaggaagttaaggacaagttggacaaacttgttgaggagcttacatggagaatagatatcgaaaagcacatgaggacggatcttgaagaagctaaagggcaagagattgcaaaattgcaaaatgctttacaagaaatgaaagctcagttagatgaagcccatgctgcaattatacatgaaagagaagcagcaaaaatagcaattgaacaagcaccaccagtaattaaagaggtaccagttgtggacgaaaccaagctagagttattgacaaataaaaatgaggagttggagactgaagtagaagagctgaaaaagaagattaaagagtttgaagaaagttgctctgaaattgagaacgagaaccaagcaaggctgaaagaggcagaagaagcacagcttaaagcaacacaacttcaggagactaatgaaagattagaattgagtttgtcaaaccttgagtccgagaccaggttctatgccagaaggctttggaagaatcaaaanatgaagaactctntgaagagatcaaaatcctcagggatcagatagcanatctacaatcagagaatgaat

SEQ ID NO: 229187 - DNA, 535 bp, Glycine max
gctggtccttacttatacgcggattatctgattgaagtcttgaagaaaaagcatgcgtctggaacatataaaaacctagtattttatctggaggcatgtgaatctgggagtatctttgaaggtcttcttcctgaagatatcaatatttatgcaaccactgcttccaatgcagaagaaagtagttggggaacatattgccccggggagtatcctagtcctcccccagaatatacaacctgtttgggtgacttgtacagtgttgcttggatggaagacagtgacagacacaatttgcgaacagaaactctgcaccaacaatataaattggttaaagagaggactatatctggagattcatactatggctctcacgtgatgcagtatggtgatgtagggcttagcagagatgttctcttccattatttgggtaccagatcctgctaatgataatttcacttttgtggatgaaaactccttatggtcaccttcaaaaccagtcaacccaacgtgatgctgatctcatcccattttggga

SEQ ID NO: 229188 - DNA, 471 bp, Glycine max
acaaaaataaatacaagttgtcattaatattaaacaataattttggcatcataaattcttccggaataattatacaaaagtgaccagggaaaacccgatctgccagttgcccactgaataaaaacacacatcatattactatgtgttgtcatacaatgcattgtaatgagtggatattccaaagcaattggtccctttatccctccttaatccttatgccgtaaatggcaccatcccttgtaaattgtaattgcttcttcagaaatagaattatacaaagatagttgcaatatctatttgccaaactataaatgtaaagacccttcttcccaatcctagtagtgtcccaattgtatttacaaaggtgggacaagatatgtatatacaagtacaaccatgtaacataatgtaacaataatcatactttggtcttactagtgcacattcagggagttattatgcactgaaacc

SEQ ID NO: 229189 - DNA, 537 bp, Glycine max
ctcgagccgaatcggctcgaggcttacagtgtcttttatatgcactgtggctaacgatgaggatggatttttctggcacttttatcaggatggaaaaatagaagcagagatcaagctcacaggaattctcagcttaggatcacttcaaccaggtgaaactcgaaaatatggcacaaccattgcacctggactatatgcgcctgtccaccaacatttttttgttgctcgtatggacatggcagtagattgcaagcctggtgaagcatttaatcaggtcgttgaggtaaatgtcaaagttgaaaagccaggagacaataatgttcataacaatgcattttatgccgaggaaaaactgcttaaatcagaattggaagcaatgcgtgattgtgatcctttatctgctcgtcactggattgttaggaacacaaggactgtaaaccgaactgggcatctaactggttacaagctagtacctggctcaaattgtttacctttagctggctcagaggctaaagttttgagaagagcagctttctt

SEQ ID NO: 229190 - DNA, 443 bp, Glycine max
acaatataggcgtttcttaattatccagctaaggtttgaacaccagcccaaacaatagtattgaaaatttaataatttgaacataaccacgtaaagtggcagatcctcattttttatcctttcaaagcttggcaattagcccattctgaataggcttggctggcaagccattctctttgtcatccaaatcacttgggttaggtggaacatctacagcaggcgagcaattgaaaaacccatgcggcataagcatgaaaccaatgcgttccacgggcataacaggccagtcttccaatcgaggaatgtgtgtcactccaaatacgtaccaaagaactatatcagctttctccaatgatcggttttgcttaacccaagtagccaaaccctcttcaacgcgcggattttgattagggaactctccttcaggatgcatttcatcacgg

SEQ ID NO: 229191 - DNA, 511 bp, Glycine max
  unsure (1)..(511): unsure at all n locations
cttcaggaagtggtgaaaatgggatttgacatgaatcaattggttgaatctcttgggaacaggatacaaaatgagggtactgtggcatactatttgttattggacaaccgatttcgtgtttccagtggctatcttggagctgagtttcaagagaccatggattccggttttaatcaaatgcattccagtgaacttgcttcttcagttgttggaaaccgctttccaggctacatggaatatccaggagtaggatcgaggcaacagttccctgttgaaaggaaatgggcccttgggcttcagtctcgagcccatcctcgtgaaataatgactgaggttcttaaagctttgcaagaattaaatgtttgttggaagaagattggtcactacaacatgaagtgtangtgggttgcttgcattcctggtcaccacgaaggaatggttaacaataatgtgcatagtaatcattactttggagatgattcaacattattgagaatgatgctgtttctac

SEQ ID NO: 229192 - DNA, 367 bp, Glycine max
tgaacatgaacatgagcgacagagcttcggtttctccgcagcaaccacactctccggggcatggcccggttccgtacttgttcggagggttagcggcgatgttgggtctcatagccttcgctctattgatccttgcatgttcctactggaagctctcagggtacctcgaagggaacggggaaacagaacgggacctagaagctggcgaaacggagcaggaccagaaacctgcgaaaccatacgaggagaagatcttggtgatcatggccgggcaagagaagccaacattcttagcaactccgagtgtttcgagttgcagcactagcaggtcctcttacttcagcgacaacaccagcacgtgcacctg

SEQ ID NO: 229193 - DNA, 390 bp, Glycine max
ttttttttttttttttttttttttttttttttttttttttttttttttttggtttttttgggtttttttttttttcccgagcccaaatccgaactaacgaacccggggacgggacgcaaaaactcttttaaggggccaccaaaaaaaaaaacacggggcggggtttaaaaaccgcgggacgggaaaaacccggggggcccccaaataaaacggctgggaaaaaaaccccctttccccagggggggtaaaaacaaaaaggccccccccaatggcccttcccaaaaattggccaccacagaaagggaaaagggaccccccctgggggggcacataaaggggggggggggggggggttacccgcaaagagaccctaaaactaggcagggccct

SEQ ID NO: 229194 - DNA, 520 bp, Glycine max
gaggtgtttgcgtgtctctccgtaaatttccttcgactgtgacaacacgcaccgatcgggatgaacagggtgaccaagaaacccaccgccaaagaggctcttcgtgagagtaaacgtgaaatgacaaacgccagtagaggtatagagaaggaaattggagctctacaatcggaagaaaaaaagcttgttgctgagataaagagaactgctaagacgggaaatgaggcagcaactaaaattctagctcgccagttgatcaggcttaggcaacaaattgctaatcttcaaggtagtcgagctcagatgagaggcatagcaactcacactcaggccatgcatgcacattcttctgttgctgctggcttgaaaggtgctactaaggcaatggcagctatgaataagaaaatggaaccggcaaagcaagctaaaattatacaagacttccagaaacaatcagcgcagatggatatgactactgaaatgatgtcagatgccatagatgatgccttggataatgatg

SEQ ID NO: 229195 - DNA, 571 bp, Glycine max
  unsure (1)..(571): unsure at all n locations
gagaaaacccccaaccccaacctcttccttaacctctcctcactttcttttcaaccggaactatgaggaagctttttaaagtaaaggaaaaacagagagaactggcagaaaatgcgagtggcggaccacccgttaagaagcaaagtgccggcgagttgcgtcttcacaaagatataagcgagctgaatctaccaaaatcatgtaccatgcaattccccaatggcaaagatgacctgatgaactttgaagtttcaattcgacctgatgatggatattacttaggtggcacatttttgttttcctttcaagtgtctcccatctatccacatgaagcaccaaaggttaaatgcaagacaaaggtctatcatccaaatattgacttggaaggaaatgtttgtctcaacatcttacgagaagattggaaacctgtccttaatataaacactgtcatctatggcttgtatcatctcttcacggaaccaaattacgaggatccactgaatcatgactgctgctgctgtgtgagagagaaccctagatgttngaatctatgtgaggagggcaatggctg

SEQ ID NO: 229196 - DNA, 540 bp, Glycine max
  unsure (1)..(540): unsure at all n locations
agaattaaacgttaacattcaattaaagcacaggttacaagaacattccacttgtttggcttttagacgcgcttggtggtcttaggaacttggcctgtcgctccaccaagaaaaataacataactgacgaaagtaaaatccaattttttgataaattttacaaaccaagggccttcacgcattgataacatatttgaacaggaacttgaaggtatcgtgcaaaaggtctaaatacagcgtgggaaaaaggtttgccccacataccctccagccattgccctcctcacattagattcaaacatcttagggttctctctcaacacagcagcagcatcatgattcagtggatcctcgtaatttggttccgtgaagagatgatacaagccatagatgacagtgtttatattaaggacaggttttcaatcttctcgtaagatgttgagacanacatttccttccaagtcaatanttggatgatagacctttgtcttgcatttaacccttggtgcttcatgtggatagatgggagacacttgaaag

SEQ ID NO: 229197 - DNA, 570 bp, Glycine max
  unsure (1)..(570): unsure at all n locations
ctttcctatcacactttctagatagttagcctgtaagatatatatatagatattgggtatatatcctatggtccgtgagtgcccttgttctgtaccaaccctttcttccacatgttgagtttcagcatcgtcctctcttgagtccccatatcaaatacccaccgaattcaaccccccatataacaaatctcctcccatcccatttttcagcaccaaagtttgaaacttttctcaattgggttgaggagagtttgactcaaatttttatttttctaacgaagcagtagctattagaagtgcaaaaattaaatgtccaacatcttcttgttgatgtttgagattcatgtatccgattctcagtgaaatcttcttttccgggtgtatgatcaattccactgttaggcgcaggacccatttagttcaatccttctcagttgctttcctctattggttgtactacgtttcatgatttctaaaccttccttagtctaataatcatctactactanngctatatattattattattattatcatcatcatcatatataataaaatctatctgcaata

SEQ ID NO: 229198 - DNA, 579 bp, Glycine max
tgacaacacataccctgctgatgtttaacgagtaaggaggatgctatccaatagggagtcaggccgtcgctctagaagaagaaagcaggctcatttaactgacctagaaacacaggtttctcaattaagaggtgaaaattctaccttgttaaagcgccttactgatgttagtcagaaatacagcgactctgctgttgacaacagagttttaaaagctgatgttgaaacattaagagcaaaggtgaagatggctgaagagaccgtcaaaagaattactgggttgaacccaatgcctcatgccatgtctgatatatcatcattgggcctgccatcatttgatggaagaagcccttcagacacttcagctgatgcatctgttcctgtgcaagatgatccacatcatcacttctatcaacccacattgaataatcctattcccagtcatgatccgatagtcaacaatggtttggggggcatttcttcaattgaaaatgtgcagcagcagaacgctgcagcagtggtaggtgggaacaagataggtcaaacagcatccctgcagcgggtggctagcttggaaca

SEQ ID NO: 229199 - DNA, 601 bp, Glycine max
  unsure (1)..(601): unsure at all n locations
gtgaacaatatcaaggctgtacgtttagcattgtgttttctgatggatccagtgggtggcggggatttgtgttatgtgcagtttccccagagatttgatggtatagatcgtagtgatcgatatgccaatcgaaacacagttttctttgatgttaacatgaaaggacttgatggcattcaaggacctatgtatgtgggaactggatgtgttttcaatagacaagcactttatggctacagtccaccatctatgcccaaattaccaaaatcatcatcctgctgttgctgcccctcaaagaagcaaaccaaagacgtctcagagctttatagagatgcaaagagggaagaacttgatgccgccatttttaatctcagggagattgacaactatgatgaatacgagaggtcaatgctgatttcacaaatgagctntgagaaaacatttggtttgttcactgttttcattgaatctacactaatggagaatggagggcttcctgaatctgctgatccctcaatgctgatcaaagaggccattcatgttattagctgtggatatgaagagacaactgcnatgggacaagagattggctggatctatg

SEQ ID NO: 229200 - DNA, 322 bp, Glycine max
agtaacaaccatgtttgcaaccttacatttaaagtgcttacacatgtcaactgggggtcaaatcacaatcaatcatcatcatcatccatatttttaacatatggtcaaaactctttatatatgcagatgacttaccaatctatagaaatgcatgactgggaaatgcctgcactgacaggtctgctgataaaagggtcaatcttgacccaaacccgagagaaaacagaagccatccacactgaccacagaataacaatggttggggtgcggttttggcgacccatgagaccccttacgaatggatagagatggaaaatgaccc

SEQ ID NO: 229201 - DNA, 511 bp, Glycine max
aataaataggccgatagttcaatcttaaaggtcttcatacccatcaccaaaaccggggacgggggattgggataagttggaagctcaagtgaaaaaagaggagaaagaagaaaagcttgatggtgatgctgctttgaataaattgttccgtgatatttaccaaaatgcagatgaggacatgaggagagcaatgagcaagtctttcttggagtcaaatggaacagtgctatcaactgattggaaagaagtgggatcaaagaaggtggaaggcagtcccccagaaggtatggagttgaaaaaatgggagtattgattcggtacttaaatattcatttgagctgatgcttgtgagagttcaagtttgtctcctcccaacctcctgccaaaaaagacattctgtaatttcttgttattattttgtgttaagagaaattaattagctgggataatgacctaatttgcttttgctgtggaagtggattttattttatttgtattatgtgataatggt

SEQ ID NO: 229202 - DNA, 463 bp, Glycine max
accattatcaacatatacaaataaaataaaatccacttccacagcaaaagcgaattaggtcattatcccagctaattaatttctcttaacacaaaataataacaagaaattacagaatttcttttttggcaggaggttgggaggagacaaacttgaactctcacaagcatcagctcaaatgaatatttaagtaccgaatcaatactcccattttttcaactccataccttctgggggactgccttccaccttctttgatcccacttctttccaatcagttgatagcactgttccatttgactccaagaaagacttgctcattgctctcctcatgttctcatctgcattttggtaaatatcacggaacaatttattcaaagcagcatcacgcatcagcttttcttctttctcctcttttttcacttgagcttccaacttatcccaaacttttgtccttggtttt

SEQ ID NO: 229203 - DNA, 536 bp, Glycine max
cccaaatattggaaatgaaggctttctaagctattgcaaggctatgcaccaagctggggtcagtctctctcaaggattgccctcttgttggggatcatggagtgtctagtctgttggcgtcggcttcgaacttgtcgagggttaagcttcagactttgaaaatcacagatttctctctggctgtgatttgccattatggaaaggcgataacaaatctggtcctctctggtctaaaaaatgtcactgaaagagggttctgggtcatgggggctgctcaaggtctgcagaaactggtgtcacttactgttacttcctgcaggggaataactgatacaagcatagaagccattggtaagggttgcatcaacctgaagcagttgtgccttcaccggtgttgctttgtttctgacagtggattggtagcatttgccaaagctgcagtatctcttgagagcttgcagctggaggagtgcaacaggttcactcagtctgggattattgttgcccttgcaaacatcaaaacgaaattgaaatct

SEQ ID NO: 229204 - DNA, 465 bp, Glycine max
cgacaatttaaaggcctcggtgtttatcttgttttaggagatctatacgatcacgagagtggggtgagtgctataaagcaggtcgatgtggtaatttctactgtaggacacctgcagctagctgatcaagataagatcatttctgcaattaaagaagcaggaaatgttaagaagttctatccatctgagtttggaaatgatgtggaccggactcatgcagttgaaccagccaagtctgcatttgcaacaaaggccaaagttcgccgagctattgaggctgaaggaattcccttcacttatgtgtcaagcaacttctttgctggttacttcctgcccaacttgtcacagcctggagccacagctgcccccagagacagagttattatcctaggagatggaaacccccatagctgtttttaacaaggaagaggatattggaacttatacaatcaattctgtggatga

SEQ ID NO: 229205 - DNA, 480 bp, Glycine max
gcatgtaataaaggtatcatagcatatagcatagcataggtatttcatacattgttcttttgaggagcacatgcagcaattcagtcttactacatgattctctttatttagaaaacaaagttttaccaattaaacaaacttatcagctaggctttgcaccttagacaaactgattaaggtactcatccacagtgatgtatttcacatcaggatatagagctgaagcttccactccaaaagaagactcaatttcaaagttagtatgatccccctttacataagaagagtggttaattgacaggatcacattcacgggtggtgcggactcttcaatttgcttcaggagttgttcttctggaacatagattctttcaagagttttaccaatctttccctcccagagagtaacaagctcattaaacgacaaggtattagctggtggtctaatgtagagaatttctgtcaagggtcttggatcat

SEQ ID NO: 229206 - DNA, 434 bp, Glycine max
aacttttctttgtttctcttttctttgtattatccttttgttgtagatggcattggggagaaggagtggactctttgctcttgaaaagcattttgctttctatggagcataccacagcaacaaaattaacatagcaatccacgtgttgtttgtttggccaatttttttctcggcccttcttattctctattttgtccctctccctcccttattcaaccttcaaaacttggagttttccatgtgggagaactatgtgatattggtttggaatgttgggtttttggttgctttgctctactcagttttctatgtttctttggatctgaaagctggctctttggctgctttgctttgtgctctttggtggaatggtagtagctttggtgccagccaacttggggtggctctaacttggaagggtggtcttgtgggtc

SEQ ID NO: 229207 - DNA, 442 bp, Glycine max
tcttcatccatagacatggtcaccgttacttctgcagccgttgctattgggtcatggactggcctcaaggcaagcgcaggcaaagtgagtgccgcagttaaagtctcagctccccaagccacaaggttgggcatcaaggcttcgctgaaagacgttggagtcgctgttgtggccactgccgcgagtgcagtgctggctagcaacgccatggccattgaagtgttgctgggtggtgatgacgggtctctggctttcgttcccaacaatttctccgtggcctctggggagaagatacgtgttcaagaacaacgcaggtttcccccacaacgttgtgttcgacgaggacgagattcctagcggcgtggatgcagggaaaatctccatgagcgatgaagaccttctcaatgcgcctggtgagacttacagcgttactttggatgct

SEQ ID NO: 229208 - DNA, 440 bp, Glycine max
gaattacagaaacgcattatatcgttcattcatcccataggccataacaagaaagatcaaccaagctcttctagaaaaaacaaaaatattagaagaaggaaccatatgagaacttagacgtaggagacgagcccttgagacaataattaattaacagtgacttttcccaccataccagctccttggtgaggcgaacagaagaaactgtaggttcccttagcatccaaagtaacgctgtaagtctcaccaggcgcattgagaaggtcttcatcgctcatggagattttccctgcatccacgccgctaggaatctcgtcctcgtcgaacacaacgttgtgggggaaacctgcgttgttcttgaacacgatcttctccccagaggccacggagaaattgttgggaacgaaagccagagacccgtcatcaccacccagcaacac

SEQ ID NO: 229209 - DNA, 546 bp, Glycine max
  unsure (1)..(546): unsure at all n locations
gcacagcagaactctgctttttcggtattccgatcgcacgcgccgtcaccgtggtgggcgttccgaaaacaaagaagacatactgcaagagtaaggagtgcaggaagcacacgctgcacaaggttacccaatacaagaagggtaaggatagcattgctgcccaaggaaaacgccgttatgatcgcaaacaatccggttatggtggacaaactaagcccgtcttccacaagaaggctaaaaccaccaagaagattgttctgaggttgcaatgccagggttgcaagcatgtctcccaacacgctattaagaggtgcaagcactttgagattggtggtgacaagaagggcaagggaacatcactcttctagtttgagaattaggatttagagctttatgtttcagcaatgttggaatgttctgtttctctctggattctttctgctagttatattttattattttgcaacaccttgttattgagaaaataaaactatnntgctcatttcatcgatggcaatctctatctatttttatactttngatact

SEQ ID NO: 229210 - DNA, 521 bp, Glycine max
  unsure (1)..(521): unsure at all n locations
agtatcaaaagtataaaaaatagatagagattgcaatcgatgaaatgagcaaaatagttttaatttctcaataacaaggtgttgcaaaataataaaatataactagcagaaaaaatccagagagaaacaaaacattccaacattgctgaaacataaagctctaaatcctaattctcaaactagaagagtgatgttcccttgcccttcttgtcaccaccaatctcaaagtgcttgcacctcttaatagcgtgttgggagacatgcttgcaaccctggcattgcaacctcagaacaatcttcttggtggttttagccttcttgtggaagacgggcttagtttgtccaccataaccggattgtttgcgatcataacggcgttttccttgggcagcaatgctatccttacccttcttgtattgggtaaccttgtgcagcgtgtgcttcctgcactccttactctngcagnatgtcttctttgttttcggaacgttcaccatggtgacggcgcgtgcgatcggaat

SEQ ID NO: 229211 - DNA, 445 bp, Glycine max
  unsure (1)..(445): unsure at all n locations
attttttttttatggtcgccatctgatctgctatgannctacttgacgtaaatgcacctccgtagctcggaattggtcggtatatatatataaaatgtgtaacttttatatatattgataaaaaaggagtgggtttatatacacactttgatcctataaaaacatcttgacacaagcattcaatagaatttcaccactttatcatgacattttactataatgatgtggtaataaagtaaattcttgttgaatattttgtataaagatgctttatactcatggtttctgtgtataaattaagcttatatatatttacactatatattgccactttacgtttgtgtgatattaattatacagtcaagtatttattagctatctttgaatatggtgtatacactagtatacatgttgtatccagggaattatggttaaagagctatat

SEQ ID NO: 229212 - DNA, 464 bp, Glycine max
gcaccttagtaccttgaatcattattattcgggtaatggacacatcactggtgtgggctgtgaggaggagtgaggcagagctgatagctccggcgaagcccacccctcgtgaagtgaagctactctcagacatagatgaccaagatgggttacgtttccaaattccggtgatacagttctatcgccacgacccatcaatggcagggaaagaccctgtcgatgtgataagaaaggctgtggccaaaacgcttgtgttttactatccttttgcaggtaggcttagggaaggacttggtcggaaactgatggtggattgtactggggaaggtgttttgttcattgaggctgatgcagatgtcactcttaagcaatttggtgatgctcttcaacctcctttcccgtgctgggaggaactcctttatgatgtacctggttctcaaggagtgcttaacactccccttctg

SEQ ID NO: 229213 - DNA, 443 bp, Glycine max
aggtaataataattttgattcttctcttgctgccactggcttgttgattacatatacgtactcgatgacatcaaatgctcaattattgattccttcattggcacgaagtaaagtcgaaaagtactggatctacaaggaagaaacaatgaacctagagtttggagcaatggcactaggttggacgatgtggtggttaagcacacagtccaactccttctgaaccctctccatggcttcagaaggcaaacaaaccggtataaccaacccttcctctcctttagcattcttaaagggtatgtaaaagctagcaacaccaggtatggctccaacccctcccttggcgggtcctccataaacagccttcccccacccaaactcaatgtttccaaacccagcacgagtcacatccgacacgagatacgatctcacaacagtgaagtgag

SEQ ID NO: 229214 - DNA, 544 bp, Glycine max
ggcaaacagaagaaacacgttcgtttcgtttcgttcccatggcggtctgggtttgggcgtcctccgcgattgcttctttgaactccgaactctccacgcgcttgccaccctcactcgcctccgcatcttcttccgccaagcaatcctttctgcaattcccgtcgtgcacgcgccttcttcggattagcactccacgcgctcccgctccatcgcgacctcgattccttcctctggttcaagcgaagaaacaaacctataactcgtttgacgatttgcttgccaattctgagaaacctgtgttggttgacttctatgcaacctggtgtggtccttgtcaatttatggttcccatactcaatgaagtaagcactcggcttaaggataagatacaggtggtgaagattgatactgagaagtatcctagcattgctgacaaatacagaattgaggcgttgccgactttcatcatgtttaaggatggagaaccttatgatcgctctgagggagcattgactgcagatcagctcattgaacgcatagaagc

SEQ ID NO: 229215 - DNA, 486 bp, Glycine max
aaaaatgccactgctaattaaactaaatattttagggttgaatctttgcattttgagatacattaatcacttcaaaaatgtctgaatgatgttgaaacaagtgattccagtcaatcatatcatgtatgtgatcgaacattccaatagacaagcttctttgtgtcttcattatagtagggttattgcttaaccttgaggccggcttctatgcgttcaatgagctgatctgcagtcaatgctccctcaaagcgatcataaggttctccatccttaaacatgatgaaagtcggcaacgcctcaattctgtatttgtcagcaatgctaggatacttctcagtatcaatcttcaccacctgtatcttatccttaagccgagtgcttacttcattgagtatgggaaccataaattgacaaggaccacaccaggttgcatagaagttaacccacacaggtttctcagaattggcaagccaatcgtcaaacgag

SEQ ID NO: 229216 - DNA, 495 bp, Glycine max
caatgagcataggcattgtttgaggtgttcaattcttacacacaggaggggctcggggcatatatggcaacaatttaaagattgagaacattctgttggatgatagtctcaatgcaaaagtcagtagatacaacattccattgccatccaagattgcacatattgaacaaaatgccaccaatcatattggcagcacaaacgatgcagaaaaggaagatatctatcagttgggtattattctacttgaagttatcactggcaaacaaattacatcctcgagtgaaatagaggagctgaaggaagagctggagaatggttcatcagaagcaacatcagtaattagaagcgcaattgatccttcactgaggggaacttatgcatatgaatcaatgaaaactgcagttcagatcaccatcaactgtctctccaaggtttctagtcagcgcccttcaatagaggatgttctttggaatttgcagtacgcaatgcaagttc

SEQ ID NO: 229217 - DNA, 498 bp, Glycine max
gataggaacctaattcaaagtattataaaaccttagtaacaacaataatatggaaaaatgcaggccaaattgcattttggggccttatgaaagaaattacatatgtacatcaacattttattcattatgataatgaacatatggaaatgtaagcaagcatttttttattgacaagtgtggtttacaattttgtgctgaggtttccactgctggtccaggactcttgaacttgcattgcgtactgcaaattccaaagaacatcctctattgaagggcgctgactagaaaccttggagagacagttgatggtgatctgaactgcagttttcattgattcatatgcataagttcccctcagtgaaggatcaattgcgcttctaattactgatgttgcttctgatgaaccattctccagctctttcttcagctcctctatttcactcgaggatgtaatttgtttgccagtgataacttcaagtagaataataccccactgat

SEQ ID NO: 229218 - DNA, 543 bp, Glycine max
  unsure (1)..(543): unsure at all n locations
actgtcggcaattgaccctgagncgnatntcaactaaaggtaagngccanaacctcggagttcggctggagctggaaccctttaagatcaacattattctatttaccctgccggcngcaaaccaaggggaagggggcgtcttcaatgaaggaaacaaccaataacatgcataggaggatctcactcttcaagaacaacccgtggagaagcttctggaaccgttcacaaaggagcagattcactctctcgtcacgcaggccgtggatatgtttcccgaattcatcgatagcgtgcgccggcttgctgacgtggaccctgcgcacaggaaaatcttcgttcatggccttggctgggacgccactgccgatactctaaccgccgtgttccgtaaatacggcgagatcgatgattgcaaggccatcaccgacaaggacttcgggaaatcaaaaggttacgcctttatcctcttcaagcacagggacgatgctcgcacggcgctgaaacaccctcaaaagaagatcggaaaccgcaccacctcgtgcc

SEQ ID NO: 229219 - DNA, 448 bp, Glycine max
caaacacccatcaactgatatcattattggtgttatagacacagggatatggccagagtctcctagtttcagagatgagggtataggggagattccttcaaaatggaaaggtgtttgcatggagggtcgtgatttcaagaaatccaattgcaataggtgatcatccattctcttacaaatgtttctaataaaaatgctcatatctattcataaagtcttctagtaatcataatttaacactgacaaaattacaaattgatcatatgctacacttaaattctctttataaaactgcagaaaattgataggtgcaagatactataagattcaggctacatcaggtgacaaccagactcatatagaagcagccaaaggttcccctagagatactgttggacatggaactcacactgcatcaatagcagctgggtgttcatgtcaacaatgc

SEQ ID NO: 229220 - DNA, 376 bp, Glycine max
aagtgtacttatagatattgatgggtaattgacgctggagataaggtcttcagaggagttctttgggcaattgaagttagtctcagagattgaccttatgattttctgtgaatagccgaaataacaaaggaatctgagatagtcttccacatctgtttcaaagactaagccagggttgagagctctgagtggattaatttccccaactcccatttcatgtgggccggcaatggagtttgagctgttagtaagaggcttcctcatgttgttgtagtttgtagctgttgtcatcaatgctgatttgatcattgaagaactccattttttgtgtactgacttaatgaatgctgctgcacctgtcacatgtgggcaagcc

SEQ ID NO: 229221 - DNA, 492 bp, Glycine max
cagcaaccgtgataagcttttaagatttcgtcacaatccttcagtatatgggttgggccatcaatccagtggcaacaattctaccaacagctacagttcttgattataagccagcgcccgtggtgccaaacttttcatcaagagggccttcatcgctttcaagcaatattctcaagcctgatattgcagcaccaggagtgaacattctcgctgcatggattggaaataacgtatatgatgttccaaaaggaagaaaaccctcactatacaacataatctcagggacttgcatggcttgcccacatgtttcatggcttgcaagcagtgtcaaaacacgaaaccccacttggagtgcctctgcaatcaaatctgccatcatgacttcagcaattcaaattaacaacttgaaggctcccataacaacggattccggaagggtagccacaccttatgactatggagcaggggaaatgacatacgtctgaatcattg

SEQ ID NO: 229222 - DNA, 465 bp, Glycine max
gcaagagaaagaggctttttaagcttctcagtgcattcgtttccgttggggaatgggtatccgaatccgcagataccattggaatcgtctccagagacgtcaaggtttttctggaatccgattcagatcaaatccccaatagcttgaagcaaatttccaagatagctcgctcggaacacttgtcagagtctttggttagcgtcacccgtgctgtgaccgtgggagtcttgcgtggttatgaatccatgaaccggaccggtggtgaccaaaccggttcatccgtcgtggaccgggtccttgacaaaatgttaacaccagcagggtcaggttttgcttctgtagttcttggaagctttgctaggaaccttgttcttgccttctattcagatcaacaacataaccattcaggtggggaatctaactcgatcaattccaattcggaaactgttctacatgggtggatgt

SEQ ID NO: 229223 - DNA, 596 bp, Glycine max
  unsure (1)..(596): unsure at all n locations
aaactacaacctttgtcattttctttcttgttcgactctgcttctttcgggaactgcacacacacacacacacaaaaaaaaaaaaacatggcaaaggatagaacaattggtgtggctctggatttctccaaaagcagcaagaatgctctgaaatgggcacttgagaacttagccgataaaggtgacaccatttatgtcattcacattaactccaactctctagacgagtcccgcaacaagctatgggcagaatctggttctcctcttattcctttggtagagttcagagagcctgagattatgaaaaagtatgatgttcaaattgatattgaggttcttgatttgcttgacactgcttcaagacaaaaagagatccacattgttacaaaaatatactggggggatgcaagagagaaacttttggatgctattgaagatttgaagctggattcgctggttatgggaagcaggggcctcagcacaatccataggattatattgngaagtgtaagcaactttgtgatgacccatgcctcttgccctgtgactatcgtcaggaaactagcanggaactagcagcagcaagtaagatgatc

SEQ ID NO: 229224 - DNA, 490 bp, Glycine max
ggcactcaaattaaattattgcctcaataaaaaggagtgaaaactataaagtacagtaaatcataaatttatcttagacaccaaaataatacttaggaaagggaatatggcccaacttgatcagggacaatgcaagaaaaaaaataatatgtgaaatttaaatgttctctcccaaattgatcatctttacttgctgctgctagtttccttgctagtttccttgacgatagtcacagggcaagaggcatgggtcatcacaaagttgcttacacttcccaatataatcctttggattgtgctgaggcccctgcttcccataaccagcgaatccagcttcaaatcttcaatagcatccaaaagtttctctcttgcatccccccagtatatttttgtaacaatgtggatctctttttgtcttgaagcagtgtcaagcaaatcaagaacctcaatatcaatttgaacatcatactttttcataatctcaggctct

SEQ ID NO: 229225 - DNA, 554 bp, Glycine max
  unsure (1)..(554): unsure at all n locations
atccgagtgacactcctctctttgtggccatggcttcactgaggtgcctgcactgggcccaccctcatcttcatcgcggttcagcgcttctcgccatttcgaaccgctgcttcaaccattcctccttgctgaaccggactctctccgtaaaccctcctcgaaccgctcctccacgcgccatggccaagcccagtttctcaactgcccaagacctagtggcttctcctggcgattttgaatttgcgcagcctctgaaaattgtggagtatcccgacccgagattgagggccaggaataagcgcatagttgccttcgatgatagtctgaagaagcttgtccacgaaatgtttgatgtaatgtacaaaactgatggtattggtctctcagcaccccaattaggaattaatgttcaacttatggtgttcaatccactangtgagcgtggtgaaggagaggaaattgttcttgtnaacccaagagttagccaatactcaaagaaactgacactatttaatgaagggntgcctatcttttccaggcatcaatgctgatgt

SEQ ID NO: 229226 - DNA, 518 bp, Glycine max
gtttttgaaatgttgtcactccctttttctatttctatgcctaactcttgggttggggttgttgtccttcttcaaataccgtaaaaccttcaagaatccaccacttccaccaggtcctagaggccttcccataatagggaatcttcatcaactagatagtccttctcttcatgagcagctatggcatctctcaaagaaatatggtcctttattttcccttcaatttggattaaggccagccatagttgtttcctctccaaaattggccaaagaggtaatgaaagacaatgaccttgagtgctgtggacgacctaaattactaggccaacagaaactaacctataatgggttagacatgggattttcctcatacgatagttattggagagaaatcagaacaatttgtgttgtccatgtccttagctccaaacgtgtccaaagctttacctcaataagacattttgaggtcaagcagatgataaaaaaaatatctaggcatgcctcatcttcaaaaagta

SEQ ID NO: 229227 - DNA, 462 bp, Glycine max
  unsure (1)..(462): unsure at all n locations
cagcagtagttacgacttttggattttacatatagcacttggccacaacacacagaggattcttcttatgctgtgtaactcctggcaacacttcagtatcaatgtcttcctttttcattccttgtggcaattcccagtcaaaggaataaagaagattagcaagtataagatccaatgcagcaaatgccatattcataccagggcacaatctacgaccagcaccgaatggaataaactcaaaatcttgtccataaagatctatgtcgcaatttaaaaacctctcaggtataaactcttctggatctttccaagccttaggatctctatgaattgcccaagcattcacatataataatgtcttggctggaatttcgtagccatctaacatgcatnttttatttggttctcttggtataagtagggggtgctggtaagtgcaatcaaagtgtctcttttatcact

SEQ ID NO: 229228 - DNA, 543 bp, Glycine max
cttcaaaatcgttgtcaatttcgcctctttctttctcaactcccttagaggctctcgatcgggtcttcaaaaatgcggatgagctgcaatggatgtcgagttctcagaaaaggttgcagtgaaaattgcagcatcagaccctgtttacaatggatcaaaagcccagaatctcaagccaatgctactgtgtttcttgccaagttctacggccgtgctggtctaatgaacctggttaacgcaggccccgaacatcttcgtccagcgatctttcgttcgttgttgtacgaggcatgcggtcggatattgaacccgatttacgggtctgtcgggttgttatggtccgggagctggcagctatgtcaagccgccgtggaaaacgtcttgaaaggcgcaccgattacgccgatcacgtccgaagccgcggctagcgggcggggcccaccgctcaaggcttacgacatacgccacgtgtccaaagacgagaactccggcgtcgcgtccaacgaaactcagcaccaacgagtcaagactcggtctcgagtg

SEQ ID NO: 229229 - DNA, 542 bp, Glycine max
aacattgcagttgaaagcttatggttaatcttttttgttgtgtgaaagttgatcgggctacggtggctatgagagaaggatttggacgatttgagaaggtacttcagccgggatgccattgcatgccatggttccttggaaaacaacttgctggtcatctctctcttcggctacagcaactggatcttcgttgtgagaccaagacaaaggataatgtctttgtcaacgttgttgcttctattcaatatcgtgccctggcagagaaggccaatgatgctttttacacactgagcaatacaaagacccaaattcaagcctatgtttttgatggtataaaaccttgatactgagtgataatacgaaacctacaataagtggtttaagcatattttatcagctaaggtgaaatttctattttcattgcagtaattagggcaaggtgttccaaaactaaacttggatgatgcttttgagcagaaaagtgaaattgccagagctgtggaagaagaactagagcaggctatgtcagctcatgggtatga

SEQ ID NO: 229230 - DNA, 663 bp, Glycine max
  unsure (1)..(663): unsure at all n locations
atgttcgcgatggaccctganacgatntctgtagaggttagggcaaagacccggaattcggctggaggggaaactgttgcacttaaggaattttaggttttgttggacaaactcgctgagggggttagggggagaatatatatcgaaaagcacatgaagacggatcttgaagaagctaaagggcaagagattgcaaaattgcaaaatgctttacaagaaatgaaagctcagttagatgaagcccatgctgcaattatacatgaaagagaagcagcaaaaatagcaattgaacaagcaccaccagtaattaaagaggtaccagttgtggacgaaaccaagctagagttattgacaaataaaaatgaagagttggagactgaagtagaagagctgaaaaagaagattaaagagtttgaagaaagctgctctgaaattgagaacgagaaccaagcatggctgaaagaggcagaagaagcacagcttaaagcaacacaacttcaggagactaatgaaagattagaattgagtttgtcaaaccttgagtccgagaaccaggttctatgccagaaggctttggaagaatcaaaaaatgaagaactctttgaagagatcaaaatcctcatggatcagatagcatatcttcaatcagagaatgaatcccta

SEQ ID NO: 229231 - DNA, 496 bp, Glycine max
ccacgtaaaccttgactttagaaaattaagcaaaaagaattgtattgtccacgtggagacacaagagacagataagatcaggaaaaagaaaagagaaaggtttcaaaacaaagcatagcaggtgacctttgacatttttttcaagagaacaaagacttcagaaacagccttattacacgctctggctatcaacattatttttgagaggttggcattgccaagttaatcttgctaccaccagttgaatccttccattgttgtgttattgtcttaatctgtgtatagaagttaacccctgccttgccatagaagttgagatcaccggcaaacgatgccttgttgccggtaaatgagaagaagggcaaaggaactggaatggggacattgatgccaacctgtccagcctctatctcagtctgaaatttccttgcagcaacaccagatgtagtaaatatagaagcaccatttccgtacttgttactgttgataatgttta

SEQ ID NO: 229232 - DNA, 473 bp, Glycine max
  unsure (1)..(473): unsure at all n locations
ctgttgggtatgacttcaaagtggttaatctgaacgaaatggttaagagggtattggcatgttttctcccaactgagttctctgttgcagttcatgtggatggtgcaagcaagttgtttgatcagacgtgttttctggatgttaagggatactgtcgcgaagagaggagccacgaagggcttggaatgggtggttctcttgtctaccaaaaatttgccaagacttgtgactgtggttcacctagatcaactctgaagtgctggaaaaggaaagataaaaaaagtagttttctttaagtgtctttattatgtccttgcgaaaataagtcncggttttccaacaaggaatggttttctttgggggttttttccttttattgtagaaccatggtaaggccgtttggaccttttattgttctactataaccatttgaacatcgaatggattttaataaatcacttttgattgcgggc

SEQ ID NO: 229233 - DNA, 467 bp, Glycine max
gcacgcatacatagtgatttattaaaatccattcgatgttcaaatggtaatagtagaacaataaaaggtccaaacgccctaacaatggtctaacataaaagggaaaaaacaccaaagaaaaacaatcactgtctggaaaaccggacttattttcgcaaggacataataaagacacttaagaaaactactcttcttcatcttcctctttccagcacttcagagttgatctaggtgaaccacagtcacaagtcttggcaaatttttggtagacaagagaaccacccattccaagcccttcgtggctcctctcttcgcgacagtatcccttaacatccagaaaacacgtctgatcaaacaacttgcttgcaccatccacatgaactgcaacagagaactcagttgggagaaaacatgccaataccctcttaaccatttcgttcagattcaccactttgaagtcataccca

SEQ ID NO: 229234 - DNA, 459 bp, Glycine max
  unsure (1)..(459): unsure at all n locations
cttgagaaaagagaattagggtcattagggtttcatcctgcggcatgggacatgggaggaggcaatgggcaaaaggcaaagatggctcgcgagaagaacatcgagaagcagaaggccgcctcaaagggaagccagctggattcaaacaagaaagcaatgtcgatccagtgcaaggtgtgcatgcaaacatttatgtgcaccacatcggaagtgaagtgtagggagcatgctgaagccaaacaccctaaatctgatgtttatgcttgttttcctcatctcaaaaagtgaacatattggagagtgcaaatggagaaaaactttatatcatcatggcctcttccttaaacctattgacagagatcttccccattttctatctatataaaatgtgtttttctgtgtttggtgccttgggaatttaggagggacanggagaggaagactattttattatgattt

SEQ ID NO: 229235 - DNA, 548 bp, Glycine max
ctgtaactctttaatattaacacgaaccatcattaaacagttacaccttgacaagcatcacacagtttcttgtcctgtcatcaagggaaatcataataaaatagtcttcctctccttgtccctcctaaattcccaaggcacaaacacagaaaaacacattttatatagatagaaaatggggaagatctctgtcaataggtttaaggaagaggccatgatgatataaagtttttctccatttgcactctccaatatgttcactttttgagatgaggaaaacaagcataaacatcagatttagggtgtttggcttcagcatgctccctacacttcacttccgatgtggtgcacataaatgtttgcatgcacaccttgcactggatcgacattgctttcttgtttgaatccagctggcttccctttgaggcggccttctgcttctcgatgttcttctcgcgagccatctttgccttttgcccattgcctcctcccatgtctgatgccgcatgatgaaaccctcgtgaccctaattctcttttctcaagctc

SEQ ID NO: 229236 - DNA, 535 bp, Glycine max
  unsure (1)..(535): unsure at all n locations
aatgacattacctccattgctagcttcggtggaagagtacaatgcatgcgggtggggccaccaattggcaagaagaagttcgagactctttcctacttgccagacctcgatgatgcccaattggcaaaggaagtcgaataccttctaaggaaaggatggattccttgcttggaattcgagttggagcacggtttcgtgtaccgtgagcacaacaggtcacctggatactatgatggacgctactggaccatgtggaagctgcctatgtttggctgcactgatgcttctcaggtgttgaaggagcttcaagaggctaagactgcataccccaatggcttcatccgtatcattggatttgacaacgttcgccaagtgcagtgcatcagcttcatcgcctacaagcccccaggcttctaagtcattgaggaatttgcngagcatctgtagccaccccacttctgttggtggtacttaaactacattcccatttgtttttgctttatgagatttcatcatcctgtatttttggtttctg

SEQ ID NO: 229237 - DNA, 433 bp, Glycine max
ggcaacacaacacaatagcttattcattagttctcatccattaatttccattgaagtccgaaaacagaaaccaaaaatacaggatgatgaaatctcataaagcaaaaacaaatgggaatgtagtttaaggaccaaaaaacaaaggggggtggctacagatgctttgcaaatttttcaatgacttaaaagcctgggggcttgtaggcgatgaagctgatgcactgcacttggcgaacgttgtcaaatccaatgatacggatgaagccattggggtatgcagtcttagccttttgaagctccttcaacacctgagaagcattagtgcagccaaacataggcagcttccacatggtccagtagcgtccatcatagtatccaggtgacctgttgtgctcacggtacacgaaaccgtgctccaactcgaattccaagc

SEQ ID NO: 229238 - DNA, 418 bp, Glycine max
aatctaaacgcaataattatagacaataattgaagttcccattaaaatttcaaacaaaaacttatcaaacatgcattcaccttcaacactaccacaataccacggtttactgggccgaaaaacaaggacagatgcctaacgtccttaggaaactcactctattacataagccaaaaataatacatgaatgagtcataaccaacagcaaaaatatcactgaccaccatgctttgccttgttatgttgttgcagaccactttcattggtgaaagacttgctgcaggttttgcaagagagtccaccagacttaggagtcttggctttggcttcactgttgggagtcttggctttggcttcgctgttgggagtctttccgcctttctttgcagggtgaggagttgctgtatgtccacctttc

SEQ ID NO: 229239 - DNA, 548 bp, Glycine max
  unsure (1)..(548): unsure at all n locations
agaagaggaagatcttcctgcagtgttctggtgctaagtggtgttcctgtcagggtgctggtcacaattcttttgatatgggcaatccttagacccaccaaacccaccttcacgctccaagacgtcaccgtctacgccttcaacgccaccgtggcgaacttcctcacttcgaattttcaggtcacgctcatctcgcgtaacccgaacgaccgcatcggtgtttactatgatcgcctcgaaaccttcgtgacctaccggagccagcaggtcacgtaccgaaccgccatccctccgacatatcaaggccataaagagatcaatgtttggtctccgtttgtttatggcaccaacatccccgtcgcgccgttcaatttcctcggcctcagccaggaccagagtaacggtaacgtcctcgtcaccatccgagccgagggtagggttcgttggaaggtcggcaccttcatctccggccgctaccacctctacgtncgctgcncggcgttcatcagctttggaccccgcagcatgggaatcgtcgtcggagagaa

SEQ ID NO: 229240 - DNA, 395 bp, Glycine max
acttgctttacaaaacttatgcgttcttcgatgctagcaaaccctccgggagccgggggaacaaactcggggttggtatctcatgatcaacctgaaacatggattcatacattactgaggcatcatgtgatgacacaccaggtccagggcaatacataggcgaatttcttgctgtctgttattggggagttgagctggccttgcacacggggcctggggggacccatacataagctggctacacccaggggcatgtgccttattcagcctatgaagacgtgctgccagggtctatcaaccattcaaaggtagcaaggattgaatatgatgcacatgactgcaactatgagactgtgcttgacatgtgctgacctagacatgatactaccactatg

SEQ ID NO: 229241 - DNA, 490 bp, Glycine max
gaaaaatctcctttttaattattttttaattattattattgttttgcggtggttgggtttggtttgacataaataaacctttcaagatctcagaggggcagaagatcaaagccaagacaacacactctcatatataaaagagtgtctctgataatttgatctttgtttcttctctttctctcctttgagatttttcagcaccccaccaaggttttgtccgaaaagcttgaatttttcgcctaccctttacaatgatctcttcattgagacaacctgttgtagggatcagtggttctgatcttcttttgaggcaaagacatgcaaccctaattaaggcaaggtcctttttaccctctttgtcaagagaaaagggtcaaagatctcttgtttcagttcaaaagccacttcacattgctgcttctcttggtgttggaaattttgtgtcagtgaagagtgatgatgacaaaaggggtgatttggtgaagtgtga

SEQ ID NO: 229242 - DNA, 449 bp, Glycine max
aaacaaaacgcatttattttaaatcattggcatttctgaaattccaaaaaaataaataaaacctacctaatcatctgtattatgataatgtttcctcagcagcattatttttattattatatctacagatggactgatagccagatcatcctagtattacaaaaatccagcagtgacacattacaaaatcaacttccttgtccctggttgagcatgaagaactgtaacaaacaagtccctagaggaatcttagttccccaactctatagtttcgcctgtgaatacaagaaggttccaaggatagcaatggcggcaccaagagcattgatgggttgaactggtgtgtggaagataataatggaagacacaatgacagatatacgtttcatggtgtttccaatgctaaacgtcaaaggagagatctgatccagagacatgtatgacacttg

SEQ ID NO: 229243 - DNA, 543 bp, Glycine max
acgtgatcaagggctcaaagaaagttcaagttcaacaaatcatcagagacattaaggagtttaaggaaagcactaaggttgacaaggtggttgtcctgtggacagccaacacagagaggtacagcaacctagttgtgggactaaacgacaccatggaaaacctctttgcttccttggacaggaacgaggctgagatttccccttccaccttgtatgccattgcttgtgttatggaaaatgttcctttcatcaatggaagccctcagaacacctttgtcccagggctgattgatctggccatcaagaggaacagtttgattggaggagatgactttaagagtggtcagaccaaaatgaaatctgtgttggtggatttccttgtgggggccggcatcaagccaacatctatagtgagttacaaccatctgggcaacaatgatggcatgaatctctcagcccctcaaacctttcgctctaaggaaatcttcaagagcaatgttgttgacgatatggtcaacagcaacgccttcctctatgagcccg

SEQ ID NO: 229244 - DNA, 370 bp, Glycine max
ggataacttgatattattttattacatacatgcatagatagcctgctctcaaataagtcggcaggaacaaagatagagagattcaacgatcttcaaatttcacatttgccagaaatatataacagaaaagaggggtatgggatatgagttaagttttgatcacattcaactacactatcccaaaccgttactcttaagactttgaacttcacttgtactctaggatcatgttgttctcaggagctaatccaacacaagccctcaggatgttttccagcatagctcgctgctttgacaacgcattcaccactggtgtacccggtggaaccagaggggccttggtcaggtaactaaggatggtcgcaactgg

SEQ ID NO: 229245 - DNA, 587 bp, Glycine max
ctggactgcgagaggtgcttgccttagctatatactcattttcgcgtgtttgctggctctagatctgattagcttttattcgagttctggttccttgtttcgtccctgcataatctgaattcaaatacttgccatcttgttacttgttacgctaccagatctgttttgaattaagagatggggttgtctttcaccaagctttttagccggctctttgccaagaaagagatgcgtattctcatggtaggtcttgatgctgctggtaagactaccatcttgtacaagctcaagctgggagaaattgtcacaaccattcccacaattggatttaatgtggagactgtggaatataagaatattagctttactgtatgggatgtgggtggccaagataagattcgtcctttatggagacactacttccaaaacactcaggggcttatctttgttgtggatagcaatgatcgtgaccgtgttgttgaggctagagatgagctccaccggatgttgaatgaggatgagttgagagatgcctgtctcctggtatttgccaacaaacaagatcttccaaatgctatgaatgctgc

SEQ ID NO: 229246 - DNA, 446 bp, Glycine max
catgtatagtttgtaattcattaattatttaaaaattctacaggattcaatacgattgctatgatatagtatcaaacacctaaataaagaaaaagaaaagacttaaaagagtaaaaaaaaaaaaaaaaatatatatatatatatatatatatatatatatatatatatatatattataaggctatataagagaagcagcaacccatcaacctcataatataataagcaagaaatagcggcattccacaaaatgtccctaagccttgttagctatattgtgggagagccactccagtccttcatatagtccttccccagaggtagcacatgtgctctggatataccaggggcgttggcgaagagaatgaaaaccaagcttgtctgtgatttctgcagcattcatagcatttggaagatcttgtttgttggcaaataccaggagaaca

SEQ ID NO: 229247 - DNA, 482 bp, Glycine max
  unsure (1)..(482): unsure at all n locations
cggctnagatctttattccacctttcacaaaacatataccatgtcggtttgggtttccttcaatttcatagtagcaactcgttggggcactcctcttttaacccaatagtccaaacccgaacaacaacataaaatcatcaaaaccaacatcaaatgtagggtgcaatattatccaaagtcagaggaacagaaatgggtgttcgacaagtttgacaccaacaaagatggcaagattaccctcaagagtacaaacagcagtgagaacaatggggtggggaatcgaaggcactgagactgatgagtcttttcaggtgatggactctgatggagatggcttcattgacttcaaagagttcatggacatgttcaacgtggaggagagggtgaaagagacggagatcaagagtgcttttcaagtgtttgatttgaatggcgatgggaaatcagtgcagaggaattgtcacaagttctcaaaagcctag

SEQ ID NO: 229248 - DNA, 557 bp, Glycine max
attgccggacaggacaagtcaaatttcatttgctactgttcttagtgctgggatgggtttgaggtatggcctaggagaagaaaaggcagctaaaagaatagagaatgcagtggtggacactttgaacaggggatttcgaactggtgacatatattctgcaggaacaaagctggtaggatgcaaacagttaggtgaagagatactgaagtcagttgaatctaacgttcatgctggtgctgctacagtgtgatctcgagaccaactcgccatagaactttggattctgggttttatcctagagatcactacgactgccagagctgagaaaatctccctaatttggctcccttcgtgtttccactttcttcttttactaattttactggctaagacaagcatttttttaaaataccttttagtatatctggattaatattttaaaagtattgaaaattgtagttggccgctaaacaaggttaagtgaggtaccacggcgattcataagggtgggagaaaactctttcattcaaatgaggactctgcctatacatgataag

SEQ ID NO: 229249 - DNA, 353 bp, Glycine max
  unsure (1)..(353): unsure at all n locations
caaaaacttaagttcattttttgtgttttgctttcttcctcaaaaccagggatgggggacacatgcggcaactgcgactgcgctgacaagactagctgcaccaagggaaacagctatggtgttattgtagagactgagaagagttacatcgagactgttgtcatggatgttccagcagctgagcatgatgggaagtgcaagtgtggcactaactgcacttgcacggactgcacctgtggccattaaggaatatgtatgaaaatgtaattgccatgtgtttggcaatacaaatatccaaataatgtaatcttcgtatgaataaatgtgtgtgctgttatcctnaaaaacaaaaa

SEQ ID NO: 229250 - DNA, 444 bp, Glycine max
gtctcaacttctgctctttcaacttttacaacgcttttctctgcactcgggggcggggtcaagatcggaatcaacggatttggaagaattggccgtttggttgccagagtcgctctgcaaagagacgatgttgaactcgttgccgttaacgaccctttcattaccaccgattacatgacatacatgtttaaatacgacagtgttcacggacactggaagcatcacgatgtcaccgttaaggacgagaagacccttctcttcggtgacaaggcagtcactgtttttggacacagaaaccctgaagagatcccatgggggtcaactggagctgacatcattgttgagtccaccggagttttcaccgataaggacaaggctgccgcacatttgaagggtggtgccaagaaggttattatttctgcccccagtaaggatgcccccatg

SEQ ID NO: 229251 - DNA, 422 bp, Glycine max
atataaaacacgaatctttaattcaaagcagaaaaggaaggggggttcaaacactcgagaaccatggatgaaaaatggagggaaaatgtctgctatcagaatcaataaagcccgagtacatctgcaagtatataagaatccaaaaaactccatcccctacacagaagaggcaacaaaaaaagagcttaatgctcgtaacagggtaacaacactggttccggaaaccgatttattcatacttctcaatttttgcacgagcaagacactaaatcgcagcttgaccagcacataatgttagaaccaccttaattaaaaagacttcttggcaacgattacaagcaggtcaatgacacgtgaactgtatccccactcgttgtcataccaagagacaagcttcacaaaattcttatttaatgcaattc

SEQ ID NO: 229252 - DNA, 503 bp, Glycine max
caaaaccagtcaaccaacgtgatgctgatctcatccatttttgggataaggtccggggagctcctgagggttctctcaggaaaaatgcagctcagaaacaagttttggaagcaatgtctcatagaatgcatgtagacaacagtgtaaaacttattgggaagcttttatttggtattgaaaagggtccagaagtactcaacgctgttagaccggcaggatcggcacttgttgatgattggcactgccttaaaaccatggtgaggacttttgagacacattgtggatccttgtctcagtatggcatgaaacatatgaggtcctttgcaaacatctgcaatgtagggataaagaatgagcaaatggctgaggcctctgcacaagcttgtgtctctattccttccaatccttggagttctctgcaagggggtttcagtgcataataattcctgtaatgtgcaccagtaaagaccaaagtatgattattgttacattatgctatatga

SEQ ID NO: 229253 - DNA, 432 bp, Glycine max
gttacaaaatggctttcattataatttctgcagttagcttgtttggggcgcttgtgggtctcatcctggtgttaaggactagagagttctataaaggtgatatatacaagaagttcagagaggaagctagaactgctgaagctgaattttgtccaactcagaacaagaatggacaaactgctgcatatgaaggctagatatcattggcatggaattgataaatgattgacatagatatcaaaatgaaattagaaccagggagcttaagcaataacaaatgcaattaaatttccattagtttgtagttgatgtcatgttaggttctagtgatgttatgttttcttttcaatgaagtaaaaaaatatatcagcttgtaacaaatcaatattgtgatcagcaacctttattttagcaaagaaaatttgaagaaaa

SEQ ID NO: 229254 - DNA, 548 bp, Glycine max
  unsure (1)..(548): unsure at all n locations
gttcggggcatttcaggagtgtcctagctgctatcaatgccgcggcaaggagaagggtgaagagcaggttcattatacatgttaagagaggagtttatagagagaatattgaggttgacaagaccaacgataatgttatgttggtcggtgatggcatgagaaataccataataacaagtgccaggagcgttcaagctggttataccacctatagttccgcaacagcaggtcactactcacaactattaattccttttcttttctctcttattttattgattcagtttattggttgaattcgtcttacccgctcttcattaattaagtctgaattttaagctttgccttttggaatatttaaggattcttcttctaatctaggaaaatcgtattttatattgcagtatactttgtactttatttaattttttatttatttataaaatgacaaaagttgaatctaaatcacttggtttagtcctgatactancgtatgaataaattatttacaaaaatttaaaatatcaaaaagaaggtaaacgaatact

SEQ ID NO: 229255 - DNA, 360 bp, Glycine max
gcaagtattatttattcataatttattatttttgtcttggaatgtacaaaagaatattgtgtcgcttgtagaaacaaactacaacataacttaattccaaccaattgaatatcatcaaattagtaattaagcataagacaataatcaaaggccagaagtgaatggcacaccagtggcaggcaaccacgtgcggccggcaaggaggttagcaactgtgaatcgtgatgcctcagctgggctacttattctatgaaaaccgggccatcgtaccctgtttctggtggaagaaccgggcccaaagttcctgtactctccataatagagagtattcaatgcaaaattagagtctccccatggaga

SEQ ID NO: 229256 - DNA, 485 bp, Glycine max
aatatctgtccctttctttaatgttcttgccttgtacaaccagtcgcgatctgaaactcaactactgcttctacttctacttctacttctacttcttctttcgcctccatgatactctgcatgtgcctctccgcacctgaaccacgcttctgaacgcaatggctcgtcctagtttccctcttgctctctgtttctctttcatcttcgttgctcttcctctttccctcgccaccactgacccttctgatgttcaagctcttgaggtcatgtacaatgtgttgaatagtccaactcagctaacgggttggaaaatcggtggtggtgatccatgtggagagtcatggaaaggggtaacgtgtgagggatcagccgttgtttccattaaactctcaggtttaggactcgatgggactctggggtacttgctttcagaccttatgtcactcagagaccttgacttaagtgataacaagatccatgataca

SEQ ID NO: 229257 - DNA, 445 bp, Glycine max
caattaaattacattatattacagcatggcaaatcaattaaaatatacagcttattttccatagtgttaaatggtgtgtgaaaaattccaacgcgtaattagtatctagaatttgtttttgattgatgatacattttcacaaacttttctactccttacttccagtgtttttgtagtagtaattttttagccgggaaactgcacaaaattgcaaaagatcactagaggcactatgacatttaaaatgacatgtccatggcatcatggtctggggtcttgtgaccaaaaccagattcctcacttggtcgtcttttaaccacacttgctctttgcactaaccgaaccaatgcttgcaccacctcagacatcggaggtcgaaattcgggttccggctgaacacagagggcaatgatatcagcaaagcgtgacagtgactttgcaggat

SEQ ID NO: 229258 - DNA, 435 bp, Glycine max
gcaaaggagtgatttttagtttggttcgactgaactaatcattaaggggcactcggggtttcagcttcatcacccttcttttgcatcatttatatctcttgagaaatggcacaagaaacctttctattcacatctgaatctgtaaacgagggtcaccccgacaagctgtgcgaccagatctctgatgcagtacttgatgcgtgccttgaacaggaccctgacagcaaggttgcctgtgagacatgcaccaagaccaacatggtcatggtcttcggagagatcacaaccaaggccaacgtagactatgaaaagattgtccgcgacacatgccgcgaaattggattcatctctgatgatgttggtcttgatgctgacaaatgcaaggtgttggtcaacattgagcaacagagcccggatatcgcccagggtgtgcac

SEQ ID NO: 229259 - DNA, 510 bp, Glycine max
ccattgcatcaacacagtaacattgcatagccaaacaataaattgtgagtatagggagaaaaaaaaaaacgaacagtttaggtattgatgagatggcattagacattgaatggagtagtagtagtagtagtcatgaaacacgcaaattattcatccacacccagcaagacatccactgaagggagtgattaacttaacaacactcttaagcttgaggcttctctgacttgagtggcttcacaacttcccaggtgaagtctgcatcatcccttccaaagtgtccataagcagctgtcttgaggaacctatgaccacccctcttaaggtccaagttaatggtgatcattccaggtctgaagtcgaaattctccttcacaatttgcagaatctccttgtcaggaatcttcccagttccataagtgtccacaaacactgacaagggctcagggacaccaatggcataagaaacttgcacaatgcaccttctagcaagggcatttgccacgacac

SEQ ID NO: 229260 - DNA, 597 bp, Glycine max
aattggaagaggtgagcctcctcatgttcctgattctctttcaagagatgcacgggattttattctgcagtgtctaaaagttgatccagatgaacgccccagtgctgctcaactcttaaaccatacctttgtccaaaggccactgcattcccagtcttctggttctgcatctccttatattagaaggggttaaacttgtcacctccaactgtgaaagataatgaagtcaaattggatgcacgtatcatacacaaggcttcagttgagtcgagggtggggttcaaatatagtgtcattcttatttaggggcgaatgttcatgcaaattctgaaataacagggggggaaagcagcaaaacctttcttaccggtctctggtggtggatcttttgttttttgttttttttttggttttacttttttttatatatatatcttttataatgagaagagcagccaaagccttactttagtggtttgacaaagtcccaaccaatctgtccaataattggttctttgttaaagggggtcttggtggacttgaaaggaaatacattatgcaatcatgcagatgggtgatttatctcactgctactga

SEQ ID NO: 229261 - DNA, 435 bp, Glycine max
gcaacagtactctttgggatgatctttttactctcacgactctcatgcctgatgcacacacagcttcttgtgaagttgtgaaggatggtggtttcaccattgacgctgctcagtttggtaatttggggagattcatcaaccatagctgctcccctaatcttattgctcagaatgtcctttatgatcaccatgacaccaggatgcctcacataatgttctttgctgctgataacattcctcccttgcaagagctgacttatgattacaattatgaaatagatcaagttcgtgattctgatggcaatataaaaaagaagtattgctattgtggttctgtggattgtactggcaggatgtattgagggcaacaaggttattaatgaatagtgtttttctgcagtcttaatgcgaagttcatcaatatccttcttcttc

SEQ ID NO: 229262 - DNA, 437 bp, Glycine max
gaagaagaaggatattgatgaacttcgcattaagactgcagaaaaacactattacattaattaaccttgttgccctcaatacatcctgccagtacaatccacagaaccacaatagcaatacttcttttttatattgccatcagaatcacgaacttgatctatttcataattgtaatcataagtcagctcttgcaagggaggaatgttatcagcagcaaagaacattatgtgaggcatcctggtgtcatggtgatcataaaggacattctgagcaataagattaggggagcacctatggttgatgaatctccccaaattaccaaactgagcagcgtcaatggtgaaaccaccatccttcacaacttcacaagaagctgtgtgtgcatcaggcatgagagtcgtgagagtcgaaagatcatcccaaagagtactgttgc

SEQ ID NO: 229263 - DNA, 524 bp, Glycine max
gtgatttcagtgagtgatcggtgttcacttgatctcatcataatcgtcagcgtcaattgaagaagatgccgatcagaaacatcgccgtcggaaggcctgaagaggcgactcaccccgacacgttgaaggcggcctttggctgagttcatctcaaccttcatcttcgtgttcgccggctcaggctccggcatcgcctacaacaagctcaccgacaacggcgctgccacccctgccggcctcatctccgcctccatcgcccatgcattcgccctcttcgtcgccgtctccgtcggcgccaacatctccggcggtcacgtcaaccccgccgtcaccttcggcgccttcgtcggcggcaacatcaccttcctccgcggcatcgtctacgtcatcgcccagctcctcggctccatcgtcgcctccctcctcctggccttcgtcaccgcctccactgttccagcattcggactctccgtggagttggagttggcaacccttggtgtggagatcgtgatgaccttcgtctg

SEQ ID NO: 229264 - DNA, 474 bp, Glycine max
ccccccctctagtagtcagtggtgggaagctgctcgtgggtgtggctgataaagacaacctcgtaaacaaggccagcgattccaccaccgatgagaggcccggcccagtagatccagtggttggtccaggtccagctcacgacagcaggcccaaatgtcacagcggggttcatggccgctccagagaaggccccacccaacaaaatgttagcgccgacaatgaaaccaatggcgatgggagcaataattcccaaattacccttcttggggtcaatggcagttgcgtagaccgtgtacaccagaccgaaggtcatcacgatctccaacaccaaggcgttgccaactccaactccagcggagagtccgaatgctggaacagtggaggcggtgacgaaggccaggaggagggaggcgacgatggagccgaggagctgggcgatgacgtagacgatgccgcggaggaaggtgatgttg

SEQ ID NO: 229265 - DNA, 462 bp, Glycine max
  unsure (1)..(462): unsure at all n locations
gcagttcacggccatgtttatgaggaatgctttcttgcattggtacaccggggaaggcatggacgagatggagttcacagaggcagagagcaacatgaacgaccttgtttcagagtaccagcagtaccaggatgccactgccgaggatgatggggagtatgaggacgaggaggacgatgatgttgaagcagaccacatgtgaagagactgaatgtgaaagatgcctgtgtcttacttatgctatgtgatgcgtaagtgtgtttgctctgctctccaacgtgaagaagattgtaattactaatagtgtatgtacggtttgcgggataaaactttgatgagcttggtgtggagaatggaaaaaatatggggttagtggagtgngcagtttgggaacacatgttatgcggcacctatctgtttgttcttatattggcttgcttttatgttgttatattgagtcat

SEQ ID NO: 229266 - DNA, 600 bp, Glycine max
  unsure (1)..(600): unsure at all n locations
agagaatggctcccaagggtttaacctttctggctgtgttaatatgcgtttcagcactgtcactgagtccttctgttgcgggggaagggcaaaataatggccttgttatgaacttctacaaggaatcatgccctcaggctgaagacatcatcacagaacaagtcaagcttctctacaagcgccacaagaacactgctttctcctggctcaggaacatcttccatgactgtgctgttcagagttgtgatgcttcactgttgctggactccacaagaaggagcttgtctgagaaggaaacagatagaagctttgggttgagaaatttcaggtacattgagaccatcaaagaagctttggaaagagaatgccctggagttgtttcatgtgctgatatcctcgttctctctgccagagatggcattgtttcgctggaggtccccatatccctcttaagactggaagaagggatggtagaaggagcacagctgattgtggtgagcagttcctcccagaccacaatgagtccatttctgcagttcttgacaagtttggtgccatgggaatngacaccccctgcgtcgttgcactgcttggagcaca

SEQ ID NO: 229267 - DNA, 385 bp, Glycine max
aacagtgtataatgcccatgggccatgatttatttattgagaaagaacaacctatctttatgagtatgaatatgataggcattgtgactgccattataacagcactgacacgcatacataacataattaacaccatgaacatgcccttctacccaactctaagctacttgcatagtgctacatatataatatccttattgaaattaaaaaaaaaacaacggtaacatcggaagattaaaaaacataggctcttaatcctcccatccccatgaacctgcagtggtgtcgggtcattgaaccaccccatttaaaggaaaagaccctacttattttttgcataatatattacagatgctcttcctcgatcatagacaaggggaggaaa

SEQ ID NO: 229268 - DNA, 536 bp, Glycine max
  unsure (1)..(536): unsure at all n locations
gaggaaaagaaaggaagagattcaagattcaggcttgggaatgatgggtgaggtctccggcgatcagcaccgtcagctgaaggcggagatagcgactcatccgctgtacgagcagcttctggcagcacacgtggcatgcctccgtgtggcgactcccatcgatcagcttccactcattgatgctcaattatctcagtctcaccatcttctacgctcttatgtctcacacaacactctttctctctcccctcatcaccgccaagaacttgacaacttcctggcacaatatttgatagttttgtgtacatttaaagaacagcttcagcaacatgtcagagtccacgccgtcgaggctgtcatggcctgccgtgatatcgaaaataccttacaagctctcactggagtgagtttgggagaaggaactggtgcaacaatgtcagatgacgaagatgatttacagatggatttttctttagatcaatctagcgctgaagggcatgacatgatgggatttnggtcttcctacagaatctgaa

SEQ ID NO: 229269 - DNA, 486 bp, Glycine max
  unsure (1)..(486): unsure at all n locations
aatatccacttttttttttctttctttcaatggcggaacgatacagcaatttacacaacaaaactatggtgtcttttgctttccacgagaatttgatatcaaatactatattttaatgaacgtcgtgtaaccaaaacagagaaaacagagcactctttttaataaacaaaacacagcttgttttttagagtgaacaacaaatacagctttagttctcaattaattaataacttttccagactcttcatgatggaaggatggatgttgcgtgtgtcgtgctagtagaatactttctttcttttactgatcgacaagtatgctgcctttgacatccacaacaaacctgtatctcacgtcattcttctccaacctttcaaaggctttngtaatgtaatccatgtttaccatttcaatcatcgaactcagacccttctgtttccagaacttcaacatctcctctgtctccttcatgctcccaatgaagct

SEQ ID NO: 229270 - DNA, 601 bp, Glycine max
  unsure (1)..(601): unsure at all n locations
caaagatccaacaagcagatcaatctttttctctgtctcccaatcaaaacagacatgggtttgaaggaggattttgagcagtatgctgagaaagcaaagactttgccaccgactcaatcaaacgaagacttgcttatcctttatggattgtacaagcaggccaccgttggacctgtcaacaccagccgtccgggaatgttcaacatgagggacagagctaaatgggatgcatggaaggctgttgaagggaaatccaaggacgaagcaatgagtgattacatcactaaggtgaaacagctgctggaagcagccggcatgcctgcttgataacattgtcatgccttgctttcttattctgtgctagaagttcccaacagtttggaaataaacaattgcagtgtttgaagcttttattatcataatcttatttatttctgatgatttagacatgttngctttgagttcagtatctgtatcactattatttgaaatgcctgtagacagatgcagaggacctgaaaatttctgtcaactttttacttaagttgcttgattcgcactttccctctcaactcttggggatatgaatctaaatttcatt

SEQ ID NO: 229271 - DNA, 546 bp, Glycine max
ccgacgtcgtaatcgtcggagccggcttggcggggctctcctgtgcgtacgagatcagcaagaaccccgccgtgagcgtcgccataatcgagcagtccgtgagccccggcggcggcgcgtggctcggcggacaactcttctccgccatggtggttcgcaagccggcgcacctcttcctggacgagctcggcgtggcgtacgacgagcaagaggactacgttgtgataaagcacgcggctttgttcacgtccaccatcatgagcaggcttctagcgaggcccaacgtgaagctcttcaacgcggtggcggcggaggacttgatcgtgaaggaagggagggttggcaggggttgtgaccaactgggctctggtttcgatgaaccatgacacgcagtcttgcatggaccccaacgtgatggaggctaaggttgttgtgagctcttgtgggcacgatggaccttttggcgccaccggggttaagaggttgaagagtattggcatgattggatagcgttcctggaatgaaggctctggatatgaatgctgc

SEQ ID NO: 229272 - DNA, 605 bp, Glycine max
  unsure (1)..(605): unsure at all n locations
gttaacatagcctttattaacgtcactttcttacaatttacataacaattgagtggatactatcccgtagacaagcagataccttatagaaagaaatatactggtcacttttcatcgattgagaatagatgaaaaaaattaagtggcgtctatctctcccatccttgataatatatggtttcctccgctatacgtggcacgtgctgtccaaatacaatgtaacaacaagtattgtctccttcataattcacatgttgttcatttattccaaaattaaaatcataattaagtagggaccaaacagaaagaaaagaaaagaaaagctatatatctagctaatttgaaagtaagtttaagcatcaacaatttcctcagtgtctgcagaagcgaaaataagctggggttcttcccttgcaactgcacacgttccatcaattgcattgttcctgcccaacgcctgtaacgccaaatgagccgccttctgccctgatatcatcatcgccccaaacgtgtgacccatccttggggagccatcaatttctgccacctccatgccggtgacaatcatgnccggcacaatctccctcgtgagcctcacaatagca

SEQ ID NO: 229273 - DNA, 542 bp, Glycine max
ctgggattggtttgctctataatgagttggtcattggaattccaggcatttttgggcagtggtctaaccacacttccagcagtacactctatgatcatatttgtgagtattaagtatgttccagtccctatggtgcctcaaagtgaaaggttcctttttaggcgagtttgccagagaagctatcatatatttcgctgtattgccaggtatggttacaaagatgttcgcaaagaaaatcaccaaacttttgagcaactgctgatggagagcttagagaagtttatacgtcgtgaggctcaggaaaggtcgctcgagagtgaaggggatgatgatactgattctgaggatgagtactctggttctagggttctcatagcttccaatgggagtgtttattcacttggtgttcctcttttggctgatttaatgatccaccattcccatacccaattttgaaggcagcacatctgatgaagcaaaccctgtatctcctaagtccccagtgcttgatgttgaagagagtctttaagagagcttttttt

SEQ ID NO: 229274 - DNA, 541 bp, Glycine max
agagaatggctcccaagggtttaacctttctggctgtgttaatatgcgtttcagcactgtcactgagtccttctgttgcgggggaagggcaaaataatggccttgttatgaacttctacaaggaatcatgccctcaggctgaagacatcatcacagaacaagtcaagcttctctacaagcgccacaagaacactgctttctcctggctcaggaacatcttccatgactgtgctgttcagagttgtgatgcttcactgttgctggactccacaagaaggagcttgtctgagaaggaaacagatagaagctttgggttgagaaatttcaggtacattgagaccatcaaagaagctttggaaagagaatgccctggagttgattcatgtgctgatatcctcgttctctctgccagagatggcattgtttcgctggaggtccccatatccctctaagactggaaaaaggatggtagcaggagcacactgatgtgggtgagcagttcctcccagaccacaatgagtccatttctgcagttcttgac

SEQ ID NO: 229275 - DNA, 488 bp, Glycine max
atataatatccttattgaaattaaaaaaaacaacagtaacatcggaagattaaaaaacatagcctcttaatcctcccatccccatgaacctgcagtggtctcggttcattgaaccagcccatttaaaggaaaagaccttaattattttttgcataatatattacagattttcttcctcgatcatagacaaggggaggaaaattcaagggtcctgatcatggtgcttgttggcaacattgcactgctttctgacctcaccctttgtgccagtgagagggttgttctctgagagcaaggtaatggctctagagaactccttgaagaaatagtcttggctcttggccattttcttcacataaggcttggtcctcttgtcattggctagttggtgatccactatcaagagacccttgctgtctaatatgtttctgtagtagttggtgtctagaatcatgggagtgccacggtcgtttctcacgtactgcacc

SEQ ID NO: 229276 - DNA, 613 bp, Glycine max
  unsure (1)..(613): unsure at all n locations
aagcaccacaccactctccaatatccctaacatggctcaagtgggttctctatcttccgaaatggagacactgaatcatgtcctagccctagtggaggcattccgagcatttgacgcggacaacgatggccgaatcacgcaggcagagctaggaggaatcttggggtcactcgggtacaaccctagcgagcaagaagttagggcaatgattgaacacggcgacaagaacaaagacgggttgttgagcatccacgagttcttggagatgaacaccaaggatttggagggtggaaatctcgccaacaccctcagcaccgcgtttgaggctttggatgaagacgggaacgagattttaaccggggaagagcttcatgaggtcatgcaaaacttgggtttggacttgtctcttgagagttgtgtgcatcttgttacttctcttgatgcggatggagatggngctgtgagcttggatgaattcaggctcatagtcgattccctaatctaattgtatcttggggcggtatatgggtgtggatcaataatcatatcatatatatgtatacttataggtagggttggagaaattaatgtattttcataaataattaaggaa

SEQ ID NO: 229277 - DNA, 510 bp, Glycine max
  unsure (1)..(510): unsure at all n locations
gggagcttaccttacctgaatatggctttggtgtcctttgccgtgggacttttaccttacgcttcagttcgatttcccgtattgagcaacgccaactcactgaaactcagttcctcagctagcatctctactccaattcttcagcaaaagctctgctctcttctttcccccctccctctaagccctcgccctcgccctctcaccattgtatccgctaagggctacaaaatgaaaacccacaaggcatctgcaaagcggtttagggtgaccggacgaggcaaaatagtgcgtaggagagctggcaagcagcatttgctcgtcaagaagaataccaagcgcaaatcccgactctccaaaatgcacgcggtcagcaggagcgactatgacaacgtaattggagccttgccatatctgaaagtaaacagaaatgctacatagatgttctgtttgaaaaactgagtcataagcctagctgggtttagtctagtgatttgtgacgtctcanatctg

SEQ ID NO: 229278 - DNA, 395 bp, Glycine max
tgctgctgaataaatcaagttttgtaatgtactcgaagttgtgcttgtaggtatgttgaatttgttagaaaacaaatttatcgttgatatggatatatgtattttcttgaatatgagctagtttcagaagaataatgacttgaggaatacaaaaaaaaaaaaaaaaaaaaaaaaaaaaaaaaaaaaaaaaaaaaaaaaaaaaaaaaaaaaaaaaaaaaaaagggggcggccgaacaactagagcgctccgacacccggaattaaatcccgccccggtccctggggggctcccatctttcctttttaagaggcgatatcccccttggcgacaccagggccaaagcttttcactgtgcaaaatggttgccctcccaaacttcccccccaaatgcaaa

SEQ ID NO: 229279 - DNA, 418 bp, Glycine max
accttattttataaacatattatatttttattttcaccaccacctatgaccggggtcattttataaaaccaactccaacaccaccctattctccaaaattggattaaagaacgccaaacaatgttaaaaaaaccctataaaacccaatttgagctttttatatcctttcaagtttccttataaaccattctgatattctcctgaacttgctcaccagctgagcattttttgtaatattaaagaattcttcagcatttgataacattaccattatattatgcttcacaccttccacactccgatagtatgcatttttcaatcttgattgaaatatttcatgaaaaaatggggcatgaaacctgtttgcaaaccctaacctctcaattactgggttcaatgcttgaatatcaaaccctcc

SEQ ID NO: 229280 - DNA, 565 bp, Glycine max
  unsure (1)..(565): unsure at all n locations
agtgtatggtgctggataatgtggcgctctacgatatctgcttcaggactctcaagttgaccactcctagctttggtgacttgaatcacttgatctccgcaaccatgagtggtgttacatgctgtcttcgtttccctggtcaactcaactctgatctgaggaaactggccgtgaatctcatccctttccctcgtctgcacttcttcatggttggatttgcgcctctcacctctcgtggctctcagcagtaccgtgcattgacagttccagagctgacacagcaaatgtgggatgccaagaatatgatgtgtgccgctgatcccaggcacgggcgttacctcacggcatcagccatgttccgtggcaagatgagcacgaaggaggtggatgagcagatgataaacgtgcagaacaaaaactcttcgtactttgtcgagtggattcccaacaatgtcaagtcgagtggtgtgtgacattgctcctagagggctctccatggcgtccacattcattggaaactcgacctcgattcangagatgttcaggagggtgagcgagcagttca

SEQ ID NO: 229281 - DNA, 452 bp, Glycine max
acggaaacatgagatccaatataccagatggacaaaaataaaaataaaaagcaagccaatataagaacaaaccgataggtgccgcataacatgtacccaaaggtcccaaactccactctcactaccatcaaagtattatcccgcaaaccgtacatacactattagtaattacaatcttcttcacgttggagtgcagagcaaacacacttacgcatcacatagcataagtaagacacaggcatcttcacattttagtctcttcacatatggtcgtctgcttcaccatcctcttcctcctgatgctcgtactccccttcgtcctcagcagtggcgtcctggtactgctggtactcagacacaaggtcattcatgttgctctctgcctccgtgaactccatcttgtgcatgccttcaccagtgtaccaatgcaagaaagccttgcttctaaacat

SEQ ID NO: 229282 - DNA, 557 bp, Glycine max
  unsure (1)..(557): unsure at all n locations
gattcatcctggtacaaaaccttctgtttgtgttgggtccacattcccacaggggcagacaccacttccaggtcaaccatcatctcagccaccttatcaggttgggaatatgcctttagggcccgattttggcaatcaagctggaaatgctatgcaagtagatagagggtcttcttggttgcctggtccctcagaaaacctagcacatctttctggtcctcctggtcagatgagtgctgctgctaatcagcttcttcggcctcctgggttgacaccagagatggagaaggcactgcttcagcaggtcatgagcctcacaccggagcagataaatctcctgcctccagaacaaagaaatcaagtgctgcagctacaacagatgttgcgtcaatgatataatacgcatatatactcaccatgaaagttaggcaatctttaaagtttaatcctagtttggaagaggttattatgtcgtatatattcaaaccgattggctgccaagttttatagaaattaatacanattcatgcaactaattatagaccataatattcgtt

SEQ ID NO: 229283 - DNA, 485 bp, Glycine max
cattatacaaaactaagagaagatgcagtcgtgccaaatttcagaagaaacgaataatatggtctataattagttgcatgaatttgtattaatttctataaaacttggcagccaatcggtttgaatatatacgacataataacctcttccaaactaggattaaactttaaagattgcctaactttcatggtgagtatatatgcgtattatatcattgacgcaacatctgttgtagctgcagcacttgatttctttgttctggaggcaggagatttatctgctccggtgtgaggctcatgacctgctgaagcagtgccttctccatctctggtgtcaacccaggaggccgaagaagctgattagcagcagcactcatctgaccaggaggaccagaaagatgtgctaggttttctgagggaccaggcaaccaagaagaccctgtatctacttgcatagcatttgcagcttgattgccaaaatcgggc

SEQ ID NO: 229284 - DNA, 440 bp, Glycine max
ctcgaatcgagtttaaagcttaaaatgtgggaaagttccactcattccacccagttgcgaccatcctcagttacctgaccaaggcccctctggttccaccgagtacgccagtggttaatgcactgtcaaagcagcgagctatgctggaaaacatcctaagggcttgtgttggattagctcctgagaacaacatgatcctggagtacaagtgaagttcaaagtcttaagagtaatggtttgggatactgtagttgaatgagatcaaaacttaactcatatcccataccctcttttctgttatatatttatggcaaatgtgaaattaaagatcgttggatctctctatctttgttcctgctgactaatttgagagcaggctatctatgctatgcatgcatgtaaaataatataaagttatcgaagtattttgtgcttaattc

SEQ ID NO: 229285 - DNA, 439 bp, Glycine max
tccgccctttttttttttttttgaattaagcacaaaatacttcgataactttatattattttacatgcatgcatagcatagatagcctgctctcaaattactcatcaggaacaaagatggagagatccaacgatctttaaatttcacatttgccataaatatataacagaaaagagggtatgggatatgagttaagttttgatctcattcaactacagtatcccaaaccattactcttaagactttgaacttcacttgtactccaggatcatgttgttctcaggagctaatccaacacaagcccttaggatgttttccagcatagtttgctgctttgacagaggattaaccactggcgtactctgcggaaccagatgggccttggacaggtaactgaggatggtcgcaactgggtggaatgagtggaactttccctaat

SEQ ID NO: 229286 - DNA, 427 bp, Glycine max
cattatgaactgataaaggaaacacttttattaagacttcaaatcacagcattcaagataatacaatacgcaacactttttagaaagccttataactataaactataaaagctttgcccagatgaaattacactgcaggcaaatttttcattcacctttagcttagttatcttcattggcgcccaaattattctttggcacatctttgtattagccctggatggcaacaccaaggggagcagcatccataggtattatcttctcaatttctacacccttgttgttctggttttcataggctgaaatgtgcactccaagtgctgctctaccagagggatcaaggttgttagaccaagcagcatcccactcaacagctttggctgtgctacatgcaacacttgctcctccaggaacagtgagcctagct

SEQ ID NO: 229287 - DNA, 477 bp, Glycine max
catacagtaagtattaaaaatgtattaagtggcgtctatctctcccatccttgataatttggtttcatctgctataggtgagtccaaattcaaagaagtaacaacaggtattgtctccttcatcattcacatttttaaaaatttattctaaaattcaaatcataagcagagacaaaacagaaaagaaaaggtatataatttgaaacttaatttaagcatcaacaatttcctcagtgtccgcagaagccaaaataagctggggttcttcccttccaactccacacgttccatcaattgcattgttcctacccaaagccttcaacgccaaatgagccgccttctgccctgatatcatcatcgccccaaacgtcggacccattctgggggagccatcaatttctgcaacctccatgccagtgacaatcatgccaggcacaatctccctagtgagcctgacaatagcgtcctcagcagcat

SEQ ID NO: 229288 - DNA, 611 bp, Glycine max
ggcagttgctgaagaatggaaacccagattggatgctcttgacatcgatgctagcaatgtgaattccttggaggctcatgcatttttgcaacttctagccagttttggtattgcctctggttttaatgaggaggagttatctaggctaattccaatggtatctcgacgtcgccaaactgctgatttatgtcgttgccttgggttgtcagagaagatgcctggtgtcattgaagttttggtgaatagtgggcggcaaattgatgctgttaacttggcttttgcatttgatcttacagaacaattttcacccattcctttactgaagtcttacttgaaggatgctagaaaaatttcttctcctgtcagaagtgttaactcatctcccactgcacagattgatgttaatgatcgagaactgattgcacttaaagctgtattaagtgtattgaaagatcacaaacttgatgaccagtaccctctggatcctctccagaagcgagcgacccaactcgagaaggccaaggctgacaagaaaagggtaactgaagcaacaaagcctcaacccaagagaccccgtgctaatggtgtgggatatgggccgcgtgtcacta

SEQ ID NO: 229289 - DNA, 601 bp, Glycine max
catgtctcctacccactgaagtcgaacccctatttttcctctccctaatggcttctcaagttcttcttcagcaggcactgtttgcccccaagctaagtttcccttcttcttctcgtaacgtggcgttaatttctagggttccttccaccccaatttcatggcgttgcactcccctcattgctaagcctagtttcgtagtgagagctgacaccaacctcgatggcggtggtgaagccaccgaggatgttccttcggataatgctgaaaaagtttcggaaggcgaagcagaacaagtttcggattctgaagctccgaaatcgcctagaaaaccccgagtcaaactcggagacattatggggatattgaatcagagggcaattgaggcatccgagaagcaaagaccaactccagacattaggactggggatattgtcgaaatcaaatgggaggttcctgagaacaagcgtaggttgtccatttataaagggattgtcatctcaaaacaaatgctggtattcacacgactattcgaatccgaagaatcattgccggcactggggttgagatagtcttcccatttactcaccaacataaagaaatc

SEQ ID NO: 229290 - DNA, 571 bp, Glycine max
cagaagaaacacttcaaatttctcaatactatcaaggttcagtacacttgtttcgatttaagggaagatacacaaaggggaagaaaaatgatgtattctacaacagaacaaattgaaattaaaaaaattaaagctccgcagcacttatcctggatcagcagactagttcgacgaataacgtgaggaaaggtggggtatccgagtatcacttgaaagtggagaatctcggaagcttgtctctcagatagtacaatcttgccctcctgaccttacggtgacttaccactttgatttctttgatgtttggtgagtaaactgggaagactatctcaaccccagtgccggcaatgattcttcggattcgaatagtcgtgtgaataccagcattttgttttgagatgacaatccctttataaatggacaacctacgcttgttctcaggaacctccaatttgatttcgacaatatccccagtcctaatgtctggagttggtctttgcttctcggatgccttaattgccctctgattcaatatccccataatgtctccgaagttgacttcgggtttttt

SEQ ID NO: 229291 - DNA, 564 bp, Glycine max
tgaggcgcgagtggctggtgtaggcatttactgcgagggaagggaagcatctttagctccaaatccaatggcggatacctcaagccgatcaagagacctcgacaagctccttctccgccctggcaatctcgtcggtcctaggttcgaacctggccctgagttgcgagatgaccttcaggccttcgccaaagtgttggtggttggggctggtggcttgggttgcgaattgttgaaggatttagccctctctggtttccgaaaccttgaggtcattgacatggatcgcatagaagttaccaatctcaaccgccaattcttgttcagacttgaagatgttggcaaacccaaagccgaggtagctgcaagcgtgtcatggagagaattagtggtgtggaaatcgtgccgcacttttgcaggatcgaggacaaggaaattgaattttacaacaattttaacattattggccttggtcttgattccattgaggcccgcagttatatcaatactgttgcctgcagttttctagagtacgattctgatgataatcccacagaaagagacatc

SEQ ID NO: 229292 - DNA, 585 bp, Glycine max
cgtacccttgctgactacaacattcatataggagagtactcttcacctcgtcctccgtctccgtggtggcatgcagatcttcgttaagacactcaccggcaagaccataaccctagaggttgaaagctccgacaccatcgataacgtcaaggccaagatccaggacaaggagggtatccccccggaccagcaacgtctcatcttcgccggaaagcagctcgaggacggccgcaccctcgccgactacaacatccagaaggaatcaacccttcacctcgtcctccgtctccgtggtggcatgcagatcttcgttaagaccctcaccggcaagactattaccctagaagtcgaaagctccgacaccatcgacaacgtcaaggctaagattcaggacaaggagggaatccccccagaccagcagaggctgatcttcgccgggaagcagctcgaggacggacgcacccttgctgactacaacatccagaaggagtcaactctcccttggtgttgcgtcctctggtggtatgcagattttcgtgaagactcttacgggtaagactattaccctcgaggtggagagctctg

SEQ ID NO: 229293 - DNA, 441 bp, Glycine max
aggtgggatattagagtactattattaatgggacacaattgagttcaacacaaaccgaacttattttcaagggacattattacagacccattaaacatcaaagttcttcaaatgttttgggaacacatccaacattacacaacgagcttaaaaccccccacggagacggaggacaaggtgaagggttgattccttctggatgttgtagtcagcgagggtccttccatcctcgagctgcttgccagcaaaaatcagcctctgctggtccggtgggatgccttccttgtcctgaatcttggccttcacattgtcaatggtgtcagagctctccacctcgagggtaatagtcttacccgtaagagtcttcacgaaaatctgcataccaccacgaagacgcaacaccaagtggagagttgactccttctggatgttgtagtcagc

SEQ ID NO: 229294 - DNA, 475 bp, Glycine max
  unsure (1)..(475): unsure at all n locations
atactatgggcatagctnncntaggggcnccccgaanagtcggtggtagagcncgggcgggctttttttttttttttttgaagaagaaggtttttgatgattttctcattaagactgcaaaaggacactattgcattaattaaccttgttgccctcaatacatcctgccagttcaattcacagaaccacaatagcaatactttcttttttatattgccatcagaatcacgaacttgatctatttcataattggaatcataagtcagctcttgcaagggaggaatgttatcagtagcaaagaacattatgtgaggcatcctggtgtcatggggatcataaaggacattctgagcaataagattaggggagcagctatggttgatgaatcttcccaaattaccaaaactgagcagcggcaatggtgaaaccaccattctttacaacttcacaagaagctgtgtgtgcattaagcatg

SEQ ID NO: 229295 - DNA, 570 bp, Glycine max
  unsure (1)..(570): unsure at all n locations
gttggttttggtggatcatgcttccagtaggacatattgaacttggtctatatctgtgagtgcaatggcctaccagaggtggccaattactggaaacaggtcatcaaggtgaatgactaccagaaaatgcggttcgtaaatcgcgtggtgtcatcaatcttcttccctgagactgtgttgaacattgctgttttgggatttgctttcaagaaggacactggtgacactagggagaccccagccattgatgtgtgcaagggccttttgggagacaaggccaagttgagcatatatgatcctcaggtcactgaggatcaaatcatgagggatttagcaatgaagaagtttgattgggaccaccctgctcatcttcaaccactgagtccaacttccaacaaacaagtatctgtggtttgggatgcctatgaggcaatcaaggatgcacatggcatctgcgttatgactgagtgggatgagttcaagaaccttgattaccagaaggtttatgacagcatgcagaagcctgcattcattntcgatggccgcaacgtcgtggatgttaacaagctg

SEQ ID NO: 229296 - DNA, 497 bp, Glycine max
aagccactgctggcatgtccttgagccatgaatctagaggtttgccaatggagtaaacaatgaaaccaatttccctcagcttgttaacatccacgacgttgcggccatcgaaaatgaatgcaggcttctgcatgctgtcataaaccttctggtaatcaaggttcttgaactcatcccactcagtcataacgcagatgccatgtgcatccttgattgcctcataggcatcccaaaccacagatacttgtttgttggaagttggactcagtggttgaagatgagcagggtggtcccaatcaaacttcttcattgctaaatccctcatgatttgatcctcagtgacctgaggatcatatatgctcaacttggccttgtctcccaaaaggcccttgcacacatcaatggctggggtctccctagtgtcaccagtgtccttcttgaaagcaaatcccaaaacagcaatgttcaacacaagtctcagggaagaagattgatga

SEQ ID NO: 229297 - DNA, 508 bp, Glycine max
cttcacctccttcgccgtcatcgaggctttcggctgcgctctcacgaacaaatactccgagggcatgccgggcaaccgctactacggcggcaatgaatacatcgaccagatcgaaaacctctgccgctcacgcgccctccaagccttccacctcgacgcccaatcctggggcgtcaacgtccagccctactccggctccccggccaacttcgccgcctacaccgccgtcctcaacccccacgaccgcatcatggggctagatctcccctccggcggccacctcacccacggctactacacctccggcggaaagaagatctccgccacctccatttacttcgagagtctcccttacaaggtaaactccaccaccggctacatcgactacgaccgcttggaagaaaaagccctagacttcaggccaaaactcataatctgcggtggcagcgcgtaccctcgcgaatgggactacaaacgttttcagggaagtcgctgataagtgcggagc

SEQ ID NO: 229298 - DNA, 572 bp, Glycine max
gaaagaaaggcagcacgtattatttcaattgttaaataagaaaaaaaatatgatatcaatcaggctaacaaaattaaacatgaaatcaaagacaaagaaacttcaaacttttgaattgaaacaccatggcgataaaccctatcactcccaggaaaggaagacacatatttcctttttctccatttctgcactttgtgtcgaacttgagtgacacaatttagtagaaagtggtatggttgaacctaatccttgtacttcatttcagataccaggaagccaggcatgtcaaacaaggcagagaacttctcaacatcagctttgagatcttcaatagccttgttgttgacgagacccttgttgaaatccttgagaagtttgccatgctccttctggatctccagtgtgagagtcacagcacggtgaaggaactcaccaatctgctcaaagtctttttcaaccaaacccctagaagtcatggcaggggcaccaattcgcactccaccaggggccaaggcactgctatcaccaaaaacagcgttcttgttaacagtaatgttacagagatcacagag

SEQ ID NO: 229299 - DNA, 564 bp, Glycine max
caaaatgctgttgtgcttacttatggatcttcagatggaggtcaagataataacaatgaggatgctcctgataacaatccttcatacaccacagtttatgttggcaaccttcctcatgatgtaacacaagctgaacttcattgtcagttccatgcactgggggctggggtgattgaggaggttcgagttcagagggataaaggttttggatttgtcagatacaacactcatgacgaagctgcactggccattcagatggctaatggaagacttgttcgtgggaagaatatgaagtgttcatggggtagtaaaccaactccacctggaacggcttcaaacccactacctcctcctgctcaaccatatcaaatacttcccactgcagggatgaaccaagggtattctcctgcggagttgttggcttatcagcgccaactggccttgagtcaggctgctgtatctggtctttcaggtcaaactcttctgcacatgactggacaacatggcctagctccagcttcgatgggcgtaaactctggggcatctcagccatgtatgatggat

SEQ ID NO: 229300 - DNA, 554 bp, Glycine max
tggagactcatttggttttgttgctttttttgatcttcactgtagttgccggcgttggagcccaaggcccatccacctctcccgcgcctcccacaccccagtcttcaccacctcccatccagtcttctccgccacctgttccttcctcacctcctccggctcagtctccaccaccagcttccactcccccaccagccccactcagctctcctccccctgcctcccctcctccttcatctccaccacccgcatctcctccccctgcctctcctcctccggcatctccaccacccgcatctcctccccctgcctcccctcctccggcatctcctcccccagccactcctcctcctgcttctcctcctcccttttcaccaccaccagcaactcctccaccagcaacgcctccacccgcattgacccctacacccctttcctctccaccagccacttctccagctccagctcctgccagggtggttgctcctgcactctctccttccttggctcccggccccagcctctccaccatctctccctctggcgatgatagt

SEQ ID NO: 229301 - DNA, 363 bp, Glycine max
acctacccattagcaggccaattatatatgacatttccagaacaaccccattttcaagcattgatacaataataaagagtaagaaaagaaaaaaataaaggggattgccacaatcatatgatcatggggggaagtctaaaatgaccttggctttgccacaatgggggaatgcttgagtatgtgcaagctaaactgccctcctttctcactggtgtcaatctgggactggccagggggaggcaagagctcaaagttttggaccaaacgtcccaaagtgatggcaagaataggcaatgcaagaatgattccggggcaactccttctgccaaccccaaagggaaggcacctaaagtcattgccatt

SEQ ID NO: 229302 - DNA, 457 bp, Glycine max
ggcaccatcaacaggctcaaatgaacatgatgggcagaacccaaaaatctgctctctaacttgagatttaatttaagaaaaaattacagaacatgatataccatgctattgccgcttcctcctatcaaaaatatacaacaccagttgggtcaatttctatttgtttcttgtccaaataagaccgcagcagcggcggcaacagcagacaaactccaaaagaaagaattatgttgatgaaaaccgtccacttaaacagtgaaactcttctcttcttaaagacacatctacagtaacagcataaagcagtagctacaaacaaagagatatatgaagttacaaaaaataatctggcgtctttcgtgtagtgtcgggctcaatttgtctgggagctggatcaaactgcagaaaattctgatccatgttctctccaatttccagaatggcagacatgttccca

SEQ ID NO: 229303 - DNA, 498 bp, Glycine max
aggcgaataatagaggtcctaatttttattgaaggtagctcatcatatttttttatgtttctcataacagactccattcactctatgaacgaaccacatgatactgatattttagaaaggaaaggaaggattcaaaggggaagggtttcgaaatgatatccataacaccgcaatcccctaaacgacatgggaaagagaaaaaaaaggcaaaaacgacaccgaaagaaacgacacattcagagccaccgacacagagataaaagcctagggtcaacgtcgtctatctaagagagttgaccacagtcggcgacgacgacaggcttggcggtcctgccggagctggatccgaccttctctatctccttgacgacgtccatcccctcgacgacctgtgcgaacacgacgtgctttccgtcgagccactccgtcttcgtcgtgcagatgaagaactgagatccgttggttccgggaccggcgttcgccatggagaggatgccg

SEQ ID NO: 229304 - DNA, 537 bp, Glycine max
  unsure (1)..(537): unsure at all n locations
ctgatgcattcttagaggttgtaaaaattgagtttttctatgatcaatccccggaacacatgaagagcattggaacttcatattctacaactaccttaggccttggtaacttcatcagttcctttcttctctcaacagngtcaaatgtcaccaagaaaaatggtcacaaggggtggattttgaacaacctcaatgagtctcatcttgactactactatgcatttttcgcaatactaaacttcctcaacctcatcttcttcgcgtatgttactaggttctatgtatatagagttgaagtttcagattccatagacaagcttgcaaaagaactgaaggaaaagactgtgtccaacgttgtgaatcccaaagactagttgattgggtatctaaggggacaaaactactttatgtacaaatttggatggccaaagaactagatatgtgtgtgtctgtgnggtgtgtgcgtgttaactttggaatggttttgatcattggaagccacttcagaagagaacctaatcaagttatagttattgg

SEQ ID NO: 229305 - DNA, 574 bp, Glycine max
gttacacacactctctttcttttgctgttccagcaacaacagagaatgaacagtactgaggaggggatgcaaggcataggcataggcataggctgcttccaaaacgacgtcgtagggcagctggagctgagtcccactatgagcaactcctcctcctcgctatccatggagctggacgagtccccggagagcagaatccaacggttgatatcggagcacccggtcatcatcttcacccgatcctcctgctgcatgtgccacgtcatgaagaagctcctcgccaccatcggcgtccaccccaccgtcatcgaattggacgaccaggagatcgccgccctccccgacaccagcgccccctcggcctttataggcggcacctgcatcggcggcctcgaatccctggtcggcctccacgtcaccggccacctgatccccaaactggtccaagtcggcgctctctggtatggcagaatttgggtgagtgaacgactctggtttgactcgccgtatacgggtgggaggtgacacgtgtacaggaatggcatccatgagcagcgggtgatggtaataataa

SEQ ID NO: 229306 - DNA, 558 bp, Glycine max
ctttgtccatggtttcttcgttctctgtgtgatcgttatggttttttggaaccctaattcggccgcgacgatctctctttttacacagtttctagcagtctagacagtgtagatcgtttgtagaagcttttcagctcgtcacattttgctccttcttctgttttcgttgttcggcggaaatcagcgcggttccttcggagaacttcttcgaggtttttggccaatttcgcgcgtcgttctgctctgaccgaaacgtttctagaatttcaaatatcttttctttcgtcggaatttgcgaaggaggatgagatttgaaggatgaacgatgccggtactgcgtagcggagcgcgcaagggccgggcagcagcgaaacagcaacaacaagaacaacaacaacagcaacaaaagcagcagcagcagcagcatagtcccgtggtggagggagaggctattgcgacgaggacttcgtcgcggcgtgcggcggcggcagcagcagcggcagtgccggagagtaacaatatcaacaacaacaataataccaataaccagcagcaaca

SEQ ID NO: 229307 - DNA, 406 bp, Glycine max
ctgataactttaactaatcattgacataaaacagattgcacacgaagggcacttcggttattttagtttgtttcagtaaagactttgattctgctacatacaaataattaaaacttatgtcatcaaaatttctttgggcctggatcgcgcttctcagctgcggcaacgtttgcagggttaagaaactgtacgtccgtagcaaatggaagcaatgtataggttctttgcccacttctccttgacatgtgtgctaggaaaagcagaagtcctaagcgtttcctgggtttcatccaaaggcttccttgttggcacactcaggacaaaagcagcttgctcccacgttgcagtagtaagctgtgattctatacccacagtgccaaccctagtgaatgccctctctatgata

SEQ ID NO: 229308 - DNA, 542 bp, Glycine max
accaccacctatgacctttttcattttataaaaccaacttaaacaccaactaattctccaaaattggattaaagaatgcaaaacaatgttagaagaagcctataaaacccaatttgagctttctatatcctttcaagtttccttctaaaccattctgatattctcctgatcttgctcaccagctgagcattttttgtaattttaaagtattcttcagcatttgataacattaccattatatcatgcttgacaccttccacactccgatagtagtcattcttcaatcttgattgaattagttcaggatagaatggggcaggaaacctgtttgcaaactctaacctctcagctacttggttcaatgcttggatatcaaacctcctgtggtctaatttgatgaaataggaaagcagcttatctctgatctcatgatcaatgtggggatgctcccacagcatctcaggatcatatagttcccacggactatgcagaagaatctcgcttggatcaatcttggactggaccccataccttttccaggg

SEQ ID NO: 229309 - DNA, 393 bp, Glycine max
atatgactctggtgttatttttgattttgcaaattaaattacacaatcacagccgtacatcacacatgagttgggcctcttccaacttaaaagcagaggataacattggcccatgacgcgacacatgcaccacctaataatcataattttacatctttacatacaaaatacaaagactttaaattttaaaaagaagaaaagagataaacagatcatcttaatgaaatgaaaccaaaacccacaaacattggcttgatttttgttgttgttgctgttcccaacttgattaagcatgaaccgcttgattgaatcacttggacttgaagggaatggccctgattacgacctggtggtagagtgctgcaagagctgcaccgatgaatggtcccaccc

SEQ ID NO: 229310 - DNA, 412 bp, Glycine max
ggaaaacaaaatgttgcttatactagatgattatgataacgaaacagaatagtcaatcgtcccttacgagaggaaaaacctataaggccgtctaccaactcaacatattgcactgtttttcaatgatatctctcacagcaacacaaagtgtttattccgaattcacactaaaataaactcgattaagataaaaatttggaacggggtagcgatgatatccaagctcagactcaattctttaagccacggatgcaatgtggacaatcaaatcaatcacacgggaactgtgaccccattcgttgtcataccaggaaacaagttttacaaaggtgtgattcaaagaaattccggccttggcgtcaaatatgctagacctgttatcaccaacaaaatcagtagacacaacatcatc

SEQ ID NO: 229311 - DNA, 481 bp, Glycine max
acagtggcgcaaaagtgccatcaaatcataagatcataatatctcatcacgatattttaaatatacaaccaatagtgcaggaaaaagaaaaaaaaaaactacccaaaatcaagttgttacaaaattgagaagcttcagaaacataattaaacaagaaaacttagtaattgagatctgagaagcttcaaaaacataaaatcaagcaagaaaacttagtacttagtactagaaagcccatcctcaaagcggggggttaaaatattcaaatcgagtctgcagttatggaactggcatatttaaaatcggaacacttggtatttttggcgacaagggaggaactaaatcccaccatggaagtggctaaatcaaactgcactatgacatcctccaattgataccctccaatcacaatggagtttctggggttcacacctccatccaagaaccccaagcacagtacttcatcgctcactctcaccat

SEQ ID NO: 229312 - DNA, 553 bp, Glycine max
caatctccaaaatagtggtagtaaccataaggctgagagcaaagaaaaaaccaaacaatggggcacaagaacacaattttcttggcacttatagctaccttgattgcaaaggaagcctttgcagcacaacatgtagttggtggaagccaaggctgggatcaatccacagactttaagtcatggacttcaggccaaacattcaaggttggagataaacttgttttcaagtacagttcttttcatagtgtggttgagctaggcaacgagagtgcctacaagaattgtgatattagcagtccggtgcagtccttgagcactggcaacgatgttgtgaaactggacaagccaggtacaaggtacttcacttgtggtaccttgggccactgtagtcaaggaatgaaggtgaagattaccatacgaaaagggaatgctcctttccccgcattgtcaccggcaacaatctcgtcactgtcaccatcactgtcaccattattgtcatcaacatcattatcatcaccaccatcatcttcttcttctacaaatactaatgcat

SEQ ID NO: 229313 - DNA, 573 bp, Glycine max
  unsure (1)..(573): unsure at all n locations
cttaaagttatgggacatcaatatggattctggtccagttgcaacgttccaggttcatgagtatttaaggccaaagctttgtgatttatatgaaaatgattcaatttttgataagtttgagtgttgtctaagtggtgatggattgcgtgtttcaactggctcttacagcaatctattccgtgtgtttggttgtgttcctggaagtactgaggctacaactttggaagccagtaaaaatccaatgagacgccaagttccaaccccttcaagaccatctagatcattgggaaacagtataacaagagttgtaagacgtgagagcgccggtgttgacgcaaatgggaattcttttgatttcacaacaaagttgctgcacttagcatggcacccaactgagaattcaattgcttgtgctgctgcaaatagcttatacatgtactatgcttgaggaagaaagatgattgacgaacatgtatttgcttttggttgacctgttttgnggttgctgtggagaaggcttctttccccttcttaccaaccaatgagttggatgctacatttaactcacactac

SEQ ID NO: 229314 - DNA, 440 bp, Glycine max
gccaatgtcaaagttggaggttatgactttcccaaagggtccaatgtgcatgtgaatgtgtgggcggtggcccgcgacccggccgtgtggaaggatccattggagttccgacccgaaaggttccttgaggaggatgtagacatgaagggccatgactttaggctacttccattcgggtcgggtcgacgagtatgcccgggtgcccaacttggtatcaacttggcagcatccatgttgggccacctcttgcaccatttctgttggaccccacctgaaggaatgaagcctgaggaaattgacatgggagagaatccagggctagtcacatacatgaggactccaatacaagctgtggtttctactaggctcccctcacatttatacaaacgtgtgcctgctgagatctaatctttcttttttttcccttggactactctttg

SEQ ID NO: 229315 - DNA, 460 bp, Glycine max
agggccacaaggcatttttggtaatgcaacaaagagtagtccaagggaaagaaaagaaagattagatctcagcaggcacacctttgtataaatgtgaggggagcctaggagaaaccacagcttgtattggagtcctcatgtatgtgactagccctggattctctcccatgtcaatttccttaggcttcattccttcagggggggtccaacaaaaatggggcaagagggggcccaacatggatgctgccaaggtgataccaagttgggcacccgggcatactcgtggacccgacccgaatggaagtagcctaaagtcatggcccttcatgtctacatcctcctcaaggaacctttcggggcggaactccaagggatccttccacacgggcgggtcgggggccaccggccacacattcacatgcccattggaccctttgggaatgtgatagccctcaacttt

SEQ ID NO: 229316 - DNA, 578 bp, Glycine max
gatccttttgtccatagatcttgctgtttgtggaacctcagcatctgctttgaatagtgagttcttctcaaccaagcctctaccttgtgatccctcaagcttaccaaagtatcctcctagcaaagaatttgatgccaaagttcgggatgaagaagctagaagacaaggagcagcaggaagcaagggccagagacatgatattgagagaagaggtgcaagagaatcacgagccattcctgcacctgatgccaatgctgaactggtcttgtcaatacagaagagacaagggcaggccaattctcagagtaggagtgagaagtttaaccctcatcctgaagaagttgcttctggatttcccattgatccccctagaccatcacaagctgcaggattaattgcagatcccccggttcatcaacataaaagatcctcccattcaggtccactgacccaccgtgcggcatgggctaaaaagccgggaagaaccaggaagatgctccaaagattcaatggggggtgacttatcaacagtatcgggcttagttgcagcaaggaggagtatgttgtctgacgatcgc

SEQ ID NO: 229317 - DNA, 542 bp, Glycine max
cttcttctcttaaaagagcctttgctttttctttaggcctttccgaattaagtacttgtttcattttctctcgaagcaagaaaaatgttcatcgagagtttcaaggttgagagtcctaacgtgaagtacacagagactgagattcagtccgtgtacaactatgaaaccactgaacttgttcacgagaacaagaatggcacttatcagtgggttgtcaagcccaaaactgtcaaatatgaatttaaaaccaacacccatgtccctaaactaggggtaatgcttgtggggtggggtggaaacaatggctcaaccctcaccggtggtgttattgctaaccgagagggtatttcatgggcaacaaaggacaagattcaacaagccaattactttgggtcgctgacccaggcatcagctattagagttgggtctttccaaggggaggaaatatatgccccattcaagagcctgcttccaatggtaaaccctgatgatgttgtgtttgggggatgggatatcagtaacttgaacctggcagatgccat

SEQ ID NO: 229318 - DNA, 483 bp, Glycine max
caagcacaaaagacggggataacttgatattattttattacatacatgcatagatagcctgctctcaaataagtcggcaggaacaaagatagagagattcaacgatcttcaaatttcacatttgccaaaaatatataacaaaaaagaggggtatgggatatgagttaagttttgatcacattgaactacactatcccaaaccgttactcttaagactttgaacttcacttgtactctaggatcatgttgttctcaggagctaatccaacacaagccctcaggatgttttccaacatagctcgctggtttgacaacgcatgcaccactggggtacccggtggaaccagaggggccttggtcagggaactaacgagggtccccactgggtggaaagagtggaattgtccctcattttgagccttaaactccattcgagtgctgagctcaccaagaaggaccaagtccaagataataggagcagct

SEQ ID NO: 229319 - DNA, 548 bp, Glycine max
taactttttgccttgccattttctcattctccatggctggcttgatcaccagttcgaattctcatttctcgcgtgactccaatgagcatcaggctcctcctacccggcaagcttcgtcgaaaactacgtgtcgagtttgtggcgatgagattggatacatggaaaatggggagctgtttgtggcttgtcatgtgtgtagatttcctgtttgtcgaccgtgttatgaatatgagaggagtgaagggaaccagagctgtccacaatgcaacactcgctataagcgccacaaaggttgtcccagagtggctggagatgaagaggacaacattgatgcagatgattttgatgatcagtttccggttgagaatcatcgtgaagatctagatgggcaacatgatgttaatcatgtggaaaatggggactacaatcaagagaagttgcatcccagtggtcaagctttctcttcagctgggagtgttgcgggcagggattcgaaggggacaaagatttctacagcaatgcagaatggcaagaaagagtagagaaat

SEQ ID NO: 229320 - DNA, 462 bp, Glycine max
gttcttgttcttggagaacacactgaagagaccttttcctgatttctttttttgacttggacttccttgaaccaccacagcagcagcaacaccatgatggccaacagtcacatgtcatctttggccttttctcagatactggtggatcatagccatacaatgcctgcctgttgaacacagttccagtaccaacatatactggaccttgaatcccatcaagccctttcatattgatatcaaagaacactgtgtttcggttagcatatctatcgtggcgatcaataccatcaaatctttgtggaaattggacataacacagcttcttccctaggttggggtgcattaaaaagcacatggcctctcttactgccttgctgttattgacgtagtgatcacaatccagattcaacatgaatggtgcatttgtaagcacagcagaaactcgaaccaaaagcattcatg

SEQ ID NO: 229321 - DNA, 387 bp, Glycine max
agggagaacccaatattaaagtagatataactatgtgtaactcatacagagaaataacaacgcaacacaatttaaagctatccaatacaaatctctcatacaagaggagaggggcatataagtggagccctcatcaccctcgatcttattcttaatattaataatgctactcatatactagtgagtagtttccggtttcctgcgtccatgactttctcttcaaaccttgatggtagcgcagttggtggaggtgctgatcttgtaggggatggagactccgcatttgccggggagcgaggcggcgttgttggctttgaagccggagatttggctggcggccgacttgaggcagttgcacgccgtctggcggtcggcggtggtcttggc

SEQ ID NO: 229322 - DNA, 514 bp, Glycine max
gtaaaaagcaagtaacattaagttggattcggatacacaagataattcacattatctgaagtacttcaccaaacacaaatctaaaaactctcaaaagtcatttcgttctttgacgctcactttccggggacgaagttggtggcataggcccaggcgttgttgttgacagggtcagcaaggtgatcggcgaggttctccaatggaccctttccggtgacaatggcctgaacaaagaagccaaacatagagaacatggccaatcgtccgttcttgagttccttcaccttaagctcagcaaaagcctctgggtcatcagcaaggcccaatgggtcgaagctgccacctgggtagattgggtcagtgacctcaccgagggggccaccagcaatacggtaaccttcaacggcacccattaggataacttgtgtggcccagatggcgaggatgctctgggcgtggatcacgcttgggttgcccaagtagtcgagcccaccctcgctgaagatctgggacc

SEQ ID NO: 229323 - DNA, 611 bp, Glycine max
  unsure (1)..(611): unsure at all n locations
gcacgccttggagttacagctcaaatgttatagttgcagcagctatggttgctgcacatgtttctgaactatttagaaggtcaaaaacttgcatgcatgctctgtctgttcttattcgttgcaaatgggacaatgaaattcattccagggcgtcatcattgtataatctcatagatattcacagcaaagctgttgcatctatagtgaacaaggcagaaccattagaagcaaccttaattcatgtaccgatttggaaggattccctcgtttgtgttggtgttaaaaggcagaatcagtgtgaaagtagtagctgctttgcccctgggcagacatctgttgtaccttcagaagattcattcccatcaaaagttgaccataattctcagaaaaccccatgttcaaaggatgcatcagattataccttgggtaaaggtgtcacaggtttctcattagatgcttctgatctagccaacttcctcacaatggacaggcatataggattgaattgcaatgggcaaatttttctaagatccatgctggcagagaaacaagagttatgtttctctgtagtttcactgttatggcacaaagtgatngcatctcctgaaaca

SEQ ID NO: 229324 - DNA, 597 bp, Glycine max
  unsure (1)..(597): unsure at all n locations
aatccaaacaattggaaatgacttccattacaagctaaatcaacataagcataacacaaaatgagacaatatagaaaaggacctggttacagcgtttttcgttactgtacaagactgttctatcgagagcagactcacaagcaagttcagggtgaaacttagtttagctacagtacatacatgatacaaaatgagctttctataaacatactagaattatgactgcagctcttttcaacaggactagcagaattatgcttatttgcaaacccgttagttcaataagcatatcaataacttttttttttctatacgtctagtaaaaaattgtcacggactaagatggatgatttcatttcacatggaaatagtacagcctaactctttggcagcggtatcaagaaagttaatagacaatccgtttgaaagtcggctgtgagcttcccaagtcaagcatttttctatgtcagcttgccagtcaatgacatccaaattgaagtattgataagaggggttgtgggtgccatttaatctcgaggtttatgactacatctgattgaaccagtatgcanaatgtcacgaagaactgatatactc

SEQ ID NO: 229325 - DNA, 474 bp, Glycine max
ttatctccgacttcattcctttgggtttcgccggcggggcgcagcgcgtgaccgccgacatcctgtggccgaatttgaggaagcggttctcgaagtcgctgctggacgatgatttcgaggcagggttcagagaattcgaggatgactcggaaatcgaggatgtcgatgatgaggacgatgaagaggaggaggagttgaagaagaagaagccctttgggttctctcgctccaacaacaaggctgcttctaagcctctctctcgtggagcaacaactgtgaaatctgtggaatcaaaggggcaagctgagaagtgtgccaagagaaagaggaagaaccagtatcgcggaatccgccagcgtccatggggaaagtgggctgctgagattcgcgacccaagaaagggggttcgtgtttggcttggaactttcagcactgctgaagaagctgcaagagcttacgatgctgaagcaagga

SEQ ID NO: 229326 - DNA, 630 bp, Glycine max
  unsure (1)..(630): unsure at all n locations
tccttttcgtggttatcgacttgggttttaacctagggttcttattctcctgttttgctcactccttgcaaatctcgcgttacgcatgcgtttcttcttcgctttgtttattcaattggagcttagtactgatctatcgaaaactcaagtcctctgaggtctgtggttttactgttctaaattttgataaattaaggcaaagacgatgactaagaagaagaatcccctggtgtttatggatgtgtcgatcgatggggatcctgttgaaaggatggtttttgagcttttctatgatgttgctcccaagactgcagaaaactttcgtgcattatgtacaggagaaaaaggcatcagtccaaatactggaaaatcactgcactacaagggttctttcttccatcagatcataaaaggttccattgtgcagggtggagattttgtcaatcgaaatgggactgctggagaaaagcatatatggtctaaagttccagatgagtcacctangctaaagcatgatgctactggccttttatcaatggcaatngcagaccgtgacacactcngttcccatttcattatcactttgaaagctgatcatcatcttgataggaaacatgtagtcttttggga

SEQ ID NO: 229327 - DNA, 442 bp, Glycine max
gaaaatgaaaaatccacttcaatattccaaccgaaaaatgtcttcatattgtaccccaagaccttattcatctgggttacagtgagatcagatgtcccattaaaacataatttaagctcataattttattctaggaatgcaggcatcaattacatttagccaaatatgcattccatccttgaagacgatattcacgagctatctcagcagggtttgctgctttgatgatgccacgtaccacgatgatgatgtcactgcccctatcatggatcacagaatatggagtgttatattgctgccctaaagcatcgccaccagttaccatttgaactccaggggttgcctgaatgaaagaaggatttattggtgcccctggccatgatgcaagattgactgagatgaatccaattacaaagtcagaatgatccttagcaattttact

SEQ ID NO: 229328 - DNA, 513 bp, Glycine max
gcacaaaactggtaatatttcatatcaataaggattgcggcaaagccgcaaagatacaacattcattagggaaaacaggagttgggaaaaataaggggagaggggttgaggaagaatcaattgctcacagagcatgctaaaacatctaaatattccacacacggttattgaaacaacccaatatagaaaatttttctttggtgtattataaaagcagaaccaatgaacttgtagattctactttcttataccattcacttggcaagttcgttacggatgagttttgctgcggcaaccatgtttgtgagggctggcttcacttcagtgtacttgcgggtcttgagaccacagtcagggttgacccacaagatgttcttctcgagcactgcaagcatcttattgattctgtcagcgatttcttcagttggtgggattcttggggagtggatgtcatagacaccagggccaatttcagcaccatacttcacaccttcacggaagactgacaggagc

SEQ ID NO: 229329 - DNA, 521 bp, Glycine max
gcatctcaaaatacaccaataacatatcaccaaaaaaaataattcaagcacaatgctaaacaacaacattgaaacaatgacaccaataagttgctttgtaaaaccagacatgctggtgtagtttactaccacaaggccaaaattcattgacaatttcgtttccacgataaagaaatgagggtatcaatagcctggttgtgcaggttatttcttatgctgcgttacctctttaataacaccatcagcaagtgagtcaacatcattgttcttgccaaaaaactttacgaattccatctcaggactcatcaagtatctccactatttctactctcatccttgccattgaaatatttcaaagattagatcatataacaatggagtgatcaacaagataatctgagtcttcctctgctgtcttcatgtaataaacgcgatatgcacgagcaacattcttgacctcatcggggctaccagttaattcaattaactttggatgaaattctgtgacatattcaccgact

SEQ ID NO: 229330 - DNA, 466 bp, Glycine max
acaaagaaattcaattattgcacaggcacttttcacataaacaagtgaaaaagaggttaagaaaattttcactaccaaatactaaagaagacacgaaacaattaacaaatatcatcctctaataaactgttctaactgaaatccagttcacagcggcagcaatttccatttgaaaacaaataaaccaagcataaaataactgacatcttacaatgttagctaaatggtaggaagagctactgctgttgcttaaggagatgtcaataatcgcttgatgccacttttctgttcggatgtaagcctggagggaaacttgatattgaacttgattcttaagtttcccttcttggaaggttcttttggaatgggcataccctctcctttgacaacttcttcatatgttggactaatagtggagttaatggggaatgtaagattccggccatcaagggttgtcagctgcact

SEQ ID NO: 229331 - DNA, 355 bp, Glycine max
ctctaaccaatcaaattttatggcacacttgtacgtaagtctgaactggttttccaagacatgcttgcttctagataactttttgtcctgaatcaaaccttttattttatacatcttgaaggcatcttctattctgacattatgcttagaccagatgcaagtgatggaatactttgttcatatctgaaaaaattgcttggatcaaccttggtctttacctctaccagtctatcatagtttcttttgaaatacttctcaccccagactctagcctctgcataactagcatttccaggtccattgacacctatatcaacgtctttatagttgatatatgaacttctaggtgaacttg

SEQ ID NO: 229332 - DNA, 559 bp, Glycine max
gtcagaattgtgaactacttttacatacaatcatgcatagagagagagagagagaattcagaaggaaatagagcaaaaaggaaactgaagtagcagaccataacaacttcagaattttgcagtataagcacattagcagaaagtctgccataagatgggctctcacataccctgaaaacctaatatgttaattggcaatatttgaaaggaacacaaaacaatgttgaaacaacaagctaatagacaaaacaaatgaatgttttttccaattacatactgaaaccaaaactgaatagtatcaaactacaagagcacaagtccaagtccagatggtttcaaggcactacgaatcctataattgtacaagtagtaatggagctgtccatctcccggtccaaacttgagctctttgaggaaactctcattgtgcattacatccaatgcattgaaaacatcaaaatccttttgctttgctacaatcagcacatcattcatcaactgagtcagtggagtttttggggagacattataataagaataagcagctttcaaaattgag

SEQ ID NO: 229333 - DNA, 474 bp, Glycine max
tttttttttttttttttttttttttttttttttttttttttttttttttttttttttttttgtttttttttttttttttttttttttagggaggggtaaaattttttaaaaaccctaaaagcccctaaaaaaagacccccggagggttccccggttggattttccaaaaaatttgggggccaaaattttctttggggcccttgggaaaaatcccccccaaaggtgggggacccttaaaaaggggggccaaaggggcacaccctccttaattccgggcctataaaacccttttaaaaggggggtttaaaaaaagtggttttaacatttttttggggggggactaagttgaagcccccagggggcccccgggggaaattgggagcctgggggggggttcccccccaacaattcccttggggggggggccaaaaggggagaacccccggccccgggcctagagggggtgtccccccc

SEQ ID NO: 229334 - DNA, 319 bp, Glycine max
ccagctaatataatagcttcaatagctctttatgggaatcaagggtacatcattttccagtcaacacaagaagactgcaaatcagcagcgagacattgttttctgaatgaagagagagaatggaaaaaaagaaaatctttgacaaaaatagaaggaaaaataaaagcgcgctatcacaaggatagtacaacactgaaccaggcactcaattattttgaaggaaatttgtggtgatttacagcgcaagacatcctgcaggttgacaactttttatgctgatttcccttggcgcttctcttcctccatcctggctttgatg

SEQ ID NO: 229335 - DNA, 318 bp, Glycine max
acctctgctgtccgagtgccttcgtaaaggtcactagccaccattggtcccatccgatctcttttaaacaattccaacaacaaaactccactaatagttccatccagcaagtgaactctttgaacaccacctctgcaaacgaaagctgcagcggccaattctgacaggtagccattcattcgacttagccgctcttgacctccaatagcaaaaccttgctcaccggaccctaagccatttccattctcaaaaccaacaccattatggaaggttgcattatgccattctgtaaaacatccaataggtggtgatttgact

SEQ ID NO: 229336 - DNA, 370 bp, Glycine max
aaatcaaaatatattcagatacactgaaatggcaatgaagcataacatgaagttgggaagaggtagcttttatttgcaaaatgatggcattccatcccataaaaatatagatccacacaatttgtaatgaacaagaatgtaatacttctttctttaaaccatgataacacagattgtcaggagcaactgttgtcttctagatgttggcaatcgatacaggctcacggaggatcctctccatctgttgtgccctggtcttaattgacatgtcaaagaccttctggctgaattcaagcacaagaccaccaagtatgcttggatcaatcttctgatcaagatgaacctttgctccagaacctattatttcctg

SEQ ID NO: 229337 - DNA, 468 bp, Glycine max
gcacaaaatgataattaaattaacttaaaagaaaacttcaggatcatcaaccatccaaccaaagatcaacggccaccgattcaacaggaaagaaaacacaaaggaaggaaaaccatacacagaagaagattccggagaaattcaataatacacattttttttttttattatttcatttttcccctctagtagtcagtgctgggaagctgctcgtgggtgtggctgatgaagacaacctcgtagataagcccagcaattccacctccgatgagagggccggcccagtagatccagtggttggtccaggtccagctcacgacagcaggcccaaatgtcacagcagggttcatggctgctccggagaaggccccacccaacaaaatgttagcgccaacaatgaaaccaatggcgatgggagcaataattcccaaattgcccttcttggggtcaacggcagtggcgtagact

SEQ ID NO: 229338 - DNA, 468 bp, Glycine max
aaaatgagaaatgaattcatatacaagcaaatttcttgatatatcatatactaatatgtatattttacaacaacaaaaaaagagagtaagcataaattcataaacacaaacttatttaaagacccaaaaaaaaactaaaagaaaaaacaagccagtttctaagagctctatggctatacacagaagaaaatatagggaagtgaaaatcatttcccctttcttgtttaaccgtcattgctgcattcccatttagaagtagggacacatgttaagtagcgacaccaatggcagtggtcataccctttctcaccccgaaatagcatcaccaatgcagtcgataaccctgcaatcaacagaataagagacacaatccatagaacatattggtaagccttgtactttgacttcatcccaacaccggcaggaagacgtggctgctctaaccaactgaactgaggacgtggcagc

SEQ ID NO: 229339 - DNA, 362 bp, Glycine max
aaaagagagggcacaccacgcgcttggttggtacagcaatgagtcgcgtggaccttggagcggtgagtccgaacacgtgacccatgtccatctcacttggtttcattccatctggcaattgccacgtgaagcagtgaagaagatgagccaccgccaattcaagcgcgtagagccccaacaccattccggggcaggatctttgacccgacccgaatggaatgaactcgaagttgctccccttgaaatccggcacgcccgggttaaggaaccgggcgggcttaaaagtttcgggttcctcccatgaatacttgtccctcccaatggcccccgcgttgatcataacacgcgccttcctggggact

SEQ ID NO: 229340 - DNA, 485 bp, Glycine max
aaatatccaatgtcaaaatttgacacataaagttgattttttaaaagcaaaccaagcaaaaattgaacacaaatataaagttgacatttaaaaagcaaaccaacaacgcaacgggaaagccctaaaactcgctgtgcttaacaaaaatgtaatcaggggttctcacaaacacaacacattaaaacagaatgataaaaggagtcttgccaccgtcgatcaagaacccaattctgggaacaaaagttgcgagatgatggtggagacttcaaactatgttcgaaaaacaagctacctataaacgaagacacaagggcaagaaaccaacatttattgtgaccataagatacgacatcccctgatgaaccaaaccgcacgattcacttcttcttctgggcagccttggtgaccttggctccagtaggatcctttttctccacgtttttgatgactcccacagcatcagtttgacgcatattcctgacagc

SEQ ID NO: 229341 - DNA, 387 bp, Glycine max
gtgggcccatagggaaaaaaaagcttaaaaagcttttttaagcaaagaaagacttctttttccaacccaaaaatggctggtgccgcaactggtttcacatttgttaaaccttggagggggggtcccaacatgtttaacctcacaactaacaatttaccccccttgccttcccaataagaagaagggtaaaacagatgggggatcaaaaaatattttgcagccccattttttttaatcagctttagaccggcccgcaagggaagaccgggttattcccaccatgggacccttgagagcaagagcttccgccaaaatgggaataaaaatccttccacccaaaagctttggctggtgggcattggctctaaccccccctttaccaacaat

SEQ ID NO: 229342 - DNA, 396 bp, Glycine max
gaactgataatagaaacacttttattaagacttcaaatcacagcattcaagataatacaatacgctacacttttagaaagccttatatctatatctatacactacaaagctttgccaagataaaagtacactgcaggcaaatttttcatacacgtttagcatagttcattctcccccaattattctttggcacagctttatattatccctggattgcaacaccaagaggagcagcatccataggtataatcttctcaatttctacacccttgttgttggtctggttttcataggctgaaatgtgcactccaagtgctgctctaccagaaggatcaaggttgttagaccaagcagcatcccactcaacagctttggctgtgctacatgcaacacttg

SEQ ID NO: 229343 - DNA, 354 bp, Glycine max
gcaaactaaaattaaaattgaaaagatcaaaatccaaattacaccaagttcatagtaataataactaataacaacaagttaaacccaggataataatgagaaaaaagagtaccggaaagaaacaaggtggcggtggtggtttttgttttccaatttccaaatgaaacgaaaccctaaccagagttttgttcgtccttgtcatggggctttctgcagaggatcatgtgcatcggagagaaaatcccagagtcaccccctctggtcaaatagtcagcggtcttgaagagcatctcatgaacatcgacggtccccttaggcgcgattcccaaagcggcgagaacagtgaccacaata

SEQ ID NO: 229344 - DNA, 475 bp, Glycine max
acattatcctaaggctttatttttaagctaatgttggtcccattccatccaattggattgacttcccactcgaggaatgctgttgactctggcgaacttatcaactttgaagttggccccacacatggccccttcactgtccactcttggcattgccttcaacttgttcattggatgctcaaagctcatcagacctccttcactgtgaaacatacaccctgttggaaagggagcaaaggatttggcacaaccctcttttatgacttctagatcatcagagatcaccacagatccatcagctgcaataccccaatacagcttcactccttcatcagaacccagtgctgcaaagacactgccaaccttgctgtcatagacaacaaaggcaaaactgccatcaggctccttgacaacttgatctgcagggtatggacccccggcaccgagtgtcttgttagctttaataacaaacatg

SEQ ID NO: 229345 - DNA, 572 bp, Glycine max
gaatgccaacacgattttatttcaaaagctgaccacattatgtgtcaccaaagaatcctcgcttttcctcatgatgagtcaggaacttacttttgttgagtgataccaaagattcaaactccttttatctgatctaaacctctcaagtttcttacaatttgagcagatcaccaaacctattttccttccctattgtcctaaacaccacaagaacctatataattagagtagagactcaacctatatacagccagttctcactcccccgagctctcgcatgagcttccaagatttgaagttatgtcatgcaccaaaaccctgattattttgcttcctgatgatcttgaaacatccatgcactcctgtaggtctgcatcacaggctatcaaaacccattcgtgatcatcatccaggtacttgatttcaaatgtacccacctctagtttcaatcttttggcaacttcttctttcagttcaacaatgccacaggtcaacgagacccgaaatcttatgatatcttctctgtatgtggccttggatgtcactgtcttcatttctttcatagctacaaa

SEQ ID NO: 229346 - DNA, 502 bp, Glycine max; identical to SEQ ID NO: 228836

SEQ ID NO: 229347 - DNA, 428 bp, Glycine max
aacaaaaaaaactgaaactagaccatttcaatgtagatacgggataaatacttcacaatcaaagactggatgctaggaagtttaactagtgcatgatagttatcagcttctggtaacaaaaaagtaactgctgttgacaaaaaaaggatggaaatactgaaacaaacaaagggaagttttaccaccctttctacacaatgtatcaactggaaagttgaagcaaatatccactcacaaatctttgacgaagaccatcagttaatgagacgccggacgagtgacccttggtctcaccggagtctttgaaggacttacccttattggatggggccccaagagcatgccacttcaggttagtgccattatagcgctttcagccattgggaatttcacaaaaacaattcgggttgaatgcacgtggtgcccca

SEQ ID NO: 229348 - DNA, 459 bp, Glycine max
ggatcaaaccaacccatattctatatgggcttttactttgcatcagatacgacaatatagaacgttatatttccgtcataatgttgacagtaatgttcaatatattacatacgctaaaatctagaacaacgcatgcccccccatcatacacaatatgggaacaactggactaccgaaatatggtgttatctaaaagacaattatatgttgacagaagcaatggcacgatagctattaatctccaaagacaagcttatgcttcgggatataaacattacaggggtaacgaaacaatacaatcaaaatatgtaagcaacaacttatccaaagagctgccttcggatctctggaagctgtttacggaacactacatcaagtcgtgcatcaagagtatttttacacacaatctttccatcacgagaagccaacaccaccccaccagagcagtagagatcatga

SEQ ID NO: 229349 - DNA, 461 bp, Glycine max
cgtccaaaaattatagataaaaaaaaagttattagaattacagatataccctttattgataataaaaatgttatgtttacatggtagacaattatcatcctttatcaggttgcctacccttacactttggaaccttttaaatcatcaatcacagcttgttttttgttgatgcaacaatcgaacccatactttgatggtttgagatctcaaaccacaaagccatgagtgcaagtgacacatctcgttcaataaaaactagataactaataaagtatagtttgtagtaataaataaataagcatactcttttaaatgaatctatacgtctggacgctcattctgatcaaaaatacgattatggcaagtagggttgcaagggtaggcacaatctatttacggaagggccttcgatcataaaaccaatcacccactgcctttgcaattgatgtcttggccaccac

SEQ ID NO: 229350 - DNA, 407 bp, Glycine max
caagaaacaaggtgtattaaaaaaattagagcaaatgatataacatacaatacaaggaacgaaagctgcttttcaattcatatatgaaatgtgctgtggactgcggtggacagtgtcgtcttgtgtgtaaccaattaaccattatgaataagaaactggaaggtccaacatattctattttctaactaaagacaagtctcggacacacctgatgcttataggggcgaaaacaacctaacggaaatagatggatatttgggggatgtcaatgtcattatcatcatcatcctcacaggcgacaacaacatccaagtgacgacggtaagaaggtatttccaccttggccactttcctagctaaatccaccatttttttgtccattcgttctctgggcctagggaacatgc

SEQ ID NO: 229351 - DNA, 415 bp, Glycine max
actccaaaaaggaagaatatattattttggttggttacaacttacaatgagaaagaatataaagtaacgaagtggagagtggtttacaaataagaatgcttttcaaatttattaagctagtccatgattccttagtattattataagttgcattgtgagcctatagtatagtattaataaaattgatgcctactatctatgcgtatatgtgagttatttttcagcaaagaatcatgtcccatcatcgcagggggaacaagcctcttgtgcaatgtcagtaatctgaaggccagaatcatatataagtccatttttccaatcagcaggtaggaccttctttgcccaaatccacttgccatcataccctgccgttaccactaacctaaattgcaatgcgccttggggtaccctgctt

SEQ ID NO: 229352 - DNA, 263 bp, Glycine max
gaacatgacaatttcatatattattattatacttcacaatcagcatttctttgttcaagactgataataaccattaaattattgtcattgtaacaatcggaaaacgagggaaaggaatagaagaaaacaatgaacaacccttgccagttagttgcaccaaccaacagggcgccaaccatagtaccaatcaaaaggtaaaaagagagagagaccaaatcctactaagaaaagcataactgttcctttccatccaaagggagaaa

SEQ ID NO: 229353 - DNA, 536 bp, Glycine max
acatactgggaaaccttttattggataaccatggaagttgacagaaacagcaaaatcatcccattcatgatttttgtgcaacaatgatcatttccattattctagggtttttattaagacaatgatgaagacaatctttgagttcacggtatgctagtgtttttaaatacatggacattgcagtattttgcttgtagatgaatgttgcaccatttgattagtcggtctccaaactgcagcctttgttcctgtttgcctgtgcactcacttcagtcccctttgttcttgattatgtttttcaatttctcatttgcagccactagttcagcagttatgcctggttcattggctgaatgccctgcatcaggaaccaccctaaaatctgcctctggccaagctttatgaagatcccaggctggcatcataggacagcaaacatcatatttttcctgaacgaatgtggtgtttatatgccttattttatcaattcttgccaccggaatgaatcaaaggggaaaaatcccttggttacaaaa

SEQ ID NO: 229354 - DNA, 478 bp, Glycine max
ttggtcataattgttttttattttttttttaaataaatctttttgttgattaaccattcaaccaaagatgaaaggccaccgattgaaccggaaagaacacaccatggcaggttaaccattctccgatgaagactcctgagaaataaaatagtccacatatgggctttttattaatacatatctcccctctagtagtcagtgctgggaagctgcctcatgggtgtggctgatgaagacaaccctcgtggataagcccagcggtggcacctccgatgatagggcctgcccagtagatccagtggttggtccaggcccaggtcacgacaggaggcccaaatgttacaacagggttcatgtgctgctccggagaaaggtcccacccaacaatatgcttctgcccacaatgaaaccaatggcgatgggagcaataatttccaaattgcccttcttgggggcaacgggagtggcgtaaactgtg

SEQ ID NO: 229355 - DNA, 482 bp, Glycine max
agggggaaaaactttatctaataagtatcacaaacatacaactagtcattgatctattagaacatgcttataaaagataagtagtctcgtagatggaattgaaatgaaaactgggaacaccttcaacaagtcctgattgagaatcaagaagtacaattatagagggagttcaccactgtcaacaatcacaaccttgctcttgggagtgccactttgtgttccttcagcttcaatcttgtaaacaacatccattccagaaagaactttaccaaaaacaacatgccttccgtccaaccagctagttgtcacagttgtaatgaaaaattgtgaaccattggtattaggaccagcatttgccattgatagaagtcctggtccagtatgctttaacttgaagttctcatcagcaaacttctctccgtaaattgattctccacccattccatttccttggtgtaaatcaccttcttgaagcataaagc

SEQ ID NO: 229356 - DNA, 461 bp, Glycine max
ggaaaggaaacatgatcggatcctccttgagtccttgtaagaaatgtttaaaaacaaaattatgagaaatacaaagcttagtcttcagacatgctcagtagaaactgccttcttatttttacccctaccaaactagaagcaatacacaaattttagtttaagactgtcaatactcaaagattgcacagtcacatggatttcaaaactcatcatcagctttctctcacaggtcctcagggccattaatttccttggctgcgatcacagctccgtcaggtatttccagcttcacacccggttttgcaagaatacttgcttttcccttaaggattacaccaggtccaaaccatacatgggctgccacttttagactgtgaagctcaacaatactggggattgacttgaacccgctcaagaaattgctaaccttcttaaattctggccccaattcaatggaagga

SEQ ID NO: 229357 - DNA, 541 bp, Glycine max
accaatagaattcgtgagtctcaaattcattttcattcatcatgcccaaacttctatacactgcaaagtcatatctaagcaccttgaaagtcaaagcatctatataattcatcagctgtagaggtaacgaaatgtaactcaaaaaatttgattacttttttacaacatccttgaatgaaactggccaaaccctgcacgttcctcaatgacaaaatacctagattagaaggatgaggttcctattgaagagtatccagcagcttttctttccttcagtgttgaagccaaccagtccaggccctcataaagaccatctgccttgagtgcacaagtgccatgtatgtgccattttctattctttagatcaaagagacctagtgcttcacatacttgcattggcgtcatcgcccctctcaggtcttgtttgttggcaaacaccaagatgacactattgagcataaatgggtcatttatgattgtctgaaattcctgctttgctttacctattctctcacgatccaagctatcaacaacataaatc

SEQ ID NO: 229358 - DNA, 537 bp, Glycine max
accaatagaattcgtgagtctcaaattcattttcattcatcatgcccaaacttctatacactgcaaagtcatatctaagcaccttgaaagtcaaagcatctatataattcatcagctgtagaggtaacgaaatgtaactcaaaaaatttgattacttttttacaacatccttgaatgaaactggccaaaccctgcacgttcctcaatgacaaaatacctagattagaaggatgaggttcctattgaagagtatccagcagcttttctttccttcagtgttgaagccaaccagtccaggccctcataaagaccatctcccttgagtgcacaagtgccatgtatgtgccattttctattctttagatcaaagagacctagtgcttcacatacttgcattggcgtcatcgcccctctcaggtcttgtttgttggcaaacaccaagatgacactattgagcataaatgggtcatttatgattgtctgaaattcctgctttgctttacctattctctcacgatccaagctatcaacaacata

SEQ ID NO: 229359 - DNA, 491 bp, Glycine max
  unsure (1)..(491): unsure at all n locations
aaattataaagtaaatatcatttattcaaacctaaagaaacacagtaacacaccatcacaaactcatgtaaccctgccaataaaccatcacccctaaactccagcaccagcagcttgctcacttcaatacacaactcccagaatttctcatgtcaccacgtggcaagcacgctgatgtggagccaagtgttgtgcttacacgtaggtgtaccctccataatacaaccaaagacttaagcatcatataataatattaataaagtaaactaaagaaataaaaagaaaaaaaaaaaaaaggcttttcaacatggcatgcaaaatggtagacctgatccccacaactaggaccatttttaaacttggttttctcactcacactgtccataggtctaagcttcagtcttctcaacaggaacctctactgnggtttcaactgactcagctggtttgttctcttcctctggggttgctggtggggctgctgctgctga

SEQ ID NO: 229360 - DNA, 558 bp, Glycine max
actaaaaaaccagcttataacataagctttaaagcctgtatgtgtccactaaaacacagtgaaaactgaaaagggtaacatgatactgaaaacataaatcgacatgacatactaccaaatattgtctttcttgagaaactaaatccaaccaaaggacatgaaatcagacatttaaaaataaatagtaaatcaaaagcagaaataaactaaatttagtctacttcctcaatctttggccccgcaccgcttccagcagcaggaacatcatcgtccattgcaccacccacgtgtggaccagcaccaccctggtacatcttggcaatgatagggttgcagatgctttccaactccttcattttgtcctcaaattcatctgcctctccaagctggttgctgtctagccactggatggcctgctcaatggcatcctcaatctttttcttgtcagctgggtcaagttttcctccaatcttctcgtctttaatggtattcctcatgttgtatgagtagttcttccatgcattcttggcctctaccttcttgttgtgctcttcatct

SEQ ID NO: 229361 - DNA, 463 bp, Glycine max
aacaagttaacaacttcagaattttgcagtataagcatattagcagaaagtctgccataagatgggctctcacataccctgaaaacctaatatgttaattgccaatattgaaaggaacaagaaataatgttgaaacaacaagctaataaaacaaaacaaatgaatggttttaccaattacatagtgaaaccaaaactgaatggtgtgaaactacaagagcacaagtccaagtccagatggtttcaaggcactacgaatcctataattgtacaagtagtagtgaagctgtccatcttctggtccaaacttgagttctttgaggaaactctcattgtgcattacatccaaggcattgaaaacatcaaaatccttttgctttgctgcaatcagcacatcattcatcaactgggtcagcggagttttggtggaaacattataataagaataagccgctttcaaaatt

SEQ ID NO: 229362 - DNA, 619 bp, Glycine max
ctatgtatctatataatcgaattgaaattacgattctatcaaatctttttatttactttttttttttttaagaaaaaagaaagttctaattattaataaattatatctatatatatatatatacagatagatattctatatcttttatcttaattaatatttgacccctccttataatgggttatagttttctttatttttaggaacttatccattccttttttaatgtgcccgacaatccgaaagaattctgggggaggggtcatttcgtttttgatctagaataaatagagcttcaagaaatgagagaattaagaatacccacgagaaacactaatccaatccataatgatgtaccggaaaatacaacatttttgttattcgaccaaccttcaggagaagcaaatacaacaggtgcactaatcaataaaataaatgaaatagcaattaatgcaaaaacagctaattggaaagcaatagtcatgtttctaatcctccaatttaccaacaaaagaactttaccatttgatcccccaaccccttgatccctttatttgacaaaaaatttataataaaaaaacgcaagagggttttatcatgaattcattgatttttttac

SEQ ID NO: 229363 - DNA, 511 bp, Glycine max
gtgacatcgaccacccaaaattgttatgcattaaaaacaatgttacacattattacaattttattcaaatataccaaaagaatcaatcaaccagcaaataaatagatggaacatggtgatgccggttgtgatcctctaactgcataaattaattaccatccaaactcatgtcatttacactttgaagcaacggatcccttcggcaatgagggatgctacagcctcctttcacttgggtataacaacttaaccaagggaatcaacacaaataaatgtggtacaataataagacacgaaaaaggtcctctaaccaagtaccttgcgaagttcatcggtcaacttcacgcgacccgatggctccaacttgcttaaaagggcagcaagaccttgaggtagagcttgcaaatctagagctgagtcaccaatatttgtcaattgaagcaacactttctgcgcacgcaattcctttagtttattctcgtaatttgcaggattatccttccatctgaag

SEQ ID NO: 229364 - DNA, 504 bp, Glycine max
aaaatatccaaagccaaaatttgacacataaatttgattttttaaaagcaaaccaagcaaaaattgaacacaaatataaagttgacatttaaaaagcaaaccaacaacgcaacggcaaagccctaaaactcgctgcgcttaacaaaaatgtaatcaggggttctcacaaacacaacacattaaaacagaatgataaaaggagtcttgccaccgtcgatcaagaacccaattctgggaacaaaagttgcgagatgatggtggagacttcaaactatgtccgaaaaacaagctacctagaaacgaagacacaagggctagaaaccaacatttattgtaaccataagaaacgacatcccctgatgaaccaaaccggacgattcacttcttcttctgggcagccttggtgaccttggctccagtaggatccttcttcttcacgttcttgatgactcccacagcaacagtttgacgcatatccctgacagcaaagcgaccaagtggggg

SEQ ID NO: 229365 - DNA, 441 bp, Glycine max
cataaaatcagatttcatatattataggatcatctgtaaccccaactacaccaccaagaggacaaagaacttcacaaaactaaccctaaaaccactctacccaccacattctcacttcctaccccctctcttagccgtagcctttttcgctggagactttacactctttggtttcacactcttcactggcgctttcttagcaggcgctactttcttcgctgccggcttcgcagcaggagctgctttcttccctggtgaagtccgtgtcgacgtccttgaagccttggcgggcttcgctttgggctttgccgcgggcttggcagcagcagcctttgttttagcagcgggcttgggcttgggcttggcagctggcttaatccctttgggcttggcggcagcaagctttgggcttggaaagcagcaccgcagcagcctttgggt

SEQ ID NO: 229366 - DNA, 598 bp, Glycine max
gaacactacaaatagaaagttgacatttaataaaccaaagcaacacaacgcagcaaagtcctgaaactcgctgcgcttaacaaaaatgtaatcaggggttccgacaaacacaacacattaaaacacagataaataaaagcaattttgccaccgtcgatcaagaacccagttctgggaacaacagttgcgagatgatggtggagacttcaaactttgtccgaaaaacaagctacctagaaaagaagacacaagagtacagaaaagaaaccaacatttattgtaaccaacatcccctgatgaaccagcccgcacgattcacttcttcttctgggcagccttggtgaccttggctccggtaggatccttcttctcaacgttcttgatgactcccacagcaacagtttgacgcatgtccctaacagcaaacctaccaagtggaggatactcggagaaagtttcaacaaccatgggtttggttggaatcatcttaacaaaaccagcatcaccgttcttcaaaaactggggctccttctcaagctctttgccggatcggctgtcaatcttggtcatgagttcagcaaacttgacaagcatgtga

SEQ ID NO: 229367 - DNA, 518 bp, Glycine max
gagaactccaccattcacgcaacctgttttaatgaaaggaatatctgtcatgaaaaatctagatgaagagaaaatgatcagatgatgcggcggcacagggtaatcccatcacccacggggagctggcaaatctcgatcctcgaatcttgagccagatacttgttgagctccatcacatggccgcgaagaggcttaatgtaatccatcaatggtgcatcgggtggtgcagccacagatccagcccatagggtgttatcgtatccgatcagtcctccaatcttcacaagctctagtaccctcttgtggtagctcaagtaattgtccttatcagcatccacgaaaacgaaatccaacgacccctttttattttcatctttaagcatctcgtccagaaacggaagagcaggtccttctctgaaatcaatcttgtgagccactccagctttttgaattattggcaatcctaactcatagtattcgcgattcacatccaaagccaagatctttccatcaggggg

SEQ ID NO: 229368 - DNA, 548 bp, Glycine max
  unsure (1)..(548): unsure at all n locations
gagcgagcgagcgagcagtttcaaagataggatttgggattgggaaggcgagggattgcgctgcgtctcttcctcttctctttcgattcatccctcattcataatcttccaatccaacaacctcagccttacactcacacatacacacatctgaacgcgtatcgtccctcccatggcttcaaagcgcatcctcaaggagctcaaggacttgcagaaagacccaccaacttcttgcagcgctggtccagtagctgaggacatgttccattggcaagcaacgattatgggtcctgctgatagtccttatgctggaggggtattcctaagcactattcactttccttcgggatatcctttcaaacctccaaggttgcctttaaactaaaggtgtttcatccgaacatcaacagcaatggtagcatttgtcttgatatccttaagaagcagtggagccctgcactcaccatctctaggtactgctttctatctgctcattgctgactgatccaaatcctgatgatccactngttccgaaatcgctcacatgt

SEQ ID NO: 229369 - DNA, 293 bp, Glycine max
ttttacctttttatttttttgtgtttcgacacaaataacattttgttcatgcgttctcatcatgattgaaacatcacagtggttgtcgaacatagttatttgctatcaaattaagacaccggccttccctgtcccctcatgtcacacataatcttaccccactttaacacgaagtgcaaggctgaccctcgccagtttttatagatgccttccattccaatatcccttatctaaacgcagatgatcccatggcatacttttgggtccagctgcgtgcagtggccgtatacttg

SEQ ID NO: 229370 - DNA, 479 bp, Glycine max
gaaacagttaatgaagttctccgcgttgcagcagacttatctcacgcgccgggcgaacagcttcagaggatcggcgcagttggattcgtccggcgacggctctgtgaagtcgccggcggcgattttctggctggtaatccacggcgtctgctgcctcatcagcttggttctcggcttccgcttctcgcgcctcgtcttcttcttcctcttctccaccagcctctacaccgcgcctttccggcgcggttcggaaatcgcggctccgcgtgaggtgcctccggcggtgaaccggacggcgacgtcggtggcgagcacggcgagccgcgtggtggtcgggcggacggggatccgaatccggccgtggccgcatccggatcccgtggaggtgatgaaggcgcaccgcataatcgagagagtccagagagagcagagggctctgttcggagtgaaaaaccctaggacgggtgatcgctgtgacg

SEQ ID NO: 229371 - DNA, 420 bp, Glycine max
caaaattatggggcgtcccctttggtcttctaccaaactatcttaaagacggtgctgcctgctttctgaatgttgggactctgtcaagaggatgtgatggagctcccctgctgcccttgttgtttattaattgtcaacatgggcttcaatatctcattgcttcatctcctcaagatctcttcggccgttgtctcttgtctagcctccacattttcagtcccaatagcaatctatgtgttcacgctgccattgccatacatcggtgttgcctcttctcttccagcaggctttgttgcaggggccatcattctgatcataggattactcatttatgcatggaccccttaaatagttcctccactgcatccatcccctaaaaaagcttggaggatttgaatctcaatatcttcaccattggcc

SEQ ID NO: 229372 - DNA, 405 bp, Glycine max
cataaacgcgtgttgctcggataaggttttgctgctttgattcactcgtactttgcttaatatggcggttgagaagttgagcattgcaaaagatgtgactgaattaattggcaaaactccattggtatatctcaaccgcatcgtggatggctgtgttgccaaagttgctgcgaagctagaaatgatggaaccttgctccagtgtcaaagacaggatagggtatagcatgattgtagatgctgaggagaaaggactcatcacaccgggtgaaagtgtcctcattgagcctactagtggaaacactggcataagtttggcattcatggcagctgcttaaggttattaacttattataaccatgccttcttcgatgagtctcgaaagaagaaccattcttcgagcttt

SEQ ID NO: 229373 - DNA, 368 bp, Glycine max
aattaaaggggattggattaatcatacctcaaaaaccggaatttaaaacagaagttccccctgtttcccaacaaagataatagattgtgagatacaccactcataaaagctttctcaaagggggaaaattaacccaatcacagcacaagaaacccgcattacccaatacttttaaatatgtccttagctggagagcaatcacattaatcttccttttagagcccttccaaatctccggcccccgggtttaataaaggatctttgggttggccggattttcaaattgccgaagaatataaaaatttggagttttatcccaaattttttttgccttttgaacagctcctttgatacctttgggggggtca

SEQ ID NO: 229374 - DNA, 595 bp, Glycine max
  unsure (1)..(595): unsure at all n locations
gttggatatttgctgtctcagacacattcagagagatggaaactctggattccacctcttcccgtccttcgtgacggtcctcttccttcgaccacttcagggtgatcagggtttgaatcttaaggttcttgttatattttttgagacatggaaggaatttgtttcttgtcaagttgcttccagaattggttgctttcattccaagaagtacttgatcgccggttcttcatccttggagattatcttctggtttcctttgctaattgcacctagttttctgttctactttaatgatcagcacattgtacttaatgcttgtttcttctgagactagtgctgcatctttagggaatatatacaatgcattcctgactcaacatcaagttgaaacatttgaaagatccgcttctgggggatgaagtatataaattgatgtgtgaattttggatgctgcctgcttctcaagtattagataagcgattgcattgaaacagtgcagacagtacttattgaccatcattgtgttgttgcttctaatggatattggtggtgacaaaatattatttaccagaaaattctganaaatctatgtagc

SEQ ID NO: 229375 - DNA, 510 bp, Glycine max
  unsure (1)..(510): unsure at all n locations
ggaatggatgttgcagcttctgaattttacaaggaatacaaaacatacgatttgaacttcaaggaagataacaatgatggctcccagaggatctctggagatgctttgaaagatctgtacaagtcatttgtgtcagagtacccaattgtttcaattgaggatccatttgaccaggatgactgggagcactatgctaagctaactgctgaggttggagccaatgtacaaattgttggtgatgatctcttggttaccaaccccaagagggttcagaaggcaattgatactaaagcatgcaatgctcttctcctcaaggtcaaccaaattggttctgtgactgagagtattgaagctgtcaggatgtccaaaaaagctggatggggtgtcatggccagtccagaagtggagagactgaggataccttcattgcntgacctttctgttggtttggctacccggtcaaattaagactggagctccnatgcaggtctgagcgtcttgctaaatata

SEQ ID NO: 229376 - DNA, 489 bp, Glycine max
gcgaagagaatggctcccaagggtttatatctttttggctgtgttatgcttctcagcactgtcactgagtcgttgtcttgcggaggataatggacttgttatgaacttctacaaggaatcatgccctcaggctgaagacatcatcaaagaacaagtcaagcttctctacaagcgccacaagaacattgctttctcctggctcagaaacatcttccatgactgtgctgttcagagttgtgatgcttcactgttgctggactccacaagaaggagcttgtctgagaaggaaacagatagaagctttgggttgagaaatttcaggtacattgagaccatcaaagaagctttggaaagggaatgcccaggagttgtttcctgtgctgatatcctcgttctctctgccagagatggcattgtttcgctaggaggtccccatatccctcttaaaacaggaagaagggatggtagaaggagcagagccgatgtggt

SEQ ID NO: 229377 - DNA, 490 bp, Glycine max
  unsure (1)..(490): unsure at all n locations
gtggagtagggttttttttcgtttgatttaagcatgagcaggagtttgggaattccggtgaagctgctccacgaggcttcggggcacgtggtgacggtggagctcaagagcggagaactctacagaggcagcatgatcgagtgcgaggacaactggaactgccaactcgagagcatcacctacactgccaaggatggcaaaacatcgcaacttgagcatgtttttattcgaggaagcaaagtcaggtttatggtcatcccagacatgctgaagaatgcgcctatgtttaagcgtttggatgcaagaatcaagggcaagggtgcatcacttggtgttggtaggggcagagcagttgcaatgcgagcaaaggctcaagctgctgggcgtggagctgcacctggaaggggtgtaccaccagtgggagggtgatcaccattcaatnatttgtattctcctgtctgttgacatgtttatgtgacaagaaattcga

SEQ ID NO: 229378 - DNA, 413 bp, Glycine max
atacaaggaataggaatttatagttctcttttgtgcaatcttcctgaatataccagaattgttgagttgattactactcaccaatttctttctttctttctttcttttggatttgcagcaacaaaatcaacgcccaagcaggtggaagtaacaggcctcatgagctgcttccggcggtggctcagccgtcacaggcccctcacgtgggggttgaatccgagcaaagccggtccggtctgatggcggatcgggccaagattccggcaccggaaggagttctgaagtgtcctcggtgtgaatccaccaacacaaagttttgctacttcaacaattacagcctctctcagcgcaggcacttctgcaagacatgttggcgttattggacaagaggtggtgctcgtaggaacgttcct

SEQ ID NO: 229379 - DNA, 422 bp, Glycine max
agagaatggctcccaagggtttaacctttctggctgtgttaatatgcgtttcagcactgtcactgagtccttctgttgcgggggaagggcaaaataatggccttgttatgaacttctacaaggaatcatgccctcaggctgaagacatcatcacagaacaagtcaagcttctctacaagcgccacaagaacactgctttctcctggctcaggaacatcttccatgactgtgctgttcagagttgtgatgcttcactgttgctggactccacaagaaggaccttgtctgagaaggaaacagatagaagctctgggttgagaaatttcaggtacattgagaccatcaaagaagctttggaaagagaatgccctggagttgtttcatgtgctgatatcctcgttctctctgccagagatggcatt

SEQ ID NO: 229380 - DNA, 400 bp, Glycine max
aacagtgtataatgcccatgggccatgatttatttatttagaaagaacaacctagctttatgagtatgaatatcataagcattgtcactgccatcataacagcactcacacgcatacataacataattaacaccatgaacatgcccttctacccaactctaagctacttgcatagtactacatatataatatccttattgaaattaaaaaaaaaacaacagtaacatcggaagattaaaaaacatagcctcttaatcctcccatccccatgaacctgcagtggtctcggttcattgaaccagcccatttaaaggaaaagaccttaattattttttgcataatatattacagattttcttcctcgatcatagacaaggggaggaaaattcaagggtcctga

SEQ ID NO: 229381 - DNA, 506 bp, Glycine max
  unsure (1)..(506): unsure at all n locations
gataactctctggttatggatggttcttagagtcctatagacagttgaggctcattgtggttaccatttcccatggagtctttccaacttccttccattgtatggaggagctgatttccatgactatcatcanccgtttattgtacaccaagtctgggaactattcatcaacttttacttacatggaccggatatttgggactgatataggctacagaaagttgaaagcattgaagagcataggagttgaagacagtggcgagcaaaagaaacaataagaatacgtttttaggaatatccaggaatgattagagagttgatttgcaaaagggcatatttgaaaaatgtctatgatatcaactccttatgtgttcttgtgtttttgtagtagctggtgtttgtcttcaatgtgctgatggctttttctggacattcatgccctgttattagaaaaacttcattattgacagtaatttcaattttgggatgtttccctttgctgatct

SEQ ID NO: 229382 - DNA, 614 bp, Glycine max
  unsure (1)..(614): unsure at all n locations
attgtttgttgttgtaactcgttcttcttcttttgttgttctgtgtttgtgtttgttttttctctcacctgaaaatgtcttgctgcggtggtaactgtggttgcggaagctcctgcaagtgcggcaacggcttgcgaggctgcaagatgtacccagacttgagctacactgagtcaaccaccaccgagaccttggtcatgggagtggcacctgttaaggctcaatttgagggtgctgaaatgggtgtgcccgctgagaacgatggctgcaaatgtggaccaaactgctcctgcaacccctgcacttgcaagtgaggtgttgggagagcaagcttcaagcagagatagcccttaattaggaataatgataaactattaatgtgtagctaaaaacttatgtattatgtctgtgatggttttcgtgcctctggtgttttgtgttaaacaaacatccttagataaagtggtcatgtcttgcctttagncagttcaagtgttttggacttgtgatgggttgtgttaagctcatgggtgcctcttttttttttttttaatgcttggtaattggtcgcttctgtataaagttcggctaatctgaaatatgaatctctgctt

SEQ ID NO: 229383 - DNA, 561 bp, Glycine max
  unsure (1)..(561): unsure at all n locations
ggtgtacctgacatgcattaagctatttattgctatagagaagtgaccaaggacatgtatggagatcttggcaaagttatggaaggaagcaatcaatggccacaaaatcctccaacattcaaagttcttatggaggagtatgttagtctctgcagagaccttgcaaggaaaattatgcgtggaatcgctttagcattaggtggatcgcccaatgaatttgaaggtcaaagagctggggatccattttgggtaatgcggctcattggttacccaggtgtatcatctgtaaatggaaccaatgttcataaaaatgacattggatgtggagctcacactgattacggtttattgacattacttaatcaagatgacgatgtaaacgcacttcaggtgagaaacctgtctggtgaatggataacagcacctccagttcctgngacatttgtatgcacattggtgacatgctaaagatttactccatgggttgtacgagtccactttgcatcgggtgataaacaacaactcanaatatagagtcagtgtagtatacttttatgagac

SEQ ID NO: 229384 - DNA, 591 bp, Glycine max
  unsure (1)..(591): unsure at all n locations
ctctctggaacccctcaccgctgcttctccttttaaaccctattcgctacttcacaacacatctctctgaactgaattaaactacatagaaaaataaaaccaaacctttcttcctactactcccattcccacatttcgacaacatggacgaggacttcgacatgccgacggcggaggcaatgggcgaggacttcgacttcgccggcgccaccggcggcgacctcgacggcagcagcagcaaccccatcttgaaggtcggcgaggagaaggagattggaaaagagggtttgaagaagaaactacttaaagaaggtgaaggatgggacactcctgaagttggtgacgaagttcaagttcactatactgngacgttgcttgatggcactaagtttgattccagcagagataggggaactcctttcagtttcacgcttggacaagggcaagttattaaaggatgggatcaaggtattataacgatgaagaaaggtgaaaattcccttttcaccatcccggctgagctagcttatggtgaaactggttctcctccaacaattccnnctaatgcaactcttcaattgatgtggagct

SEQ ID NO: 229385 - DNA, 321 bp, Glycine max
aaaacacgacaacaagggacctggattagtactcagagataaatcaaaccaaaaaacagagtggtttttttttaagaaagaaagaaagccctgcctctggcaagcccatcaattacttgctcctcatcagttttgaattcaaacagcttttcttcatgggcatggcccttttttaaaaacaaaggaccattttgcaggttaccaattacttttaatttcacaagggctcccttatttggacgctcatatccttccccttccttgaggatcttcttaatgagcttcttgtcctccggtacttttgagacagtcttccaagaa

SEQ ID NO: 229386 - DNA, 479 bp, Glycine max
cagtgaagacagtgagggtgattactactgagattcttgtagtgaaggaagtagtgattatgaatatggaaaaaggactgaatttatgacacaaagaagtagtcagcatctaacaggtggtgtctcactgaaaaatggacacactatctatgcatgataaatgcagtacagtgcaagaaggattttcaagtgatgatagtgaaactgggaatcctcaagatctactattcgagtattttgaacaagatcctccttatagtcgtgaaccattggctgacaagatacaagatcttgcacgccactatcctaccattaagtcattgagaagctgtgatttattaccagtcagttgggtgtctgtggcatggtatcctatatatcgaatacccacaggtccaactttaaaagatttagatgggtgctttctaacgtaccatacactccatacacccttgacggaagtgggtcgtactcatgct

SEQ ID NO: 229387 - DNA, 399 bp, Glycine max
ctcgttctctgcaaccatgtcactgaaatcttctcgctggctacgtaacttctcttcttcccttgcttcttcgtacttggcaggcaaaacattttccatggcttccaactcttcaggctgtaaagtgacatccactttatctgtcttctgacctctaagcaaatcaacccttttagcacctgatttgtcctgtgtgccagtgccaaccacataagtgtgtgtggttccaagcaaagttccaggggcaattttttcttccttctcttcaagtacttgataaagaggcctctcaggctccttcctctgttgcttccggaggtcgataacatcaggtgtttccactccagcgggagtgcttgacagactatcaacagactgaataccagcttcaagttcctc

SEQ ID NO: 229388 - DNA, 429 bp, Glycine max
aaaagttcaaaggagggaagactacatatatatcattttcccaaatatgtattcattattcacataaaatttatctcatagggacaccgatgaatcaattactacatgatatcagtaatagtgtaatactggtgtttattaagctacactcctcgagataaataatgaataaggtaattagccactaatcagatatctcgaaacatctgatatgcaccgaccctatcacgaggaatcagacgtagctctgaaccatgcttaaggaagacattacctgcactttgctgaggatgtatcccaacaccatcattggtgatgatggccctggtctggggaggcactttgaattcttctgctgcaaatttcacaacggcagtgaaaggtgcagcctctggaacgctgaacactttgaagggaagctttggatcg

SEQ ID NO: 229389 - DNA, 553 bp, Glycine max
aaaaaaattgacgtggagtgtgtccatttatgtcgattattggcacatgaatggcaagcattcgtatctcgcactcacaagttaagaaaaacgtttgtatctgtgaaaggcatatactaccaggctgaggtcgagggccagacaataacatggttaactcctcattcactacaacaggttgtatctgatgatgttgacatcactaccatgctaaactttctgcaattgtatgagcctcttcttagttttgtcaatttccgcctctaccattctataaatttgaagtatccccccatccttgatcctcagttggaagctttggcagcagatctatatgctctgtcaaggtatgccagtgccaataccagaccctctgtactgatttctgaagcttctcaagctgaatctgaacaagtggagaccaagcaaaaagaggcagagactggagataaaacatctgaactaagacttgctcaacttcagcatcaacttccttctaatgaacctggtgcactaatgcacctcgttgaggaagttactggtgaagatgaag

SEQ ID NO: 229390 - DNA, 556 bp, Glycine max
ctcgagccgcgcgtctggctcggcaccttccccaccgccgaggaagccgcccgagcctacgacgacgccgccaagcgcatccgcggcgacaaggccaagctcaacttcccggccaccgctccgccacccttcaaaaaacaacgctgcctcagccctgacaccaccaccgaacaaagcagcagctcacaatccaccactggatccaccggatcgccgccttccgccgccttccacggcggaggagatgaactcgacctgaaacaacttgaacggtttctagggttggacaacatgggtgctgagtgggacaacatggatgacctgtggatgctggacacgtcgttgtgcccaaccgtcacttaatttactagaagggagataattaattaattaatagatggcgttttcttaagttatagttttataaactatgttgggtatgtgtcttagtttctgtttgtcttgcctctcgtttggtatttcgttttgacggtcgattatttcaattaggtgcacgtatcatgaagggatgatatatgtatcatatgattataat

SEQ ID NO: 229391 - DNA, 553 bp, Glycine max
attggctgatacttgctccctcttaattataacatgagacagagaaagggttgacggaaaggaaaaccaaatcaaacccaacccaccttgtccgatctgccaccaggtgtggttgttgtgatttgaatggaggcaagtggaggtggcggtggctgtgctttaccgtctgcaccagagaagcaatatctgcacgatttctcgaagctgtttcagtactatctggataaatccactccacattccacgtacagatggattgggacttttgtgatagcatacatctacgttgtacgcgttgtttatgtgcatgggttttacattgtctcttatggcctcagaatctaccttctgaatctcttgattgggtttctctcccctttggtcgatccagagctcgatccctgcgattcccctttgcttgccaccaaaggctccgatgagttcaaacccttcattcgccgccttcccgagttcaagttctggtattctttcacgaaggctctctgcatagcattttgtgatgacttttttttttccctgtttgatgttcctg

SEQ ID NO: 229392 - DNA, 440 bp, Glycine max
acaagaaaaatccaatcaataacatgtgtaccgacaatgagattcactatcaatcaccaattcttcatgtataataaaacgagtggacattaagattttctgtaactgcataatgcatactggcatccataataccatgaatacaaattctttcatagaaagggggggaattaactaccctgaatgttcacaaaacctaactaagtagatctttgaatccagagaagcaagtttcagtctgcacgagagccactgctacttgcagaagatttcttaccgctatacttctgcttccccaagctgaaggggatatatttgtatttcatcatgtgtgcaacttggcggctcatcgctaggacaatgtgaacaaaccagtaactgagtcttataggccaaaagacaggaacattatacagggaaaataaagtcatcacaaatgc

SEQ ID NO: 229393 - DNA, 554 bp, Glycine max
  unsure (1)..(554): unsure at all n locations
gtttcaccggaagaacgtttccttattgggcgagtttgccccagaccataccgaatgtataggtgcattgtcagatatggttacaaggacattcaaagggatgatggagattttgagaatcatcttatacagagtatagcagaatttatccaaatggaagcagtgcaacctcagttctcaagttccgaagcttcttcttcacttgatgggaggatggccgttataagttctagaaactatgattatgcttcaagtttaatagtttctgagcaggaggatataggcgttgacatatccatccctagcagcagatctgcaaccctgcaaagtttgcaatcggtttacgatgatgaaactccgcaagttagaagacgacgagtaagatttcagctaccagaaaacactggtatggatcccgatgttagggaagagcttttggatttaattcaagccaaggaagctggggttgcatatataatggggcactcatatgtgaagggcaggaaatcatcctcattcttgaanaagctcgtgaatgatattggttactcatt

SEQ ID NO: 229394 - DNA, 556 bp, Glycine max
aataataaaagcagtggttataataataataaattttaaagatttgctctacatactacaacaaaatagctccacacctgctgagctaataatgccaaagcaaactacacccgtacatattcacgataaacctatccaaacctcagggtttacactcatacaatcatgcatatcgttacaatattatgtttcgtgcttttgacaacacttcatttgtaaggattgggaagtgaataaagcaacaaaaaacataaatctacgtcaacaagtgcaactcaggacggataggaagctacagcttaggtaaaggattgaacggcagaagacgtggtaactaaacttgataagagaccgactatgacagcactgttgtacgtgcttggttctgtttgcatggaattgttcctggaatcaatgaaagtctcatttaagaagggtccaccaacaagtgctccagtagctacattgggattaggatcagatgactcaagccactggaagccatccttgcagccagtttttgcatcagcaggaattgaagcacccctatgatgca

SEQ ID NO: 229395 - DNA, 523 bp, Glycine max
  unsure (1)..(523): unsure at all n locations
agatgccattggtagatgtagacattgatatagagtccactgaatcattccctatcacagaagaaatgagaatgaaagcacagagtttaagggtacaagagcgcaaaaggaaagaggaggaagagaaaagattggagagagaacgggagaaggagaggattcaagctggtaagagactccttgaggctaagcgaattgcggaagaaaatgaaagaaaacggaatctagcattgaaaaaagcagaaaaagaagaagagaaaagagctagagaaaaagttctcaagaaaccagagcaggataagttaaatagaaggtataaacaaggattgcctttagaaggccaagcagctgtgaagatcttctgctattgaaatagaacaagaaaagaagtcaanagtctgtttataatacaacagcaaaagctgaacagttaagagaatgtctgaggaatctaagcgtaacctcagggtgaggatgccagagtcagaagggcctttcaacaattttagtctatgttggaaat

SEQ ID NO: 229396 - DNA, 567 bp, Glycine max
ctcgagccgaatcggctcgagttcaaattttgcaatttcatgcattggatgtaaggctcgtccatgtgatttgaggtttcatttgatgaaggtatgccctcttctctaaatagggagtcaccacagaatgcagcatctcctgatgcaatgggtgagtcatccagcacaggaacagcaagacttgatagaacagacagttttcgtgcactctagttgagagtggactgtgaccatgtttttggttggggctgtggcatagtaggtgtttgtgtcttggaaaagcacttttttcctgcatattatcatattatgatgctatgcaggcagaattatgtttccaattaccatctatgcaatggctcacagattggtatttgttataccagtcagtcagtcatttcattttaaatttgttgtagtgtggttcaaatttggttcgtttcagtaagtaaatgttgctcttaatccttctacctggctcgagtataattacctctcataaaggatgtatgtagtattgtagtcttgtaccacaaaaaaatcagtaaataaatgcatgtgttcaat

SEQ ID NO: 229397 - DNA, 600 bp, Glycine max
  unsure (1)..(600): unsure at all n locations
gctacccactctcttcttccaagtccattcacgcttttctctacagtcatgggcaaggtcaagatcggaatcaacggatttggaagaattggccgtttggttgccagagtcgctctgcaaagagacgatgtggagctcgttgccgttaacgaccctttcattaccaccgattacatgacatacatgtttaaatacgacagtgttcacggacactggaagcatcacgatgtcaccgttaaggacgagaagacccttctcttcggtgacaagccagtcactgtttttggacacaggaaccctgaagagatcccatgggggtcaactggagctgatatcattgttgagtccaccggagttttcaccgataaggacaaggccgccgcacatttgaagggtggtgcgaagaaggttattatttctgcccccagtaaggatgcccccatgtttgctgttggtgttaacgagcacgagtacaagccagagcttgatattatttccaatgctagctgcacaaccaactgccttgctccacttgctaaggttattaatgacaggtttggcatttgtgagggttngatgaccactgttcattccatcact

SEQ ID NO: 229398 - DNA, 463 bp, Glycine max
ctcactgatccagccaatttaatgggatgaacagtaaagaaggcttatgaacttttggaaaacacaccaaatgcccacatgctgcaacaattttcaaaccctgccaatactcaggtgcattttgaaacaacaggtcctgagatatgggaggatacaaatggacaagttgacatatttgttatgggaataggtagtggaggcacagtctctggggttggacaatatcttaaatccaaaaatcctaatgttaagatatatggagtggagccaagtgaaagcaatgtgctgaatggtggtaaacctggtcctcatcatataactggcaatggagttggattcaaaccagacatattggacatggatgttatggaaaaagttcttgaagttagcagtgaagatgcagttaacatggctagggtgttggcattgaaggaaggactcatggtagggatatcatctggag

SEQ ID NO: 229399 - DNA, 533 bp, Glycine max
  unsure (1)..(533): unsure at all n locations
agaagacgttgaggctgttttactcctttgttgtcgaatttgcctcgaaagcgattccgacccagaggatgaattgatatctccgtgcatgtgcaaagggacccaacagtttgtccatcgttcatgtcttgatcattggcgctcagtaaaggaaggatttgccttctcacactgcacaacctgcaaagcccaatttcatcttagagttgaatcgattgaggacaacacttggcgtaaaataaagttcagactttttgtggcaagggatgttttccttgtttttcttgcagtacaaactgtgattgcagctattggtggctttgcatacatcatggacaaagatggttccttcaggaactcgtttgatgatggttgggataggatactgtcaaggcatcctattccattttattattgcattggagtgctggccttctttgtattgattgggttttttggcctcatactgcattgctcctncctcatagcaatgaccccagaatggctggctgtcaaaacttgttgtatggatg

SEQ ID NO: 229400 - DNA, 539 bp, Glycine max
  unsure (1)..(539): unsure at all n locations
gttcccactcaaacttatctagcgcatcacaagcaacaaaacacaaacaagcgaacaatagttcacaactaaaggaagaggttgttgaagagatagagatacatagtgtttgtgttagtgttatttatggtgtccctcaacctcaacccaaacccacctcaaacttttcacttcttcgaccccttcaacatggaggatcagaataagaaggtccgaaaaccttacaccattaccaagtccagagagaactggaccgaccaggagcatgacaagtttctcgaagctcttcacttattcgaccgtgactggaagaagattgaagcatttgtaggttcaaaaacagttatccagataagggagtcatgcacagaagtatttatgaaagttcagaagatggcacaagtgaacatgtaccttcccctcgtccaaagagaaaagctgctcattcctacccacaaaggcatctaanaatgctcttactatatcccaagttgcgcggccattgcaatcttcatctgctttatctgaatcatcacaca

SEQ ID NO: 229401 - DNA, 444 bp, Glycine max
  unsure (1)..(444): unsure at all n locations
atacaaagcattgaattcaaaaactaatttcatttcttgtgctttgctttattcctcaaaaccaaacatgtcgaacacatgcggcaactgtgactgcgctgacaagactaactgcaccaagggaaacagctatggtgttatagtagagactgagaagagctacatcgagactgttgacatggatgttccagcagctgagcatgatgggaagtgcaagtgtggcactaactgcacttgcacggactgcacttgtggccattaaggaatatgtatgaaaatgtaattgccatgtgtttggcaatacaaatctccaaataatgtaatcttcgtatgaataaatgtgtgctgttatcctacttcagggtctgtgtagtcatgcagtctgaatcatgtccagttcctgtcatagttattaacagccatgggntgtggcattctatatat

SEQ ID NO: 229402 - DNA, 485 bp, Glycine max
ccacttgccaaggttatcaatgacagttttggcgtttttgagggtttgatgaccactggtcattccatcaccgcttcccatatgactgacgatgggccatcatccatggactggagaggcggaagagctgctttatttaacatcattcctagctgcactggagctgccaaggctgttgggaaagatctccctgctttgaatggaacactgactgggatggcagtccaagtgcccaccgtggatgtttctttggtgacctcacagtgaggctggagaaagaagcttcctacgatgaaattagagatgctatctaggaaggatcagagggccaagatgagggcattctcggctacactgaagatgatgtggtctccactgactgtatgggcgatagcagatcaagtgtttttgatgcaaaggctggaattgcattgaataatagctttgcgatgctcgttgttggtacgacaacgagtggggataca

SEQ ID NO: 229403 - DNA, 309 bp, Glycine max
gaaaaaaaggacggacaaatatctgctataacaatcaatcacaggtacattagcgagtggtcaagccaagtccatcagcgagtatataaaaatgcagaaactcgatccccctccacaagagacaacctcaaaagcccaaaaaagagctgatgctacttcaacaagtaacaccactggtttcagaaaccgatgatattcagacctctcattttttgctcgagcacgacactaaatcgcggcttaacatcaacatacggtgattatgtgaagacacgctacctcgaagtaacaccttaaagagactttttg

SEQ ID NO: 229404 - DNA, 449 bp, Glycine max
aaagaaacaacaaaacactttctcagtttcatatcctatcttctcttctccctcttcttaaaaccagggagggagagggagagagagagagagaacgtgcttaacatagcaatggcaatggccaacaaggagagggagaagaagttcttctttgtagggtcactagtaaactacgcagctgaactaaagcttcttctcgcaactctcttccttctttgtggtgttgccactctccttcaattcctcccttcgcgtttcaccatttcctcctccgatctccgcttctgcatctaaagggtgtccctatacacccccaccaccctctacacccccaccaccctttacatcactttctacacccccaacaccactctctttcacccaaaaacaccttcccaatggcaccatcaagcgtgtcttcaaccctcacggctccgcggcctacaact

SEQ ID NO: 229405 - DNA, 581 bp, Glycine max
tctacattggcctgcgccgcccctgcctcaagctcgattctttcaattctcaatctttctctctcttcgaccctaatcttcgcctatccctctctccacccaaaccctcacgcgccgtcatcgccatggccgggcaccgggaagttctttgttggtggcaactggaagtgtaacggaacaaaagactcaatcagcaagcttgttgctgacttgaacaatgcaaaattggagcctgatgttgatgttgtcgttgcacctcccttcctctacatcgatcaagtgaaaaactcactcactgagcggattgaaatatctgcccagaattcttgggttggaaaaggtggtgcttttactggagaaatcagcgcggaacaactaaaagatcttggatgcaagtgggttgttcttggacattctgagcgaagacatgttattggagaaaatgatgagcttatagggaagaaagctgcctatgctttgagcccaggtcttggggtgattgcatgcattggagaattggtagaagaaagggagggctggaaaaacttttgatgtttggtttcagcaattggaggcttatg

SEQ ID NO: 229406 - DNA, 388 bp, Glycine max
aattcaaaaacatttattatttattggtttctaccatctctgcatggctaaatgctataaataccctggctttttggaaaaatcaaataatgccattcctactgattgcaaaaaaattggcagtaattttgataataaaaaccaatctgttattatacacccacattattgccacatttatgactagcccgtctttatccttaatgctctcatattgccaaaatcacaataagtaattaagccgcaactttcttggatgggactgaattgacaatggtagcaaactcaggaccctttaatgaagcccctccaacgagaaatccatcaatatcttcttgctttgccagttcagcactggtgcctccatttacagaccctccataaataa

SEQ ID NO: 229407 - DNA, 487 bp, Glycine max
  unsure (1)..(487): unsure at all n locations
ggtgcccaaacttttgcaaactcagaatccttggtgtgtttgctgaaaaagcaaagagaatcaaacatatattatggagcaatatgtgcatccccggctttagtcttggagccccatggcttgctgaaaggtaaaaaggccactgcctttcctgtaatgtgcaacaagttatcagatcagagtgaagtagaaaacagggtggtagttgatggcaatcttattaccagcagaggtccaggaacctccattgagtttgcattagctattgtggagaagctgtttggacgcaagttagcactagaacttgcaaagggcagtagtgtttgcacgcccttaggatttttgaacgcgaagctttttgtaccgatgcattatagatatgtgtatggataattgagtgtatctgaaccttcttgagttgtaaaaatcacgaatatagagtgggtgctaattactttgatatctaangaaaaaaaggatgcataat

SEQ ID NO: 229408 - DNA, 317 bp, Glycine max
gttccaaaatccaaacactctctctcttcccatggcgttgaacaatggcgtccccgccaccggcaccggcctcatcgtcagcttcggtgagatgctcatcgacttcgtccccaccgtctctggcgtgtccctggccgaggcccctggcttcctcaaggcccccggcggcgcccccgctaacgtcgccatcgccgtgtcgcgcctcggcggcaaagccgccttcgtcggcaagctcggcgacgacgagttcggccacatgctcgccggaatcctcaaggaaaacggcgttcggcccaccggattaactttgacccggg

SEQ ID NO: 229409 - DNA, 549 bp, Glycine max
ggaaatgggatatgattgtattgttttttaatcttggtcaaggtgggcagcttatggtatcttgcatgatccaagcatgcggaatttggcattgcagtttgtaaaacagcttggagatgcactgcattctataagctcagagaaaattagtgggcagcagctgcagttggtctatgttataggttcaccttctgagaagttgcaagagcatgattttggtcctaaagatcttgagactttaagtgaagctgtggatggattctcgttaatgacatatgatttctctaatcctcataatcctggtcctaatgcacctttgaaatggattcaaattgttctacagctgcttctcggtacctctggcaatagagcccaaagccttgcccccaagatacttcttggtatcaacttctatggaaatgatttctccctttcagggatgcagggggtggagctattattgggagagattacctggcacttttggagaagcactggcctgaactgcagtgggataagaatagtggggagcattttttcttttacact

SEQ ID NO: 229410 - DNA, 562 bp, Glycine max
aattggtacacggcaaataaatcaaattcacatgccaaaaatggaacatcatgtaaaataagctatggaactggttcaatatctggtttcttcagtcaggataatgttaaagttggcagtgctgttgttaagcatcaggatttcattgaggctacccacgaaggaagtcttacctttctgtcagcaaagtttgatggaatactgggacttggatttcaggagatctcagttgaaaattctgtaccatactggtacagaatggttgagcaaaaacttatcagtgagaaggtgttctctttttggcttaatggggatccaaatgcgaaaaaaggtggcgaattagtttttggtggtgttgacccaagcacttcaaaggaaaccacacttatgttccaattactgaaaaaggttactggcagattgaaataggagatcttttcattggaggtgtttcaactggtgtttgtgagggtggctgtgctgctattgtggattcaggaacatctttgcttgcttgtccaactccctgtgtggctgaaatcaaccatgctattggagctga

SEQ ID NO: 229411 - DNA, 452 bp, Glycine max
cataaacgcgtgttgctcggataaggttgtgctgcggtgattcactcgtactttgcttaatatggcggttgagaagttgagcattgcaaaagatgtgactgaattaattggcaaaactccattggtatatctcaaccgcatcgtggatggctgtgttgccaaagttgctgcgaagctagaaatgatggaaccttgctccagtgtcaaagacaggatagggtatagcatgattgtagatgctgaggagaaaggactcatcacaccgggtgaaagtgtcctcattgagcctactagtggaaacactggcataggtttggcattcatggcagctgctaagggttataaacttattataaccatgccttcttcgatgagtctcgaaagaagaaccattcttcgagcttttggagctgagttagtcctcactgatcccgcaaaggtatgaaggagct

SEQ ID NO: 229412 - DNA, 463 bp, Glycine max
gagagaacatttttttttgtttcatcatataaaatatatatgttctgaaagaacacatacaagtacacaaaaaaaagggggaaattcataaaaaaatacagaaaaaaaaaaacagaattgagtaagagggaaggaaacatagagaaaattttagcaatcagataataagaagccagtagtagtgcaaaagtcccttgccaagagtgttggaaccccttttagttaagcaggtaccttctcccccttgagtggcttcaccacttcccatgtgaagtcagggtcatctctgccaaagtgtccatatgcagcagtcttcaagaacctgccatttccacccctcttgagatcaaggttgatggagatcatgccaggcctgaagtcaaaactcttcttcacaatgctgaggatttccttgtcagggatcttcccagtgccataagtgtcaacaaacacagacaagggc

SEQ ID NO: 229413 - DNA, 532 bp, Glycine max
ctcattaacgtttcttctcttcactctttccgctgcatcaatggcttcagagaagaaactttcgaacccaatgagggagataaaagtgcagaagctcgtcctcaatatctctgttggcgagagtggagatcgtctcaccagagcctccaaggtgttggaacaacttagtggccaaaccccagtgttttccaaagcaaggtacactgttcgttcctttgggattagaagaaatgagaagattgcatgctatgtcactgtcagaggtgacaaggcaatgcaacttttggagagtggtttgaaggtgaaggaatatgaacttctcagaaggaacttcagtgatactggttgcttcggctttggtattcaggagcatattgatttgggaatcaagtatgatccttcaactggtatttatggaatggatttctttgttgttctggagcgacctggctatcgtgttggacgtcgccgaagatgcaaagtcccgtgttggaattcagcaccgagtcacaaaggaggatgctatgaagtg

SEQ ID NO: 229414 - DNA, 463 bp, Glycine max
ggttgcaaagaaaactaagtaaattgcccaacatcattgcataacgcggggttcaggagttctttgcaataaaagtgccgtttaaacagggctaatccatacccttcatcacgaaactgaaatgacaaacattgattcaaaacctgccttaaaattaacataatatcacagaaagatcgagctatagttgacaaaactgataacacactcctaaagtgaactcaatctaactaaagaatagcctgggacttgttaaggatcactccctcgtacttcacctggaaccacttcatagcatcctcctttgtgactcggtgctgaattccaacacgggacttgcatcttcggcgacgtccaacacgatagccaggtcgctccagaacaacaaagaaatccattccataaataccagttgaaggatcatacttgattcccaaatcaatatgctcctgaataccaaagc

SEQ ID NO: 229415 - DNA, 452 bp, Glycine max
atacaaagcattgaattcaaaaactaatttcatttcttgtgctttgctttattcctcaaaaccaaacatgtcgaacacatgcggcaactgtgactgcgctgacaagactaactgcaccaagggaaacagctatggtgttatagtagagactgagaagagctacatcgagactgttgacatggatgttccagcagctgagcatgatgggaagtgcaagtgtggcactaactgcacttgcacggactgcacttgtggccattaaggaatatgtatgaaaatgtaattgccatgtgtttggcaatacaaatctccaaataatgtaatcttcgtatgaataaatggtgtgctgttatcctacttcagggtctgtgtagtcatgcagtctgaatcatgtccagttcctgtcatagttattaacagccatgggttgtggcattctatatatggtttta

SEQ ID NO: 229416 - DNA, 505 bp, Glycine max
ttttccctcactttctcgctcgccaatttcccctctttctcctccaatggccgaccagctcaccgacgaccagatcgccgagttcaaggaggccttcagcctcttcgacaaggacggcgatggttgtattactactaaggaacttgggactgtgatgcggtcactagggcaaaacccaactgaggcagaactgcaggatatgattaatgaggttgatgctgatggcaatggaaccatcgacttcccagagttcctcaacctgatggctcgcaagatgaaagacaccgactccgaggaggagcttaaggaggctttccgtgtgttcgacaaggatcagaatggtttcatctctgcagctgagctccgccatgtcatgacaaatcttggggagaagctgaccgatgggaggttgatgagatgatccgcgaggccgacgtcgatggtgatggacagatcaactatgagggagttcgtcaaagtcatgatggccaagtgaggaccattc

SEQ ID NO: 229417 - DNA, 523 bp, Glycine max
gcagaaagcaagctcatcctagagttttaaaaatggcagcagcctcctccatggctctctcttccccatccttggctggcaaggccgtgaagctgggcccatcagcccccgaagtcgggagggtcagcatgaggaagaccgtcaccaagcaggcctcctccggaagcccatggtacggcccagaccgcgtcaagtacttgggcccattctctggcgagcccccgtcctacctcactggcgagttcccaggtgactacggctgggacactgctgggctttcggccgacccagaaaccttcgccagaaaccgtgagctcgaagtgatccactccaggtgggccatgctcggggccttgggctgcgtcttccccgaactgttgtcccgcacggggtcaagtttggaaagctgtgtggttcaggccgggtccagatcttagcgagggtgggctggactacttgggcacccaagccttgtccacgcccagagcatcctcgccatctgggccacccaagttatcctaat

SEQ ID NO: 229418 - DNA, 334 bp, Glycine max
agggagggttgccggggttgtgaccatttgggctctggtttcgatgaaccatgacacgcagtcatgcatggaccccaacgtgatggaggcgaaggttgtggtgagctcttgtgggcacgatggaccctttggcgccactggggttaagaggttgaagagtattgggatgattgatagcgttcctggaatgaaggctttggatatgaatgctgctgaggacgctattgtcaggctcactagggagattgtgcctggcatgattgtcactggcatggaggttgcagaaattgatggctccccgagaatgggtccgacgtttggggcgatgatgata

SEQ ID NO: 229419 - DNA, 509 bp, Glycine max
  unsure (1)..(509): unsure at all n locations
tgctcatttacacaccttttcaacctttcactttcagctttatttgaatccctctctctcctttccaaatggccagcgttgaggttgcacatcaaacaccaacaacagttccagaaaatgaaacaanccgatgtaatcaagacccaggaaacaaccccggaaccagtaccagccactgaggctcctgcaacagaacaagcagcagctgaggttcctgctcaagaagaacaacaagcaactgaggttcctgccccagaatcaaccaccgaagcaccaaaggaagaaaccaccgaagcaccaacaacagatacagtagaaacaacaactacagaagaagccaagccagaggagcctaaagaagttgcagttgagaccgaggagggtggtgacaaaggagacagaggaagagaagccagcagcagaagagaaatcagaggagaaaactgaagaagtgaaagaagaagcagatgagcctaaagatactactgaaacagagacagaatcagcac

SEQ ID NO: 229420 - DNA, 537 bp, Glycine max
ggcatcgtcacttgactataccccttttagatcatctctcaagttgcttttacccctggcagaacctactcgagctttgaacattcctgttattccagttgggccattgatggctactgttcatccccttgcaagctatcctccatatgttttttcttggctaaattctcagatttcagctcaagatatgatggaccaaaatctatttgagaagcttgttttgaacaacttcgataccgtaccttccaagcttctcttgcagttatcatcagttttccaaaaaggtggtttacgtacaggagtggaacattcttctacaaggaccatctccacaaaagtaatgttcctgtcttagcaattgctggtgaccgagacttaatctgccctcctgaagctgtatatgaaacggtgaagcttattcctgaagaattggttacatacaaagtctttggggaggcctggtggtccacactatgcccactatgacttagtgggtggatcgtctggctgcagatcaactgtatccatgtatcactg

SEQ ID NO: 229421 - DNA, 541 bp, Glycine max
  unsure (1)..(541): unsure at all n locations
agcacgttgaggccaatttcgctgattatgaagcccagtgaggatgaactcaaggcttgggacgctgatttcgtcaaggttgatcaggccacactctttgatctcattctggctgcaaattacttgaatatcaagagccttttggaccttacttgccagacagtagcagacatgatcaagggaaagactcctgaggaaattcgcaagacattcaacatcaagaatgacttcacccctgaggaagaggaggaagttcgtagggaaaaccaatgggcctttgaatgagtttataattctgctactttttaaatttcaatgaaaagatatgccctatagttgctagtttatttgtgttttatgtttcgcgtttctgacttgtcttttttttttttaacttgtgggggcaatcttgaaattgtaagtaatagttgaatatggtgggaggaatgctcttgagtctggtatctcagctttactgntaattcattgtccaacttttctgttgctctcgtatttaataaatgttagtggnttggtcttt

SEQ ID NO: 229422 - DNA, 505 bp, Glycine max
gtgagaaacatggcttttttaagctctttagtgctgctccttgcagctctaattctatcccctcaagttcttgcaaactatgagaatcccccagtgtacaagcctcccactgagaaaccaccagtttataagccccccagttgagaagcctcctgtttacaaacctccagttgaaaaccccccaatttataagcctccagtagagaagccaccagtgtacaagcccccagttgagaaacccccagtgtacaagcccccagttgaaaaaccaccagtgtacaagcccccagttgagaaaccaccagtgtacaagcccccagttgaaaaacccccagtttacaagccctcagttgagaaacccccagtgtacaagcccccagttgaaaaaccaccagtgtacaagcccccagttgagaagcccccagtttacaagcccccagttgagaagccaccagtttacaagccctcaggtgagaagccaccagtatacaagccaccagttgag

SEQ ID NO: 229423 - DNA, 440 bp, Glycine max
tttgttttttttttttttttttttttttttttttttttttttttttttgttttttttttggtttttggtttttttttttttttttttttttttggggggaaaaaaaattggggggtttttccttttttttggggaaaatgtgaaaattttcaaaaaaacgggggccagggggtatttgggaataaaaaaaaggtttttgtttggggccccagggggggccgggcctttcttgtttttaaaggggggggggaaattaaaaaaggggataaaaaaccgcccgtttagaattaaaggggggggggccccccctaatgacttgaaaaaaaaaacccccccttttggagggggggcaggccctttttttagggaatccggggaaccgacctcccgggttttgcctattatttttggggcctggggggggaaaaactggccccccc

SEQ ID NO: 229424 - DNA, 563 bp, Glycine max
gaattttattataaagtacattcaagctttatctcattttatgattttacaaataattggcaaaatatcacattatttgactttattttctattttcataaatttgtatggggaaaacagatgtcagttatattatgtacatgaaactctaaaaataagaaataaggtgatatttttataattatttgtgaaaataaaaattattttgtgaaacagaaactaacttctcacgaatttaattgttacatattatataatgtaaagaattttacatatctactctttttatataattaactatttcgtgtacttttctatatatattcattgtacaggctgatgttctaaaagtgttcccggatgaagtgacaatagtcctcttttacaacgtgacttacacagtcatgtctacacttgtagctttatttgcagtgccaaacgcatatgcttggaaagtaggactgaatatttcattaatctccattatttgcactgtaagatacctttctaagttaactgctgctgcactttgacatgggctatatacttttcacgtgggcact

SEQ ID NO: 229425 - DNA, 483 bp, Glycine max
atgaagacaagcacggcatgccgagcttttaccatcattttgctgccgcccactgccatgaccatggtgaacatcatgatcgaactgggcactcttgtcatgaagatgctccacttggtcgtaaagagcatgaccatcgccatattgatcacaatatggaagggatattttggcatgttcttgctgacaccatggggagagttggcgttgttatatgtaccctgttgattaagtacaagggatggcttattgctgatcctgcctgctcagtcattatgtctattgtaatcgtatcttctgcgatacctttgctaaaaaattcatcagaggttgtgctccaaagagtgccaagggcgcgtgagcatgagctgaaggatgccttacttaatgtttcgaagatcaggggcggttatggcatgcaaaagtttcattgctggaactgcacacacacagatgtagcaggggcgatgcatctttacgtgt

SEQ ID NO: 229426 - DNA, 587 bp, Glycine max
atgaagacaaacacagcattccgagctttaagcatcatgatgctgccgcccactgccatgaccatggtgaacatcatgatcaaactgggcactcttgtcatgaagatgctccacttgttcgtaaagagcatgaccatcgccatattgatcacaatatggaagggatatttttgcatgttcttgctgacaccatggggagtgttggtgttgttatatctaccctgttgattaagtacaagggatggcttattgctgatcctgcctgctcaatttttatttctattttaattgtatcttctgtgatacctttgctaaaaaattcagcagaagttttgctccaaagagtgccaagggcgcatgagcatgagctgaaggatgccttaattaatgtttcgaagataaggggcgtttatggcattcaaaagtttcattgctggaacttcacacacacagatgtagttggtacgatgcatcttcacgtgtcaacagatacagacaagacatgcgccaagtcgtaggttatgcatctgttacgtaatgctggaatgcaggatgtaacccttgcacgtggaatgtgttggataatt

SEQ ID NO: 229427 - DNA, 409 bp, Glycine max
aatattagagagtttgagatcattcagaaagttatttagtatttcacttggacaactcaaccactgtagatatcacccacaagtcacaatgtggggataccattgtacaagtccatgaaaatggaagaattttattctttaggacagagacagactaccaaggttttcattgcgcacttaagacttcgatttcaaattccaagacagagttgggccgtattccccaagcaggaaagccaccagcaccataagcataatccggagagcaccggagacgagcaacttcaccaatttgcatgccaagcacaccttcatcccatcctttgataacagaaccttggccgattttgaaagtgaatgggttctggccaggatcctttgtgctccagaatttctgagaaaggtcacc

SEQ ID NO: 229428 - DNA, 568 bp, Glycine max
  unsure (1)..(568): unsure at all n locations
gaattttattataaagtacattcaagcttaatctcattttatgattttacaaataattggcaaaatatcacattattttactttattttctattttcataaatttgtatggtgaaaacagatgtcagttattttatatacatcaaacttcaaaaataagaaataaggtgatatttttataattatttgtgaaaataaaaattattttgtgaaacagaaactaacttctcatgaatttaatttttacatattatataatgtaaagaattttacatatttactctttttatataattaactatttcgtgtacttttctatatatattcattttacaggctgatgttctaaaagtgttcccggatgaagtgacaatagtcctcttttacaacgtgacttccacagtcatgtctacacttgtagctttatttgcagtgccaaacgcaaatgcttggaaagtaggactgaatatttcattaatctccattatttgcactgtaagatacctttctaagttaactgctgctgcactttgacatgggctatatactttncacgtgggcactgcgct

SEQ ID NO: 229429 - DNA, 608 bp, Glycine max
  unsure (1)..(608): unsure at all n locations
aatttgtgttgcctgttctgctcgtgttttactgctggtttggaggcaagtggaactagcaatatgaaatttgcaatgaatggctgcatattgattggaactttagatggggccaatgttgaaataagggaagaggttggtgcagacaacttcttcctctttggtgccaaggctcatgaaattgctgggctgaggaaagaaagagcagagggaaaggtctgtcttaatacccatgttgtgcattttacttactgtgaaacatagttaatgccatgctgtttggggcatacaagcatagaacaaatattccactgttgaagtttctaatgttagtaataagaaattcacggatccaatgacttcaaaagaattgaacgaggagccatatgaagtgaaatcccatgtacggttttgtagtgtggcagtaagggtgacttatctgtcaacttttccacttctcaatggattggcagtaatttttttactgcatgtacattcccaaaatgatgatgtttntccaaaatcaaactttgttgttcagcatcttggactagccatcctttagaaggtattgntaaaaggtcatcaattcctaatgaaatggatgt

SEQ ID NO: 229430 - DNA, 417 bp, Glycine max
gaagccaaaacaatttgatatttattattataagacaaaggtttgatttacaccgacgaagtacccataaaacatatatattacagaactgcaagcttattttgactatgagcgcacccttaaagcgcgtctctacgcgaagttatattttattctctgctacgaggaattaagctatgcagtgatcatcacaaccacgtggcaccgattctctatactcctctatggcaattggactggttcaatgttccatatctctcgggcatattcatgaatcgtgcggtcactgctaaacttgtatgaacctgctgtgttcaatattgacattcttgtccatttagtttggtcacggtatgcttcatcaaccttctcttggcattctatgtagctgggggaagtctttccctacaaggaaat

SEQ ID NO: 229431 - DNA, 525 bp, Glycine max
aatttgtgttccctgttctgctcgtgttttactgctggtttggaggcaagtggaactagcaatatgaaatttgcaatgaatggctgcatattgattggaactttagatggggccaatgttgaaataagggaagaggttggtgcagacaacttcttcctctttggtgccaaggctcatgaaattgctgggctgaggaaagaaagagcagagggaaaggtctgtcttaatacccatgttgtgcattttacttactgtgaaacatagttaatgccatgctgtttggggcatacaagcatagaacaaatattccactgttgaagtttctaatgttagtaataagaaattcacggatccaatgacttcaaaagaattgaacgaggagccatatgaagtgaaatcccatgtacggttttgtagtgtggcagtaagggtgacttatctgtcaacttttccacttctcaatggattggcagtaattcttttactgcatgtacattcccacaatgatgatgtttttacaaaatc

SEQ ID NO: 229432 - DNA, 418 bp, Glycine max
gaagccaaaacaatttgatatttattattataagacaaaggtttgatttacaccgacgaagtgcccataaaacatatatattacagaactgcaagcttattttgactatgagcgcacccttaaagcgcgtctctacgcgaagttatattttattctctgctacgaggaattaagctatgcagtgatcatcacaaccacgtggcaccgattctctatactcctctatggcaattggactgggtcaatgttccatatctctcgggcatattcatgaatcgtgcggtcactgctaaacttgtatgaacctgctgtgttcaatattgacattcttgtccatttagtttggtcacggtatgcttcatcaaccttctcttggcattctatgtagctggggaagtctttccctacaaggaaataa

SEQ ID NO: 229433 - DNA, 552 bp, Glycine max
aatttgtgttccctgttctgctcgtgttttactgctggtttggaggcaagtggaactagcaatatgaaatttgcaatgaatggctgcatattgattggaactttagatggggccaatgttgaaataagggaagaggttggtgcagacaacttcttcctctttggtgccaaggctcatgaaattgctgggctgaggaaagaaagagcagagggaaaggtctgtcttaatacccatgttgtgcattttacttactgtgaaacatagttaatgccatgctgtttggggcatacaagcatagaacaaatattccactgttgaagtttctaatgttagtaataagaaattcacggatccaatgacttcaaaagaattgaacgaggagccatatgaagtgaaatcccatgtacggttttgtagtgtggcagtaagggtgacttatctgtcaacttttccacttctcaatggattggcagtaatttttttactgcatgtacattcccaaaatgatgatgtttttccaaaatcaaactttgttgttcagcatcttggact

SEQ ID NO: 229434 - DNA, 416 bp, Glycine max
gaagccaaaacaatttgatatttattattataagacaaaggtttgatttacaccgacgaagtacccataaaacatatatattacagaactgcaagcttattttgactatgagcgcacccttaaagcgcgtctctacgcgaagttatattttattctctgctacgaggaattaagctatgcagtgatcatcacaaccacgtggcaccgattctctatactcctctatggcaattggactggttcaatgttccatatctctcgggcatattcatgaatcgtgcggtcactgctaaacttgtatgaacctgctgtgttcaatattgacattcttgtccatttagtttggtcacggtatgcttcatcaaccttctcttggcattctatgtagctggggaagtctttccctacaaggaaat

SEQ ID NO: 229435 - DNA, 459 bp, Glycine max
aatattagagagtttgagatcattcagaaagttatttagtatttcacttggacaactcaaccactgtagatatcacccacaagtcacaatgtggggataccattgtacaagtccatgaaaatggaagaattttattctttaggacagagacagactaccaaggttttcattgcgcacttaagacttcgatttcaaattccaagacagagttgggccgtattccccaagcaggaaagccaccagcaccataagcataatccggagagcaccggagacgagcaacttcaccaatttgcatgccaagcacaccttcatcccatcctttgataacagaaccttggccgattttgaaagtgaatgggttctggccaggatcctttgtgctccagaatttctgagaaaggtcaccgttcttcccgaaaccagtgcagtgaacggttacgttctgaccgggaattg

SEQ ID NO: 229436 - DNA, 418 bp, Glycine max
cccttgaaaggtgtaattgcttcttcagaaatagatttatacaaaggtagttgcaatatctatttgccaaactaaaaatgtaaagacccttcttcccaatcctaggtagtggcccaattgtatttacaaaggcgggacaaaatatgtatatacaagtccaatcatatagcataatgtaacaataatcatactttggtctttactggggcacattacaggaattattatgcactgaaacccctttgcagagaactccaaggattggaaggaatagagacacaagcttgtgcagaggcctcagccatttgctcattctttatccctacattgcagatgtttgcaaaggacctcatatgtttcatgccatactgagacaaggatccacaatgtgtctcaaaagtcctcaccatggttttaa

SEQ ID NO: 229437 - DNA, 411 bp, Glycine max
ttttttttttttttttttttttttttttttttttttaaaaaaggccactttcaatttgggtgtataacaggggaagaacccaggaagtaggagtgttgagctcattcatttcagcaggggataccttcagcaggggaacaaatacagaatcactattcctattgaaaatatgagagaatctgcatgtttattggccaactggattcggggcaggctcctattccttgccctcacacaggtagggcatttgtaaccattgaataaagatcggacagttcggatctcaaataccgggtttatgtctaatttactgagatagatgtccgatctttatgtaatgggtcccagttagtaattgagtgaatatgtggaaaagacattgcagatgatcctcattatttgggggtcttg

SEQ ID NO: 229438 - DNA, 467 bp, Glycine max
gagagagatagaaaaaggggctgcttctttggagggagttaaagcaaaactgtggcaggtacctgaaacattgcctgaagaagaccttgcttagttgggagcacctccaaagagagatgttgcaattattactcccaatgagctacctgaggctgatggctttatgttgggttttcccacaagatttggatctatggacgctcaattgaaagcattttctgatgcaactggaggcctttggcgtacacaggcactagcaggaaaggccgccaggttctcttatagcactagatctaaaggaggaggcccagaaactaccccgttgacatctattactcaggttgttcaccatggattgatctttgtgaccattggatacacattcggcggtggcatgtcagacatggagacagtgaaaggtggattcgcatatgctgcaggaacttatgctggagatggcttaaggc

SEQ ID NO: 229439 - DNA, 552 bp, Glycine max
aatttgtgttgcctgttctgctcgtgttttactgctggtatggaggcaagtggaactagcaatatgaaatttgcaatgaatggctgcatattgattggaactttagatggggccaatgttgaaataagggaagaggttggtgcaaacaacttcttcctctttggtgccaaggctcatgaaattgctgggctgaggaaagaaagagcagagggaaaggtctgtcttaatacccatgttgtgcattttacttactgtgaaacatagttaatgccatgctgtttggggcatacaagcatagaacaaatattccactgttgaagtttctaatgttagtaataagaaattcacggatccaatgacttcaaaagaattgaacgaggagccatatgaagtgaaatcccatgtacggttttgtagtgtggcagtaagggtgacttatctgtcaacttttccacttctcaatggattggcagtaatttttttactgcatgtacattcccaaaatgatgatgtttttccaaaatcaaactttgttgttcagcatcttggact

SEQ ID NO: 229440 - DNA, 572 bp, Glycine max
  unsure (1)..(572): unsure at all n locations
tttttttttttttttgaagccaaaacaatttgatatttattattataagacaaaggtttgatttacaccgacgaagtacccataaaacatatatattacagaactgcaagcttattttgactatgagcgcacccttaaagcgcgtctctacgcgaagttatattttattctctgctacgaggaattaagctatgcagtgatcatcacaaccacgtggcaccgattctctatactcctctatggcaattggactggttcaatgttccatatctctcgggcatattcatgaatcgtgcggtcactgctaaacttgtatgaacctgctgtgttcaatattgacattcttgtccatttagtttggtcacggtatgcttcatcaaccttctcttggcattctatgtagctggnggaagtctttccctacaaggaaataatctgctcgaccaaaaccttcatttccttctaaggatcccatcaattcgtcattagtggtaaagatcccaaaaacgccacttctgacaaaattctttatacttcttcaaaatcgggggatcagggcacaaactgggatt

SEQ ID NO: 229441 - DNA, 605 bp, Glycine max
aatttgtgttccctgttctgctcgtgttttactgctggattggaggcaagtggaactagcaatatgaaatttgcaatgaatggctgcatattgattggaactttagatggggccaatgttgaaataagggaagaggttggtgcagacaactatttcctctttggtgccaaggctcatgaaattgctgggctgaggaaagaaagagcagagggaaaggtctgtcttaatacccatgttgtgcattttacttactgtgaaacatagttaatgccatgctgtttggggcatacaagcatagaacaaatattccactgttgaagtttctaatgttagtaataagaaattcacggatccaatgacttcaaaagaattgaacgaggagccatatgaagtgaaatcccatgtacggttttgtagtgtggcagtaagggtgacttatctgtcaacttttccacttctcaatggattggcagtaatttttttactgcatgtacattcccaaaatgatgatgtttttccaaaatcaaacttgtgtgttcagcatcttggactagccatcctttagaagtattgttaaaaggtcatcacttcctaatgaaatggat

SEQ ID NO: 229442 - DNA, 504 bp, Glycine max
gaagccaaaacaatttgatatttattattataagacaaaggtttgatttacaccgacgaagtacccataaaacatatatattacagaactgcaagcttattttgactatgagcgcacccttaaagcgcgtctctacgcgaagttatattttattctctgctacgaggaattaagctatgcagtgatcatcacaaccacgtggcaccgattctctatactcctctatggcaattggactggttcaatgttccatatctctcgggcatattcatgaatcgggcggtcactgctaaacttgtatgaacctgctgtgttcaatattgacattcttgtccatttagtttggtcacggtatgcttcatcaaccttctcttggcattctatgtagctggggaagtctttccctacaaggaaataatctgctcgaccaaaaccttcatttccttctaaggatcccatcaattcgtcatagttggtaagatccaaaaacgccacttgtgacaa

SEQ ID NO: 229443 - DNA, 448 bp, Glycine max
aatttgtgttccctgttctgctcgtgttttactgctggtatggaggcaagtggaactagcaatatgaaatttgcaatgaatggctgcatattgattggaactttagatggggccaatgttgaaataagggaagaggttggtgcagacaacttcttcctctttggtgccaaggctcatgaaattgctgggctgaggaaagaaagagcagagggaaaggtctgtcttaatacccatgttgtgcattttacttactgtgaaacatagttaatgccatgctgtttggggcatacaagcatagaacaaatattccactgttgaagtttctaatgttagtaataagaaattcacggatccaatgacttcaaaagaattgaacgaggagccatatgaagtgaaatcccatgtacggttttgtagtgtggcagtaagggtgacttatctgtcaact

SEQ ID NO: 229444 - DNA, 438 bp, Glycine max
gaaacaagaaatcttatttatttccataatatgcaccatatcatggcccttcccagagcacacaacacaattacatctatgaaaaggaaaatgtttctagtatatttcttgcatcaaaagagtctcacaccacacattaaagacagttaaacagccaacaagaggattcaagggttttaaagggccttgatgatctcttcagcactggagatggtgaactctcctccactttcaacattcgcaaccttcaccttgaggtcttccaccagcagagcaaacctctttgagcggacgccgagacccttgtcagtgaggtcaagctcaagaccaagggcattggtgtatttggctgcaccatcagcaaggaacttaacatgcttgttctctgggaatgttttggcccatgagttcatcacaaatggatcattcacactgata

SEQ ID NO: 229445 - DNA, 426 bp, Glycine max
  unsure (1)..(426): unsure at all n locations
gaaacaagaaatcttatttatttccataatatgcaccatatcatggcccttcccagagcacacaacacaattacatctatgaaaaggaaaatgtttctagtatattcttgcatcaaaagagtctcacaccacacattaaagacagttaaacagccaacaagaggattcaagggttttaaagggccttgatgatctcttcagcactggagatggtgaactctcctccactttcaacattcgcaaccttcaccttgaggtcttccaccagcagagcaaacctctttgagcggacgccgagacccttgtcagtgaggtcaagctcaagaccaagggcattggtgtatttggctgcaccatcagcaaggaacttaacatgcttngttctctgggaatgtttttggcccatgagttcatcacaaatggatc

SEQ ID NO: 229446 - DNA, 448 bp, Glycine max
agtaaaggaagatccatcatagagatatttggtgaaatttgaaagaaaacaatcccaacaaagcgggtggcttattgtaaacttgcttcactatatgggagtgaaaaatcaattgcccattctataatcatatcacaagcaggaaaaagctactgtgtctacaacaaaaggcgagacaatgttaaaaattaggaccttgattcaacttatcaattcaccacctcaaacttgcgcaacatatgacaatggggtgtttcccggatatacccccattggcgacgctgcaactcgaaatgacaattctggcggagaatgctgaagtactccctctctaccctctcttcaatttttgatcgatcatcactccccaacggatactcctgaacaaagtttgtagacttgacataataggtaacacccttgggtgtggtaaaccgatgttcataag

SEQ ID NO: 229447 - DNA, 607 bp, Glycine max
tagagagatagaaaaaggggctgcttttttggagggagtttaagcaaaactgtggcaggtacctgaaacattgcctgaagaagtccttgctaagttgggagcacctccaaagagtgatgttccaattattactcccaatgagcttcctgaggctgatggctttttgtttggttttcccacaagatttggatctatggccgctcaatttaaagcattttttgatgcaactggaggcctttggcgtacacaggcactagcaggaaaggccgcagggttcttctatagcactagttctcaaggaggaggccaagaaactaccccgttgacatctattactcagcttgttcaccatggattgatctttgtccccattggatacacatttggcggtggcatgtttgagttggagaaggtgaaaggtggctccccatatggtgcaggaacttatgctggagatggctcacggcagcctagtgaattggaattggctcaagctctccatcagggaaagtactttgcgggcattgcaaagaagctcatgggatctcaatgatttttatcctccatatatctgccacaccatattctgtgtcaaataaaatgagat

SEQ ID NO: 229448 - DNA, 379 bp, Glycine max
atcgaaaaaatatgaaggattactttattctctcacacttttattttatttttgcttctaacatctcattttatttgacacaaaatatggggggggagatatatggaggataaaaatcattgagatcccttgagcttctttgcaatgcccgcaaaggactttccctgatggaaagcttgggccaattccaattcactaggctgccttgagccatctccagcataagttcctgcaccatatggggagccacctttcaccttctccaactcaaacatgccaccgccaaatgtgtatccaatggggacaaagatcaatccatggggaacaagctgagtaatagatgtcaacggggtagtttcttggcctcctccttgagaac

SEQ ID NO: 229449 - DNA, 615 bp, Glycine max
  unsure (1)..(615): unsure at all n locations
tagagagatagaaaaaggggctgcttttttggagggagtttaagcaaaactgtggcaggtacctgaaacattgcctgaagaagtccttgctaagttgggagcacctccaaagagtgatgttccaattattactcccaatgagcttcctgaggctgatggctttttgtttggttttcccacaagatttggatctatggccgctcaatttaaagcattttttgatgcaactggaggcctttggcgtacacaggcactagcaggaaaggccgcagggttcttctatagcactagttctcaaggaggaggccaagaaactaccccgttgacatctattactcagcttgttcaccatggattgatctttgtccccattggatacacatttggcggtggcatgtttgagttggagaaggtgaaaggtggctccccatatggtgcaggaacttatgctggagatggctcaaggcagcctagtgaattggaattggctcaagctttccatcagggaaagtactttgcgggcattgcaaagaagctcaagggatctcaatgattttatcctccatatatctncacaccatattctgtgtcaaataaaatgagatgttagaagca

SEQ ID NO: 229450 - DNA, 386 bp, Glycine max
  unsure (1)..(386): unsure at all n locations
tttnttttttttttttttttttttttttttttttttttttttatcgaagaaatatgaaggattactttattctctcacacttttattttatttttgcttctaacatctcattttatttgacacaaaatatggggggggagatatttgggggagtaaaaatcattgagatcccttgagcttctttgcaatgcccgcaaagtactttccctgatggaaagcttgagccaattccaattcactaggctgccttgagccatctccagcataagttcctgcaccatatggggagccacctttcaccttttccaactcaaacatgccaccgccaaatgtgtatccaatggggacaaagatcaatccatggggaacaagctgagtaatagatg

SEQ ID NO: 229451 - DNA, 495 bp, Glycine max
gatttgtgttggctgctctgctcctgttttactgctggtttggtggcaactggaactagcactatgaaggttgccctgagtggctctatatcggttgggactttccatggggccaatgtcgacagaagggaagaggatgctgcacacaactggttcctctttggtgccaaggctcatgacatcgttgggctgtggaacgaaagatcacagggactggtctgtgtctaatgcccatggtgtgcagtacacttactgtgaaacatagtttctgccatgctgtttggggcacacaagcatatggcagatattccactgctgcagtttctactgctagtaataagaaatgtacggattcaatgacttctgaggaattgggcgacgaatcatatgatgtgatatcccatgtacggattgtgtaatgtggtattcacggtgactcatctagcaacttttgcacttgtcactggagcggctcatatatttctactgcatgta

SEQ ID NO: 229452 - DNA, 343 bp, Glycine max
gaagccaaaacaatttgatatttattactataagacaaaggtttgagttcctccgccgaagtacccataaaaaatatatattacagaactggatgcttattttgactatgaacgcacccttaaagcgcgtttcttcagcgaagatatattttattctctgctaccaggaagaaagccatgcagtgatcatcacagcctggtggcgccgggaggatatactcctctatggcaggaggaccggttcaatggtccatatctctcgggcgtattaatgaatcgcgcggacactgataaacttgtatgaacctgctgtggagaatattgacattctcgtccatttagt

SEQ ID NO: 229453 - DNA, 611 bp, Glycine max
  unsure (1)..(611): unsure at all n locations
ggttctcctgagctgtttttattctctttctctgccctctcatcttcgagctccgatggcgagcctgtggcgcgcggcaaccggcatgacggacaacgccaccgattacgacggcgtcgagttctggtcgaaccccgagcggaccggctggctcaccaagcagggcgagtacatcaagacctggcgccgccgctggttcgtcctcaagcaaggcaagctcttctggttcaaggactccgccgtcacgcgtgcgtctcgtccacgcggcgtggtccccgtcgccacgtgcctcaccgtcaaaggcgccgaagacatcctcaacaagcccaacgccttcgagctctccacgcgctccgacaccatgtacttcatcgccgactccgagaaggagaaggaggattggatcaactctatcggccgctccatcgtccagcactccagatccgtcaccgattccgagatcatcgattacgataacaactccttcaagcgctgacaaccacgcgctctcaatccacgcgcctctttcggggagttctcctttntcttctttttccttntggtntactatgatggggtatattactattactattatatatcgatcccga

SEQ ID NO: 229454 - DNA, 466 bp, Glycine max
aaatccacaaagccctaaaaatcattacaatttgatagcagttcaggtacataaacagagtttcctcacaggaacgagcacgatcgggatcgatatataatagtaatagtaatatacacaatcatagtaaaacaaaaggaaaaagaagaaaaaggagaactcaccgaaagaggcgcgtggattgagagcgcgtggttgtcagcgcttggaggagttgttatcgtaatcgatgatctcggaatcggtgacggatctggagtgctggacgatggagcggccgatagagttgatccaatcctccttctccttctcggagtcggcgatgaagtacatggtgtcggagcgcgtggagagctcgaaggcgttgggcttgttgaggatgtcttcggcgcctttgacggtgaggcacgtggcgacggggaccacgccgcgtggacgagacgcacgcgtgacggcggagtccttg

SEQ ID NO: 229455 - DNA, 520 bp, Glycine max
cctgagctgtttttattctctttctctggcctgtcatcttcgagctccgatggcgagcctgtggggcgcggtatccggcgtgacggacaacgccaccgattacgacagcgtggaatttctgggcgaaccccgagcggaccggctggctcaccaagcagggcgagtacatcaagacctggcgccgacgatggttcgtactcaagcaaggcaagctcttctgggtgaaggactccgacggcacgcgtgcgtctaggccacgcggcgtggtgcccgccgccacgtgcctcaccgtcaaaggcgccgaagacatcctcaacaagcccaacgccttcgagctctccacgcgctccgacaccatgtacttcatcgtcgactccgagaaggagaaggaggattggatcaactctatcggccgctgcatcgtccagcactccagatacgtcaccgattacgagatcatcgattacgacaacaactccttcaagcgctgacaaccacgcgctctcaatccacgcgcctt

SEQ ID NO: 229456 - DNA, 521 bp, Glycine max
aacacatcaaagatccttcaaccataacattaactcgggtacataaaatatagctactcccacagtcaagtcttagagttttgttaagttttatcacaacaatcttgaaaagaagcttactaaatcataaacgccatgacaacataaaacggacacataataaacaatagaaggattatggcagcttagtatgagattctatccagtcccatatgccttcagttctcgcttccaatacaccatgttcgaagaggaacactggtactgcctaggttctgctcttacatttttcaacagccctgggagctagaccaatggcatcagaactcttcatgatcctcagcctcttgcatgtttcaataaacatctcccagggaacatcacccacaagcatccaatcgccctctctgtcctcatatgtaagaacatattctgatccatgaagaaggtccttcagcttggtttcattcagcatctccctgcccagaatccatgagatccacatttactcatagtaaaac

SEQ ID NO: 229457 - DNA, 436 bp, Glycine max
gaaacaagaaatcttatttatttccataatatgcaccatatcatggcccttcccagagcacacaacacaattacatctatgaaaaggaaaatgtttctagtatatttcttgcatcaaaagagtctcacaccacacattaaagacagttaaacagccaacaagaggattcaagggttttaaagggccttgatgatctcttcagcactggagatggtgaactctcctccactttcaacattcgcaaccttcaccttgaggtcttccaccagcagagcaaacctctttgagcggacgccgagacccttgtcagtgaggtcaagctcaagaccaagggcattggtgtatttggctgcaccatcagcaaggaacttaacatggctgttctctgggaatgttttgggccatgaattcatcacaatgggatcattcacactga

SEQ ID NO: 229458 - DNA, 420 bp, Glycine max
gaaacaagaaatcttatttatttccataatatgcaccatatcatggcccttcccagagcacacaacacaattacatctatgaaaaggaaaatgtttctagtatattcttgcatcaaaagagtctcacaccacacattaaagacagttaaacagccaacaagaggattcaagggttttaaagggccttgatgatctcttcagcactggagatggtgaactcttctccactttcaacattcgcaaccttcaccttgaggtcttccaccagcagagcaaacctctttgagcggacgccgagacccttgtcagtgaggtcaagctcaagaccaaaggcattggtgtatttggctgcaccatcagcaaggaacttaacatgctcgttctctgggaatgttttggcccatgagttcatcacaaatg

SEQ ID NO: 229459 - DNA, 429 bp, Glycine max
aggaaaggaagatccatcatagagatatttgctgaaatttgaaagataacaatcccaacaaagcggctggcttattggaaacttgcttgactatatgggagtgaaaaatacattgtaccttctattataatatcaccagcaggaaaaagctcctgcgtctacaacaaaaggcaagacaatattaaaaattaggacctggattcaacttatcaattcaccacctcaaacttccgcaacatatcacaatggggtgtttcccggatatacccccattggcgacgctgcaactcgaaatgacaattctggcggagaatgctgaagtactccctctctaccctgtcttcaatttttgatccgtcatcactccccaacggatactcctgaacaaagtttggagacttgacataaatagataacacccttgggtgt

SEQ ID NO: 229460 - DNA, 398 bp, Glycine max
gagaaaggttgtgaaaagggctactatttaggaagatgtttaggctggaccgtctcaggggccagaaaggcagccaattgaaacactagctcagggggacacggactacaaaaaagcagccccaataactacttctgatgctgttgagctagctgcatggtccttgtacggagctgcaacagcagagggagcggtcgctttttagttcctatacattaccaatgcaactggcagggttgtgaacacacaagccttcaaatgagccgctcgtggcattcatggtattgcttgggcctaaggaggagggacctatgctctcgcctacgagcactgctggtaagttagggggacacatatagacatctgtgaccattggactctcattggccaggaagctg

SEQ ID NO: 229461 - DNA, 417 bp, Glycine max
ggacacaaataaattataacaagtaatgcattcaaagggtcacaaatacaatcaaggaactaatcatgtcataatttacatccattcaatggatgaagacaatgagattcacatggatttgcaaatgaaaaggactccaaatacataaataacaactgataccagggtgcgcatacacaaacaagagcctaaccccttgtattgaaagggatggctcgaatgactatgtggggatgcacaacatccagggcaacttcaatgaaaggttcaacccacaaaattcattggttatcccatgcatgggctctgttgtaaaggatggcagctgcgaaactcctagctgggataatgacaattcctgggaagggaatggtacccgggtggacctagaacacatcctatccgatgggaagtgga

SEQ ID NO: 229462 - DNA, 577 bp, Glycine max
gagaaagggtgtgagaatggagagcatttaggaagatgttagggttggagcaactaagttctcagaaaggcaaccaattggtacagcagctcagggtgacaaggactacaaagaaccacccccagcacctttgtttgagcctggtgagctaaagtcatggtccttctacagagctggaattgctgagtttgtggccactttcttgttcctctacattaccatcttaactgtcatgggtgtcaacaggtcaccctccaagtgtgcctctgttggcattcaaggcattgcttgggcctttggtggcatgatctttgcccttgtctactgcactgctggaatttcagggggacacatcaacccagctgtgacctttggtctctttttggcaaggaagctgtccctcacaagggcgctgttctacattatcatgcagtgtcttggagccatctgtggggctggtgtggtgaagggatttgagggcaatgctaggtatgagatgttcaaaggtggagcccattttgtgaattctggatacaccaagggtgatggacctggagctgagattgtggcacttttg

SEQ ID NO: 229463 - DNA, 418 bp, Glycine max
gtaaacaaataaaataaaacaagtaatccattcagagtgtcacaaatacaatcaaggaactaatcatgtcataatttacatccatacaatggattaaaacaaaaagattcacatgaatttccaaatgaagaaggactccagatacataaataacaactaatacaagcaagcacatacaaaaacaagagcctaagcccttgtcttgaaagggatggctcggatgactatctggtgatacacagcagcaagggcagctccaatgaaaggtccaacccagaaaatccattggtcatcccatgcatggtctctgttgtagatgatggcagctccgagactcctagctgggttaatgccagttcctgtgatgggaatggtagccaagtggaccaagaacacagcaaatccgtgggaagtggag

SEQ ID NO: 229464 - DNA, 393 bp, Glycine max
gagaaaggttgagataatggatactcttttggaagatgttttggtgggaccatcgcaggtgccagaaaggttgcctattgtagcactagctcagggtgacacagcctacaaagaacctctcccagttcttttgatggagccggacgcggtagatacatggtccttatacggagtctgcaatagcagaagtagttgtcactttattgtttctagactttaccatagcaactggcatgggtgttaacacatcaccctctgagtgaaccgctgttggcattctacgtatgcgctgggtccatggtggcatgacctatgcctcttcacgacggctctgatggaatgtctaggctacacatattgctagctgtgaccattggtttctcattggccagg

SEQ ID NO: 229465 - DNA, 322 bp, Glycine max
acaaattaaatttaacaagccatccattcagagtgggacaaataccatcaagggactaaccatgtaataaattacatccatacaatggctcataacataaacacccacattattgtgcaaagggtgaaagacccccacatacacttgtaacaactcataccagcaagcacattccaaaacaagagcctaaccccttgtcttgaaagggatggctcagatcactatccggtgatacacaacacccagggcaagtccaatgaaaggtccagagccacaaaatccattggttatcccatgcatagtctatgttgtagaggatggc

SEQ ID NO: 229466 - DNA, 600 bp, Glycine max
  unsure (1)..(600): unsure at all n locations
ggttcttctgagctgtttttattctctttctctgccctctcatcttcgagctccgatggcgagcctgtggcgcgcggcaaccggcatgacggacaacgccaccgattacgacggcgtcgagttctggtcgaaccccgagcggaccggctggctcaccaagcagggcgagtacatcaagacctggcgccgccgctggttcgtcctcaagcaaggcaagctcttctggttcaaggactccgccgtcacgcgtgcgtctcgtccacgcggcgtggtccccgtcgccacgtgcctcaccgtcaaaggcgccgaagacatcctcaacaagcccaacgccttcgagctctccacgcgctccgacaccatgtacttcatcgccgactccgagaaggagaaggaggattggatcaactctatcggccgctccatcgtccagcactccagatccgtcaccgattccgagatcatcgattacgataacaactgctgcaagcgctgacaaccacgcgctctcaatccacgcgcctctttggggagttctccctttcttctttttcctatgttatactatgatggngataatactattactatatatatcga

SEQ ID NO: 229467 - DNA, 471 bp, Glycine max
acataaaaggaggacaattttgttgttataattttaaaccattaaagacaggtgtatcacttcattttatggaagaatatccaaagcctaatattttcagaataaacagattacacattgccaaaattaaaataaaaataaaatacacccattacaacaaaacagcaatattaaacaagtgcagcagagctcagcgggataagtgctctcttaactctttctacagctgcctgtagggtagtaagggattctgcataagagatgcggatgcaagtgtcatctccaaatgcactccctggcaccagggctacctggcccacatccagtagatatcgacagagggactcagaatcctcaattttaccgaatccttcagcttctcttccataatagaagctgaaatcaaggaatagataaaatgctccctggggttcagatatcttgacaccatctatttttctaaaacttttt

SEQ ID NO: 229468 - DNA, 401 bp, Glycine max
aaggtggaacattaactcatagagtttgagcaagcacagtgtcaaggactagaaaatcataatggttctttttgaagtctgctggttattcaatcatatatccttttgacaaccttttgattgtcacagaagccctatcttatctatgatgattagtcagcagtccaactctgctcaacaatctcacgtactcttctgttgtattcacgcttgttttcactgaacatccgagcagcttcagaatttgctggtgaatttgggtttggatcacacagcaatgactggattgaggtaagaattgcagctacgtcataaatagggctccactgattctgtaaaatgtccaagcatatactgccatccgataaatgttaggatgaaacattcgagaaacaaaacgc

SEQ ID NO: 229469 - DNA, 489 bp, Glycine max
aaaattaaaccatatatttttattcattattttttacaaaaatacagcatagaaaactcaaataacagaacagaaccccccacccccccaaaaaaaatttattaaatatgaaacaagatcatatgcccccatctgtgccagataaataaaaaaaattatatataatacagatattatataaaaactctcagagattttttttatcctgccacaagttaaattatatatttctttataggaaagcccatttcctgttcaagagaaaaggaatgagagatttgaggtatgtcattattgccttgtcttctgcaaccttgttccaatcatcttgagctcaaatttcttgattaccccagcagtgtccctcattgtggtgtccatcacataaggaattttgttctgggtgacttgtgttgtgttgacgagtattttacatgtttctctcctttctgatatgggtccatgatagtggaaagtatttgatcctac

SEQ ID NO: 229470 - DNA, 487 bp, Glycine max
aagaataatttttgtatcacgttgaattgatcatgtaaaaaattacaaatgaacatagaagaaacaaaatagaaggaggggaggaggagaagcacacacggagtaagtaagtgacatgaaacaaataatagatatcgtaatggcaacgctcaaaaaactaccagcaaagaacggtggaatgaatggccttaggccttctcccacttgaggggcttgaccacttcccatgtgaagtcagggtcctctctgccaaagtgtccataagcagcagtcttcaagaacctgttattcccacccctcttgagatcaaggttgatggagatcataccgggcctgaaatcaaagttctccttcacaatgttgagaatctccttatatggatcttcccggtgccataggtgtcaacaaagacagacaaaggcttcggcacaccaatggcataagacacttgcacaatgcaccttctggctagtccacttgccacaat

SEQ ID NO: 229471 - DNA, 302 bp, Glycine max
gttaaagggtgggatgatcgagagcctttaggaagatgtttgggtgggagcatcgcaggggtgaaaaaggcaaccaattgggacatactctcagggtcatttggactactaagaacctcccctaacccctttgttggagcctgacaagctaaagatacggcccttctaccgacctggaatagctgagttcgtggacactttattgctcctatactatgccagatcaactgttatgggtgttaacaggttaccctccaagtgcacctcagttgatatacaacgcattgcttgcgcctttgact

SEQ ID NO: 229472 - DNA, 397 bp, Glycine max
gttaacaaataaaataaaacaagccatccattcagaggggaacaaatacaatcaaggaactaatcatgtcataatatacatgcatagaatggaataaaacagaaagattcacactgaattttgcaaaggaagaatactccggatacattagtgacaactaataccagcaagcacatacaaaaacatgagcctaagtctttgtgttgaaagggatgggtgggatgactatctggtgatactcagcacctagggctgctccaatgaaaggtccaacccagaaaaaccattggtcatcccatgcatggcctatgttgtagatgatggcagctattagactcctagctggggtaatgccagtttctgtgatgggaatggtattcaagtggaccaagaacac

SEQ ID NO: 229473 - DNA, 560 bp, Glycine max
ggaaaatgtgaagctgatccacaaactttaagaagttattgtaatgggaagattgttggagcacaacactttgctcatgctgcaatagctgctgggtcatttaacccttcaattgactttgcttctcctcttgatggagatggacatggaagtcatacagcctctattgcggccggaaataatggaattcctgtgaggatgaatggccatgaattcgggagagcgagtgggatggctcctcgtgctaggattgctgtctacaaggcaatttatagactgtttggagggtttgttgcagatgtagttgctgcaattgatcaggctgtatatgatggagtggatatactcaacctttcagttggacccgacagtcctccagcagccaccaaaactacatttttgaacccttttgatgccacacttcttggagccgtgaaagctggtgtatttgttgcacaggctgctggaaatcatggtcctcttcctaagacattggtttcatatagtccatggatagcatctgtagcagctgcaattgatgatcgtagatataaaaatca

SEQ ID NO: 229474 - DNA, 406 bp, Glycine max
ggaaaaggtggtgctaatccagaaactttaagaagatgttgtggtgggaacatcgaaggagcacaacaggctgctcatgctgccataactgctgggtgacttggccttctaatagactctgcttgtacttttgatggagacggacgtgctagtgatacagtctttatagcgagcggaaatagtggaattcctgggcggatgaatggtcatgacattaccatagcgagtgggatggctgctaacgctacgaccgctgtgtgcacggctgttgatatactgtgcgtagggtgtgccgcagatgtaattactgcaatcgatcaggacggctctgatggaatggatatactacaccttatacctggagcgaactgtgctccatctgtcaccaagactacattcctgaacc

SEQ ID NO: 229475 - DNA, 450 bp, Glycine max
atgaatacttcctttgatggcctagatttatcacatgcttttgtgcagggtggaacccagtcacggatggaagctagcatggttaatgcccaaatacgcaacactggctgagccaaccaccacagaattgattacattggtcctgccactgattgcaactactatcacagacatgttggtactggccctcaaacactccttgaaattgctgaggattgccactccatttttcacagacactctcaaatgccaaaaaccctgttatcattgtcagtgctggggtttttgagaggaaagctcaggatgcaatttttgctgttgtggcaaccattctacaaacagtatatgtcgccagacctgactggaagggccttaatgtgatgcttcttcatgctgtccaagctggtgcgcttgtccgtggacttgctccacaatgtgtgattagccttg

SEQ ID NO: 229476 - DNA, 429 bp, Glycine max
gaacatatcaaaatattaatttctcaaattattgaaatattctgatctagaacaatagattgggaaagaaagaaaagaaacgaaaaatgtccagcagggcgtatccaaaacaaccaactagtatccaatatggatacatggctaacatgtacatttgaccactgcctttgccctttgagtggtgtttggaaaagaatatgtataattatacattttcactttcaggatgaccattgatcaggtcaggtgagaaagtatgtagtcatggcctttcggagcctttgcttggattgttcaggagaaactattgtgggagcaggatcttttggacccccaagtatccctgatgccttcacccatgtctccaaatgcttgtcccatgtgtattgtctcatgatatcaatgatccccagaaccagcttcttgcgc

SEQ ID NO: 229477 - DNA, 461 bp, Glycine max
aagaataatttttgtatcacgttgaattgatcatgtaaaaaattacaaatgaacatagaagaaacaaaatagaaggaggggaggaggagaagcacacacggagtaagtaagtgacatgaaacaaataatagatatcgtaatggcaacgctcaaaaaactaccagcaaagaacggtggaatgaatggccttaggccttctcccacttgaggggcttgaccacttcccatgtgaagtcagggtcctctctgccaaagtgtccataagcagcagtcttcaagaacctgttatttccacccctcttgagatcaaggttgatggagatcataccgggcctgaaatcaaagttctccttcacaatgttgagaatctccttatcatggatcttgccggtgccataggtgtcaacaaagacagacaaaggctcgggcacaccaatggcataagacacttgcacaatgca

SEQ ID NO: 229478 - DNA, 434 bp, Glycine max
ggaaaatgtgaagctgtgccagacactttaatacgtttttttaatgggaacattgttggggcacaacagtttgctcatgctgcaataactgatgggtcatttaacccttcaattgactatgcttctcctattcatggagatgggcatggtagtgatccagactctattgcggcccgaaataatggacttcctgtgaggatgaatggtcttgaattctccagagccagtgggatggcttctcgtgctaggattgctgactactaggcaagttattcactggttggagggttcattgcagatgtggttgctgcatttgatcaagctgtatctgatggagtggacatactcaacctttcagctggacccgactgtcctacagcaggcaccataactgcattgtccaaccctattgatgccacactatttggagccga

SEQ ID NO: 229479 - DNA, 598 bp, Glycine max
ggaaaatgtgaagctgatccagaaacttttagaagtttttgtaatgggaagattgctggagcacaacactttgctcatgctgcaatagctgctgggtcatttaacccttcaatcgactttgcttctcctcttgatggagatggacatggaagtcatacagtctctattgcgggcggaaataatggcattcctgtgaggatgaatggccatgaattcaggagagcgagtgggatggctcctcgtgctaggattgctgcctacaaggcaatttatagactgtttggagggtttgctgcagatgtatttgctgcaattgatcaggctgcatatgatggagtggatatactcaacctttcagatggacccgacagtcctccagcagccaccaaaactacagttttgaacccttttgatgccacactccttggagcactgaaagctggtgtatttgttgcacaggctgctggatatcatggtcctattcctgagacattggtttcatatagtccatggatagcatctgtagcagctgcaattgatgatcggagatataaaaatcatttgatccttggaaaggaaaaaccttatcaggaattgg

SEQ ID NO: 229480 - DNA, 576 bp, Glycine max
ggaaaatgtgaagctgatccagaaactttaagaagttattgtaatgggaagattgttggagcacaacactttgctcatgctgcaatagctgctgggtcatttaacccttcaattgactttgcttctcctcttgatggagatggacatggaagtcatacagcctctattgcggccggaaataatggaattcctgtgaggatgaatggccatgaattcgggagagcgagtgggatggctcctcgtgctaggattgctgtctacaaggcaatttatagactgtttggagggtttgttgcacatgtagttgctgcaattgatcaggctgtatatgatggagtggatatactcaacctttcagttggacccgacagtcctccagcagccaccaaaactacatttttgaacccttttgatgccacacttcttggagccgtgaaagctggtgtatttgttgcacaggctgctggaaatcatggtcctcttcctaagacattggtttcatatagtccatggatagcatctgtagcagctgcaattgatgatcgtagatataaaaatcatttgatccttggaaat

SEQ ID NO: 229481 - DNA, 620 bp, Glycine max
  unsure (1)..(620): unsure at all n locations
atgaatactagcattgctggtcttgatttagcggatgcgttcctgttggttggcacccagccacgggtggaagctgccatggttaatgccagaatacgcaaaactgtcagagcaaaccaagccaaagttgggtacattgggcctgccactgatttcaactacgatcacagacatcttggtactggccctcaaacactccttgaaattgctgagggttgccacccatttttcaagacactctcaaatgccaaaaaccctgttatcattgtcggtgctggggtttttgagaggaaggatcaggatgcaatttttgctgctgttgaaaccattgcacaaaaagcaaatgttgtcagacctgactggaatggccttaatgtattgcttctccatgctgcccaggctgctgcgcttgaccttggacttgttccacaatctgagaaaagccttgagtctgcaaaatttgtatatttgatgggtgctgatgatgttaacttagacaagatcccagatgatgcttttgttgtttatcaaggtcaccacggtgacaagagtgtttatcgngcaaatgttgttttgccagcagcagcattcagtgagaaggaagggacctatgaaaatac

SEQ ID NO: 229482 - DNA, 538 bp, Glycine max
agacgagtaaaccttcacaatcagttggataactcaaattgtacatgacaacagttctaaaaagtggtgcttccacaccgcatattacaaatggaacagataaatcctagttttaatttattggatacttccaacatccaataagtttttggcaagcaatcttgcatggccaggaagggaaaaacgtgaatcttctttattgaaaccaaaaaataaaaaatccatgtttcacttcttcaacagcatggcactgcattgtgccattatctttgatgcccttgtaatggcatcagtcatatagaaattctcaactacagtcccgaatgggggtggtgtccaccttctcagagaaggttggtctgagtgaagatggtaatgtggcaggctctctctcatccattttacaaggtttggggctacagtactgattcgagcacgaacggccccaattgtatcatagggcaaacgcactcctgccacctcagatagagctcgaattatcttccaatcatctctggagtcaccaactgttggaact

SEQ ID NO: 229483 - DNA, 592 bp, Glycine max
atgaatactagcattgctggtcttgatttaagcggatgcgttcctgttggttggcacccagccacgggtggaagctgccatggttaatgccagaatacgcaaaactgtcagagcaaaccaagccaaagttgggtacattgggcctgccactgatttcaactacgatcacagacatcttggtactggccctcaaacactccttgaaattgctgagggttgccacccatttttcaagacactctcaaatgccaaaaaccctgttatcattgtcggtgctggggtttttgagaggaaggatcaggatgcaatttttgctgctgttgaaaccattgcacaaaaagcaaatgttgtcagacctgactggaatggccttaatgtattgcttctccatgctgcccaggctgctgcgcttgaccttggacttgttccacaatctgagaaaagccttgagtctgcaaaatttgtatatttgatgggtgctgatgatgttaacttagacaagatcccagatgatgcttttgttgtttatcaaggtcaccacggtgacaagagtgtttatcgggcaaatgttgttttgccagcagcagcattc

SEQ ID NO: 229484 - DNA, 435 bp, Glycine max
agacgagtaaaccttcacaatcagttggataactcaaattgtacatgacaacagttctaaaaagtggtgcttccacaccgcatattacaaatggaacagataaatcctagttttaatttattggatacttccaacatccaataagtttttggcaagcaatcttgcatggccaggaagggaaaaacgtgaatcttctttattgaaaccaaaaaataaaaaatccatgtttcacttcttcaacagcatggcactgcattgtgccattatctttgatgcccttgtaatggcatcagtcatatagaaattctcaactacagtcccgaatggggtggtgtccaccttctcagagaaggttggtctgagtgaagatggtaatgtggcaggctctctctcatccattttacaaggtttggggctacagtactgattcgagca

SEQ ID NO: 229485 - DNA, 466 bp, Glycine max
gaaatgaatatcgcaggtcatgcagtgaatacatgtccacttttaattccatagatttcatcttgacttcaatatagaagttggtgggaacaatgtgagaaaatttcaagatttatctcaactatcatacgtgtttggatgaaaattgagttattaatgcaaggcgttctccttgtacttgatgtgggtaggacaatggcatagaaatccattacaacttccagattataagaaaactggttaagggggagtattgggaaaggtcaaaggtgaaacctcaaagtaaattaggacggcttatagtattttgttggtacaaatggcatctttgtaacaactccttcattagactttcctcgaataataatctctactttggtgcctgctttgtgcaatcctgatttcacatatccaatggctatgttcttcttgaggcaaggactgaatccgccccctgtgacttccc

SEQ ID NO: 229486 - DNA, 518 bp, Glycine max
  unsure (1)..(518): unsure at all n locations
attcaaccaaaaatcaaactaacaaaatgaacacaaacaaggcacgcacaagagggtccaagagttccaattatagctaaaagtattagctaatttaagcaatcatacaaacccaagttacacaaaagaagagaatacttctagcaagcattctgctattacaacattgacaagaaaggataagcatctttctccaagaaccgccatactcagcaggaaatcaccagacaagaccaaaaattttcaaatgtctcatgccttgctggcaatgttgttagaaagccagtccaaaccctcatagagaccctctccagaagttgcacaagtgctttggatataccagtggcgttgacggagtgaatgaagtccaagcttgtcagttatttctgcagcattcattgcattaggaaagatctntgcttgttggcaaaaacaagcaaaacagcatctctaagttcatcctcattcaacatcctgtgcaactcatcccttgcctcaaccactcgatccctatcatt

SEQ ID NO: 229487 - DNA, 323 bp, Glycine max
ctcattgtgtttggcttttattatatttttggttctttttgaagtctgttggttattcaatcatatatccttttgacatccttttgattgtcacagaagccccatcttatctatgaggattagtcagcagtccaactctgcaaaacaagctcacctcctggggggtcgcctccacgcttgggttcactgaacatccgagctgcttcagaatttgctggcgaataagggtttggatcacacaggaatgactggatccggggaagaattgcggctacgtcataaatagggctacactgattcctggaaatgtacaagcatatact

SEQ ID NO: 229488 - DNA, 417 bp, Glycine max
atcccaaagataacttgttcttgctttcataatttaacatcaaattcagttttactataaagcacataataaccagcatgcatttttttggggcaggggaggggttgagaggggaataaaagaaagtgagaagttttaatttacctttgcaccagggttttcagaccactatgacttccttttatggaatccatatgcaatatacagggtaccttaagtgaattgtccaggtccttatctggaatacatatcataacataaatctctgaaaattctttcacaagaacgatcataagctgagacctcaccattaaaattaaccaattcaccaggatggcatatgactattaaactccagtgaagattgaagttcacaggaatgaaatatataatcctttggaaacaaaaatacttttt

SEQ ID NO: 229489 - DNA, 566 bp, Glycine max
  unsure (1)..(566): unsure at all n locations
ctctctctctgctcaactgaataaagcttagaagaatattaaaatgggtgtgttcagtacagtgctgctgtgccttatgtccctaatgtggatggtggatgctcgaattccaggcgtatactctggcggcgcttggcaaaatgctcacgctacgttctacggaggatccgatgcttccggcaccatgggtggagcatgtgggtacgggaacctgtacagccaagggtacggagtgaacactgcagcgttgagcacggcactcttcaacagcgggctgagctgcggagcgtgcttcgagatcaaatgcgcaaacgacaagcagtggtgtcactccggcagcccttccatcttcatcaccgccaccaacttctgtccccctaactacgctcttccaaacgacaatggcggctggtgcaaccctcctcgccctcacttcgacctcgccatgcccatgttccttaaaatcgccgaataccgcgccggcatcgtgcctgtcgccttccgcagggtggcatgtangaagcatggtgggatcaggttcacaatanacggtttccgttacttta

SEQ ID NO: 229490 - DNA, 385 bp, Glycine max
ccacccgggaatcatcaattatacattaattaaaaaaatgaaacccaccaatgagaagcaaaagtaaaaaaacttgtcactgactatttttttgtttcttcctctgcagtaaaaaagatcaggaaatagataaatggggggaacccaaacaaaaagaaaataaacttgtattttatatatcttaagaaagtaaagggggtgttcagacacggaagttctttccagtgaaagtttgaccaaattgccaatttgatggaacaatgttccaagagggggaagagcgacggtcgctggcggtgactctgaaggacaaagcctgacccaccaaaacggggtttgactgccagttctgtccccagtttttgctcattggcatccaccccgt

SEQ ID NO: 229491 - DNA, 552 bp, Glycine max
  unsure (1)..(552): unsure at all n locations
ctctctctctgctcaactgaataaagcttagaagaatattaaaatgggtgtgttcagtacagtgctgctgtgccttatgtccctaatgtggatggtggatgctcgaattccaggcgtatactctggcggcgcttggcaaaatgctcacgctacgttctacggaggatccgatgcttccggcaccatgggtggagcatgtgggtacgggaacctgtacagccaagggtacggagtgaacactgcagcgttgagcacggcactcttcaacagcgggctgagctgcggagcgtgcttcgagatcaaatgcgcaaacgacaagcagtggtgtcactccggcagcccttccatcttcatcaccgccaccaacttctgtccccctaactacgctcttccaaacgacaatggcggctggtgcaaccctcctcgccctcacttcgacctcgccatgcccatgttccttaaaatcgccgaataccgcgccggcatcgtgcctgtcgccttccgcaaggtggcatgtangaagcatggtgggatcaggttcacaataaacgg

SEQ ID NO: 229492 - DNA, 343 bp, Glycine max
cacccgggaatcatcaattatacattaattaaaaaaatgaaacccaccaatgagaagcaaaagtaaaaaaacttgtcactgactatttttttgtttcttcctctgcagtaaaaaagatcagggaaatagataaatggggggaacccaaacaaaaagaaaataaacttgttttttatatatcttaagaaagtaaagggggtgttcaaacacggaagttctttccagggaaagtttgaccaaattgccaatttgatggaacaatgttccaagagggggaagagcgacggtcgctggcggtgactctgaaggacaaagcctgacccaccaaaacgggcgtttgact

SEQ ID NO: 229493 - DNA, 596 bp, Glycine max
  unsure (1)..(596): unsure at all n locations
attgaggaagatggaacggcgccagcgtaacccgggtcttggattacagtggctgtcaaaagcttgaagccagatggccttcaaggccatagagaatgggtggctgaagttgactttcttggacagcttcaccatcctaaccttgtgaaacttattggttattgcattgaagatgatcagcggcttcttgtttacgagtttatgacccgtggaagtctagaaaatcatctattcagaagaaccgtacctcttccgtggtccaacaggattaagattgcccttggtgcagcaaaaggattggccttcctccataatggtcccgaaccagtcatttatagagattttaaaacatctaacatcttgcttgatacggagtataatgcgaagctttcagattttggtctagcaaaagcagggcctcaaggagacaaaacacatgtttctaccagngtagttggaacttatggttatgctgctccagaatatgtcatgacaggacacttgacagctaagagtgatgtttatagctttggagttgtgttactcgagatattaacaggaagaagatcaatggacaagaagcgcccgagtgggga

SEQ ID NO: 229494 - DNA, 553 bp, Glycine max
atgaatactagcatttttggtcttgattaagcggatgcgttcctgttggttggcacccagccacgggtggaagctgtcatggttaatgccagaatacgcaaaactgtcagagcaaaccaagccaaagttgggtacattgggcctgccactgatttcaactacgatcacagacatcttggtactggccctcaaacactccttgaaattgctgagggttgccacccatttttcaagacactctcaaatgccaaaaaccctgttatcattgtcggtgctggggtttttgagaggaaggatcaggatgcaatttttgctgctgttgaaaccattgcacaaaaagcaaatgttgtcagacctgactggaatggccttaatgtattgcttctccatgctgaccaggctgctgcgcttgaccttggacttgttccacaatctgagaaaagccttgagtctgcaaaatatgtatatttgatgggtgctgatgatgttaacttagacaagatcccagatgatgcttttgttgtctatcaaggtcaccacggtgacaagagtg

SEQ ID NO: 229495 - DNA, 435 bp, Glycine max
agacgagtaaaccttcacaatcagttggataactcaaattgtacatgacaacagttctaaaaagtggtgcttccacaccgcatattacaaatggaacagataaatcctagctttaatttattggatacttccaacatccaataagtttttggccagcaatcttgcatggccaggaagggaaaaacgtgaatcttctttattgaaaccaaaaaataaaaaatccatgtttcacttcttcaacagcatggcactgcattgtgccattatctttgatgcccttgttatggcatcagtcatatagaaattctcaactacagtcccgaatggggtggtgtccaccttctcagaaaggttggtctgagtgaagatggtaatgtggcaggctctctctcattcattttcacaaggtttggggctacagtactgattcgagca

SEQ ID NO: 229496 - DNA, 559 bp, Glycine max
ataagtttcttatcttctggactgcgagaggtgcttgccttagctatatactcattttcgcgtgtttgcttgctctagatctgattagcttttattcgagttctggttccttgtttcgtccctgcataatctgaattcaaatacttgccatcttgttacttgttacgctaccagatctgttttgaattaagagatggggttgtctttcaccaagctttttagccggctctttgccaagaaagagatgcgtattctcatggtaggtcttgatgctgctggtaagactaccatcttgtacaagctcaagctgggagaaattgtcacaaccattcccacaattggatttaatgtggagactgtggaatataagaatattagctttactgtatgggatgtgggtggccaagataagattcgtcctttatggagacactacttccaaaacactcaggggcttatctttgttgtggatagcaatgatcgtgaccgtgttgttgaggctagagatgagctccaccggatgtcgaatgaggatgagttgagagatgctgtttctctg

SEQ ID NO: 229497 - DNA, 579 bp, Glycine max
ttcagagatatgggttataatgtcagtatgatggcagattctacatctagatgggcagaagcattgcgtgaaatctctggacgactggcagaaatgcctgcagatagtggatatcctgcataccttgctgcacgtttagcctcgttctatgaacgtgctgggaaggtaaaatgtcttggaggccctgaacgtacaggtagcgtaactattgttggtgctgtttcgccacctggaggagatttctcagatcctgtgacatctgcaaccctgagcatagttcaggttttctggggtttggacaaaaagcttgctcagaggaagcactttccttctgtaaactggcttatttcttattcaaaatactcaacggcacttgaaaccttttatgagcaatttgatccagattttatcaacattaggacaaaggctcgtgaagttctgcaaagggaagatgacctgaatgaaattgttcagcttgtgggcaaggatgctctagctgaaggagataagatcaccttagaaactgcatagcttttgagagaggattatcttgctcaaagatgccttacaccatatgac

SEQ ID NO: 229498 - DNA, 519 bp, Glycine max
aaaaactagtcctgtccccctgaacagaccccaccgaatgatcgccggctcgaccagctcactcgtctgcgggcgcccttttttttttttttttgataaaactagacatgcaacatatttcgaataaataaggaaatactcattgctacaagaagtccatctatgaaatacaggattcaagataatccacttccaccaaaaattccacctatatgaatccagagttcgatcgctgtgggcacttcatgggataagataattgctattctcctaaagccatattgaaagagccagtctggtttcttattctcaataaacaaactgaggacgactgacacacatggtgctaggtacacatgagactagatcaaaagccagaccagcatccggaaagggaataactgtgatatgactgaatcgtaccgccttatgtgtgaacactcgggacgtcgcacccctgcaatgctagactgcggacaacaagcggacataacacagtattcgaaccatctaccagat

SEQ ID NO: 229499 - DNA, 577 bp, Glycine max
ttctttttctctctctcacttgcatacgttcctttcactgtactttttgacacacacgtaacacattcatcagaggaagagagaatgagttcatcctcaggtcagagcagtggctatgatctctctttcaagatcttgttgatcggagattccggtgggggaaaaagtagcctactagtcagctttatttcaagttctgttgaagatctttcccccaccattggtgttgattttaagatcaaaacgctcacagtgggtggcaagagattgaaattgacgatttgggatactgctgggcaggaaaggttcaggactctaaacagttcttactatagaaaagcacaaggaatcattctcgtttatgatgtcacaaggagagaaacctttacaaacttatcagaagtgtggtctaaggaagtggaactctactcaactaatcaggattgtgtgaagatactagttggaaataaagttgatagagatactgaaagggctgtgagcagggaagagggtttagcacttgctaaagatttggggtgtttgcttcttgaatgtagtgccaaaacaagggaaaatg

SEQ ID NO: 229500 - DNA, 519 bp, Glycine max
aaaatgatacagtcattcataggcaaacaaatttacacaagctaatagacaccattgttgccaattcctccttccggtaatacaagtaattaagcaatcaaaagacaatggcagaagaaactaaggaagaagcttacatatacaagatttgtccaagattgctagttaagaagattcaatgtccacgccagcaagtatcaatttaagagcaacaaccaccattttgggatgcttgggattcttgttttggttgtaaaacactccttttaactgctgttgagccttcttccaaaagactaggagcttgcattatctttagagcaaggtcctgaaagcactgctccacattttcccttgttttggcactacattcaagaagcaaacaccccaaatctttagcaagtgctaaaccctcttccctgctcacagccctttcagtatctctatcaactctatttgcaactagtatcttcacacaatcctgattagttgagtagagttccacttgcttagaccaca

SEQ ID NO: 229501 - DNA, 545 bp, Glycine max
cagaccaaaatgaaatcggtgttggtggatttcctagtaggggccggcatcaagccaacatctatagtgagttacaaccatttgggaaacaatgatggcatgaatctctcagcccctcaaaccttccgctcgaaggaaatttccaagagccatgttgttgacgatatggtcaacagcaacgccatcctctatgagcctggtgaacatccggaccatgtggttgtcattaagtatgtaccttacgttggggacagcaagagggccatggatgagtactcttctgagatattcatgggcggaaagaacacaattgtgttgcacaacacttgtgaggattcactgttagctgctcctattatcttggacttggtccttcttgctgagcttagcactcgaatcgagtttaaagctgaaaatgagggaaagttccactcattccacccagttgcgaccatcctcagttacctgaccaaggcccctctggttccaccgagtacgccagtggttaatgcactgtcaaagcagcgagctatgctggaaaacat

SEQ ID NO: 229502 - DNA, 452 bp, Glycine max
ggaaacatgaattaagcacaaaatacttcgataactttatattattttacatgcatgcatagcatagatagcctgctctcaaattagtcagcaggaacaaagatcgagagatccaacgatctttaaatgtgacatgtgccataaatatataacagaaaagagggtatgggatatgagtcaagttttgatctcattcaactacaggatcccaaaccattactcttaagactttgaacttcacttgtactccaggatcatgttgttctaaggagctaatccaacacaggcccttaggatgttgtccagcatagctcgctgctttgacagtgcattaaccactggcggactcggtggaaccagaggggccttggtcaggtaactgaggatggacgcaactgggtggaatgagtggaactatccctcatttcagcattaaactcgattcgagggct

SEQ ID NO: 229503 - DNA, 571 bp, Glycine max
  unsure (1)..(571): unsure at all n locations
tttatcgacaatatctttcgcttcgtccaagcaggatctgaagtatctgccttattgggtcgaatgccttctgctgtgggttatcaacccactcttagtactgaaatgggttctttacaagaaagaatcacttctaccaaagaggggtccataacttctattcaagcagtttatgtacccgcagacgatttaaccgatcctgcgcctgctacgacatttgcacatttagatgctactactgtactatcaagaggattagcggccaaaggtatctatccagcagtagatcctttagattcaacctcaactatgctccaacctcgaatcgttggtgaagaacattatgagactgcgcaaagagttaaacaaactttacaacgttacaaagaacttcaagacattatagctatccttggcttggacgaattatccgaagaagatcgcttaaccgtagcaagagcacgaaaaattgagcgtttcttatcacaaccttttttcgtagcagaagttttaccggttcgccggngaaatatgttagtctagcagaaacaattagagggtttaaaatgat

SEQ ID NO: 229504 - DNA, 499 bp, Glycine max
agttattccgatattcggacgcatcaacttgttatgaaatcacattgatagcctctactcgtgtcctagctcgtctaagagctagatttgcctcaattgtttgtctcttgccttccgccttattcaaattagcttctgctatttcaagagtttgctgtgcttcttgtggatcaatgtcactacccttttccgcatcatttactaaaacagtgatctcattattgtttattctagcaaaaccgcccatcagagccatcgttaaccattggtctttaagaagacgtattctcaaaatacctatatctacggctgtggcaataggcgcatgatttggtaatactccaatgtgtccgctattagtagataaaatgatgtccttcacttccgaatcccaaacaattcgattgggggtcagtacacaaagattgaaagtcattgcttcaaattgctctccatttctaagttcgtagctgtcgcagtagcttcatcgatattacct

SEQ ID NO: 229505 - DNA, 530 bp, Glycine max
ctcatcgccgctagcggcgagcccggagacagggttcaattcactgagtacattcagaaaaacgtcgccttgtatcagttccgtaacggcatccctctcaccaccgccgccgccgccaatttcacacgtggcgaacttgccactgctctccgcaagaacccatactctgtgaacatccttcttgctggctatgacaaagagacaggccctgaactgtactatattgactacattgcaacgcttcacaagcttgaaaagggggcttttggttatggctcctatttttcactctcaatgatggacagacactaccatagtggaatgtcagttgaagaagcaattgatctcgttgataagtgcattatggaaatcagatccaggcttgttgttgcgccgcccaactttgttattaaaatcgtggacaaggatggtgcaagagagtacgcatggcgtgagtcagtcaaggatactcctgttccttcagcttgagtaactctttccctaattttcgttggacttctttctttcta

SEQ ID NO: 229506 - DNA, 535 bp, Glycine max
gagaaaataaggattattattatcgagagaatggcaggctcctcggaggagggacaagtcattagctgtcacaccgttgacgcatggaacgatcaactccagaagggcaaccaatccaagaaactcattgttgtggattttactgcttcttggtgtggaccatgccgtttcattgcaccattcttggctgagctggctaagaagttcacaagtgtcgtattcctaaaggtggatgtggacgaattaaagagtgtttctcaagactgggctattgaggctatgcccacttttgtgtttgtgaaagagggaacacttctaagcaaagtggtgggagcaaagaaggatgagctgcagcagacaatagagaaatatgtggcttcagctagtgcttaatctttcaccttcaaaagagacataatatatatgctttctttttataatcttgtactagacttatgttggtatttctgttattgcaccaatcagcttttcaaatgtgatgactcttatcatctatttctgaatagtaactggt

SEQ ID NO: 229507 - DNA, 394 bp, Glycine max
caaaacccacgaaggggccaggtacttttcaaaaatagaggctaagagtccccccatctgaaaggcgtggaggggcctgatcctagatgccaaccatgccgtatcaccggaccattataggaaggcctggctaagaagtccacttgggaggggaaagaaaaagcccttgctgacgccccaaattacgttattgacggactgagctcaagacgtttttgcccccacccatttgtttaaaagaggggcccttttttaaaaacacagaagggggcatagcctgaatagcccaagctggaaaaacaccctttaatgggtccacatccacctttaggaataccccccttgggaaactttttaccaacgcatccaatataggggcatggaaacggcttgg

SEQ ID NO: 229508 - DNA, 590 bp, Glycine max
  unsure (1)..(590): unsure at all n locations
cccactttgatgaattccaaatctctgacttcttaaggcgctttgggtggatagtgccagcatacaccatgcccccagatgctcaacatgtcacagtgcttcgtgttgtcatcagggaggacttctcgaggactctcgcagagcgcctcgtggccgatgttgagaaggttctgcatgagcttgattcacttcctgctagggtcataagcagcactagtgtgacagtcactgctgaagaaaatggcaaggtagtggttgctaagaagagtgctatggagactcagagggaaatcactgccatttggaagaagtttgtgttggagaggaagaagaacaatgacaagatgaatggtgtttgttagagttagcttaagagtgtgttgtgttgtgttgtgcctatccctgccttattctagttctttttttcatatatatatttgaggagtaagtacttttgattgagtcaagctatttatctgattcggttgcttattgatgagaggcaaatatcanactgtattttcatctgtataagtatgattcactgtatttttgactattttctgaatcatgaattatatntatcttcc

SEQ ID NO: 229509 - DNA, 519 bp, Glycine max
ggaagataaatttaattcatgattcagaaaatagtcaaaaagacagtgaatcatacttatacagatgaaaatacagtttgatatttgcctgtcatcaataagcaaccgatatagatgaatagcttggctcaatcaaaagtacttactcctcaaatatatatatgaaaaaaagaactagaataagggagggataggcacaacacagcacaacacactcttgaagctaactctaacggacaccattcatcttggcattggtcttcttcctctgcaacacaaacttgttccaaatggcagtgatttgcctctgaggctccatagcactcttcttagcaaccactaccttgccattttcttcagcaaagactgtcacactagtgctgcttatgaccctagcaggaagtgaattaagctcatgcagaacctttctaacatcggccaccaggcgctctgcgagagtcctttagaagtcctccctgatgacaacacgaagccctgagacatgttgggcatttgggg

SEQ ID NO: 229510 - DNA, 374 bp, Glycine max
gtaacatcagtctaacgaagatcgagtcacggccgcatcggaaccgtccgattaggctggtggatgacgcgaacgtgggaacagcgaagcacttcgagtacttgttctacgttgattttgaggcctccatggctgaggttagggcacagaacgcgttggcggaggtgcaggaattcacgtctttcttgcgagtgttggggagttaccctatggacatgacaccctggacaccttcctcccggggagattagcatccccttattttgtctttttcatctctccctcccaaaagagaggaaaacaaaaacatatattaaatgtctcatatggattctgaattttgtgaataaaagaaaacataaacttattatttt

SEQ ID NO: 229511 - DNA, 381 bp, Glycine max
aaaataatgagtttatgttcacttttattcacaaaattcaggatccatatgagacatttaacatatgtttttgttttcctctcttttgggagggagagatgatattgaccaaataaggggatgctaatatccccgggaggaaggggtccagggtgtcatgtccatagggtaactccacagcactcgcaggacagacgtgaattgctgcccctctgccaacgcgttctgtgccctaacctgagccatgggggcctgaactgcatacgtttaaccactactcgaagtgcttcgctgatcccacgtatagtgtcgtccaccagcctaatctgacggttgcgatgcggacgtgactcgatcatcgttagactgatgtgacctggt

SEQ ID NO: 229512 - DNA, 551 bp, Glycine max
aaagagatgtatagtatttcctttccacccatgggatgatcagaaagcggatagaaaagagggagtggtcctaacggttccacaaagcattgaagagcttataaaggaggcgacaaaacatttggaaattccaaacgcttcctgtattttgtcagaacaatgtggcaaaattgtttatgtaggcacgattaacaatgatgagaagctatttctagtgagtgaagcacagaatgaatgaggtgaaatgttcagcagtaccaacaccactagctggttaatatactttttctttactccacaaatttttccattccagataagaacaatttttatatgtttgcagttattgtcaattagtactaataaacatcctctcatcactctttcaaccatggtacatgtcaacggatccaagttggtgacggggtatgtgaagttgactttgcaaaaacacctttctttctatgctatctcgatcgtagtcataatcccagtgcacaaggtcattcattgactacacctgccggttctgtctcagtcttctccaccca

SEQ ID NO: 229513 - DNA, 571 bp, Glycine max
cttcttcctttacgttcattctgttttcatagtgaggatcttctgaagaaatggcaaatcaccctttgacacactctcactctttccgcgagaggtttgatgaaactctcactggtcacaggaatgaaattttggcccttttgtcaaggcttgaagccaagggcaagggaatcctgcaacaccaccaggtggttgcagagtttgaagaaatccctgaggagagcagaaagaaactccaaggtggtgtctttggagaagttttgagatctacacaggaagccatagtgctgccaccatttgtggctctggctgttcgaccaaggcctggtgtttgggagtatctgcgggtgaatgtgcacatgcttgttgttgatgagctgcttcctgctgagtatctgcgtttcaaggaggagcttgttgagggaagttctaatggcaactttgtgcttgagttggactttgaaccgtttaatgcatccttccctcgcccaactctgaacaagtccattggaaatggcgtctagttcctcacccgcacctttcgccaagctctccatgacaggagagcatg

SEQ ID NO: 229514 - DNA, 466 bp, Glycine max
ttcagagatatgggttataatgccagcatgacggccaatgctacatctagatgggccgaagcattgcgagaaaactatgaacgactggcataaatgcctgcacatagcggatattctgcataccttgctgcacgtttagccttcgtctatgaacgtgctgggaagggtaaacgactagcaggccctgaacgtacaggtggcgaaactattgctggtgctgtgtcgccacctggaggagattaatcatatcctgtgacatctgcaaacctgagcatacttaatgttatatggggtttggacaaaaggcttgctcataggaagcactttacttctgtaaactggcttatttcttattcaaaatactaaacggcacttgaaaccttttatgagcactttgatccagattgtatcaacattaggacaaaggctcgtgaagttctgcatagggaagaagacctgaatgaaa

SEQ ID NO: 229515 - DNA, 369 bp, Glycine max
gataaatcaagccatgcatcatatgctgaataaatcatgcaagactcatggctccatgggggccatctatgaaatccaggattccaaataatccacttgcaccaaaacttccgcctatgttaatacagaatccgcttgctggtggcactttatgtcataagagcatgatattatcctaaatacatatggcaagagcacgtctggtgtcttactctcactaaccaaactgcagatgactgatgcacatgatggtggttacacactacactagatctatggccaaccctcccccactaaaggaaataaatgcgatatgtatgaatcgagcagtcaaatgtgagaacactctggacgctgcaaccgtgcctt

SEQ ID NO: 229516 - DNA, 572 bp, Glycine max
actttgggcaactggctggattcacaacagaataagagtaatagtttccagttttgctgtgaaaatgttgcttctaccctggaaatggggaatgaaatatttctgggacacacttcttgatgctgaccttgaaagtgatatcttgggttggcagtatatctcaagaggcttaccagatggccatgagcttgagcgcttggacaatccggagattcaaggggttaaatttgatccagaaggtgaatatgtgagacaatggctacctgagttggcaagaatgccaactgagtggatccatcatccttgggatgcaccgcttactgttcttagagcagcaggagttgagctgggtcaaaattatccaaagccaataattgatatagatttggccagagaaagactcactgaagctatattcaagatgtgggaatctgaagcagcagcaaaagctgcaggctctgaaccaagggatgaagttgttgtagacaactctaactctcttgaaaatttggacactcgaaaagttgtcgttctgggaaaggctccatgtgctactatttcagctaatgatc

SEQ ID NO: 229517 - DNA, 486 bp, Glycine max
tttatcgacaatatctttcgcttcgtccaagcaggatctgaagtatctgccttattgggtcgaatgccttctgctgtgggttatcaacccactcttagtactgaaatgggttctttacaagacagactcacttatgccaaagaggggtccatagcttctatccaagcggtttatgtacccgcagacgatttaaccgatcctgcgcctgctaccacattggcacatatagatgctactactgtactatcaagaggattagcggccatgggtatctatccagcagtagatcctttagactcaacctaaactatgctccaacctcgaatcgttggtgaagaacattatgagactgcgcaaagagttaaacagactttacagcgttacacagagcttcaagacattatagctatccttggctgggacgaattatcacaagaacatcgcttaaccgtagcaagagcacgacaagatgagcgtttcttatca

SEQ ID NO: 229518 - DNA, 337 bp, Glycine max
agttattcccatgttcggacgcatcaactcgttatgaaatcacattgatagcctatactcgcgtcctagctagtctaagagctagatttgcctcaattgttcgcctcttgccttcccccttattcaaataagctcccgctattccaagagtttgctgtgcttcttggggatcaatgtcactacccttttccgcatcatttactaaaacagtgatctcactattgtttattctagcagaaccgcccatgacagccatggttaaccattggtctttaagaagacctattctcaaaatacctatatctaccgctgtggcaataggcgcatgatttggtaa

SEQ ID NO: 229519 - DNA, 598 bp, Glycine max
  unsure (1)..(598): unsure at all n locations
aaagttttatcatctatctgcttaatggtccatagtccatacaccaacaccaaaacaaacccactaagatggcttcctttgtatccttcctagtgctgcttcttgcagcccttatcctcatgcctcaagggcttgctacttactacaaaccaattaagaagccaccagtgtacaagcctccagtgtacaagccaccagtgtacaaaccaccggtttataagccaaaaccaccggtttacaagccgaaaccaccggtttacaagccaccatataagaagccaccatacaagaaaccaccttatggaaagtaccctccagtagaggacaacacccatgcctaaagcaagcaatgaggtctattatctacttaataaataagaggaactgctttgtgttttctagcattgtgatttacaacttcgtagcaatgcatattcttgactcttgcatgcacttcaatccttcgtagcattaatgatgtggccaagtcatcatgagcatcatacttanttcttgtgaatgtaaatcaaaattataagagagaaaatggtgcttttgtactacagnatactataaataaaaaacttttatgggtttc

SEQ ID NO: 229520 - DNA, 424 bp, Glycine max
gaaaaccataaaagttttttatttatagtaatctgtggtacaaaagcaccattttctctcttataattttgatttacattcacaaagaaataagtatgatgctcatgatgacttggccacatcattaatgctacgaaggattgaagtgcatgcaagagtcaagaatatgcattgctacgaagttgtaaatcacaatgctagaaaacacaaagcagttcctcttatttattaagtagataatagacctcattgcttgctttaggcatgggtgttgtcctctactggagggtactttccataaggtggtttcttgtatggtggcttcttatatggtggcttgtaaaccggtggtttcggcttgtaaaccggtggttttggcttataaaccggtggtttgtacactgggggcttgaacactggaagc

SEQ ID NO: 229521 - DNA, 598 bp, Glycine max
aaagttttatcatctatctgcttaatggtccatagtccatacaccaacaccaaaacaaacccactaagatggcttcctttgtatccttcctagtgctgcttcttgcagcccttatcctcatgcctcaagggcttgctacttactacaaaccaattaagaagccaccagtgtacaagcctccagtgtacaagccaccagtgtacaaaccaccggtttataagccaaaaccaccggtttacaagccgaaaccaccggtttacaagccaccatataagaagccaccatacaagaaaccaccttatggaaagtaccctccagtagaggacaacacccatgcctaaagcaagcaatgaggtctattatctacttaataaataagaggaactgctttgtgttttctagcattgtgatttacaacttcgtagcaatgcatattcttgactcttgcatgcacttcaatccttcgtagcattaatgatgtggccaagtcatcatgagcatcatacttatttctttgtgaatgtaaatcaaaattataagagagaaaatggtgcttttgtactacagattactataaataaaaaacttttatggtttc

SEQ ID NO: 229522 - DNA, 554 bp, Glycine max
gaaaaccataaaagttttttatttatagtaatctgtagtacaaaagcaccattttctctcttataattttgatttacattcacaaagaaataagtatgatgctcatgatgacttggccacatcattaatgctacgaaggattgaagtgcatgcaagagtcaagaatatgcattgctacgaagttgtaaatcacaatgctagaaaacacaaagcagttcctcttatttattaagtagataatagacctcattgcttgctttaggcatgggtgttgtcctctactggagggtactttccataaggtggtttcttgtatggtggcttcttatatggtggcttgtaaaccggtggtttcggcttgtaaaccggtggttttggcttataaaccggtggtttgtacactggtggcttgtacactggaggcttgtacactggtggcttcttaattggtttgtaatgagtagcaggcccttgaggcatgaggataatggctgcaagatgcagcactaggatggatacaaaggaagccatcttaatgggtttggtttggtgtt

SEQ ID NO: 229523 - DNA, 615 bp, Glycine max
  unsure (1)..(615): unsure at all n locations
agttttactactcataatactgaaccgtatggtccagtttcgaggtatagaggaaaatgtgaagttgatcctgacactaaaagaagtttctgtaatgggaaaattattggagcacaacattttgctcaagctgcaatagctgctggggcattcaacccttcaattgattttgattcacctcttgatggagatgggcatgggagtcatacagcctctattgcagctggaagaaatggaattcctgtgaggatgcatggacatgaatttgggaaagcaagtggaatggctccccgtgccaggattgcagtgtacaaagcactctatagactctttggaggatttattgcagatgtagttgctgcaattgatcaggctgtgcatgatggggtggatatactcagcctttcagttggaccaaatagtgctgcatcaaacaccaaaactacatttttgaatgcttttgatgctacacttcttggagcagtgaaagctggtgtgtttgttgcacaggctgcnggaaatggtggtccttttcctaagtcattagtttcatatagtccatggatagcaactgtagcagcagcaattgatgatcgagatataaaaccatctgat

SEQ ID NO: 229524 - DNA, 540 bp, Glycine max
gtgattgggagaggagggtatgcagaggtttataagggaacattgaatggtggtgatgaagttgcggtgaagaggctcacaagaacttcaacggatgaaaggaaggagaaggagtttctgttagagattggaaccattggtcacgtgcgccattccaacgtgttgcctcttcttgggtgttgcattgacaatggactttacctggtttttgagctatccactgttggttctgttgcttctcttattcatgatgagaacttgcctcctttggattggaaaacaaggtataagatagctctaggcactgcacgtggccttcactacttgcacaaaggctgcaagaggaggatcattcatagggacatcaaggcctcaaacattttgttaactgcagattttgaaccgaagatatctgattttggacttgcaaggtggcttccctctcagtggactcaccattcaatagccccaatagaagggacatttgggcatttggcacctgagtactacttgcatggagtagtggatgagaaaacagat

SEQ ID NO: 229525 - DNA, 515 bp, Glycine max
gccgaagcaactgagttcaattttaataaataggttacatgcacataaatacaaaaaagaaacacttaagttatatagttttggttaaacagaacagccacaagaagcttatctgcaccttctatatttatgtaacaatatatgtacaagtagttgaaagttgtacctaactcctttaaccctaagtacttccaacagagtctggtagtgacattgaaaaggaactgtcatattcatattccagatcctcaaaaccccataattcctcctcttgctcttcttcctctggcatttcccacttccctttatccatcttccactcctccattacctgcagtacctcactcatgataggtctgcaagttgcagatgccctaatgcaaagggaggcagcataggctactctattaaactgtgtcacgtcataagcccctgcaagccttgaatctaccaaattttctatctcccctttgcttagtattggtttagcccagctgtgcaagctttggtgagac

SEQ ID NO: 229526 - DNA, 570 bp, Glycine max
  unsure (1)..(570): unsure at all n locations
ctgaatcttagagcagtcagtgaatataaatatctagttcagagtgactgcacgttaattgatggtgtcaatgatgctaacaactttcatcagctgatgaaagcgctggatactgttcaaatttgtaaagaagatcaagagatgatctttaagatgctcgctgcaatactatggctgggaaatatatcattccaagtagacagtgaaaatcacattgaggttgttgatgatgaagctgtaaccagtactgcccagctgatgggttgcagttcccaggaattaatgacagcattatgtacccttaaaactcaatttgacgaggatactattgccaaaaatttgacattgaggcaggcaactgaaagaagagatgcaattgcaaaattcatctatgcaagcttgtttgactggcttgtagaacaagttaacaagtcacttgaagtgggtaaaccacatactgngaaatccataagtatccttgatatttatgggtttcagactgtccagaaaaacagctttgaacagttttatataaatttatgccatgagaggattcaacaacattttaat

SEQ ID NO: 229527 - DNA, 456 bp, Glycine max
  unsure (1)..(456): unsure at all n locations
atggtttacgacacaaaaagaaagatttatttttaaaataaataaataaaggcgttgaacagatgcactgcattcgatttcgtttttggaccacggtggtggcagatcagctgccaaagcaaagaatagagatattgagttttagtttgagtgtgagaggatgatgcgatacaaagaggaaaaagaagcacagaaggaagcttttagaaaatatctggaaacaagtggagctgtcgacgctctcaccaaagttctggtttctttgtacgagcaaaacgacaagccttcttctgccgtcgagttcattcaacagaaattaagctgtccttccatctcagaatatgaaaagttgcaagccgaattgtccgatctgcaaatcaaatacaatgacctcttagctgcacaccagaaaacctgcaaagagaattgcaatggaatggattntcaatgatattt

SEQ ID NO: 229528 - DNA, 539 bp, Glycine max
gggctgtgcgttggaatgcgcaattcttagtccaacgttcaaagtacgagaatttcaggtcaacgaaagccttcctttctcgatttctctttcatggaaaggttctggtccagatgcacaggacaatggatcagaaaatcagcagagttcccttgtttttcctaagggtaatcccataccaagtatcaaggcactgacattctgcagggcaggaacattctctgttgatgtattatatgatgatgcaagtgggctgcaaacacctgctaagatcagcacatatactattggtcctttccaaactacaaatggtgaaagggcaaaagttaaagtgaaagttcgtctgaatctgcacggaattgtatcccttgagtctgcaacactcctggaagaggaaaaagttggggttccagttaccaaagaggcagcaggggaaaatactaagatggacattgatgaagtccctgctgaggctgctgcacctcccgcctccaatgacactggtgctaatatggaaagtgcaaaggctagtactgatg

SEQ ID NO: 229529 - DNA, 604 bp, Glycine max
agttgttaccatttgctcccagtacagagcttaaccgagcttcacaaagatgaatcgggaaaagttgatgaagatggccggttcggttagaactgggggaaagggtaccatgagaagaaagaagaaggctgtccacaagacaacaaccacagatgacaaaaggcttcagagcaccctgaagagaataggggtgaatgccatcccggctattgaggaggtcaatatctttaaggatgacgtagttatccagtttctaaatcccaaagttcaagcatccattgctgctaatacttgggttgtcagtggttctccacaaacaaagaagttgcaagatatactccctagcattatccaccaattaggaccagataacttagaaaacctgaagaagctagccgagcaattccagaagcaggctcctgaaggagccgccggttcaaccacagctcaagaggagaatgatgatgacgatgtcccggagcttgttccaggccaggattttgagacagctgctgaggagaccaaggctgcttcttaagtgttattgtactgtgccatcgccaatatctactgggttttatttttttccctgattttctttttt

SEQ ID NO: 229530 - DNA, 542 bp, Glycine max
agatgaaagaaagcatatttaatagagtatttgaactgtttagagtatatgaggggagaaccgaacacctgaaatacttttaaaaaaaaggaaaatcaagggaaaaaaaataaaaacacaggagatatatggcgatggcacagtaacaataacacttaagaagcagccttggtctcctcagcagctgtctcaaaatcctggcctggaacaagctccgggacatcgtcatcatcattctcctcttgagctgtggttgaaccggcggctccttcaggagcctgcttctggaattgctcggctagcttcttcaggttttctaagttatctggtcctaattggtggataatgctagggagtatatcttgcaacttctttgtttgtggagaaccactgacaacccaagtattagcagcaatggatgcttgaactttgggatatagaaactggataactacgtcatccttaaagatattgacctcctcaatagccgggatggcattcacccctattgtcttcaggtgctctgaagccttatgtcatct

SEQ ID NO: 229531 - DNA, 630 bp, Glycine max
  unsure (1)..(630): unsure at all n locations
ggcctcattgggtgggttacaaaatctaagcggcatcaattttcttatcaaaaaagagggtccaaaagtcaatgcgaagttcgagctgaagccgccaccatatccactgaatggtttggagccggtgatgagccagcagacacttgagtttcattgggggaaacaccacaagacatatgtggaaaatctgaaaaaacaaattgttgggacagagcttgatgggaaatcactagaagagattatagtgacatcatataataagggtgacattcttccagctttcaacaatgcagcacaggtatggaaccatgacttcttctgggagtgcatgaaaccaggtggaggtggaaagccatccggggagcttctagaactgattgaaagagactttggctcatttgaaaaattccttgatgagtttaaggctgctgctgcaacacaatttggttcaggatgggcttggcttgcatatagagcangcaaatttgatggggaaaatgcagcatatcctccttcaccagatgaggagcacangctagtggtgctcaagagtcccaatgctgtgaacccccttggttggggaggctattatccacttcttaccatgatgtttgggagcatgcttactac

SEQ ID NO: 229532 - DNA, 601 bp, Glycine max
  unsure (1)..(601): unsure at all n locations
aactcatatttccaaaacgcagaaccaacaatgtcgttccccttcaaccactctcaccgcagggacgacgacgacgacgacaaacgacccgccgtttaccctcctccgggtaacaccttcaacaaccctccaccacccttctacggcgtccatcagccagaaacccacgtgtcccatgtcttcaacaacagcaactactccgctcccccgcctccaccaccttcccataaccaccaccatgactccttcactcacggaggcggcagcaccgtgcaccacacccctcacaacaacgcgccacccaccacctctgttcatcacttgagccacctggttaacaccggtgttctctcgagcaaacccactgtgagagttttcaccaaagccaatcccaatttctctctcaccattcgtggcggccaagtcattctcgctccctccgatcccaccaatgagtaccagcattggtataaggatgagaagtacagcactagggtgaaggatgaagaggggtgccctgctttctctttgatcaacanggccactggtgaagccttgaagcacttcatcggtgccactcatcctgttcggctgatacctt

SEQ ID NO: 229533 - DNA, 465 bp, Glycine max
tttctttttttttctaacaagtaacatcagcatcagtagttgttcacactgaattatattaagatataaggacatacatgaactgtgtaccaatatatatatggcaatcggcacattaaccagcgtcacatgtatgcaattaatattacataaaacgcacttaatctattgaaaaaagccgattgcttggtacaagcaaatgcactacacaccattccatactctaggcaacaccaaaccagcttaaatacatgggccaactatcctcttaacttgatgcatctttaaagccattgataatttcgtcaattgaaatcagtaatggaagatcttgcactgctggttatcacctttgttccagtcccataggactattgtagtgccatcacgaacaccttcataattcttgataccgtgaaaagcattcacattaagatgaacattgttgaccatgcttatagctct

SEQ ID NO: 229534 - DNA, 588 bp, Glycine max
ctcgagccgaatcggctcgagcggctcgagggagattcatctctgcagcaggttgttttagaaaagaaaaaatgctgaagatttgctgcattggggctggatatgtggggggtccaacaatggcagtcattgcactgaaatgcccctcaattgaagtggctgttgttgacatctctaaatccaggattgcagcatggaacagtgaccagctccctatctatgagccaggccttgatgatgtggtgaagcaatgtcgtggcaagaaccttttcttcagcactgatgttgagaaacatgtctatgaggccgacatagtgttcgtctccgtcaacaccccgacaaaaactcgtggtcttggagccggaaaggctgcagatttgacttactggtagagtgcagcacgcatgattgctgatgtctccaagagtgacaagattgtggtggagaaatccactgtccctgtgaaaactgctgaggccatagagaagattctgactcacaatggaaaggggatcaagttccaaatgctttcaaaccctgaattccttgctgagggaactgcaatccaagatctttttcaaccggatc

SEQ ID NO: 229535 - DNA, 474 bp, Glycine max
caaaaacagcaacacagtttgtgtgaagagctcattatcccctacggttacccctgctccgagcatacgattcaaaccaaggatggtttcttgttaggtcttcaacgtgtctcttcttcttcttctcttcagcttcggaacgatggagaacgaggccctccggttctgcttctgcatggcttattcatggcaggtgatgcatggtttctaaatactccggaccaatcacttggcttgatacttgcagatcatggttttgatgtatgggtaggaaatgtgcgtggaacacggtggagccatgggcatatatctttattagagaagaaaaagcaattttgggattggagttggcagaatttaaccctgtatgatgttgcagaaatgatcaattacattaattcagtgacaaactcaaagatatttgtagttgggcattcacaggggacaattatatcttttgctgccttcacttca

SEQ ID NO: 229536 - DNA, 530 bp, Glycine max
gcagaaataggccatgcaacgccactctttattatatctgtcatcatatttacatacagaaaatcaaggggaactccacacaatattaatattttcactatacagaaagtgcagtaatatataaacacgtagaccattgtattgcatccatcataccggaatgaaggaaatttacacactactaaattttccggatgacttgaaaaaactaatcatagggtcataaagatcttgttttgcttgcaagcttaaaatgaagtcaacatgaccatagttttcaagataaaccacttccggtgtggatggcaattccttgagtgtgtgctggaaatcagttatatctgccaaagcatcattgccaccataggccatccacagaggcaatgatttgggtatgcgactaaggtcgaactttggtggattgaacttgccgtactctatcagattttttagctttccataatcatacttggagtaggtacctctgcggatcatctggaaaagggtgtttacgtttttggaggatgatg

SEQ ID NO: 229537 - DNA, 550 bp, Glycine max
gtcctctccgtcgttcggcagattcggcctgagatcctcaccgtcgtcgagcaagaagcgaaccacaacggactgagttttgtcgaccggttcaccgagtcactgcactattattcaactctattcgactcgctggagggttcgcctgtgaacccgaacgacaaggccatgtcggaggtttacttagggaagcaaatctgcaacgtggtggcgtgcgagggaatggaccgcgtggaaaggcacgagacgctgaaccagtggcggaaccggttcggttcgaccgggttttctccggttcacttgggttcgaacgcgtacaagcaggccagcatgttgctatcgcttttcgggggtggggatgggtatagatggggaaagagaacaatgggtgtctcatgttgggatggcacactaggcccttgattgccacctgcgtgtggcaactcgctacaaaatcggtggttgctgctcactgagtcgactcgccgattcctcagccagctttttctttgtattttgtgtttaaattaatttctaatcatgcccaccg

SEQ ID NO: 229538 - DNA, 374 bp, Glycine max
ttttctttttatattttcctttgtttcggcgggcatgattagaaataaagggaaaacagaaaataataagaaaaagctggctgtcgaatgggcgagctgacttattgagcagcatccaccgattttgtaccgagttgccacacggaggtggcactcaagggcctagtgtgccatcccaacatgagacacccattggtctcttccactctatacccatccccacccccgacacgcgatagcgccatgctggcctgcttgtgcgcgttctaacccaagtgaaccggtgaaaacccggtcgtacctaaccggttcccactctggttcagcgcatagtgcctctacacgctgttcattccctcgcacgccaccacgtt

SEQ ID NO: 229539 - DNA, 549 bp, Glycine max
ctcgagccgaatcggctcgagattactggtcctggaatgggttccgagattaaatgtgaatctctggatattttatgtgatgtccttcataaatttgggaatctaatggcagcggatcatgaactattattaagttccttgctttctcagttgagttctaatcaagctagcgtgcgcaagaagactgtggcatgcattgcatctctctcttcaagcctgtcacatgatatgttggcaaatgcaactgttgaagttgttactaacttcaaaaataaagttgccacgtccgaaatgatccgtacaaatatacagatgatcggcgctttgagtcgagctgttggctaccgatttgggccccatcttggagacactgttccagtgctaattaattattgtactaacgcctcagaaaatgatgaagagcttcctgagtacagcatgcaggcactggaaagctttctccttaggtgtccaagggatatttctgtttactgtgatgaaattcttcatttgacactagaatatctaagttatgatccagatctcact

SEQ ID NO: 229540 - DNA, 286 bp, Glycine max
agaaagaacaacctatctttatgagtttgaatttgataaagcattgtcactgacattgtaccggcactaacacgccttcctgacctggtgaacaccatgaacgtgccctgctaccccactttgactctaattgaatagtgctacatatatattaccccccattgaactcaatgatgggcagcatttacatcgcgagataaagaaacataatcccctaattctcccattcccatgaacccgcacaggacttgggtcattgaacccccccatttaaaggaaaagacct

SEQ ID NO: 229541 - DNA, 443 bp, Glycine max
gattgtagctattactctttctctagagtgtgttgtgcttgagatgaaaagctggaacctcttgcttccagtaagcattgatatggagaagaaaaccatttcatcagagggggaaccaaaagagagagatataccaacaataattagcaaggaactacttagagggaccagggaggtacttgttcctcaggcctctccaagtttacaatctgttgcagctgattcaattgaaggtcgatcaacattacatcagtatttcaagctgtttcatgaaacctatgtggagtatgcacataaggtgtacctggagctcaagcatcacgcaccttcagttgaagaaaatcattaatgaccaacattctcgattgggtgatgcacaaaagaatacttttgaaaatgaggagcaagaggctatattacccgaaaaggatagatcgtgcaat

SEQ ID NO: 229542 - DNA, 431 bp, Glycine max
ttttcaagcaagtcgcgcttccgccatactgactctgcctgctactgagttgtgacttgggcgaagacatgctgagaactctagttgtgaagcgcagccttggtcaccactggcactcgcattctcagcacctccgactccagcggcaattctcatcatccccggagcccaactcctccgtggatgcagaaacccgcaagtacgcgggctatgctgccctcctcctcttctgcggcggcgccacctactacacattccccctcccggacgacgccaagcacaagaaggcgcagatcttccggtacgctccgctgccggaggacctgcacacggtctccaactggagcgggacccacgaggtgcagacgcgcaactttctccagccggagaacgcggagcagctggagcgagagctgagggaggcgcggagt

SEQ ID NO: 229543 - DNA, 518 bp, Glycine max
aaagtgaaaaaatattttctaatataattaaatgtgtaaaattactcataaaatatgatgatataaaaaatgttacatttaactaatatattgtaagcttcattatttttggctcctcagtttttagtcaagctcgccaatgcagtcgccccactcaatccagctcctctatatgcatacatcacaattctctaagcttctgtgttcaatccatctgccatgcaagcaataagctgaaagaatgcatttatgcataataatccagattgtgcaccagatattttgcaaacccaagttccaaagtcaacaacttaaggttgaatatacagtaaacataaaaaatatggacaatatagacaaataaccaacacagaatttatatggtgtctgattgtgggaagagcttttccaacatgttattccaaaggatcctattggggtccaattcctttcttgctttattgtatgcatccacaggaaaccgctttcttagcttttctggagagctgcaagctcct

SEQ ID NO: 229544 - DNA, 580 bp, Glycine max
ttttcaagcaagtcgcgcttccgccatactgactctgcctgctactgagttgtgacttgggcgaagacatgctgagaactctagttgtgaagcgcagccttggtcaccactggcactcgcattctcagcacctccgactccagcggcaattctcatcatccccggagcccaactcctccgtggatgcagaaacccgcaagtacgcgggctatgctgccctcctcctcttctgcggcggcgccacctactacacattccccctcccggacgacgccaagcacaagaaggcgcagatcttccggtacgctccgctgccggaggacctgcacacggtctccaactggagcgggacccacgaggtgcagacgcgcaacttcctccagccggagaacgcggagcagctggagcgagagctgagggaggcgcggagtcgtatccggccggtggggtccgggctttcgccgacgggatcggcctttccaggaccgggatggtaaacttggctctcatggatgggatcttggaagtcgacaagcagcgcaggactgtcagggtccaggctggcatccgagtgcagcag

SEQ ID NO: 229545 - DNA, 528 bp, Glycine max
tttctttttttttttagcacaatgatttatgaataatgactatacccataaaatgtaacatgcaaatctctactggctgttgagatgaaacctgagagcattgctgagcatggtaccaacttgttcaacatctaattttgtattttgaaagaaattacaattcaaattcatcttcaagcttcaaggcctctgcggcagactcttcctcttcgtcatcgatgacaaaatacggattgtgagcctctggcttgaacttgctgccagtaaagaaattgaaagcatgggtggccaactcagcagcatccacactggtccaagaataacgataggaggtaatagtctccaaggcataaacgacaaccctggtgaagtaaatgtaacagataacgacgacatagtagtgcctgaagagagtcagcttcatcaaattaacagcggccttgccgtcggtcctagcggcctcacggaagttcttgatggaccagacaatggggaaatgcacagcgcagcaaccgacgacgttcacaa

SEQ ID NO: 229546 - DNA, 551 bp, Glycine max
cgtccttgtattaaaaactcaatatcaaattctttgtcccacaaaagatggggttcactcccacaagtactgcaacatgctttctcataatagcacctctggttgtgctatggtgttggaagctactaaagtgggtgtggctgaggccaaagagattggagagagcattaagggcacagggccttcaggggaatccctacagcctcttgattggggacactaaggaaatgtacacagtgctcatgcaagctgccagatctcaacaatctacaagttcttttctctctaaggataaggatgcagcaccacatatcacaacctttaaccatcacattgtcaacaaattcggcaagaattcatttttttgggaaggtaccaaaccaaaagtggtaatcactgaccctgagcaaatcaaagaagtcttcaacaagatccaagactttgagaaacccaagttgagtcctattgtcaagttgttgggctctggacttgcaaatttagaaggcgagaaatggcgtacacatcgaaagattattaaccctgctttccat

SEQ ID NO: 229547 - DNA, 540 bp, Glycine max
aggaaataaaaatagcattcaatataataaagaggtttccctctataaatacaagagattagaacataagaaaggaatggagataattaggtgtgcaggatacaaattaatagatgacactacaacttatgtaagatgatatgagcaccaaattttggattaagagtgagcacagtgactggagcatgtgcataggtaggagaaagctcaaatgagaagcgttgtaagagtaatgacaaaaccaacttcgcttctaataaagcaaaattttggcctaagcacactctaggaccccatccaaatgggaaaaacacaacttggccttttgttgcctttgctactccttcagcaaatctttctgggttgaactctgtagcatcatcaccccaaatatcacgatcctggtgaatcaatagtattggtaaggaaacttgcactcccgcaggtagggaaaggtttccaagtttcacatcattcttgatcgctcgagcaaaataaattaaaggtgggtattacctaagaacctggtataaaatcatg

SEQ ID NO: 229548 - DNA, 87 bp, Glycine max
ttctttgagatgagagtcttgatgaacagtaccattctgatgtattgctttccttgaaagttaatgcatgcttcttatcttctgtct

SEQ ID NO: 229549 - DNA, 330 bp, Glycine max
ttatgttttagatctttagctgtttttttttgatttatatatttgtttatattgtatttttctgtttatattatggttgtttaaactgtttaccatttgatagaaaggctatgggaagcaagagcctgaaaagaaagatagaataaatctaaccggcaaacaaagaactgacaaaaaaagaaaaaaagaaagaaagcagaaaacaaacaaggcaaagcacaaaaaacaaaaaaaagaaaaatgaaagaaagactaaaaaaaagacccgaatatcagataaaaaaacggcccaaaactggcggaaactaaggaattaattcctggaattca

SEQ ID NO: 229550 - DNA, 578 bp, Glycine max
atcgaggacggcgtcgacgtcctctcgctctccctcggtggcggttccgcaccgtacttccgcgacacaatcgccatcggcgcgttcgccgccatggcgaaaggtatcttcgttgcatgctccgccgggaacagtgggccccagaaggcctcgcttgccaacgtggcaccgtggataatgacggttggtgcaggaaccctagatcgtgatttccctgcctacgcttctctcggtaacaaaaaaagattctccggtgtttctctctatagtggaaaaggaatggggaacgaaccggttggtttggtttatgacaaaggcttgaaccagtcaggtagcatttgcttgcccggatcgcttgaaccgggtctggttcgtgggaaggtggttgtttgcgaccgtggaatcaacgcgcgggtggagaaaggtaaggtggtgcgtgatgccggtggtgttgggatgattctcgcgaacacagcatcgagtggtgaggagttaattgcggatagtcacctgctaccggctgtggcagttggaagaattgtggcggaccagatcagagcctatgctttttccgatcc

SEQ ID NO: 229551 - DNA, 556 bp, Glycine max
cagtgatgcatctccacagatacttgagtaaagctatatgctgtggtgtagatttttactatggagttaaatgcaagttatgacgtcgagcattcacattctacacaaagaatacagcatgagctgtggcctctagatccaattgatccaaagaaggcaaagtttccatgttgtttggtttggaatccacttcctgtggtctcatggttggctcccttcattggtcatgttggcatttgcagggaggatggagttgttttagatttttcaggatcatatcttgtgaatgttgatgattttgcatttggtccagtggcaagatacttgcaacttgatcgtagacagtgttgcttcccccctaacctatctgcacatacatgcaagcacggttacctgcatgccgagtatggtactgcaatcgcatgggacgatgcgttacagacaagtttgcggtattttgagaacaaaactcacaaccttttcacttgcaactggcactcgtttgttgccaactgtctgaatcggctgtgttatggtggatcaatgaatggaacat

SEQ ID NO: 229552 - DNA, 432 bp, Glycine max
caaaagctattccattaacttgccataagagataactatttcttgttccaatatcaacatttaaacctgttatttggagaagagggaacacaaatgatgaccatctttcaattcaagagaccatctagcactctaatagggttctaaataggcaagaccccaatagaaaccaccctattaagagttgagagaaggatagtaccccaagtaagaagggccatgcaaccataaaaacacctaagcaaacaaccacaacaaaaggcagaaaagaccttacaattgacctgaaatcaacccagtgccccttaaatattaccaaagctcctacattcaccatgttccaattcattgatccaccataacacagttcgattcagacagttggcaacaaacgagtggcagttgcaagtgaaaaggttgggagttttgttc

SEQ ID NO: 229553 - DNA, 576 bp, Glycine max
  unsure (1)..(576): unsure at all n locations
gaggaagagagaaaaaccatggcaataacactcaacaatggcttcaagatgcctatcattggattgggcgtgtggcgcatggaaggaaacgaaatcagggacctaattctcaattccatcaaaattggttatcgccattttgattgtgctgctgactacaaaaacgaagcagaagttggagatgcgcttaaggaggcttttgatagtggccttgtgaagagagaggatctcttcattaccaccaagctttggaattctgatcaaggccacgttcttgaggcgtgtaaagacagtctcaagaagcttcagttaacgtatctagatttatatcttgttcactttcctgttgccgtaaggcatactggggttggtaatacttctagtcctttgggtgatgatggggtcctggacatagataccaccatatccctggaaacgacctggcatgcaatggaagatcttgtttcatcgggcttggttcgcagcatagggatcagcaactatgatatctttctgaccagagnnatgttagcatattccaagataaagcctgctgtaaatcagaatgaaactcat

SEQ ID NO: 229554 - DNA, 504 bp, Glycine max
ctgcaagtcaagaagttggaggaggtggtttttttatcgatatacttgttcccgggagtgtgggtgcatgtgactcaaaccttgagtatgtgcgagtttacaatgttgacgaccttaaagaggttgtggctgccaatacagaggatcgcctaatagaagcaatggaagcacaggcaatcattgctgaagaatctaagcaattccaagcttggagggactcactggaaactgttcctactattaagaaattgagggcttatgctgaaagaatcaggcttgctgagcttgagaacgtgcttaggtcagatgggtgatgatataccaaagaaaacgcggagagctgtggatgaccttagtcggggtatagtgaataagttgctgcatggtccaatgcaacatttaaggtgagatgggaacgacagccggactcttagtgagacactggagaacatgaatgcgttgaatatgatgttcaaccttgacacagaaatatctgttttggag

SEQ ID NO: 229555 - DNA, 473 bp, Glycine max
cccgatacggggacaattttataacaattttatttgatgtaaatacgaagctcaccaaaacacttaattttggataatacaaagaccaatggatgcggaagaacacagggaaaacgcatgacccaaaaaacgcaaacgagttaggccaagcagacgcatcatggaggacttcagctgtttcaactatgcaactaaatattgcaggatgattaatactaaaaggtgaggatgtttcctcttattctaaaggagaaaataaatcaatctgattggtgttagatttcatttctgggtttgttcgacctttgctcgaatcttctccttcaaaacagatatttctggctcaagggtgaacattctattcaaagcattcatgttctccagtgtctcactaagagtccggctggcgttcccatcacaccttaaaagttgcattggaccatgaagcaccttattcactataccccgactta

SEQ ID NO: 229556 - DNA, 550 bp, Glycine max
  unsure (1)..(550): unsure at all n locations
ctgcaagtcaagaagttggaggacgtcgctttttcattgatatctctgttccccggaatgtgggttcatgtgtctcagaccttgagtctgtgcgagtttacaatgttgacgaccttaaagaggttgtggctgccaataaagaggatcgcctaagaaaagcaatggaagcacaggcaatcattgctgaagaatctaagcaattcgaagcttggagggactcactggaaactgttcctactattaagaaattgagggcttatgctgaaagaatcaggcttgctgagcttgagaagtgcttaggtaagatgggtgatgatataccaaagaaaacgcggagagctgtggatgaccttagtcggggtatagtgaataagttgcttcatggtccaatgcaacatttaaggtgtgatgggaacgacagccggactcttagtgagacactggagaacatgaatgctatgaataggatgttcaaccttgagacagaaatatctgttttggaggagaagattcgagcaaaggtcgaacaaaaccaganatgaaatctaac

SEQ ID NO: 229557 - DNA, 475 bp, Glycine max
cccgatacggggacaatcttataacaatattatttgatgtaaatacgaagctcaccaaaacacttaattttgtataatacaaagacaaatggattcggaagaacacagtgaaaacgcatgacccaaaaaacgcaaacgagttaggccaagcagaccccgcatggcggacttcagctgtcttgaactatgcaactaaatattgcaggatgattaatcctaaaaggggaggatgtttcctcttattctaaaggagaaaattaatcaatctgattggtgttagatttcatttctggttttgttcgacctttgctcaaatcttctcctccaaaacagatatttctggctcaaggttgaacattctattgaaagcattcatgttctccagagtctcactaagaatccggctggcgtgtcccatcacaccttaaatgttgcattggaccatgaaacaacttattcactattccccgactaa

SEQ ID NO: 229558 - DNA, 387 bp, Glycine max
ctcttggaaaagtgaaaaccagaagtacgaacgaaagagaagagcgatttataagtgagagaagatggggttgtcgttcacgaagctgttcagcaggttgtttgcgaagaaggaaatgaggattctgatggtaggtctcgatgctgctggtaagacaaccatcttgtacaagctcaagcttggagaaatcgtcaccactatccccaccatcggatttaatgttgagactgtggagtacaagaacatcagcttcactgtgtgggatgttggtggtcaggacaagatccgtccactgtggaggcattatttccagaacacttagggtctcatttttgtggttgatagcaatgatagagatcgagtggttgaggcaagggatgagctgca

SEQ ID NO: 229559 - DNA, 526 bp, Glycine max
caataacaaaacgcatggaaatatatgcgatcaaggatcaaacaaacaagatgtaagcaacacagcacgcacgcacaaaagggtgcaagagtgccaattatagctaaaagtattagctaatttaagcaatcatacaaacccaagttacacaaaagagaatacttttagcaagcattctgctattacaacattcgctagaaaagataagcatctttctccaagaaccgtcagactggcatgaaatcaccagacgagaccaaaatttttgaaatggctcatgctttgctggcaatgttgttagaaagccagtccaaaccctcatagagaccctttccagaagttgcacaagggctctggatataccagtggcgttgacggattgaatgaagtccaagcttgtcagttatttctgcagcattcattgcattaggaagatcttgcttggtggccaaaacaagcaaaacagtatgtttaagttcattcccttgcaacatttttgtgcagctcatcccttgcctaaaccact

SEQ ID NO: 229560 - DNA, 510 bp, Glycine max
tagcagctcacgtgaaaaaacaacgactggtcacgtgccccgtgtgcaacgctaactggaaacaactgcttcaaaacgcagacgaaaacaaaccgcacgcagaactcaaaacgacgaagtcgttcaagccccacaactacaacgacgacgagcctctcatgtcgcccacttcagtctcgcgtttcaaccccattcccgaatccaacgagaacgaagaagaagaagacgaagaagaacaaaacgatgaacaaataaagttcaatctctcatcatcattggtcaagaccagaaacatcgaagcattcttctcaccggaggctgcgattgtggcgtccaattggagctccgagacgtacgttacggtgttgaatgtgaaagttcagccgcgtaacgcggcggcgaatcggccgccggtggatctcgtcatggtgatcgacgtccgaggtagtgtcaccggtgaagagctttggatgctgaaacgttcgatgcaggttgttatctcgtcgctcg

SEQ ID NO: 229561 - DNA, 549 bp, Glycine max
catgattagagccataacttcttaatattttcatgcctagctaactaaagtgcggtaactatagctatgcttacataattcaggcatcaacaaaatacaagctcccaaatgtgccgtgaattcacccattcagtatgctttcttaattctcaaaacatttaaaatctggcatcctcgaagccatgtaaatcgctgactctgttcatagactttctcataatagccactttagccagtctctcagctactgttcaagccgacatcggcgtaagcggctaccccttttcctccaagcaattattattactacttctgaacttttggttcctcagctcgggtagtttggcttcgagccagcgcaagcactcatcaccctgttcgcggctcacagaggctcgagccgatgatagcaactgaagcgcgccagacacatcgttgcgagccacacactttgtcgactcggctacggcgcgtgcactgacgtggcgtcgcctgaactgttcgatcctgagatcacacgatcgaacagtgtggggccctggaacaatt

SEQ ID NO: 229562 - DNA, 572 bp, Glycine max
  unsure (1)..(572): unsure at all n locations
gtaattgatttcgtaactcaactgctgaacagagatgtatccgcccggccactttctgatgctgatcgtgtgaagatcaagaaagctctccggggtatcaaagttgaagtgacacatcgtggaaacatgagaagaaaatatcgtatctctggtctgacttcacaggcaaccagagaattgacattcccggtagatgaaaggggaaccatgaaatctgttgtggagtacttctatgagacatatgggtttgtcattcaacatactcagtggccttgtctgcaagttggcaatgcacagagaccaaactatttgccaatggaggtttgcaagatagtggagggtcaaaggtactcgaaaaggcttaatgagaggcaaatcactaatttgctgagagttacatgccagcgtcctggtgagagggagcgtgatatcatgcaggtcagaaaaatgctgtcgggccattttttttatggatttatttaatattttttctctttggtaaaattgatgtttttgtgaatttgtttggtgccatttctgtatctgcattaattatnttgtgtgcatcatgt

SEQ ID NO: 229563 - DNA, 602 bp, Glycine max
ggcctcaaaaggaattaagtatattgattgctatggagttgacaatgcactggttcgagttgctgatccaacttttttaggttacttcattgataaaggtgttgctgctgctgcaaaagttgtccgtaaggcgtatccacaagaaaaggttggtgtgtttgtaagacgaggtaaaggtggtcctcttactgtagttgaatacagtgagttggaccagtcactagcttctgcagtcaatcaagcaactggccgtcttcgtttttgttggagtaatgtctgcttacacatgttcactctggattttctgaaccaagtggcaaatggccttgaaaaagacagcatttatcatcttgcagagaagaaaataccttccatacatggatatacaatgggattaaaacttgaacagtttatatttgatgcatttccatatgctcctacgactgcactttttgaggtgttacgggaggaggaatttgcaccagtgaaaaatgcaaatggatccaatgttgacactccagacagtgcgaaactacttgttcttcgactccatactcgttgggtagttgctgcaggtggcttcttaacacattcagtgccct

SEQ ID NO: 229564 - DNA, 506 bp, Glycine max
aaggaaaaaggaaaatggggcgatatattggagtctgcatgggcaaataaatgctcagtaaaattatgatacatgtacattcctgagcacactaaaacagatcagtggccaaaaaagaaaaaaccaaaaaccaatcagaaacagattggagaagataatatacattgataactgtgaatgatgagtggcatacgcaaagtaatcttgcaacatgtatgggactgagaactccctcattgtagtgtaagtcacaaaaaagccgcacaaacagggtggaactagaacgagatctcacaaggtgcatgaaatgttcttcctcgacatattggttccaggttttcaccagcatacgaacagaggggtgacacttcaacacctgttgcatataagggcactgaatgtgttaagaagccacctgcagcaactacccaacgagtatggagtgcgcgaacaagtagttgcgcactgtctggagtgtcaacattggatccatttgcatttttcac

SEQ ID NO: 229565 - DNA, 519 bp, Glycine max
gtttagaattattggaatttggaagaaagggttgagctgcacaacaacctaagaatgggaggaagttcgagcttcagggatgagtataccttggaacaaaggctcggagaatcgcgggatattgtggccaaatatcccgatcgagtccccgtgattgtggaaagatatgcgaaatgcgatctgcctgagttggagaagaaaaaataccttgttcctcgagacttgtctgttgggcatttcattcatattttgagttccagacttagtctgccccctgggaaagctctctttgtatttgtgaagaataccttgcctcaaactgctaatatgatggactctgtgtatagatcattcaaggatgaggatggatttctttacatgtattatagcaccgaaaaaacctttggttcgtacatcatgtaaaatattaaactctgtacactattgtatccaacactttgtgaagtgactactatcacgaaaccttgtacaaaattgttgtatggtttaatgtatcac

SEQ ID NO: 229566 - DNA, 382 bp, Glycine max
ccggtggatccactttttttagatttgtcttttttttttggggaactacagcttgtggcccctaaccagacgacaaattgggcccagggttcgtgaatgtcatcacttcacaaaggggtggatccaataggcgcccgagtttaatattttacatggtgcccgaaccaaaggttttttcggcgctataacccatggaaagaaatccctccccttccttgaatggtccatacacagagtccattatattagcagtttggggcacgggattcttcacaaaatcaaagaaagctttcccagggggcagactaaggttgggacctaaaatgtgaatgaaatgcccaacaaacaaggctcggggaacaaggtgtttttttttctccaa

SEQ ID NO: 229567 - DNA, 572 bp, Glycine max
gcgcgctcctattatcaccgtagacggcggaggtggcggtggtggtgtagacacggcgtgacggcgatctcttgagataaatgttggttgaaagaggaagaagaagaagagttgtattgtagaatgagccaaccaacggtgatacttgccactgcgagctatgatcacactattcgtttttgggaggccaagagtggccgttgctaccgcaccatccaatatcctgattcgcaagtaaaccggctggagataaccccggataaacgcttcctggctgcagctggcaatccacacatacgactgtttgatgttaactcaaatagtcctcaaccagtaatgagctatgattcacataccaataatgtaatggctgttgggtttcaatgtgatggtaattggatgtattctggctcagaggatggcacagttaaaatctgggatttgagggcacccggttgtcaaagggaatatgaaagccgtgcagctgtaaacactgttgttctacacccaaatcagactgaactaatatctggtgaccaaaatggcaacattcgtgtgtgggatttgacagc

SEQ ID NO: 229568 - DNA, 528 bp, Glycine max
gagaaattactgacaaataatattagaaatatgctcatggtacaaatttagattactccggacagcgtatatcatccacgaagaggattcttattgactaaacgtgcataaagtcaaagaactatagtaaacttcaaagatcaagaggctgattattatttacaaaacacgatgtacctgatggagaaaaataactttatgaccattatctcaggaagttgcgggttcagccccatcgtgtcgggcacagcaaattgtagctttatgatgcccttggaaaactttaatatcttcaccagttgacatagaccagagcctcgcaggtgtatcagaggaagctgtaataaggtaggcgccatccacggagaagacacagtgccacacccagcgttggtgacctataagagttttttctagggtaaaaccatcaacattccatattttgacagtttgatcagaagatgcagttgccatgtgcctgtggtgttcacagaactcgggtgattaaagacctttgaggatgtatcc

SEQ ID NO: 229569 - DNA, 510 bp, Glycine max
  unsure (1)..(510): unsure at all n locations
gaagattttgttcgatggattcaaaaaggaccaaaacctttatattttgggtttgggagcatgcctcttgatgatcctaaaagaactactgatgttatagtggaggcactaaaggatacgggacaacggggaattattgacaggggctggggaaatctagggaacttggcagaagttcctgacaatgttttcgtgctagaggaatgccctcatgactggctgtttccccaatgttctgccttggtgcatcatggtggtgctggaacaacggctacaggactaaaggctgggtgtccaacaaccattgttccattctttggagatcagttcttttggggagatagaataaatcagaaagggctaggaccagctccaattccaatatctcagctcagtcttgagaatttatcaaattccattaaattcatgctccagccagaggtaaaatcacgggcaatggaagtggcanagttgatcgagaatgaagatggtgttactgctgcagttgat

SEQ ID NO: 229570 - DNA, 584 bp, Glycine max
ggaagatgcccatgaatttttaaggcttctaattgcatcaatgcaatctatatgcttggagggacttggtggtgagaaaaaagttgatcctagaatacaagaaacaactttcatacaacatacttttggtggccgtcttcaatccaaggttaagtgtttgaattgtaatcatgaatcagaaaggtatgagaacattatggacctgaccttggagatattgggttgggttgagtcactggaagatgcgctgactcagtttacttcccctgaagatttggatggagagaatatgtacagatgtggaaggtgcacatcatatgttcgagctagaaagcaactgagcatacatgaggctcctaacatcttgactatagttctgaagagatttcaggaaggaagatatgggaaaattaacaagtgcataacttttcctgaaatgctggatatgattcctttcatgaccgggacgggtgatattccaccactttacatgctttatgctgttgatgtgcacctggacacactaaatgcatctttctcttgacactatgttttatatgtgaaagatctgcacggcaattggt

SEQ ID NO: 229571 - DNA, 557 bp, Glycine max
caggcttcaaagcattaagtgctctattgcagggaagaatgtttatattagatttacctgtagcacaggtgacgccatggggatgaacatggtttccaaaggggtccagaatgttcttgatttccttcaaagtgatttccctgatatggatgttattggcatctctggaaattactgttcagacaagaaacctgctgcagtaaattggattgagggacgtgggaagtcagtggtttgtgaagcaattatcaaagatgatgtggtgaagaaggtgctgaagaccagtgtggctgctttggtagagcttaacatgctcaaaaaccttgctggttctgctgttggctggtgctcttggtggattcaatgctcatgccagcaacattgtttctgccatttttatagccactggtcaagatccagctcagaatgtggagagttctcattgcataaccatgatggaagccgtgaatgatggcagagaccttcacatgttagtgaccatgccttgcatagaggtttgtacaagtggggggtggaacacaactaccatctcaatc

SEQ ID NO: 229572 - DNA, 596 bp, Glycine max
  unsure (1)..(596): unsure at all n locations
agaaaccctagccactctcccggcgtcacgatgcagatcttcgtgaaaaccctaacgggtaaaacgatcacgttggaggtggagtcttcggacaccatcgacaacgtgaaggccaagatccaggacaaggaaggcatccctccggaccagcagcgcctcatcttcgccgggaagcagctggaggacggccgcaccctcgccgactacaacatccagaaggagtccacgcttcacctcgtcctccgcctccgtggcggcgccaagaagcgcaagaagaagacctacaccaagcccaagaagatcaagcacaagcacaagaaggtcaagctcggcattcttcagttctacaaggtcgacgattctggaaaagtccagaggctccgcaaggagtgccccaacgccgagtgcggcgccggcaccttcatggccaaccacttcgaccgccactactgcggcaagtgcggcttgacctacgtctaccagaaggccgatgcttaatttgcggttttaattttattttagtatttaaaagttttggtttatggttttgttcaattagtgttatgactggttgggctntgattaaacctttattc

SEQ ID NO: 229573 - DNA, 438 bp, Glycine max
gaataaaggtttaatcaaagcccaaacagtcataacactaatggaacaaaaacataaaccaaaacttttaaatactaaaataaaattaaaaccgcaaattaagcatcggccttctggtagacgtaggtcaagccgcacttgccgcagtagtggcggtcgaagtggttggccatgaaggtgccggcgccgcactcggcgttggggcactccttgcggagcctctggacttttccagaatcgtggaccttgtagaactgaagaatgccgagcttgaccttcttgtgcttgtgcttgatcttcttgggcttggtgtaggtcttcttcttgcgcttcttggcgccgccacggaggcggaggacgaggtgaagcgtggactccttctggatgttgtagtcggcgagggtgcagtcgtcctccagctgattcccagtgaagatg

SEQ ID NO: 229574 - DNA, 436 bp, Glycine max
ccttagccaatatatcatgaaaagtaaaaaggggcaaagtaactttgtgttgattgctctctaaattaaagttatcttcttctgcgtgtaaaaagggaatgaatacatcaatcaaattccgggaggcttcataaagcgcttccttaggagttgaacttccatttgtccatatttcgagaaagagtatctcttgtttttcattcccattcacataagaatgaatactatgatttacatttcgaacaggcataaatgtggcatctataggatgacctccatcttgaaagttttttagtgtttttatacgatacccacgattcctctcagtttttaattcaatacacaaatcaacgggttctgttacgatggctatatgttgtgtattatcaacgatttccacagagggtggtaaaatgatgtcttgagcggatacata

SEQ ID NO: 229575 - DNA, 456 bp, Glycine max
caacaaagtgatcaaagttcctcttttgagtcttcgtgcttccttccacgatccttctcatcaaacccctcatcatagaaatttggaaaaagggttctgaaatcttagctactgagtgcgtaatcactgagatctgccttcatcctgggttggttttgttgatgggtgcttgctggagtaataggattaagtctgtgagtccttccaatacagggatcacttctagaagtgtcagcaggagtggccatgacgtcagctcaaatagcaggagctcatcagcctccatatccgtcgcttctcggagtgagggtgagatcttgcaatcttccaacttgaaaagcttcagctataatgagctaagagcagccacaagaaatttccgcccggataggcttttgggggagggtgggttttggttcacaattttaagggctggattgatgagcattcacttgc

SEQ ID NO: 229576 - DNA, 623 bp, Glycine max
  unsure (1)..(623): unsure at all n locations
ttcttttgttgtttgtgtgtttgttttttctctcacctgaaaatgtcttgctgcggtggtaactgtggttgcggaagcgcctgcaagtgcggcaacggctgcggtggctgcaagatgtacccagacttgagctacaccgagtcaaccaccaccgagaccttggtcatgggagtggcaccagttaaggctcaattcgagagtgctgaaatgggtgttcccgctgagaacgatggctgcaaatgtggagctaactgcacctgcaacccctgcacttgcaagtgaggtgttggagagctaaagcttcaagcagaaatggcccttagaaataatgataaaaactatatgtagtttcaaaacttcaaaattatgtagtatgtattatgttgcactctggtgttttgtgtctaaacaaacacccttagaataaagtggtcatttcttgcccttgagcaagttcaagtgttttggacttgtgatgggtgtgttaaggtcatgngtgccttttttttatatatatatatatatataaatgtttggtaattggtcgcttctgtataaagttcggctagttaatctgaaatatgaatctctgcttataatataaaactagtactattgctggg

SEQ ID NO: 229577 - DNA, 494 bp, Glycine max
tttcttttgttttttttgttttttttttttcccagcaatggaactagtttaatggtatgggcacagattcataattcagattaactagcccaactttatacagaagcgaccaattaccaaccattgatatatatatatatatataaaaaaaaggcaaccatgaccttaacacacccatcacaagtccaaaacacttgaacttgctcaagggcaaaaaatgaccactttattctaggggggtttggtgagacacaaaacaccagagtgcaacataatacatactacataattttgaagttttgaaactacatatagtggttatcattattcctaagggccatttttggttgaagctttagctctccaacacctaacttgcaagagcaggggttgcaggggcagttagctccacatttgccgccatcgttctgagggggaacacccatttcagcactctcgaattgagccttaactggggccactcccatgaccaa

SEQ ID NO: 229578 - DNA, 633 bp, Glycine max
  unsure (1)..(633): unsure at all n locations
ggatagtgagagtgaggaagatattttggatgaaggggatgatgaggtggaggaagagcatgatcatgaacccgaagaatctttgaaacccgaacctgaggttaagaaggatgctgaagtccctttgccaccaccaaaagagacagaaaggcagctctctaaaaaggaaaggaagaagaaggaacttgcagagcttgaggctcttctagctgattttggagtggcaccaaaacaaagtaaagatggtcaagatgagtctcaaggtgctcaggataagacaggtgttgagactgatggagatggagaaaagaaagaaaatgtccctgcagaatccaaaacttccaagaagaagaaaaagaaggataaagcttccaaggaggtgaaagaatctcaagatcaacccaacagttctgacacaaacaatgggcccgatttggccacaggcaccgaaaatgtggaggaggatacatctactgttgatgtgaaagagcgtctcagaaagtngcttctacaaagaagaagaagtctagtaaagaaatggatgctgctgcaagagctgctgctcaagaggctgctgcanggagtgcanggcttgctgctgcaaagaaaaagagaagaccattatacccgcac

SEQ ID NO: 229579 - DNA, 580 bp, Glycine max
  unsure (1)..(580): unsure at all n locations
ttcaactctgcttcccctggcaaccttcttcttagttctctccgcttcttatctccagattgctggggcgaaagcacaaccgttgactagtctcaagcttaactctccgatccttcaggagtctattgctaaagagatcaatgaaaatcctgaggcaggatgggaggctgctataaatcctcatttctccaattatacagttgaacaatttaagcgccttcttggagtcaaaccaacgcctaagaaggaactgagaagtacacctgctatatctcacccaaagtcattgaaattgccaaagaattttgatgcaaggacagcttggtctcagtgtagcactattggaagaattctagatcagggtcactgtggttcttgttgggcatttggtgctgttgaatcattgtcagatcgcttttgcattcattttgatgtaaatatctctctctctgttaatgaccttcttgcatgctgtggctntctgtgtggatctggttgtgatgggggatatcccttgtatgcgtggcaatacttagcccaccacggtgttgtcactgaagagtgcgaccattatttgatc

SEQ ID NO: 229580 - DNA, 456 bp, Glycine max
  unsure (1)..(456): unsure at all n locations
ctcaagatctgcgccaatcatctcattttgcctactatgagtgtgcaagagcacgctgggaacgagaaatcttgcgtttggcacgctagggattttgctgatggtgaactcaaggacgagcttttctgcatccgttttccttctattgaaaattgcaaaagcttcatggaaacattccaagaagttgctgaatcccagaaggcagaggatgagaaggaatcagctgatgcagctggtcttattgagaaattaagtgttgaagaaaaggctgatgcagagaagaaggatgaagagaagtctgaggacaaaactgtggagaaagaatctgcatcagggaaggaaagcnaggcggttgaagataagaaagccgaagagcctgcatcctcagcttgagtgtttcttattcatattctatacttggcaatctgacaaggtaggtggttgatgtttttgccg

SEQ ID NO: 229581 - DNA, 472 bp, Glycine max
  unsure (1)..(472): unsure at all n locations
gacgcttcttcacccccatctcgcgttggtgcaaagcatccttcgcttcaatctctctctctctctttgcgctttctgcaaaccgaacatttcatctccaaagggatcaacaggtcgaaggagaaatggggctgacattcacgaagcttttcagccggcttttcgcgaagaaggaaatgcgaattctgatggttggtcttgatgctgctggtaagaccactatcctctacaagctcaagctcggagagatcgttactacaattcctaccattgggttcaatgttgagactgtggaatacaagaacattagcttcactgtttgggatgttggtggccaggacaagattcgtcccttgtggaggcactacttccagaacactcanggtcttatgattgttgtagacagcaatgatagggacagaagttgtgaggccagagatgagtacataggatgtngaatgaggatgaactg

SEQ ID NO: 229582 - DNA, 468 bp, Glycine max
aacaaaatctccatttgattatatgaatgatacatgaccaaaataaaactaaaaatcagacaaaacctggtggcacattgaattagtatctacattacagttatgggcgttgcatccaaacccaatagaaagctcagagtattacacatcccaaaaagtgaaatcctactacagtttatcaccgagatgtcctaaaccacattacatgaacacaaattcgagttgtcttggaagaggaccaacatataaacgctagataatgatcaaccctgcatccagaaataccaatccgcaagactcccgtctcccaaaggcattaagccttattggcaatgctgacggaaagccagtccagaccttcgtaaaggccctccccagaggttgcacaggcgctctgaatgtaccagtgacgctgtctcacagagtggagacccatcttgtcagtaatctcagcagcattcattgcat

SEQ ID NO: 229583 - DNA, 565 bp, Glycine max
gtgaaggttagaagtgctacaaacaatggcaactaatcaggaagaggtgtctcttttgggagttgttggaagcccatttgtgtgcagggtgcagattgccctcaagttgaagggaattcaatacaagttttttgaagaaaatttggtcaacaagagtgaactgcttctcaaatacaaccctgttcacaagaaggttccggtgtttgttcacaatgagaagcccatagcagagtctcttgtgattgttgaatacattgatgagacatggaagaacaaccccatcttgccttctgatccttaccaaagagccttggctcgtttctggtccaaattcattgatgacaagattgggggtgctgtatggaaatctgttttcacggttgatgaagaagagcgtgagaagaatgttgaagaatcgttggaggctctgcagtttcttgagagtgagatcaagggcaagaagttctttggaggagaggagtttgggatggtagatattgctgctatcttcatagcattgtgggtccctatggttcaagaaattgcagggttggagttattcaca

SEQ ID NO: 229584 - DNA, 522 bp, Glycine max
atataaagaatttctttattaaatgaaatggccaaaatgggaataagatcctaagttacattacatatagtatcaaattgacatgaaattcaaacatcaataactcaacgagagacaagttgttcacacaagtatccttaaataaatctattttgaatcagcgagcaggctttcgtagcgggctttgaagaaggcaaaaagtgggtctctaggaggaagaacttctttcacaacagggtggctcatgaactcttggctccaattgtagagcttatgaaatttctcacttgtgaataactccaaccctgcaatttcttgaaccatagggacccaaaatgctatgaagatagcagcaatatctaccatcccaaactcctctcctccaaagaacttcttgcccttgatctcactctcaagaaactgcagagccttcaacgattcttcaacattcttctcacgctctttctcatcaaccgtgaaaacagatttccatacagtacccccaatcttgacatcaatgaa

SEQ ID NO: 229585 - DNA, 559 bp, Glycine max
  unsure (1)..(559): unsure at all n locations
ctgaaaaacaaaatcccaatttaactgaagtacgtttcgattatactgaatacacaacattacgacgtaggaataaacattaacatgggccacaaaagaagtacacataacaagctatcacagaaggtcaaaaaaataatccagaccttggccaatttcccagatcgagatgccacattcccatgaacgagcttcctctaaccgcaaagaaattgacttcaaagatggataaaataccacatgcctgatatccttgtcgtcagtgtaaaagaaaaaatgctccccactattcttatcccactgcagttcaggccagtgcttctccaaaagtgccaggtaatctctcccaataatagctgcaccccctgcatctgcatcccttgaaagggagaaatcatttccatagaagttgataccaagaagtatcttgggggcaaggctttgggctctattgccagaggtaccgagaagcagctgtagaacaatttgaatccatgttaaaggtgcattangaccaggattatgaggattagaagaatcatatgtcattaacgagaat

SEQ ID NO: 229586 - DNA, 595 bp, Glycine max
ctctttctctttctctccgacctagcgagaccgagcgatccgatcctaaccccgcgatgctccgccgcgcaaccacctccctcatctccggcgcctcccgccgccgcctctccaccgacgtgccggcgacgccggcggcggattccgtcttcgcggaggcgtggaagaaagtgagccccaacatcgacccgccgaagacgccgctggcgtacatgaagccccgaccacccactccttcgactctcccctccaaactcaccgtcaacttcgtcttgccctacgcttctcaattggccgcaaaagaggttgatttggtcattgtaccagcaacaactgggcagatgggtgttctcccaggacatgtagcaacaattgcagagttgaaacctggtgtcctatctgtacatgaagggaacgatgtgaccaagtactttgtcagcagtggctttgcattcatccatgcaaactctgtggctgatataatagctgatgaggccgtgccggtagaccgaattgatgtgaatctagtccagaagggtctgcaagagttcactcagaaactgaactcagccacaactggattggagaaagctga

SEQ ID NO: 229587 - DNA, 447 bp, Glycine max
aaaaaaagaaacttttgtttgtaattgcaaggtcttgcccaacatccttgagctagattgaagctgttgaaatattattttatcaagtccactttcaacacagaaattcaggatgaaaatgttcttttaacaactttgattaccccgagacaaatcaatgccccacaggggggggaaataaacaaatcccaaaggcaagactcaacactacagtacttattattagcctgaaagagcacagttgagagcgctatggacatcaaccccaatctgagcttcagctttctccaaataagtgggggctgagttcagtttctgagagaactcttggagacccttctggactagattcacatcaattcggtctaccggcgcggcctcaacagctattatttcacccacagagtttgcatggatgaatgcaaagccactgctgacaaagtactt

SEQ ID NO: 229588 - DNA, 590 bp, Glycine max
cgagaaagaaaagcgagagtaacttcgaatctgattttcatcccttaacaccaacgccaacgccaattccatttagatcacagtcccttcgattcctgctgcaacatactttcaaagccctaaaatggaggggactgtcttcactcctgcactgcaagaaattgagcatgtaaagtctgatcaaggagaaattctgagcaagcctttcttggatgcgtgcaaacacatattgcctgtaatagataagtttggagctgctatggcccttgttaaatctgacataggtggtaacatatcgagattggaaactatgtattcttccaatccaaccagatttaactacctgtacagtttggtacaggtagaggttgaaactaaaacagctaaatcatcatccagttgtaccaatggacttctttggctcacaagagcaatggatttcttggtggctttgttccgaaacttaatcgagcatgaagaatggccaatgtcacaagcatgtacagattcgtataacaagactctgaagaagtggcatggctggcttgctagttcaagcttcacagtagtcatgaagcttgctcctgata

SEQ ID NO: 229589 - DNA, 532 bp, Glycine max
cataaaaacagttgttataaattttataattgaatcagacttatacaaccaagcagccatgcatatactgaaccaaagttggatgagtttggttctagccaatcggtaaatgataaagactatactaaactccactagcattaaccttgataataaactaactgtaacaaattttgagataccatagaaacactggtcttaatagagtacttagaggcacaatatgaaagtcgatgcttatttatcatgctgggaaagaaaatatgaaaggggtgtgagcatgcaagagctactcatggggaactgctgaatctgtgattgatgatgccttcatatgatctaagccaaatcgagccaaaaacttgtgattctcttcaaggacaggagaaaaggttgtacaaaatttctcaatggcagcactgatattgccagggcctgctatcacgtccataaacttcttcctatcaggagcatgcttcatgactactgagaagcttgtactaggaggccagccatgccacttctttagagt

SEQ ID NO: 229590 - DNA, 528 bp, Glycine max
agcggatgtagttatgcccacaatgtcggagcggggactgcacattttctcgagcagcttgctgaataatgagctattaacgtttttgggaagagcactttgattggattggctctaacattctttggtggactttgcatactgatggttgcaccagcattaacatatcatcacatgaccaatgggatactctggaaaaagggggtacccatatgacagattatactggattcttttattttccaatatctttgttctggtattgccgtgattctaaacatcaccttagtgtaccaccctgtcctaaacctacccatgttgtaatttaaggcttacttggcagactcagatggcataggctcggccatgtaggctggtctacctctggggttagggaatggtcttcaatttatgggtgctcatgcaccaggatatgcagcagcagatgccgtccaggcacttgcacttgtaagcactttctggtgcgttattctgtttgggcagtcatgaaatcatcatgaataacat

SEQ ID NO: 229591 - DNA, 457 bp, Glycine max
gtgaaggttagaagtgctacaaacaatggcaactaatcaggaagaggtgtctcttttgggagttgttggaagcccatttgtgtgcagggtgcagattgccctcaagttgaagggaattcaatacaagttttttgaagaaaatttggtcaacaagagtgaactgcttctcaaatacaaccctgttcacaagaaggttccggtgtttgttcacaatgagaagcccatagcagagtctcttgtgattgttgaatacattgatgagacatggaagaacaaccccatcttgccttctgatccttaccaaagagccttggctcgtttctggtccaaattcattgatgacaagaatgggggtgctgtatggaaatctgttttcaccgttgatgagaaagagcgtgagaagaatgttgaagaatcgttggaggctctgcagtttcttgagagtgagatcaagggc

SEQ ID NO: 229592 - DNA, 528 bp, Glycine max
atataaagaatttctttattaaatgaaatggccaaaatgggaataagagcctaagttacattacatatagcatcaaattgacatgaaattcaaacatcaataactcaacgagagacaagttgttcacacaagtatccttaaataaatctattttgaatcagcgagcaggctttcgtagcgggctttgaagaaggcaaaaagtgggtctctaggaggaagaacttctttcacaacagggtggctcatgaactcttggctccaattgcagagcttaggaaatttctcacttgtgaataactacaaccctgcaatttcttgaaccatatggacccaaaatgctatgaagatagcagcaatatctaccatcccaaactcctctcctccaaagaacttcttgcccttgatctcactctcaagaaactgcagagcctccaacgattcttcaacattcttctcacgctctttctcatcaaccgtgaaaacagatttccatacagtacccccaatcttgtcatcaatgaatttgga

SEQ ID NO: 229593 - DNA, 487 bp, Glycine max
ggcttttgtatcatgtttctttctctttctgcagaagctatccgtgttacttgttcccaagtctgcaacaagcaaagtacatggttgatttggaaatccaggtccccagcgcattcgacccgtttgccgaggcgagagaatcagatgcccccggggcaaaggagtatgtgcacatacgaattcagcagaggaatggaaagaagagtctgacaacagtgcaagggctgaagaaggagttcagctacgagaagatccttaaggacctcatgaaggacttctgctgcaacggtactgtggtgcatgacaaggagcttggcatgattatccaacttcaaggggaccagtgcatgaacgtatcccatttcctggatcaggccggtcttgtgccgaaggaccaggtcaagattaatgtgttttgattaaacgattggacatgtttatgttgagagagtagtattagtaattcgaagttgttgagtcttgaaaa

SEQ ID NO: 229594 - DNA, 556 bp, Glycine max
cacagagcaagaacactgttccaatacggaatctaaggcaaagcaaaccaaacatcttgaatcatgggttcaacaggtgagactcagattaccccaacccacgtatctgatgaagaagcaaaccttttcgccatgcaactagccagtgcttctgtccttccaatgatcctcaaatcagcacttgagcttgatctgttggaaatcatagccaaggctggccctggtgttcatctttcccccactgacatttcttctcagctcccaacacagaaccctgatgcacccgttatgttggaccgtatattgcgcctattggcttgctacaatatcctctctttttctctccgcactctccctgatggcaaggttgagaggctctatggtctcgcccccgttgccaagtacttggttaagaacgaagatggtgtctccattgctgcgctcaaccttatgaaccaggacaaagtcctcatggatagctggtactatttgaaagatgcagtccttgaaagaggcattccatttaacaaggcttatggaatgacagcctttgagt

SEQ ID NO: 229595 - DNA, 507 bp, Glycine max
atatataatccacaaaatgaaacttgttatttgatattggcagtctacattggacttgttcattattcttttcctaagagaaaattacgtttttccgggaaagctttggaaagtagcaccacaaccacaacctcaatctcaaaacccaaatgcagcttgacatgaatccatgccaaagaacttaaatctttttgagaaattccatgatgttggtattgaaagcacagcaaacaactcggaaaccttggaatccagaccctttggccagagcctcaaactctttctctgttctctctttcccacctggattatgtgccaacatgatcacattgatgtgaaccacaccttttgtggcctagctagagtctggagccactggaagaatgcattctgccacaatcaccttcccattgtctggtagtgcctcgtagcagttcttcaaaaacttcaagcagtgctcattactccaatcgtggcaaatccacttcataaaaatagcatcagctt

SEQ ID NO: 229596 - DNA, 562 bp, Glycine max
  unsure (1)..(562): unsure at all n locations
ctcgagccgattcggctcgagcggctcgagcaaaaaactattttggcttctgcctttccttttccagggagctcattgacaatggctgaaacaaagtgggtcatgaaggacaaaagatggtctctccatggaatgacagctctagtcacaggaggcacccgaggcatagggcatgccattgttgaagagttagctgagtttggagcaactgttcatatatgtgcacgtaatcaagatgatattgataaatgtttagaagagtggaaaaacaagggacttaatgtgactggttcagtatgtgatttactatgttctgaccaacgtaaaagattaatggaaattgttggctccatctttcatggaaagctcaatattctagtgaacaatgctgctacaaatataacaaagaagataacagattacacagcagaggatatatcagccataatgggcaccaattttgagtccgtttaccatttgtgtcaagttgcacacccacttctaaaagattctgggaatgggagcataagtattatntctttcgtagcaggtttaaaagctc

SEQ ID NO: 229597 - DNA, 541 bp, Glycine max
catctaaagaacaaataagataacatggagtcatggggagcaggcaattaacaattgttctgccttgttgaattctgagagaaagacacacgaaactaaacaagaacacatggttatgtttaagaacaggagataaacctaaccaacgacataagcatgagtcgtttggaggaacacgaaacacaagatttaattcagcaacaaaatcattaacaacaatctaagttgtgaaacccccatctacacatataacctgtccagtgatgtatgatgcagccggaaggcaaagaaaagcaactaatgctgatatctctttaggttctcccatgcgaccaacaaatgtttgagacactattccatttatagactcattcccttccgaagaattcacgatacactccaaaagtttagtcttaacaggtccaggggcaacagcatttgcacgaatattatcctttgcccattccaatgccaagattttggtgaattgattcatggcttctttagaggctgctttaacagagaacacaggaagagcttt

SEQ ID NO: 229598 - DNA, 530 bp, Glycine max
gtttcacataacaaaccgtttgcagaacatcccataaaagcttagcttgtattcagtttctcttctcccaacgtttttgtcgctagtaacagaatattacaaagtaacggctttctcaatggagcgcttgatttgggttggtgggtcaacttcaagtttcaatttttttttcatttttgtctgctctctcatcttcatggacagcactcagcagaatcccttcttgattggaaccggcggatgaatatcgcaattgggtctgctgagggaattggatatctccacaaccagtcaatgccacatatcatccacagagatatcaaggcaagcaacgtgttgttggattcggattttcaggcacaggttgctgattttggtttggccagttgatccctgatggggcaacacatgtgactacgagagttaaaggcaccctaggctaccttgcaccagaatatgctatgttaggtaaagcaatgagagttgtgatgtctacagttttggaattctccttctagaacttgctagtg

SEQ ID NO: 229599 - DNA, 617 bp, Glycine max
  unsure (1)..(617): unsure at all n locations
aacacaacaaaacacacataataaacatattacaacttcttcttcttcttccattgaccattgttgttgttgttgcttttgttcgttctcgccatgtcaatgttgtcttcgagaggcttcatcgcttatctcgtatctgctttctcttgtgctgttctgtctgcgctttttctcaccaaccacatccatcatgatgataacaagccaattactttgttagcctctcgtgtgtctgaaactcttaaagtttggccagacttggagccaagttggagacttgtgttggcaacggttattgggtttcttggatcagcatgtggaaccgttggtggggttggaggctggaggcatttttcgttcccatgctcaatctgcttcttggctttgatactaagtctgctgctgctctttctaaatgtatgataatggnggcatcagcatcatcggtttggtataatgtgagagtgccgcatccaacgaaagaggtgcccatattagactatgatctggctcttctgttccagcctatgctcatgctnggaatcactgctggtgtngctctcatgttgncttcccttactggcttnatcactgtctcatcatcattctcttcatag

SEQ ID NO: 229600 - DNA, 570 bp, Glycine max
  unsure (1)..(570): unsure at all n locations
gcacaaaactaccccaccaagcagtgtttttgagaaggttggcaaatactataaagctggttcctcaaccattgctgtggattgttgtggaagctaaaaccaattccacagaactgccagagatattaaggaaaactggcatcatgtataggcatgtggttttcaaggaaaatttcacggaattagaagctgaactgaatcaccagaggaatcttgcacttaagcacattgagcaccacaggctcaacggcattgtacactttgctggcctttccaatgtttatgatctccaattcttccatcagcttagagatattgaggtctttggaacatggccaaccgcattgttagctgcacacaggaagaaagtgaaaatcgaaggacctgtatgtgattcatcacaagtcattggttggcatcttaggaatatgaacaatgaaactgatacaatcactcccccaattcatatttcaagttttgcttttaatagctccatcctttgggaccctgagagatggggtcgcacttnctctgttcaagacacttctcagaattcaatcaagttcgtga

SEQ ID NO: 229601 - DNA, 554 bp, Glycine max
gtgatatctgtttacttcctcccagaccataatgagataaagaagaaaactatgatctattcactttgtttcctagggttggctgtgttctccttagtggttaatatcctccagcattacaactttgcttacataggagagtacttgactaaaaggatcagagaaagaatgttttccaagatactcacttttgaagttggatggtttgatcaagatgaaaattccacaggtgctgtttgttctagacttgccaaagaagccaatgtggtaaggtctttagtgggagatagaatggctctagtggtacaaaccatttcagcagtggtaatagcttttacaatgggcctaatcattgcatggaggttggccattgttatgatagcagttcaacccattatcatagcatgtttctacacaaggcgtgtccttctaagagcatgtctagtaaggccatcaaggcccaagatgaaagtagcaagatagctgttgaagctgtttccaacctcagaacaatcacagcattttcttcccagataggatccttaaaatgctcg

SEQ ID NO: 229602 - DNA, 503 bp, Glycine max
cataagttaccacaaaagaggtttaatactaatgaccaataaatgtgacattttgtttgttttgattagctagctgagatttcatgcgtaaaactaacattcatgtttaatttgctggtcttttttgtgaacttattaaagagttataagctccacctggtccatgagccaacaaagatgagtgggtccctttctccaccacttttcccttatctaacacagcaattaggtcacaattttgtattgagcttaacctgtgagccaccaccacactagttctccccaccatcaccctttctagagcatcttgcaccaatttttctgattggctatctagggcacttgtggcttcatccaacaacaacacttctggattcttcaatatggctcttgctattgcaattctttgcttttgacccccagagagttgcactcctctatcttcacacgatgtgtcataaccatcctttatgcttgcaatgaaatcatgagcattagtctgc

SEQ ID NO: 229603 - DNA, 554 bp, Glycine max
  unsure (1)..(554): unsure at all n locations
gccatctttatagccactggccaagatccagctcaaaatgttgagagttcccattgcataaccatgatggaagccatcaatgatgggagggaccttcacatctcagtgaccatgcccctccattgaggtgggtactgttgggggtggaactcaacttgcatcccaatctgcttgtttgaatttacttggtgtgaagggtgcaagcaaggagtcaccaggatcaaactcaagactcttggccaccattgttgctggatctgttttagcaggagagctgtctctgatgtctgccattgcagcagggcagctagtgaacagccatatgaaatacaacagatcaagcaaagatgtaaccaaaatatcataatcttgaggtcaggacgtggttgcagtcattaaatggtgactccagactaaataaaaaatgagggtaagcgaaatctgggaaggaaaatggagaaacattagattagatggcngtcatccacgtttggctatgcattgctgactgtgtagatctttaattatttggagagaggaaagaagagttctac

SEQ ID NO: 229604 - DNA, 492 bp, Glycine max
  unsure (1)..(492): unsure at all n locations
gttttccttgtttcccctattattatctcgctctcacaaaatcatggcattctctagtgctttgattctgtggtcgttgctagcaatcaacatggccctgccaaccctcgcaaccgtctacacccgtgggagatacttcaggttgggcaattggtactgattatagcacttggactggcgacaagatcttttcagtgggtgatagtctcgcgttcaactatggagctgggcacacagtggatgaagttaaagagagcgattacaagtcgtgcaccgcagggaattctattagcacagacagtagtggtgcgaccacaattgcccttaaaagtgcaggcactcattacttcatatgttctgttcctggacattgttctggcggtatgaaacttgccgtcactgtcaaatcaggaaaagcctctgatgccacacccactacttccactactaccgncactaaatcaaactcgtcttagcgagtagtgtctcacc

SEQ ID NO: 229605 - DNA, 575 bp, Glycine max
gccgctactagtcggcgccgaccttgttttaggcgctcttctattttttatgtttcttttattacgctctttccttcgatctcaggtgttgttgaagcttcctgtgttggcttggtatccttgcaagttcttctgtagcagattccaaagtgaaggtgtcacgttaaagtatctttcatgtatgaacaggctactatccatttgggagcaactgatctgcttggattgtattattcttcttctagaaaaaattacagaccctcaccaccacagacttatgatgtatgaacggttggccaccttccattatccttgaaggagattgttcatggatacaggttaccttataggctgaaatcacagctgcgtataatctgaataccaacatatgctgcctctgaatatacatggaactttgtaggtcaacagacatggctatacagaactattggcgctgcaaactgtgatgaagacctttacaggaataagatgcctatgatgatcaccattatagatagcaggagcaatggcatcaaaactaatgtagtcgatactggtgacattggaaaggccct

SEQ ID NO: 229606 - DNA, 538 bp, Glycine max
  unsure (1)..(538): unsure at all n locations
ccggaatttggtcagtctccaaggctactccttgtccccatatggccatctcctgttttatgactacatggaaaatggcagtctatgggatcttcttcatggacctaccaagaagaaaaagcttgactgggagctgcgtctaaaaatagcacttggagcagcacaaggacttgcttatctacaccatgattgctgtcctagaatcatccacagggatgtgaaatcatctaacattatattagatgcagactttgagcctcatctcactgattttggcattgccaaaagtctctgcccctcgaagtcccatacttctacttacataatgggcacaattggctacatagaccctgagtatgctagaacttcgcatctcactgagaagtctgatgtgtacagttatggtattgttttactcgagttgctaactggaaggaaagctgttgacaatgaatccaacctncaccatcttattttgtccaaggcagcaaccaatgctgtgatggaaacagttgatcccgacattactgccacatgc

SEQ ID NO: 229607 - DNA, 423 bp, Glycine max
acttcacctttcaaattgggaggatgaggatgatacatatttttcctggtcaaatgaaccaaccataaaaaactagtactaaaaactttttataaacatttacattaactattacccctaatccatttttttgcttctcttttttgggttttaaataatatacatgattcttgaaattggttttcatttcaaaatcctctcactcactcactggtttgagagattacttcttcaaacttgaggaagagttgagcatctgaagtgctcattggggggcagtttactaagtggggggttttgagggttgcatactcatccacgtagcatggcactttggcagatggatttgaagcaggtggtaggtcaactagttgctttggtgggatgcttgatggcacgagacttccgagtacacgtgtcact

SEQ ID NO: 229608 - DNA, 568 bp, Glycine max
cccatttggaatgattttgagcgcagcaaagcgttcaccaagaaaatcattgcgaaaatggggaccccacaacctccaaaacgctctgatcgtacaattttcctcctcaacacccaaaatttgcttgatggattcaccaaatgggccattaacaatgtgtccctaacattgccgccaaccccttacttgggttccatcaaattcaaaataaataatgcctttgacaaaactcccccaccagttaccttcccacaagattatgacatcttcaaccctcctgtgaaccctaatacaactattggcaatggggtatacatgttcaaccttaacgaagttgttgatgttatcttgcagaatgcaaaccaattatctgggagtggtagtgagattcacccttggcacttgcatggacatgacttttgggttttggggtatggagaagggaaattcataccaagtgatgagaagaaattcaatttgacacatgcaccgttgaggaacactgctgtgatattttcatatggttggactgctttgagttttaggctgataacccaggagtttgggc

SEQ ID NO: 229609 - DNA, 547 bp, Glycine max
tttctttttttttttttttttttttttttttttttttttttttttttttttttttttttttggtttttgtttttttttttttcttttttttttttttttttttttccccagggggaaaaaaaaaccccccccccccccccatttaaaaaaaaatctttttttattttataataaaaaaatacaaaacaaaccctcaaaaaaaaaaaaaaacacttttttttaccccccccccccatttttattaacaacccccccctttaaaatctctttggggggcaagggggcccccccctacaaaaagggggtatttctccccaactcttcctccacgagcccccacaagggggccccccctggggaactcccccttgtggagccccccccaaaaaaaaccccccccctccccctgggaaaaaggggggcctaatggcaccagggggccccccccccccgggggtgtttaccccaaaacacacaaaggggccccacccttggagaatacccccgggggctccccccagagggggggaaaaaaaaattccccccc

SEQ ID NO: 229610 - DNA, 579 bp, Glycine max
atttgtttttcagagtatgatgctgaagccacctattttgacgaaggtgtgagatcttccaaacaaaagcaactacaagaaaaattgttccaacttgtccaaccagcattccaatctgcgctgggacatataagatctggaactttggataaattcaaggaggcatttgacaagactttgaaaggaggggaaggattttctgtggctgctaataattgcattgggtcttgtatggttcaatttgatgaagcatgcacagatgttgttattgaacaaacaaactgggatacatctaaagtacgagagaaactgctgcgtgatattgatgcacatgttgcaactgtacgtgcaaccaagatttctgaacttacttcatcatatgaggaaaaacttaaacaagctttgtctggacctgttgaagctcttttggacggagctaatagtgatacttggccatcaataaggaatcttttaggcgtgagactgaatagctgtttcagggttctctgctgcacttactgggtttgatatggatgaagaaacaaggcagaaaataattttgagtttagagggatatgc

SEQ ID NO: 229611 - DNA, 537 bp, Glycine max
  unsure (1)..(537): unsure at all n locations
gcaggatgcttgctctcttatgacccaaacctgcggctacccttgtggccctccgccgaggaagcacgtcagcaaatactcagcatatgggacaaggctgatgtaatcaaggtcagtgatgtggaactggaattcctaaccggaagtgacaaaattgatgatgcatctgctctctccctgtggcaccccaatttgaagttgctccttgtcactcttggcgaacatggctctagatactataccaagaatttccatggatcagtggaggcttttcatgtcagcacggtcgacacaactggcgctggtgattcctttgttggtgctctattaagcaagattgtcgatgatcaatccgtacttgaagatgaagcaaggttaagggaagtactcaagtttgcaatgcgtgtggagcaattacaactactaaaaagggagcaattcctgctcttcccacagaggctgatgccctcaacctgatcaaagaggcatagaaatttaatgctagtagctnttggttntctttatatatatgtcttc

SEQ ID NO: 229612 - DNA, 478 bp, Glycine max
gataaggactcaaattttcattcaaccaataatctcaatctcagaatttgaaagaaatcatttggcaaaaccccaaatcatatgatattaccgttaatgcagaatgaggggtaaataaaacaaagaaaaccaagaaacaaaatccatctgaagttgatagcaagcaagtccaacgcgaaaggaaaaggatgaagacatatatataaagaaaaccaaaagctactagcattaaatttctatgcctctttgatcaggttgagggcatcagcctctgtgggaagagcaggaattgctccctttttagtagttgtaattgctccacacgcatttgcaaacttgagtacttcccttaaccttgcttcatcttcaagtacggattgatcatcgacaatcttgcttaatagagcaccaacaaaggaatcaccagcgccagttgtgtcgaccgtgctgacatgaaaagcctccactgatccatggg

SEQ ID NO: 229613 - DNA, 492 bp, Glycine max
  unsure (1)..(492): unsure at all n locations
caggtctagcatatttgacgccaaggccggaatttctttgaatgaaaactttgtaaaacttgtttcctggtatgacaacgaatggggttacagttcccgtgtgattgatttaattgcccacattgcatccgtggcttaaacagttgaggctgatcttggatatcatcgctaaaccgttccaaatttttatcttaatcgagtttattttagtgtgaattcggaataaacacgtgttgctgtgtgtgatatcattgaaaaacacagtgcaatatttgtatttatatttttgagtttgatagacggccttaggtttttcctcctcttgtaagggacggttgactattctgtttcgtcatcacaatcataatataagcaacattttgttttccataaaaaaaaaangaacataaattgaaaagactgaataaataaagtaatggccaataactagtatatacatgttagctaaaactgtacagtccccacaatata

SEQ ID NO: 229614 - DNA, 463 bp, Glycine max
aaccctcatcaattcggcttgtgccatcttatcttcaattataattggattgtatgtccaaacttttctctatttgacagtcacattcaaacaaagttcatacatacctcatcaatcttcccttattttatcttcactttaatcatattttctttcctttcagtgtcccagatggcatcttctatacaagaagatcatcttcaagataattatactcaaaagtgaattcagtcttgattctttgacaccatccatgttgcatgtcatcatttgcaatatggaaatcaaagtacacataagttccctgctcatattcatcggttgcaactttgggctcttcatgccgctgaaaccatgtgttatactttcggtggtatctccaagactgcttctttaactcctttgcagccaaatattgttggtaagtattctgttgataataaaatgcaaagaacagagtatc

SEQ ID NO: 229615 - DNA, 459 bp, Glycine max
cagatcctctctcgcatcttccccaaaaccctaaccctagcccccttcctcttccgctccctcaccaccgccccctctcgtccttccctccccgcgctctccttcctccgccgtatctccgttgcagccaacccctccctccgccgcgtcctcctcccaaacgccccctccctccgcgccctctccacacgcgccaccacctcctccctcaacgaccccaaccctaactggtccaaccgtccccggaaggaaaccatcttgctcgacggctgcgactttcgaccacgtgctcgtcgtcatggagaagcccgagggcgaccctacccgcgatgacatcatcgatagctacattaaaaccttggccaaggtcatcggaagtgaagaggaggcgaggatgaagatatattcggtttcgactaggcactactttgcgtttggggctcttgtgtctgaagagct

SEQ ID NO: 229616 - DNA, 356 bp, Glycine max
  unsure (1)..(356): unsure at all n locations
caatcttcctgcagaaatgataaggtgtgttgaagttttcaaagaattttatcaaactaaaacgaagcacagaaaacttacatggatttattccttgggtacgtgtaatataagtgggaaatttgacccataaaccgtggagctgattgttacaacctaccaggcttcagcattactgctntntaattcgtctgatagactgagttactcagagataatgactcagttaaacttatctgacgatgatgttattagactgctccattccttatcatgtgccaagtacaagattctcaacaaggagccaaatacanaaacaatattgtccactgattattttgaatttaattccaaat

SEQ ID NO: 229617 - DNA, 575 bp, Glycine max
attggtacagcacaggtcgaacttcctcgttgtgttctgttctgtttcgtgtgtacagctctttctgttctctctttcttctccaagcgattcattcaattttcaattcgattcgatcgcattcttcttctacattctcgattccttcctttctcaacaactattatattatgcatcttcgtctccctctctcaccaaccacctagggtttctctccgacgttaggttttttttttcgtttctcgccgggattttgggggcagacttaatctccggcagctatggcctccaacttgcagatgagccctcaggtggagcagatccacggtgaaattcgcgacaactttcgagccctcgcaaatggctttcagaagctggataagattaaagatgccaatagacaaagtaatcagctggaagaactcacggacaagatgagggagtgcaaaaggttgataaaggagtttgatcgtgagattaaagacgacgagggaagatatcccccagaagtgaataagcagctcaatgatgaacagcaatcaatgattaaggagctaaactcatatgtggcattg

SEQ ID NO: 229618 - DNA, 517 bp, Glycine max
  unsure (1)..(517): unsure at all n locations
gaaagatagtgagtgaagtaactgaagagaagaaaaaatgccgtgcctcaacctcagcaccaacgtgtccctcgaaggcgtcgacacctcttccatcctcgccgaagccacctcctncgtcgccagcataatcggcaaacccgaagcctatgtgatgattgtactgaaaggatcagtacccatagcttttggtgggaatgagcagccagcagcttatggagaattggtttccattggtggtcttaaccctagtgtaaacaaggaacttagtgctgcaattgcttcaattctggaaaccaattgtcagtgccaaagtcgcggttcttcttgaaaatctatgacaccaaagggtccaacttccgatggaatggatctacattctgaaatccgaattccatggtacattggttgcggtaccttgaatgttggatggagtgttcattatgtttcaccccgtgttatgtctatgtttgtatcattatataagtacactcgggatttctggtagcctaagcgc

SEQ ID NO: 229619 - DNA, 522 bp, Glycine max
gcctctgccactctctgagtaggactacactgccatggctgcctcagtctccactgttggagctgtcaacggagctccactgagcttgaacagctctggagctggagcttcagttcccagttcagccttctttggcaccagcttgaagaaggttattgcctcaagggtccctaacgtcaagatttcttctggaagtttcaaaatcgttgccgcggaaaaagagattgatgagaaacaacagacagacaaggacagatggaaaggtcttgcctatgatgtttcagacgaccagcaagacatcacaagagggaagggtttggttgattccctcttccaagctccacaggatactggaactcactatgcaatcatgagctcttatgagtaccttagcactggacttaaacagtacaacttggataacaacatggacggtttttacattgctcctgcttttatggacaggcttgttgttcacatcagcaagaacttcatgaccctgcccaactcaaggttcctctc

SEQ ID NO: 229620 - DNA, 533 bp, Glycine max
gagaaagacatcaagactttaacattgcacacattgtaaaatgtagacaatgtaactcaaaattatacaggataacaatccaatatgaacaagataacttattttattatctcaactcttagcttctctccaagtggagaatgcttaggttctcagggtgtgtataagcaggttccatcatcacttcttgcagttgggtcgaagtttgaggcatttggatcagtacaaccttcaggaacgggaatgtttacttgctgagctgctttgccatagaaagttcctctgttgatggaatcttgattagcatcaccaagagcagcctctttcaagtacttgtctgccagttgtactctcttcacattctcttgttcttggacaagcatgttaccatactccaagagcttgctcaaagtcatcttcggttggtcaaaggttggaggtccttccttggagttcacaagcttcttcccaatgaagtcaacaccaacaacagaaatccacttcctcacctaatcatgatatactctagccct

SEQ ID NO: 229621 - DNA, 590 bp, Glycine max
  unsure (1)..(590): unsure at all n locations
atcgtaagcagcggctaccctaatcctctcctcttcctctctactaatttcagctatggccgacgaagctgtggttgttccagatcccacccagatcgatgtcaagctctttaaccgctggagcttcgacgatattgagattactgacatttctctggctgattatatcggagtggcgacatccaagcacgccacgtatgtgcctcacaccgccggcaggtactcggtgaagcggttcaggaaggcgcaatgccccattgttgagaggctgaccaactctctcatgatgcacggtagaaacaatggcaagaaactcttggctgttaggatcatcaaacatgctatggagattattcatttgttgactgaccagaaccccattcaggttattgttgaagctgttgtcaacagtggtccacgtgaagatgcaacaagaattggttcactggagttgttaggagacaggctgtggatatctcacccctaggcgtgttaaccaggctatctatcttctaacaactggagcacgggaagctgctttcagaaatattaagacaattgcagaatgctnggctgatgaactattaatg

SEQ ID NO: 229622 - DNA, 498 bp, Glycine max
atcaaattgcaagagacagaaaagaatcgtaagctgaatgatcttcttgatgctctggatttcaaccaagtagttatttttgtcaaaagtgtcagcagagctgccgagttgaacaagttgcttgtggagtgtaacttcccatctatctgcatacattctgcaatgtcacaggaagagagattgaaacggtacaagggcttcaaagaagggaagcaaaggattctcgtggcaacagatttagttggaagggggattgacatagaacgtgttaatatagctattaactatgacatgcctgattctgctgatacttacttgcacagggtgggaagagctggcagatttggcacgaagggacttgcaatactttcgtgtcctctactgctgactctgaggttcttaatcaggtgcaatctaggttagaggctgacataaaagagcttccttgacagattgacacttcaacatatatgccaaactgatgacgctgtggaacta

SEQ ID NO: 229623 - DNA, 569 bp, Glycine max
  unsure (1)..(569): unsure at all n locations
agcactatagtaaaaaaaggacattcattcatctatggctacccttattgctcccagcaaccactctccccaagaagatgctgaagctctcagaaaggcttttgaaggatggggaactgatgagaacactgtcatagtaattttgggtcatagaactgtgtatcagaggcagcaaatcagaagagtttatgaggaaatttaccaggaggatcttgtgaagcgcctagagtctgagatcaaaggagactttgagaaagccgtgtaccgatggatactggaacctgcagatcgtgatgctgttttggccaatgttgccatcaagagtggcaaaaactacaatgtcattgtggaaattgccactttnctctcccggaagaagctttggccgttagacgcgcctatctcaaccgctacaagcactccttgcagaagatgttgcagctcatacctctggccatctacgccagctnttagtggggctnggtgaccgcattcaggcatgttggtgatgagatcaatcccaaatggcacaatctgaggcctgaaatcttcatgatgctngtaaagag

SEQ ID NO: 229624 - DNA, 533 bp, Glycine max
acatcctcaacaagaagatattatttatttacatttgaaccaaaagtgacattgcaaagtaaaaaaaaaaaaaaaaagctggcaagaaaccaccattgggaacaaaccagtagagtgccattttttctttggcttattatgaacttacccttgtctaccacatgatctcaagtttaaacagaagaacttgagagtagaaggtagagacatgctctatatgctatagagaaaattcagtaaggccaagaccaaatggcttgatcttcctccggaattccaaaattacatgaaccatgaggtgggtcggagtaatcaacatcttcaagcttgggaaaaatgtaatgaggtaaaagggtcttgctcaaggatctgcttcatcctgggacacataaaatcgatcaggttcgaacacatacgaagaatcaccagtctatagaagtgcatagtgaactccatcagtgtattgtgggctttctgatgaatcaaatttgtaactcttggttgagctaattgtcctccggtttccaggcctt

SEQ ID NO: 229625 - DNA, 572 bp, Glycine max
cttttgcaccgcaaacagcttcacttcacactctactcccaaaatggcggctgctacgacgtcgtattcttccgcaatcgccgcctcgtccgataccctagccaaacctgcttccaccagaacattctccgccaccaacctcgcccttcaatcgtcgtcttccaagctcggtttcaaatccctaaagcttcaccgatgcgccgccgccgccggctccgccctcggcgcgcggatggtgtcggcgccggcggtcaaggcccccgcactgctcgatttcgacacgaaggttttcaagaaggagaagattaacctcgctggacacgatgagtacatcgtaaaaggaggcagggatttgtttcacttgttgcccgatgctttcaagggtatcaagcagattggtgttatcggttggggatctcagggacctgctcaggctcagaatctacgggactctcttgctgaagcaaagtctgatattgtggtcaagattggactcagaaaggttctcgtcctttgccgaagctcggcagctgggtttctgaggagaatgggactctatgtgacatatggga

SEQ ID NO: 229626 - DNA, 323 bp, Glycine max
ggacaccaagtaacgttcctcagtggcagaacacaggcgggtacaaactgtaaaatgacaatacaacttacacactagcatccaatcatgaaaacccaaactaacaagataactgcagttctgagaaatctgaaaaagattcgaagtgaaagccataattgcttttaagttctaattgctagaacgcaactccggacgaacaaagtctgcatctggtggcacagaaatgtctactgtgggtctcagttcagcgcaaactttaatggcttcgtgcactgggtctgacaagaaagtgctgattaagtccctgttaacaggagttc

SEQ ID NO: 229627 - DNA, 481 bp, Glycine max
ctctgaccgggaaaagaaaaaccagctttcttcaagcacctagatttcctctctctgtaaagggcgttctctcctttcctgggcaaagtccttttggcctccgtttccatcctttccgtttaccaaggatttaaatcctaatggagttgatgggggaccgcaaccaaagcccttcgaccgcaaattgagggccttggacaataaggtccatctaaaagtgggtcttcaacttccagtattggatgtaaaattttaagggtctggctcttgctctcaagggccttggagggattcttttcatactcagcagctcttttggagctttccctttgctcttgcatcaagtgatcacttcttccatactgtgtgagatctacaattatcacagtgaggacacagaatttatacaacttttcatcaaatttactcataatatggctctcttcggggcattgttgtttttcattgggaagaaaaactc

SEQ ID NO: 229628 - DNA, 587 bp, Glycine max
  unsure (1)..(587): unsure at all n locations
attcaagggagctgaaattgccatggcatcttattgttctgaacttcaatatttggcgaatccggtgacaagccacgtgcaaagcgcggagcaacacaaccaagatgtgaactctctggggctgatttcatcaaggaagactcatgaggctattgagatcctcaagctcatgtcctccactttcctggtcgccctttgccaagccattgacttgaggcatttggaggagaatttgaagaacacggtcaagaacgttgtgagtcaagttgctaagaggactctcaccacaggtgtcaatggagagcttcacccttcaaggttttgtgagaaggacttgctcaaggttgttgatagggagtacacatttgcatacattgatgacccctgcagtggaacataccctttgatgcaaaagctaggcaagtgcttgtggactatgcattggccaatggagagaacgagaagaacacanacacatcaatcttccaaaagattgcaacatttgaggaagagttgaagaccctttgcctaggcagtgnangtgcaagagtgcatatgagatgaccatgtgcaatttcaacagatca

SEQ ID NO: 229629 - DNA, 364 bp, Glycine max
tcctttttttgtttttctgaatggttgttttacggcaaacacttggaattctattacatgatcaagtccctggtccttgcgtggaatccatcagggaaagctgggagttgttaatgtggcaggtagccgtgacgatctatacaacgtgggaagttcaaccaagaggttgctctatgaaagactgtatataggactggttataacagatggctacgtataggaagaagcggccaatttaactctccagggccttccagcatgtgcttcaatgagtgatccttgctacaatgcattgtacactccgtggcactcttcacccggtgaaattgccctttcaccatgatcaatggtccccctgctgcat

SEQ ID NO: 229630 - DNA, 425 bp, Glycine max
cgcgaaattctgttacggcgtcaacttcgagataacggtccacaacgtcgccgttttgcgatgcgccgcggagttcctccagatgacggatcagtactgcgagaacaaccttgcaggccggacagaggagtttctcacgcaggtcgcgttcttcacgcttaccggcgccgtcacggtgctcaagtcctgccgccatctcctcccctatgctgacgatatcaacgtcgtgaaacgctgcgtcgaagccgtcagcgccaaggcctgcagcgaggccaatttccccagccgctcgccgccgaactggtggacggaggagctcgccctcctcgatatcgatttcttcgccagagtcatcgacgccatgaagcagcgcagcgcgaaggctcttaccgtcgccgctgcgctcatcacctacacggagcgcg

SEQ ID NO: 229631 - DNA, 578 bp, Glycine max
gaaaactataagaattctgcacatacacgacacaaattgcaaacacaaaaaaaataaaaaagaagaagaaagaaaccgtgatgaacctcgcataattaatatgctcataatttaattcaattcaaatttcgtctaagacacagagaaccttctccttcggggcttggtcaaatccacgttcccatcttccaaatgggtcgtatccttcgacccgtttctaaacgggttcaacttccccagcgttttcgacacggaagagaagaacgtggccttcttagggttagggttcgcagcagacgacgtcgttccatgcccctgagggttcgcgccattattagtgttcttattctgctgcaaatccgaaatgtacatcttcatcttcattagttcagttctcaactcctcgttctccctcaccaaggtcacgtccatctgaagctgattcttcttcgtcgccacttcacgctcctccgtcccgctcctcagccgtagctggtcgtagtaaagcgcgtgcagcacaatctgcaccggcaatcgcttgttctgcgacgcgtgcacacgcgccttgtatgaaagct

SEQ ID NO: 229632 - DNA, 557 bp, Glycine max
gcttgccccattgcacttccttacagcttagccttccctagcccaaccccataagcctctttctctctctcacccttgcatacgtttctttcactgtactttttgacacacacacctaagacattcatcagaggaagagagaatgagttcatcctcaggtcagagcagtggctatgatctctctttcaagatcttgttgattggagattccggggtgggaaaaagtagcctacttgtcagctttatttcaagttctgttgaagatctttcccccaccattggtgttgattttaagatcaaaactctcacagtaggtggcaagagattgaaattgacgatttgggatactgctgggcaggaaaggttcaggactctaaacagttcctactatagaaaagcacaaggaatcattctcgtttatgatgtcacaaggagagaaacctttacaaacttatcagaagtgtggtctaaggaagtggaactctactcaactaatcaggattgtgtgaagatactagttggaaataaagttgatagagatactgaaagggctgtga

SEQ ID NO: 229633 - DNA, 408 bp, Glycine max
caacacataaatgatatagtcattcgtaggcaaacaaatttacacaggctaatagacgccattgttgccaatttccccattccggtaatacaagtaattacgcaatcaaaagacagtggcagaagaaactaaggaagaagcttacatatacaagacttgtcaaagattgctagttaagaagactcaatgtccacaccacgatgttgtatcattttaagagcaacaaccaccattttgggatgcttgggattcttgttttggttttaaaacactccttttaactgctgttgatccttcttccaaaagactaggggcttccattatctttagagcaagttcctcaaagcactgctccacattttcccttgttttagcactacattcaagaagcaaacaccccaatttttt

SEQ ID NO: 229634 - DNA, 536 bp, Glycine max
  unsure (1)..(536): unsure at all n locations
gaaacagtgtgtgttgtgttgtgttgtgtcggtggcatttttgttggttcgagtgagcgagggaagatgtactctagagattcatggggtggtccgttggagataaacgcgacggactcggcaacggaggacgagcggagccggaacctgcaggacgtggacagggcggcgctgtcgcgtcccttggacgagacgcagcagagctggctcctaggccccggcgagcagaagaagaagaagtacgtcgatctcggctgcatcatcgtcagccgcaagatcttcaagtggaccctcggcaccctcctcttcgccgccttcctcgccggcctcattgccctcatcgtcacacctcgtcccccgccaccgtcacaaacacccccctgccgacaactacaccctcgcccttcacaaggccctcatgttcttcaatggccaacgatcggngaagttaccgaagcataacaatgtgtctcggaggggaaactcggngatgcatgatgggaaatcttcggatcattctgctgcgattatgatct

SEQ ID NO: 229635 - DNA, 503 bp, Glycine max
gagtaaaactgtgaaggcattagatgaaactgtcaaacaggtacaagctgttcagtttttcatgtttaaagaatacaagatttgatttagatacatatatactatatgtgtatcacaaaaatttaaagagacacactctcaagtaccactttatcaattcttaatgctaaatcttgagtcgatcattggccccaggcagctatattcagtaggccaagctccatttcttctatttctcaaagctttttttctgcaaaattaccttgatctttcagttgatacaaaacaacgaaggttaccggtgcactcaaatcatctgggatacttgctagaaagaaataaccaatggcatgatgcgcttatggtttccatggtgctggtggtggtggcggtgtaagaaacattgggggaacagcagagaaaatggtatttttgccaatcgatgtgcttttgtcgcctgacaatgccactagtgctgcaactaaaccagcattttcagcaag

SEQ ID NO: 229636 - DNA, 107 bp, Glycine max; identical to SEQ ID NO: 184843

SEQ ID NO: 229637 - DNA, 108 bp, Glycine max
gtaaaaagcaagtaacattaagttggattcggatacacaagataattggacattatgtgaagtacttcaccaaacacaaatctaaaaactctcaaaagtcatttcgtt

SEQ ID NO: 229638 - DNA, 557 bp, Glycine max
caaaaacacacacacacacaaattctcaaacccaaatcccaagtctcctaaaaccctaattcgcagtgaaaatgagagaaatcttgcacatccagggagggcaatgcggtaaccagatcggagcgaagttctgggaggtgatatgcgacgagcacggcatcgaccacaccggaaagtacagcggcgactccgagctccaattggagcgcatcaatgtttattacaatgaagccagcggcggaaggtacgttccacgcgccgtcctcatggatctggagcccggcaccatggactccgtcagatccggcccctacggccagatcttccgccccgacaacttcgtctttggccagtccggcgccggcaacaactgggccaaaggtcactacaccgaaggcgccgagctcatcgactccgtctcgacgtcgtacgcaaagaagccgagaattgcgactgcttgcaagggttcacgtgtgccattcgcttggtggaggaacgggttccggcatggggacgcttctgatctcgaagattgggaggagtatccggatcggatg

SEQ ID NO: 229639 - DNA, 306 bp, Glycine max
gtcaacaaaacccagtttatacaatgtcaacaatcaacaataagcgtacacattaacgagtcaatctaatttgactgcatcacaattttaaacttacaccactcgttcaaagccaacccatattgatatttgaaacaatttttgacaaataagagagatgccttaagcaccaatcttctcttcttccttctcttcctcatactccttctcatcagcagtagcatcctggtattgctgatactcagcaacaagatcgttcatgttactctcagccttggtgaattccattttggccatttccttccc

SEQ ID NO: 229640 - DNA, 176 bp, Glycine max
tttttttttttttttttttttttttttttttattttttttatttttttttattttttgggttttatatataataccccacacaccacaataaaaaaatccccacccccccaaacaaaaaagaaaagaaaaaaaaaacatacctcaaaaaaaacacgggaaaacaaacgccaacgat

SEQ ID NO: 229641 - DNA, 472 bp, Glycine max
agcaccacaatgaacaactagagcataatgaaaatgtctcatctgtccttgatgccctttactgcgatgaaggaaagtgggaggatgaagaggaggaggaagaagataatgaagaaaggtgaagtaacaacaaacactggaacttctcttttccctctgctcatgttggagcaagacttgttctgggaagatgaggaactaaactctctcttttccaaagagaaggttcaacatgaagaagcctatgactataacaatctgaacagtgatgataatagcaatgataacattaataataccaataatgtgcttttggactctggtctctctcagcctcgtcgtgaggcagtggaatggatactgaaagtcaatgctcactatggatcctctgctctcactgcaccactggccgttactaacctgtataggttccttctaagcttccattttcaaagggagaagccatggatga

SEQ ID NO: 229642 - DNA, 486 bp, Glycine max
ggaacaaaattgttcccaatttattatagaaaatatgatataaaatatgtccaaatttggtatggtctatatgagacccattgaacaattaaaaaagagtgcctgaaacatattatagagtgctgatgattgtcttcaattcttcattgccaactctgtcctccttttccctcagagatagaccactcattcctgaaccaccaccaccttgcctttttaagaaatgttaaatgaatgagggacattgttggaaatgaagagatacattttgaggggaaggctctgaagttcagcaacatgcatggaagactaattaccacagtaaataaaatataagacttcttttttggtttgtgaaaggggtatttaattaaggagaggtgccaacaattccgacaatgacccggttaagtggtgacaatttcatttgttggccttgggttctgctcttcttgaagagaggctctggtggtgaatataatgatg

SEQ ID NO: 229643 - DNA, 620 bp, Glycine max
  unsure (1)..(620): unsure at all n locations
cagaaatctccattctccaaaactgcttcaactcttctcattctctctatctctctctctgcctcacactggagtaccctcttcaatttccatcaattaagtttctctaataccctctgaatcatcatcatcatcatcatcattagtcatggctcttgtgatatattttgtgctttttcttgccctcactggccattcaagtgctctttactgtgtatgcaaagatggtgtgggtgatcaagctcttcagaaagcaatagactatgcatgtggtgctggagctgactgtacccctattctccaaaatggagcatgtttccaacctaacactgtgaaggatcactgcaactatgctgttaatagctatttccagagaaagggtcaagctcagggaagctgtgatntttctggtgctgccacccctagtcaaacaccacccactgcagcatnctacatgtgtttacccntctagtcctagcaatgctggaacaggcaccacagcaactccaacaaccactacaccaacaacaggcacaccacccaccaccttaacttcaaaccaccccactactaccactccaggcacaaccacccgtaccagcccaaccactggcactggt

SEQ ID NO: 229644 - DNA, 547 bp, Glycine max
ctcaaaatggcagagaattccaacggcaatggcgtctacgtcgatgaagaagaagaagaagaagaaataaagttgaagcagaaaaagcaaagactgaaagagaccttgccggaggtccttaaccgcatcgcctccgccattctcttccaggaacccgccgatgccggatccctacttcgccggatcaaggtctccgtcgccgacaacgctactctcctccccgaagcttccagaaactccgcccgcgacgttctcatctggactcgccgcggcactcccttccgcgcgctcttcgtcatctccgttgggacggtcacttttgttgctttgacagggctgcttgtgtttatgcttttctttctagctgcgaccgtaaatgccattgtcatatcgttactgatgtctttggcagctgcaggaggattcctggctcttttctttgcttttgttacagctatatacattggagcattatcaattgccatatttgctatttcagttaccacattttggggcaatgtggctattctgatgatcacaggctgga

SEQ ID NO: 229645 - DNA, 609 bp, Glycine max
  unsure (1)..(609): unsure at all n locations
ctgaagtgagagatagttcaacctgcattgacaatggattatctggctctcatggagctgagatgaagaaaatccataatgcaaatgatgaaggtttgactagcaggtcaccatttggtccatccttggatgtggcaagaggggatgtatccgggaatcctgtggtgaaaattgcacataagtttgataatggtttttcctccattagtatgtgttctcaacctcaaagcatgcttcctccagtgccaaaccaaaatattcaatttccagtgtttcggacttcttcagcaatgggttattaccatcaaaatccagtttcattgccagctgctccacaaatgggttgatgcctttcccacacacaaacccctacttatatgctggcccttttggaatagcttaacgaggatccacgcttctgcttgcagtatggtggcttacagcaaccaacacccctatttaacccagttgcatttccagtttatcagccaatcgccagagctaaaggcttaaatacagaggaatcgactctaatgtccaagnccacatctatgctgccagagcatcttnatagatctttcagtagaaaaggtttctctaaccggagct

SEQ ID NO: 229646 - DNA, 474 bp, Glycine max
  unsure (1)..(474): unsure at all n locations
ggtacggcaagtggccccaatcccagaagctcctcatcaaggacttcctcaactcaatctccgacgaccaccaccgcgcctccccctctccctccgtctccgactggtggcgcactgtctccctctacaccgaccagaccggcgccaacatctcccgctccgtctccatcgccggcgagtactccgacctccgctactcccacggcacacacctcacccgcctctccgtgcaggacgtcatcgccaccgccgtccaggccaagcccttccccgtcgaccaccgcaacgggatctacctaatcctcaccgccgaagacgtcaccatggaagacttctgccgcgccgtctgcggtttccactacttcaccttcccatccaaggtgggttacacgctcccttacgcctgggtggngaactcangaaaacagtgtcccgaggttngcgcttatcccttcgctgttccccgctacatgg

SEQ ID NO: 229647 - DNA, 568 bp, Glycine max
ggagaagataaaaatgaatatcgccattaataataaaaaaaagcatcattaggtgtatgatacatagatagggtaagtaagcaaaaaaagagttgcaggcagagcttgtaatgtatgaaggaattcaatccaaagcattgggcccagcacaagccttcaaaacggggctccaaatccactgcactagaaacttccgtccattcctaccgttaagattaaaggttctcccttcaccatctttcataacggaaccaatataaccgtcgccaccacccgttccgtacaacccctggcacaaatctccgatctcggttggcgcggtggggtcctcgccggcgtaccacgcgttcaccagcgggttcgacgagagctccgccagcttgtgcccgatcacgcttaccatgccgttcacttcgacgtctccgttcggcggcgtgaggtggccggggccgtcgacgcccatgtagccgggaacagcgaaaggataagcgcaaacctcgggacactggtttcctgagttccccaccaaggcgttagggaacgtggtacccaccttggatggaaggtg

SEQ ID NO: 229648 - DNA, 570 bp, Glycine max
ggagaaagagaaggagaaggagagggaaagagaaagaagggagagggaacgggaacgggaagagagagagaggtctcggaggagtaggagtcgttccgagagagaaagagaaagagaacgggatttcgacaccagagatagcaggagatttagggacaaaaaagaggcagcggagcccgaggcagatccagaaagggatcagagaactgtttttgcttaccagatgcccttaaaggcatcggagagggatgcttatgaattcttctcaaaagctggcaaggtgagggatgtccgtctgatcatggataggaactcaagacgatctaaaggagttgggtatattgagttttatgatgcaatgtcagtgccaatggcaattgctctctctggccaacttcttctaggacaacctgtaatggtcaagccttctgaggctgaaaagaaccttgtccaatctaatgctaccagtggagctgctggagtagtaggaccatatggagctgtggacaggaaactatatgtggggaaccttcactttaacatgacggagagtcaattgagagagatttt

SEQ ID NO: 229649 - DNA, 565 bp, Glycine max
agaaactgtactacttgattcttcactgggttgcaagatgtgtggatttgggctctgcaggctggtgagcgaggagtctctcctccgtcctagtttccgcttgagcactgaaccaaaaggtgctttcacatatacagatccagagtttcagagaactggaatactaaccaccaagtctgacatctactccttcgggctcatcattttacaacttctcactggtaggactccagttggattagcagttttagtacgcaatgcagtttcatgtggaaagttgtcttcaattcttgattcttcagctggagaatggccctcagctgtggcaatgcaattggttgaactgggactgcaatgctgtcaacaataccatagagacagaccagagttaacacctacacttgtgagagaattggagcagttgcatgcttcagaagagcgacctgtaccatcttttttctcatgtccaatccttcaagaaataatgcatgatcctcaagttgcggcagacggatttacctatgaaggagatgccatacgtgaatggttggaaaatggacatgat

SEQ ID NO: 229650 - DNA, 560 bp, Glycine max
  unsure (1)..(560): unsure at all n locations
ctcaaacgccgtgatggccctcgtccgccaccgccgccaccccaacctccgcctccccctcccggagccctccgagcgccgcccccgcttcccccttcccctccctcccaccaccaccatcgccaaaccctccgccggcgacaccatcgcctccgccgacctggagaagctcgccgtcctcggccacggcaacggcggcaccgtctacaaggtccgccacaagaccacctccgccacctacgcgctgaaaatcatccactccgacgctgacgccaccacgcgccgccgcgccttctcggaaacatccatcctccgccgcgccaccgactgtccccacgtcgtccgcttccacggctccttcgagaatccctccggcgacgtggcgatcctcatggagtacatggacggcggcaccctcgagaccgncctcgccaccggcggcacgttctcggaagagcgactcgccaaggtggcgcgtgaacgtctcgggggctcgcgtacctncacgcgcgcaacatcgcgcaccgcgacataaagcccgcaacatcctagtaaactcc

SEQ ID NO: 229651 - DNA, 324 bp, Glycine max
  unsure (1)..(324): unsure at all n locations
aatcatcgaagtactcaaattagcatggctgtcacggttgcattcttgaatttgatcatcatgttttcagtagtctctacaagcaagtcactgagcttaaactactattcaaaaacatgcccctgatgtggaatgcattgttgccaaggcagtgaaggatgccactgctagggacaaaactgttccagctgcacttctgcgaatgcacttccatgactgtttcgttcgggggtgtgatgcctctgtgctgctaaattcaaaagggaagcaacanagcagaaaaaagatgggcgcaccaaatgttntctttgcatgcattctatg

SEQ ID NO: 229652 - DNA, 501 bp, Glycine max
gcgcccgttttttttttttttctatacaaaatgatatattttattacacttcagtataaatatacatgatttctgtgatatgaggaaaaagacataatacttcttgccatctaggaaatttgatccaacaagttcatacttctaacttggttgaaacatcaatttaacttgaattaatttaagactttttaattgatcactctgcagtcctttctaacctcctgtccaccattgatgctactcattttgatcatggactttgcaaaagcgtcataaaaagccttttttgaggtggcaaacttcgcaaccagatttttagtgtctgggttgtcaagcaaaacttgatcagaagaaaacaagcctttctgttggaggatcaacctgtcatatgtattatcaaaaggtgctgctgaagggtccatagaggtgcctgcattttttgccctgatttttagtggacaaattgatatcaggtttgttgcaaatgatggctttaatgaa

SEQ ID NO: 229653 - DNA, 339 bp, Glycine max
gattaccttgccagcaagactatttgttcagatgatttggtagttgtctcgccagatgttggtggtgttgccagagcacgtgcttttgccaaaaaattatctgatgctcctttagctattggtgataaaaggcgccatgggcataatgttgctgaggtgatgaatttgattggtgatgtaaggggaaaggtagcagttatggttgatgacatgattgatactgctgggactattgccaaaggtgcagctctgttgcatcaagaaggggcaagagaagtctatgcatgcactacacatgctgttttcagtcctcctgctattgagaggttgtcaagtggt

SEQ ID NO: 229654 - DNA, 456 bp, Glycine max
  unsure (1)..(456): unsure at all n locations
ctctctgtctcgtttacacatctctccaacctttcactttcgtttctcagttttattcgaatccctctctcaatctcctttccaaatggccagcgttgaggttgcacagcaaacaccaacaacagttccagaaaatgaaacaaccgaggtaagcaagacccaggaaacaaccccagtcactgaggctcctgcaacagaacaaccagcagctgaggttcctgcaacagaacaaccagccgctgaggctcctgccccagaatcaaccaccgaagcaccaaaggaagaaaccaccgaggcaccaacagaaacagtagaaaaaacaactacagaagtagccccagaggagcctaaagaagttccagttgagaccgaagangtggtggcaaaggagacagaggaagagaagccagcagaagagaaatcagaggaagaaactgaagaagtgaaagaagaagc

SEQ ID NO: 229655 - DNA, 590 bp, Glycine max
  unsure (1)..(590): unsure at all n locations
attttggcttctcaaaaccccactcatcatccatatcacaaaaaactattttggcttctgcctttccttttccagggagctcattgacaatggctgaaacaaagtgggtcatgaaggacaaaaagatggtctctccatggaatgacagctctagtcacaggaggcacccgaggcatagggcatgccattgttgaagagttagctgagtttggagcaactgttcatatatgtgcacgtaatcaagatgatattgataaatgtttagaagagtggaaaaacaagggacttaatgtgactggttcagtagggatttactatgttctgacaacgtaaaagattaatggaaattgttggctccatctttcatggaaagctcaatattctagtgaacaatgctgctacaaatataacatagaagataacagattacacagcagaggatatatcagccataatgggcaccaattntgagtaccgttaccatttgtgtcaagttgcacacccacttctaaaagattctgggaatgggagcatagtatttatttcttccgtagcagggttaaaagctcttctgtgttctctggatatgc

SEQ ID NO: 229656 - DNA, 521 bp, Glycine max
acgaggaattgaagttatgtttcatctaaagaacaaataagataacatggagtcatggggagcaggcaattaacaattgatctgccttgttgaattctgagagaaagacacacgacgctcaacgggaacacatggatatgtttaagaacaggagataaacctaaccaacggcataagcatgagtcgtttggaggaacacgaaacacatgatttaattcagcgacaaaatcattaacagcaatctaagttgtgaaacccccatctacacatataacctgtccagtgatgtctgatgcacccggaaggcaaagaaaagccactaatgctgatatctctttagtttctcccatgcgaccaacgaatgtctgagacactattccatttatagactcattcccttacgaagaattcacgatacactccagaagtttagtcttaacaggttcaggggctacagcatttgcacgaatattatcctctgcccattccaatgccaagatgttggtgaattgatcatggct

SEQ ID NO: 229657 - DNA, 330 bp, Glycine max
atccatatgggcctcctcgaccacttgtgggacgacaccgtcgccggcccaaggccggaaaacggtctcggcaagctccggaaacaccacaccttcactttccgacctagctccggcaagggaagcggagggcgggagcgtgagatcgtacggtgacgaatcgtcggaagaagcgactagagtgacgcgtaatatcatgaacgggaaaccggcaaggtaccaaaatggatcggcttcgggttcttctggcgggtctacttcttcgatttcttcggtttccggaagaaaagattcgcttcgggttccaaaaaggtccggatctgatgccta

SEQ ID NO: 229658 - DNA, 485 bp, Glycine max
  unsure (1)..(485): unsure at all n locations
atcagtgcctccttctggtctccctggtgttggtctcctacgctgcccggtcggaatcagcgctgggcggctggagccccatcaaggacgtaaacgacagccacgtggcggagatcgccaactacgcgctgagcgagtacgacaagcgttctggggccaagctcacccttgtcaaggtcgtcaagggcgagactcaggtcgtttccggcaccaactaccgtctcgtcctcaaagccaaggatggatccgccacggccagttacgaagccatcgtctgggagaagccttggctccatttcatgaatctcacttccttcaaaccccttcattaatcttagacccatacttttcttcactttctctcttatcatatttcatgtgttagctattctgtttttctcaataaggttcctgtcatgtgctaatgaatctanattgtatgttggattatggattcctctattctctcgctctcgggtttttct

SEQ ID NO: 229659 - DNA, 603 bp, Glycine max
  unsure (1)..(603): unsure at all n locations
gttctagatcgcgatctagaactaggagtctgtctgccagaggagtgatgaggaagggaattgttcccctcctacacaagaggaattggcggcagaaattcataggttagagttgcatgcctatcattgtacaattgaggcattgcatgcatcaggacccttaagttgggaacaggaagcattaatgacaaacctccgtctttcgctccacatatcaaacgatgaacacttaatggagctaagaaatttgatttcttctgaaaacagcattcctttcagatgacaggaatttttttcctcttcaatttaatactttttccctaggatagagtttcggaatagtttgatctcagcctcattcaactgtaagaagaaagatgaaatatttcggtccttcatttatgttttatgacttagtgatatagtttgatgtgaatgtacantgctaacttcgtaataagtgatcatttctgaactctgtaatcagttcatctatgatatatcctcttatttccataggcttgtctggagacattctataccggatcttttgaacctttgtacatttagatttgcagacactgtagactgactgatactgga

SEQ ID NO: 229660 - DNA, 464 bp, Glycine max
  unsure (1)..(464): unsure at all n locations
ttccttcaccgccacgtcacacgggattctggtgtccacatcagcaggaaacggtgggcccagccaaggaagtttgtccaacgtggcaccgtggataactacagtgggagcgggaactatcgaccgtgattttccagcatacataaccctcggaacagggaaaacatacaccggagcttctctttacagaggtaaacccttgtcggattcgccgcttcctcttgtttacgctgggaatgcgagtaactcttctgtagggtatctttgcttgcaagattctctgattcctgaaaaggtatctgggaaaattgttatatgcgaaagaggtgggaatccgagagtggagaagggtttggtggttaagctcgaanggggtgctggaatgatttttgctaacagtgaagcctacggggaaaaattagttgctgactcttatcttctcctgctgcgtctctgggacaaaa

SEQ ID NO: 229661 - DNA, 465 bp, Glycine max
cagattgagaattccctgctgttttatacagcaggtcttgagattcaagggcaggtcttgggggaaacagacccgagattcggtgagacgtgtcgctatgtggccgacgcacatgttcaggcactgcagtttgatgaggctgagaagctgtgccagatggctcttgacattcacaggggaaatggagctcctgcttccatcgaggaagctgctgataggagactaatggggcttatctgtgactcacagggtgattatgaagctgctctagagcattatgttttggcaagcatggctatggctgcaaatgatcatgacgtagatgtggcttcagacgattgcagcataggtgatgcctatttggcgttggcgcgctacgatgaggcagtgttttcttatcagaaagcactcactgtgttcaaatcaacgaaaggagagaatcatacaacagttgcttcagtctat

SEQ ID NO: 229662 - DNA, 399 bp, Glycine max
cgtttttccttcccccaaggtctctgatactgtggttgagccttataacgctactctttctgttcatcagttggtggagaatgctgatgagtgtatggtgcttgataatgaggcgctctacgatatctgcttcaggacctcaagttgaccactcctagctttggtgacttgaaccacttgatctctgcgaccatgagtggtgttacatgctgtcttcgattccctggtcaactcaactctgatctgaagaaattggcccggaatcttatttcctttccttggctggacctcttcatgggtggaattgggccttttaacttttgcgggtcttaagcaataccgcgcattgacagtgccaaagctgacacagcaaatgtgggatgccaagaccatgatgtg

SEQ ID NO: 229663 - DNA, 427 bp, Glycine max
cagcgttaaagaagagagaagaaaaatgcgaaagttcgatccatggcccgttttcttcaagcgcgagtggaaacgcaactggcccttcctcgttggattcgcagtcaccggagctctaatcaccaaactttcccttggccttaccgaggaagatgctaagaattccaaattcgttaaggcgcacaaaaggtgatttctgaatcgtgacatctgcctggctttgcactttatgttaggtttgtcaagattactttgcttgtcttgattttatggattgtaataacagaagagagatgctctagatagtctctttaagtctgtatcccatgttcttattttcagttttggttgtttacctaaatctggttgaaaaaaaaccacaatagttaataaaaaaaaaaataataaaaacctatctaagacaaaa

SEQ ID NO: 229664 - DNA, 495 bp, Glycine max
  unsure (1)..(495): unsure at all n locations
taacaacagcacaaagcgggttactgtctgttcaagctaccatctctctctctctttcttagtgcctccttgccagaagttaaaatggcccaagaaactttcctattcacatctgaatcagtgaacgaggggcaccctgacaagctctgtgaccagatctccgatgctgtgctcgatgcatgcttggagcaggaccctgacagcaaggttgcctgtgaaacctgcaccaagaccaacatggtgatggttttcggagagatcacaaccaaggccaacgtggactatgagaagattgtgcgtgacacatgcaggaccttggttttggctcgatgatgttggtcttgatgctgacaactgccaggtcctcgtcaacattgagcaccagagtcctgatattgtcaaggtgtgcacggccacttacaaagaggcctgaggagattggtgctggtgaccaagtcatatngttcgctatgccactgacgagactccagctca

SEQ ID NO: 229665 - DNA, 473 bp, Glycine max
tcctttttttgttttctatgtatactctctataatttgagattattacatatttctagcataaatcttgagagaacatttttttttgattcatcatataaaatatatatgtactgaaagaacacatacaagagcacaaatgataagggggaaattcataaaaaaatacaggtaactgaataacagaatatggaaatagggatggaaccatagactaaattttagcaatcggatgatatgaagccatgagtagcgcaaacgtcccttgtcaagagtgttggaaccccttttagttaagcacgtaccttctaccccttgaggggcttcaccactttccatgtgaagtcagggtcatctgtgacaaagagtacatatgcagctagtttcatgaacctgccattaacacccctctagagatcaaggttgatggagaacatgccatgcctgaagtccaaactcttcttcacaatgctg

SEQ ID NO: 229666 - DNA, 511 bp, Glycine max
gtcatcaaactctgacagagcatggaacctgctacattgctggcaaaatcgacgttccaaaccagctataaccaccttaggggatctggaatgagcttcacaaactctgtgttcgccatggggatccttagcacatgacaggtcaaggccacagtcttgcacctggcagcttggatgctgtacagcctgactacttgttttatatgtcttccctgataaaatgggaaccttaaaggaagatggtttcttggaatcacttgcggtgcagacatcctcaaagtgcattcgtctaccaagctttacagtgagcaatgaggcaccagagacaggagagggcactgctgctggataagtttcatccggctctccattgcgcattattatctatgcactggaatcgtactgagaaccttccagaggcaatatagatgccctgctatccccattcgatgatgaattgttggaagctgattttgagctccttgatgaagaagcatgtattagttcagag

SEQ ID NO: 229667 - DNA, 597 bp, Glycine max
gccagggacaatctgctatatctgtggatgatacattgaagatcatagcctgcagggaacaacataagaagcttgatgcccttgagacggaacttgctggagctaggcaagagggctttggtttcaaatcccttgatagagactaatggaacttactcgacgagaaggccgttggtcgtgataggtatactgacaaagtttggccgccagaagaatagagatgcaatccgcaaggcatggatggcggagtggtgcatctttgaagaaaattgaagaaggaaagggcatcattgtgcgatttgtattggtagaagtgaaaatcgtggagacagtcaagataagacattgatcatgagaataggctgactaatgacttcttaattctcgatatcatgtggaaacaaatgatgcattcccaagaaggtcaaattgttctttgctcatgctgcagacaaatgggatgctgagttttatgcaaaagtcaatgatgatgtctatgtaaatattgatgccttgggagctacacttgctactcatttggacaaacctcgtgtttacatgggatgcatgaaatcaggcgagttttctctgagctga

SEQ ID NO: 229668 - DNA, 560 bp, Glycine max
ctgagtactggaaacaagtgatcaagatcaatgattatcagaagagccggttcgtgaaccgtgttgtttcgtcgatgttcaacacagttgcaaccaaaaagatagccattctggggtttgcattcaagaaggacactggggacacaagggagacaccagcaattgatgtgtgcaagggactactcggtgacaaggcacgcctaagcatatatgatccacaagtcactgaggaccaaattcagagggatttatggatgaacaagtttgattgggaccaccctattcacttgcagccaactagtcctacaactgagaagaaagttagtgtggtttgggatgcatacgaggcaacaaaggatgcagatggtgtctgcattctcactgagtgggatgagttcaagactcttgattatcagaaggtgtatgacaacatgagaaaaccagcatttgtttttgatggaaggaacattgtggatgtggagaagctacgtgatattggtttattgtgtactcaattgggaagcactggatccatggctcaggacatgccagctgtggca

SEQ ID NO: 229669 - DNA, 475 bp, Glycine max
aatcaaataaaaaaaatccttataaacttataacagccaaacaggattggattgcagtacaaggaaacacaaaacatatggcctcgtactttcccaaaatttatactcatttatgccaactactatgggaaagtgaaaaatggcaaccaaaaaattgttccaaaaaaaaaattattagtaataaaattgaaccaaattgaatgcctcaatccttgaaatctctctcttatgccacagctggcatgtccttgagccatggatccagtggcttcccaattgagtacacaatgaaaccaatatcacgtagcttctccacatccacaatgttccttccatcaaaaacaaatgctggttttctcatgttgtcatacaccttctgataatcaagagtcttgaactcatcccactcagtgagaatgcagacaccatctgcattcttttgttgcctcgtatgcatcccaaaccacactaactt

SEQ ID NO: 229670 - DNA, 554 bp, Glycine max
  unsure (1)..(554): unsure at all n locations
ccctactcagcatatcactactactgtgctcctgggaatgctcaacacttggagcaaccagtgagcacttgtgatccttacagcaatcctcatgctcaagagatagttcagttgcttcctcaccctacttggggtgagtatggctatcccaccaaaaaaggtgatggttgggtgggggatgcaaggacttgggagcttgatgttggagggctatcaagtagactctacttttatcaggacccaggcactcctcctgccaagagaatatggacatctattgattctggtactgagatatttgttagtgacaaagatgaagaagcagagtggactcttagtgattttgacgtcattctaacacaatcagggaccaacttgatgaacaaggctgagagaaagaagtaaggaatattgataatggactaaacttttgggattttagatagtccaccaagtgtaggcttctaaatataggggttacagcacatttacacgaaaataattntcattggtcaaatcctgatcataggatcttgangtngtgcatgttggac

SEQ ID NO: 229671 - DNA, 603 bp, Glycine max
gatgaagtctgctatgtgtgcagtggtggttgtagcacttcttcttctggcggaggtggggcccatggctgaggctgtgacatgcaccccaacagagttgagtccgtgtcttccagcaatcacttccggtgctaaaccttccaatgcttgttgcacgaagctgaagcagcaaaaaccatgcttatgtggctacctcaaaaacgctagcttgaagcagtatgttaactctcctaatgcccgaaaaaccgttgcttcttgtgggattccctttccaacttgttaattaattaagccttcttataattaaagtgtgggatatatatatatatatagataaacagtttaatttatacacactttgatcctacaaagcatcttgacacaagcattcaataggatttcaccactttatcgcaacattttaacatgatgcggtaataaagtaaattcttgttgaatatttggataacgatgttatatactcatagtttgtgtgtataaattaaacttatatttattatttactctatatatgtcactctacgtctgtgtgatatattataccagtaagtatttagctatctttgaatatgttaagatgat

SEQ ID NO: 229672 - DNA, 447 bp, Glycine max
agaacatcattatttatttatctatttatttatttatagcgcttaacacatataattccctggatacaacatgtatactggtcatattcaactctagagagctttatctgatatgatcatccttaacatattcaaagatagctaaatacttaactgtataatatatcacacaaacgtagagtgacatatatagagtgaataataaatataagtttaatttatacacacaaactatgagtatataacatcggtagccaaatattcaacaagaatttactttattaccgcatcatgttaaaatgttgcgataaagtggcgaaatcctattgaatgcttgtgtcaagatgctttgtaggagcaaagtgcgtataaattaaactgtgaatctatatatatatatatatcccacactataattataagaaggcttaattaattaacaagttg

SEQ ID NO: 229673 - DNA, 564 bp, Glycine max
ggtgaagagcgatccgagatagtgttcttcgatgtggagaccagcgttccgacccgggcggggcagggttttgcgcttctggaattcggcgccattttggtttgccccaggacgctcacggagctccgcgattactccactctcgtccgcccagccaacctctccgtcatcacccccttgtccgagcgctgcaacggcatcaacgccgccgctgtctccgccgcccctaccttcgccgacattgctcacctcgtttacgacctcctccacgggaggatttgggcggggcataacatcataagattcgactgtgttcggattagagatgcgtttgctgagattaatcagccaccgcctgaacctaagggaccattgactcgctggttttgttgactcaaaagtttggtagaagagctggtgacatgaagatggctactcttgctacttattttgggcttggacgccagacacataggagcttggatgatgttcggatgaatcttgaagtcctcaatactgtgcaacagttctattctggagtcaaagtctccagatatattcact

SEQ ID NO: 229674 - DNA, 596 bp, Glycine max
  unsure (1)..(596): unsure at all n locations
cacatagtagctattatactctctagagtaattgcggaatctgctagaattttctaataatggcgaaagacgttgagcaggtcacagagcaaggtgaatactccgcgaaggactaccatgaccctcctccggcaccgttgatcgacccagatgagctcacaaagtggtccttgtacagagccgccatagctgagttcatagcaacactcctttttctttacatcaccgtgttgaccattattggctacaagagacagagtgacaccaaaatccccggtaacaccgaatgtgacggcgttggcattttgggcatcgcttgggccttcggtggcatgatcttcatccttgtttactgcactgccggaatctctgggggacacatcaaccctgcggtgacattcgggttgttccttggacgcaaggtgtctttggtgagggcgttgttgtacatgatagcacagtgtgccggtgcaatctgcngtgcttgggttgcccaaaggtttccagaaatcgtctacaacaggtacggaggtggggttaacactgtcagcgatggctaccacaaaggtaccgctttgggtgctgagatcattggt

SEQ ID NO: 229675 - DNA, 421 bp, Glycine max
aattaagcgttgcttctgaaggatccaagagctttgattgcagaacctgtaaaaatgtattgatggtagattgcacccaccgcatctccaacaaacggcccaacccagtaaattcattggtcgttccaggctttgtcgttgttgaagatcacagctggtcccaaactccttgcagggttaatgccggttccagtgacagggattgtacccaagtgaaccatgaatacggcttacccaatgggaagtggtgctaacacaggaacatgagagtccctagcgttcctcttaagatcagtggcggaaaaaaccgtgtatacaagaacaatggttccaatgatctcaacacccaaagcggtacctttgttgatgccatctgtgacagtgtttaccccacctccgtacctgttggagaacgattttt

SEQ ID NO: 229676 - DNA, 391 bp, Glycine max
cagcgttaaagaagagagaagaaaaatgcgaaagttcgatccatggcccgttttcttcaagcgcgagtggaaacgcaactggcccttcctcgttggattcgcagtcaccggagctctaatcaccaaactttcccttggccttaccgaggaagatgctaagaattccaaattcgttaaggcgcacaaaaggtgatttctgaatcgtgacatctgcctggctttgcactttatgttaggtttgtcaagattactttgcttgtcttgattttatggattgtaataacagaagagagatgctctagatagtctctttaagtctgtatcccatgttcttattttcagttttggttgtttacctaaatctggttgaaaaaaaaccacaatagttaat

SEQ ID NO: 229677 - DNA, 544 bp, Glycine max
  unsure (1)..(544): unsure at all n locations
gcagttgtcaagatattcagtggaggcattgcgatgcccagactcttccctgtcactactgatgtggcatcattctttagactattcactgtagttcctgtgtttgtgactgcatatatctgccactacaatgttcacagcatagacaatgaacttgaggactcctcacagatgcgaggggtagtacaaaccgcccttgttctatgctcttcagtgtacgtaatgataagcttctttgggttcctcctatttggcgaaggaactcttgatgatgtgctggccaatttcgataccaatcttggaattcctttcggatctgtgctcaatgatgctgttcgtataagctacgccgcacacctgatgcttgtatttccagttgtcttctttccattgcgtctcaacatagatggcctcctcttctctaaatcaaggcctctggttctggataacttcagatttgcatcactcactattgcccttattggtgttatcttcctgggagcaaatttcatacctagcattcgngatgctntccagtttactg

SEQ ID NO: 229678 - DNA, 575 bp, Glycine max
  unsure (1)..(575): unsure at all n locations
cttcttcttcttcttcgttccgatcagattcttcgaattctgaatcaaaattcatcgaagaagaaggagaaggagatgtatagcaatttcaaagagcaagcaatagagtacgtgaaacaagcggtagatgaagacaataagggaaactacgcgaaagcgtttcaactttacatgaacgcgttggagtatttcaaaacgcacctcaagtacgagaagaaccctaagatcaaggaggccatcactcagaaattcaccgagtatctccgccgggccgaggagatccgggccgtcctcgacgatgggcccagcggcccggcctccagcggggacgccgcggtcgccacaaggcccaagacgaagcccaaggacggaggcaaagatggagacggcgaggatcccgagcaggccaagctacgggccgggctcactccgcgatcgttgggaaaagctcacgtgaagtggacgacgtcgggnggctgagagcgccagcaggctctgcggaagcggttatcttgccgtgagttccgcagttcttactggtaacacgaccttgagagccgtttgtgtacgaccgc

SEQ ID NO: 229679 - DNA, 538 bp, Glycine max
aactggaatcacatattcacataaaatttatttttctgatcatttcatcaggctgtttttatacacaaattatgattagtaaaaatatgcatttcacttgatccaatagctctgtaaattacaaatcatcacatgtttaaactagtgaagatggttgaagaaaaattctgtcagaagtatccttcctctacgaattcctttgtgaatcgctcgtgaacatcaaggtcagacttgcttacggtggggctttgtctatcaaggactttgtcaaaatctgttctcgatataggtggtggcaggatcttagaagcaagtcctttggcagcaagatcctgcattgtagtttggactgcactctgctgctttggtccacatgggatccacatatgctcaggattcctaatgaaaaacatggcatcttgggttttgcgaacaggctcaaataaaacatacttgacacatacagatatatctgaacctgaaaacccctctgacttgcgagccaaatgttcgagatcactttcagccagttatgggg

SEQ ID NO: 229680 - DNA, 365 bp, Glycine max
  unsure (1)..(365): unsure at all n locations
gcactgactggtggcagtgggaaggttgtggacagtggtcctgatgatcatatatttgtatactatactgaccatggaggtcctggggtgctcgggatgcctgctggtccttacttatacgcggatgatctgattgaagtcttgaagaaaaagcatgcttctggaacatataaaaacctagtattttatctggaggcatgtgaatctgggagtatctttgaaggtcttcttcctgaagatatcaatatttatgcaaccactgcttccaatgcagaagaaagtagttggggaacatattgccccggngagtatcctagtcctcccccagaatatacaacctggttgggtgacttgtacagtgttgc

SEQ ID NO: 229681 - DNA, 563 bp, Glycine max
gacttgttgatggtattgaattagttcataagtttaaagggtttcggaatgcaaatagccatatttaccatttgctgtgaggcaggcagaaatggtaaatatgttgtctcagcaagtgaaggattctcatgtatacatctggaaaaatgaagctgattgcagacctagcaggagtaaaggtgtcactgtgacaagcacatatgaacattttcactgtaaagatgtgtcagtggccattccttggtcaggtatggatgatacatgggagatgcatgattcatattttgcagaagaacctgagcttgatgatgatggggatgaggcatgagggtctcatcggccaatcatcctcctactcctgtagaggaaaatctaggttctgagggttcacaatttgcttcaggttgcaacaacagtccacttcatggaaccattgcaagtgcaacggatagttattttcttgatagaatttctgccacatggcctgaggaaaaactttctacaatcagggaccgaagccctcggtaagtgtggatttatctatggggtgaatcaaacatgtc

SEQ ID NO: 229682 - DNA, 536 bp, Glycine max
ttggaagcttgtccatggtgatgtttttaggccaccaaataactcagatttgctgtgtgtttatgttggaactggtgttcatttttttgggatgattctagtaacaatgctgtttgctgtcctggggttcctttctccttcaaaccgaggcgggctaatgacagccatgctcttgctttttgttttcatggggatttttgctggttatgcctctgcccgcatatataaaatgttcaaaggaacagagtggaagagtattgccctcagaactgcaatcatgttccccgcaatcgtttctgccattttctttgtattaaatgctctcatatggggacaaaaatcatctggagctgtgccatttggaacaatgtttgccctgatctttttatggtttgggatctcggttccacttgttttcgttggtgcctatgttggttttaagaagcctgcaattgagaatcctgtgaagacaaacaaaattccaaggcagatccctgagcaggcatggtacatgaatccagtcttttcagttctga

SEQ ID NO: 229683 - DNA, 518 bp, Glycine max
agaaataaataaacaacttgagattccatttttgacctctctacgagtctatgacaactaaaatataacaataataataaagataaaaataaaacaaatttacaaggcagccattgtccttacttcttggttcttcccactacactttccaaaaattatatatatatattttttaaaaaagtcctccacttccaaatttattattatttttttattggaccttctttctcattctctacgttgactcgaacaccaaccccaccaccccggctgcgttctcctgcatcgcagcctgaaccgcgtgcctgtgctccccctcgtacgtcactatcagcattgcaggatcgtctggtgcgcgctccacgtgcttcctcgctgggcaccctctaatcgtgctgcacttgtagtaaccccttgggtatggggaacccttgatcggtttctgaccgtacttactgcacgagtactcgtccggtggaatatcggcgacttttgaactaatcgccggcactcttaca

SEQ ID NO: 229684 - DNA, 583 bp, Glycine max
tggtcgtcaacacagtctaattaatatctttttgctccttcgcttatgaatcttcttcttcttcttcttgttcctgcaacgcactgaattcgatcaatcaatccatcttcaattgctttgtttcgatcggaggaaaatggccgatcagttatcgaagggagaggaattcgagaaaaaggctgagaagaagctcagcggttggggcttgtttggctccaagtatgaagatgccgccgatctcttcgataaagccgccaattgcttcaagctcgccaaatcatgggacaaggctggagcgacatacctgaagttggcaagttgtcatttgaagttggaaagcaagcatgaagctgcacaggcccatgtcgatgctgcacattgctacaaaaagactaatataaacgagtctgtatcttgcttagaccgagctgtaaatcttttctgtgacattggaagactctctatggctgctagatatttaaaggaaattgctgaattgtacgaaggtgaacagaatattgagcaggctcttgtttactatgaaaaatcagctgatttttttcaaaatgaagaagtgacaact

SEQ ID NO: 229685 - DNA, 429 bp, Glycine max
agactccagcatcctcattaaaaactcattttttgaattcagggagaggaattcaattaaaaccaaagcaggtacactctgtaagtggatgtgtaagacgaacaactggacagacacacatagtagtacaatgtaaatcatcaaacaataggtccaaccaccaggaatattaaaggtacaattcaagtaagatcatcctcctcaagttctttggctttcagcttttccttcacccttaagagaagtgtggtcttccaagaatccagaggggtcatactatcaaattccttgacaacatcagtaaactttgcaacatcttcttcatcaattgcagcagcaatgtccgccaacaatctatattcacgtgttcctgaaaatgttggatccagttcctgatatcgttctaatgcattggttatagcaacaacg

SEQ ID NO: 229686 - DNA, 641 bp, Glycine max
  unsure (1)..(641): unsure at all n locations
ctcgagccgattcggctcgagatacacaacacaacacacacctaacttgtttatgagagctataagtcaccaccttctagtttcactactcgattggagaatctctacctcacgatcccttttttctcttagaaccatcatgtcacaatctgatcattcctctgcttttaccacacccagattagttctcaagaaggttttggccaaatctcaacatgaaggggatggagctgttgttagaagaggcattggaaggagcgagttgaagaacttggatcccttcctaatgttggatcacttctcagtatctcccccagcaggatttccggatcatccacaccgaggttttgaaaccgtcacctacatgctagagggaggcatcactcaccaagattttgctgggcacaagggtacaataagaaagggtgatgttcagtggatgaccgcaggcaggggaatcattcactctgaaatgcccgcagaagcaaacaacaacaagggattgcaactatggatcaatttatcatccagggacaaaatgatggagcctaactaccaagagcttccaagtgagaacataccangagcagataaagatggngttgcagtgagagtgatagcaggagaagcaatgggagtgc

SEQ ID NO: 229687 - DNA, 563 bp, Glycine max
  unsure (1)..(563): unsure at all n locations
cagtaaaccttatccacttaggatgttccgcagccaagtggcgggcaagtcctatattatagccatcgttctctcaatcgtcattaccaaacgggactcacagaagataataattaataataattgagcagaactgagcgcgctcaaacaaagcacgctttccgtttccgcagcatcaaaatgtatcttaaggaaatctaagcagtcatcaataaagctcctaacaagagccagctaataaaaacacaatcacttggaaaaaagatcaggctcccccattaatcaagacaaatagcgacttgtctcccaacctttcccgcccctttaactctggcaattcaatcacacaagcacactccacaacatgcaccccaacacgttctagaagcttaattgcagcacctaacgttcccccagtggcaataagatcatctatgattagggctcgttctccaggntgtacaacccctacatgcatctccattttgtctggtccatactccaaagaatactcttctgagataaccctcccaggcaatttattggggtttcctcatggggac

SEQ ID NO: 229688 - DNA, 457 bp, Glycine max
tgaacaatcccgatgaatgcaaggtgtttttctcggcttctccatatttctgaaatggcgcctgtcttagctttagccaagtatcaagctcgtcttcctgggtgaccaatacgcgggcaaaacctagtatcatcatctcgctccatgtatgataaattcgataacacctatcaggctacaattggtattgattttctatcaaaaactatgtatcttgaagatcgaactgttcgactgcagatgtgggatacagctgggcaggaaagatttataagtcttattccaagctacatcagggactcatctgtagctgttattgcatatgatgttgcaagccggcagactttcttaaatactgctaagtggattgaacaggtgcgaacagaatgaggccgtgatgtcattattgctcttggtgcgaacaaaactgatcttgtcgagaaaagacacattctta

SEQ ID NO: 229689 - DNA, 436 bp, Glycine max
aatataaatattgtgtcatctttttttgttcattcgggatgggtaatataggcaacaaaactagcagaatctacagcttccaagagaagcatttgaacatgggaaagtgctccgaaactaaaacatgttgagaccaacacacttcacgtttagctaaaatatcaacatttttttacctttagtatggtagaagttaagcagccaatcttcattcttgaaagcccctatatattataggtgcatacggattgctacctgttttaggccttccttggtagcagagaccaacttctttccctcaaattccttaagctgaccaacagcatactcatcaattgcatcaaccatgttgagaacctcataccccttcttcctaagcttttcaaggaagggggaattctcgacaactttcttgctttcaccagtaatgtagtag

SEQ ID NO: 229690 - DNA, 536 bp, Glycine max
  unsure (1)..(536): unsure at all n locations
ggaacaaagaatttgatttattattaaggccccttaatacacagatacattatcaactataaaatanatacttaaaaaaaaggacagaagtcagtaaagaatctaagacataaaccattgcatattttacatagaccattcaaatccaactcagaaagtgaccattctcttcatctcttaaaaccttcaacgtttacattcagcaggaagaccttgtgggaatcgcttgagatcactgcagtagttatagatcatgaagtacttctgaacccatctcagtcttcttctgctataagcatcaagctcatttgcctcatattcagccccagaatttgaaatggaagacttggatgagaactcaatggccttgaaattgcggtagtatgctgtaaagggtgctttggaccaatcagttttcaccaatccttctctggtggcccagtcatcaacattccagaggctaaaatagattctcatgggctggtttctttgaaaaggaacaccaagagggttagcattcttgaatacccttatgg

SEQ ID NO: 229691 - DNA, 522 bp, Glycine max
ctcactctccttctctctcctattgcggctagggtttgggtttttcactttcagcctctccattccttcaaccttcttcttctctttgatctctgatggagacgttccgtgtttagtagcaagggttagttgaggccttgtgtttggaaacgtacggtgtcgttttggagttgggaaaacaaataattctgagagatggcaaccacgaacccttttgatttgttgggtgacgacgctgaggacccttctcaggtcatcgccgccgagcaactcaaggcggcggctgctgctgcggctgccaccgccgctcccaagaaggcgccggctcagcagatcaagccggctcagctccctagcaagcctcttcctacggctcaggctgtgagggatgccagaaatgagtctgttcgtggaggccgtggaggtggacgaagtgggggacgtggatctggacgtggtcgcgggtttagtcgtgactcttcccatgacgagaactcaatccctaccaggggagcttcttat

SEQ ID NO: 229692 - DNA, 474 bp, Glycine max
gagaaaccttaaattgaagcaaaactgagatgtgggtctgggaagaaaagggaactcaacaacatttatgtcttaccccgaccatattcccccaaaatatcaaacgcgggaaaaataaagcacaaggaggaacaggcttcaagggatacatgaccgtatgaagaacaacctaaatttacacttttaaggcataaaattaaatgaaccttctaatccaggaaatccaattaccatagttcctttcctgcttaagttcaaataagagaacccaaaattgaaaataggacagagatatgtcaaaagggttctgggaaggcctcacttggcactcaaggttgggaaatgcccgggatcttcaatggatggagcaggtgcattgttggtggcactttcatggtaacccgctccgcctcgtgaaccacggccacggcccctaccacgttctgggttatagtatgccttccccctcagcag

SEQ ID NO: 229693 - DNA, 592 bp, Glycine max
cacatgaaaagagggtagaaaaataagactaaaaaaattggttagctagattttttgtttatgttttttgagatcactttgttaaaagcttttattgatagagagcttggcattggaattgtaccatatagccctcttggtcgaggcttttttggtggcaaaggagttctggaaaatatgcctgcaagtacagtcctgactttacatcatcctcggttccaagcagagaacataaacaagaacaagagaatatatgaacaaatagaaagccttgctaagaaataccagagcactcctgcccaattggcattagcttgggtacttcaccaaggcaacgatgttgctcctattcctggaacaactaagattaagaacctggatcaaaacatcggtgcattatcactgaaatttacagaaagtgacttgagagaaatttccgaggcagttcccatacatgatgtggcaaggtctcaatacttctttggaaatgataaagatttcttggaaaaattgccaacacacctttcaaaagatccgagggtcttcacttgaagcactcttaatcctttttagtcggataattttctatttt

SEQ ID NO: 229694 - DNA, 510 bp, Glycine max
  unsure (1)..(510): unsure at all n locations
caccaaataaaactaacttgggtagtgccttttttctttctctctatcgattctcgaaacaaaccctacccttttttagtcttcgaatttttcataatcgtaatgggttccgaaggatccagcgttgtcgttcctaggaatttcagattattgcaagagcttgagagaggtgagaagggaattggggatggaactgttagctatggaatggatgacgctgacgacatatacatgcaatcttggactgggactatcattgggccccctggtactgttcatgaagggcgtatccaccagttgaaattgttttgtggcaaggattatccagacaatcctccatctgttagatttcaaacaaggattaacatgacatgtgtcaatcaagaaactggagcggttgagccacatttgtttcctatgcttgctaattggaaacgtgagcatacaatggaagaacgtttgattcaattgaagagagaaatgatgtctcctcanaataggaagctaact

SEQ ID NO: 229695 - DNA, 539 bp, Glycine max
aaaaaggatcttgggattcgaaattagagtccgctgtaaaaacagcttcagtacaataaaaatttcataagacatatagtaactactatatcttggattgctccaggttacatacggaagtggtccataattacattataaatgcgttatgcataagtccgtgaacttggatcatctattgaatataggtatttacattattatgtatgattatgattatcattattattatgcttggattctccatggaattacacaatacaacatcttaccaccaggcccttttgatcaaccctggcttcttcattgccttcaggaggctgagttagcttcctattttgaggagacatcatgtctctcttcaattgaatcaaaacgtcttccattgtatgcttacgtttccaattagctagcttaggaaacaaatgtggcttaaccgttccagtttcttgattgacacatgtcatgggaatccttgtttgaaatctaacagatgggggattggctggataattccttgccacaaaacaatttcaact

SEQ ID NO: 229696 - DNA, 541 bp, Glycine max
tgaaaaaaaaaaaaaaaaaaaaaaaaaaaaaaaaaaaaaaaaaaaaaaaaaaaaaaaaaaaaagaaaaaaaaaaaaagacggccgccaatcttatataatagaaaaaccaaaaaatatatttccggggggttcctgcctgctggccttctttccccccgggttttttttcgggtccgggccctgggggtgtcccttttttccttttgggggtgctttttttcccctggctcttcctggcttcttccttgcccgtggcttaattgtgtctcccctgcccttcctcccgtgtgccctgcctgactttttttgggtggatcccggtggttcctttccgggtggcttccctgcctttctggctgttttctttattccgctttcccgcgggggaagcttgtttccctgttgtcctccagggtgggcccttttcccgtcagggggccttttgttttttggccgcctgggggtgttttttttttcccgggtccccggtttcccttctttctcgtttgccccgtcggccctgaaggcttttttgttggt

SEQ ID NO: 229697 - DNA, 322 bp, Glycine max
atggcttggtttttttttaaattacattacaacttatcacctatatactatttatttaaatatcaattaatacacaaaaataaaaaaaaaatccacccacgacaaccaccaaaaaaacccccaaaaaaaaaaaaaaaaaaacaaaacaaaaccaacaaactaaaaacacaacaaacaaaaaaaccccgccacaaaaaaaaaaaaaaaccccccaaacacccccacaaaaaacaatccgaaaaaaaaaaaaaaaagacccccccacccacccataaaaaaatataacccccaaaaatcaaaaattacaaccatcctaaaacaa

SEQ ID NO: 229698 - DNA, 564 bp, Glycine max
gagcttctttacagctcagtggagaatgaggaacacatatgcgtattgaaggaccgcaacaaaccaataatcttcaccatggcaaggcttgaccgtgtgaagaacatcacggggcttgtcgagtggtacgggaagaacgcacgcctccgcgagttggtgaacctggtggtggtggctggagacaggaggaaggagtcgaaggacttggaagagaaggccgagatgaagaagatgtatggcctcatcgagacctacaagttgaacggccaattcagatggatatcctctcagatgaaccgtgtgaggaacggagagctctaccgtgtcatctgtgacacaaggggtgcctttgtgcagcctgcagtttatgaggcctttgggttgactgtggttgaggccatgacttgtgggttgccaacgtttgccacatgcaatggtggtcctgctgagatcattgtgcatggaaaatctggttaccacattgatccttaccatggtgaccatgctgctgagatccttgttgagttctttgagaagagcaaggctgatccatctcactgggac

SEQ ID NO: 229699 - DNA, 382 bp, Glycine max
ggaagggaaaaagggggatcgttaaattgaattgatgggggggaaaaccccaatttaaagatttccaatcatacccaattttgccccaacacaaaagaattttaaaaaaaaaagactttctttttttactttttttacccaaaacctaagcaaaatttaaaaacaaacgacccttttttttaaactctttaaatccaaaagctgatcacaatcaaaatcaagggcgttatttatgaaagctccataagacttcaaacgaccaaaagccgggttctccattgatgttctcttcaaacatgaatttactcttcaatagcagggggcacagactcagccaatttgcggtacttgagagcataaaacatcttgaggtaacgtttgc

SEQ ID NO: 229700 - DNA, 570 bp, Glycine max
tgacagttgcgcagagagagaatagcagaaagaatcagggctttgcaagaactggtccctagtgtcaacaagacagatagagctgccatgctggacgaaattgtggattatgtcaagttcttgaggcttcaagtgaaggttttgagcatgagtagaattggtggagctgatgcagtggcaccactggtaactgacatcccattatcgtcagtcgaggaagaaggcggtgagggaagaaaccagccagcttgggagaagtgctcaaatgatggcacagaaagacaggtagccaagcttatggaagaaaatgttggtgctgccatgcagtttcttcaatcaaaagcactctgcatcatgcccgtctcactagcatcagcaatataccagtcacaaccatcagacacttctagtatagttaagcctgaaattaatcctgcttcatagacagacctctggcacagatgcaccatccagtggtcccatcaagggctcacctaacacacgtctaggacccacacgaaattcgtctgtttcaaacccccttaatcttagtcatggtttcgcatcgag

SEQ ID NO: 229701 - DNA, 565 bp, Glycine max
cttttgctttgcttagattctgttctgcagagagagagagagagagtttcagaatttagagagagaattttattttgttttttcggttatctttattggtttctcttacatcgtttttgtaggcgctgaggaagaagctttggcagcataactttgttggggagcataaaattcaggcaagcccttgaagttggagagtattagatgggaatcttagaattttctctttagaccaaagaaatggaggtatatggaaattctatggttgcagctccttcaaatgttatttatctgtccagtattttgggccaaggcggtccaattcccggtcacagatgcaactggaaatgtgaaaatgaacatgtttgtggaaacatgtatcgctgcaagctaacagggctgactcacatttgtgataaaaactgtaaccagagaattctgtatgataaccatagctcactttgcctagcatgtggtcaaattttcccccttacgccggaagaggaacaagcagtgagaggtgttcgcaggaagcttgacatggagaattcgccctctgatagct

SEQ ID NO: 229702 - DNA, 631 bp, Glycine max
gcgtcactaggcaccccagcgcatgttagcagtaacaagaagcccttgcatcgttggagttggaaggcgaagcgtgtgaggtgcgcagtgtcaccccccacatggcgtgaagggcggcgcacggtgtcgttgtctcttgttctctcccacttgcttctcattcctaaccgtgatactgccctagcaagtcctttcgataagtatgttaagagaaaaaagcttgatcctctggaggtttatataccagctgtcatacttacagagtttcagatcaaggacttagaaaaaacattataggatgaggaaccccaatttgccctctgccggtctctacttcgttctgggcctgcagcatcacttcctgtaaatattagagcagtggcacagtatgcatctgacagtggctatggttaaacggcattcaatgatgttgatgaatgtctgatgtcgctggaagaacttgattccttgcttcttcatgcatcacgaaatgatcctgaagcctcagtcaagtcaatgaaggcaaaaatcaattctgcccttggcgctctggacagcctcttacaaaccgtaccttctgatgtgctgagtaaggtatggttatagctgattcatacagggaaccggaaga

SEQ ID NO: 229703 - DNA, 474 bp, Glycine max
cgaagaggtaatttatttaattcattaacgcaataatggtgagggtaattgataagtttaaagaagaaatgcctacatgcatccccacggggataaagttttctcatatcctggcttccttactataaaggtcaaaaggttcctgttccagaaagactgatccagatgtaacaaaggatagtcttttttttttttctaaaccgaagttgtcaagaaaaagttgacatcatctcatgcataaagggttcccaccaatctgtgcaaatctggataatcatgtgagaaaagcaagaagccacagaatccaggttttaaatttcatactgagctcgatcaccatagtttatttttgatccagaaaagtacgaagacaactccaaaaacaatagcaacaggggcccacttccgaatcagagcctgccggtttaaatctctagccttatcagcatatatgcgagattctgatgataagcg

SEQ ID NO: 229704 - DNA, 472 bp, Glycine max
aattatttgaattcaagaatgtctcaacccgactcgttggtggctgagattgaggtgaaaacctctgctgatcacttttacgacaccttgaagggtaagaaacagcatcgtattcatgatgttgcccctcatcatatccataatgtggaagttcatgaaggtgagtgggataaatctggcaatatcaaggtgcttacattcgctgatggggacactgttgagaccttaaaggagagagttgattttgatgatgaaaacaagaagataacctacaccatattggagggtgtcatgtcgaagtactataagagctacaaggttatcgttcatgttttaccaaaaggtgatgagcacagccttgtgaagtggactttcttgtatgagaaggtggatcacactggccctgagccaaccaagtacatagatatggtggttaaactcaccaggaacgtggaagctcatcttgttgagg

SEQ ID NO: 229705 - DNA, 514 bp, Glycine max
tgcagccctggattgccaaggatgatgattcaggtcagaagatgtggagaatcaatcagcggattgtaaaattgattgtggaacttatgaggaatcatgagactgcagaatcattggtaattgtggcaagttcatcagatttactactgcgagccacagatgggatgctggttgatggagaagcttgcactttaccacagctggagctattggaagcaacagctagagcagttcagccagtgctcgagtttggagaatctggattggctgtggcagatggcctttcaaaccttttaaagtgtcgcctctcagctacaattagatgtctttctcatccaagtgcacatgtccgagctctgagtatatcagttcttcgtgacattttgcatactggttcaatcagatgtagtcctaaacctcggagattaaatggcacccacaacccttcttatcaatacttcaatttggatgccgttgactggcaagctgacatagaaaaatgctggactgggga

SEQ ID NO: 229706 - DNA, 617 bp, Glycine max
gaaggctacagtttctgctaccgatgaagattccattgctgatgtgatggaacagcatgacgaatttcttagttcaatgctggctcgttcagctaagttacagatggtcttcagatgttgggaaagaaatgatgttaaggaggtcattggcataatggcaaggatggatgatcatgctgtgattgctgatgttgttagcattataatggaaaaaattgatatcattacacttgagatatgtgctggtcttctgccacttctaactgatcttctacaaagtgaaatggaaagacatctaggaatatccttggaaatgctattgaaactggtcagaatatttggttcagtaatctattcaaccgtatcagctacacaacctgttggtgtcgatatcgaggcagagaacaggctagagcgttgcaacctctgcttcacagagcttgaaaaagtcaaacgttttttgccttctctttcaagatgaggaggatcaattgcaaaatctgcacaagagttgaatctggctttgcaggatgtttcgtgatcttttcctgattcaattattttcgccgctcaagttttaccggtgctttttatgggtttggtgcattttaaagatt

SEQ ID NO: 229707 - DNA, 535 bp, Glycine max
  unsure (1)..(535): unsure at all n locations
ctcgagccgaatcggctcgagcttcgttccttccccaacccaatcttcgccttcgcccacaacaactcctccttcaggatcgctgccaacgttactttccatttttacccttcatcctcgagaaaaaaatggcgaacgcagcatctggtatggccgtccatgatgagtgcaagctaaagtttctggagctcaaggcgaagaggacgtaccggtatatcgtttttaagattgaggagaaatcgaagcaagttattgtggagaagctgggtgaccctgcaaatggctatgatgaattcgctgccagtcttcctgctgatgagtgtcgatatgctgtttatgattttgattttgtcactgaagagaattgccaaaagagcagaattttctttattgcttggtcccctgatacatctagggttaggagcaagatgatttatgccagctccaaagatagattcaagagggagcttgatggaattcagaatgagctgcangcaactgatcctactgagatgggtcttgatgtgttcaaaag

SEQ ID NO: 229708 - DNA, 506 bp, Glycine max
aagatggcaactgtcaacattacatcaatacctggtcccaaatggtcgttcaatcacacaaagaacagttacaaaattaactactaggaataggactaagattacacccaaacacgggttatatgtcgcaaaccacaagatacactggaacaagagaagctttgttgaagctgcaatagacctcatgtcaaaacttggaaaattgagtccaaattagccaagttgaccatccccatcacaactcctatttatgaataatcggaatcatttaattggcacggcttttgaacacatcaagacccatctcagtaggatcagttgcttgcagctcaatctgaattccatcaagctccctcttgaatctatctttggagctggcataaatcatcttgctcctaaccctagatgtatcaggggaccaagcaataaagaaaattctgctcttttggcaattctcttcagggacaaaatcaaaatcataaacagcatatcgacactcatcagca

SEQ ID NO: 229709 - DNA, 537 bp, Glycine max
cacaaggcagaaagcaagctcatcctagagttttaaaaatggcagcagcctcctccatggctctctcttccccatccttggctggcaaggccgtgaagctgggcccatcagcccccgaagtcgggagggtcagcatgaggaagaccgtcaccaagcaggcctcctccggaagcccatggtacggcccagaccgcgtcaagtacttgggcccattctctggcgagcccccgtcctacctcactggcgagttcccaggtgactacggctgggacactgctgggctttcggccgacccagaaaccttcgccagaaaccgtgagctcgaagtgatccactccaggtgggccatgctcggggccttgggctgcgtcttccccgaactgttgtcccgcaacggggtcaagtttggagaagctgtgtggttcaaggccgggtcccagatcttcagcgagggtgggctggactacttgggcaacccaagccttgtccacgcccagagcatcctcgccatctgggccacccaagttatcctaatgg

SEQ ID NO: 229710 - DNA, 415 bp, Glycine max
gaaaaaagcaagtaacattaagggggatggggatacacaagataattcacattatctgaagtacattgcaataacatatacttcaccaaacacaaatttaaaaactctcaaaagtccacaagtcatccttttctttcatgctcacttgccggggaccaaattggtggcgtaggcccaagcattgttgttgactgggtccccaaggggatcagcaaggttctccaatggacccttaccggtgacaatggcctgaacaaagaacccaaacatagagaacatggccaatctcccgttcttgagttccttcaccttaagctcaacaaaagcctctgggtcatcaacaaggcccaatgggtcaaagctgccaccagggtagattgggtcagtgacctcaccgaggggcccaccagcaata

SEQ ID NO: 229711 - DNA, 562 bp, Glycine max
caatttctctttctctctttttttgtgtgtccaaaatggctcctagttctgctcacaacaatgggttctatgtgcttatgctagttgggatagtggttagcactatggttgctacctgtgctggtagcttctaccaagactttgatctaacatggggtggtgaccgtgctaagatattcaatggtggccagcttctatcactttccctagacaaagtctctggctctggcttcaaatcaaagaaagaatacctatttgggaggattgatatgcagctcaagctcgttgccggcaactctgctggcactgtcactgcttactacttgtcatcccaagggccaacacatgatgagattgatttcgagtttttgggaaacctaagtggggacccttatattctccacacaaacatcttcacccaaggcaaaggcaacagggagcaacagttctatctctggttcgaccccaccagaaacttccacacttactctatcatttggaagccccagcacatcatattctcggttgataacacacccatatgggtattcaagaatgctga

SEQ ID NO: 229712 - DNA, 535 bp, Glycine max
ggaacaaagaatatgatttattattaaggccccttaatacacaggtacattagcaactataaaatagatacttaaaaaaaaggacagaagtcagtaaagaatctaagacataaacatagcatattttacatagaccattcaaatccaactcagaaagtgaccattctcttcatctcttagaaccttcaacgtttacattcagcaggaagaccttgtgggaatcgcttgagatcactgcagtagttatagatcatgaagtacttctgaacccatctcagtcttcttctgctataagcatcaagctcatttgcctcatattcagccccagaatttgaaatggaagacttggatgagaactcaatggccttgaaattgcggtagtatgctgtaaagggtgctttggaccaatcagttttcaccaatcctcctctggtggcccagtcatcagcattccagaggctagaatagattctcatgggctggttctttggaaaaggaacaccaagaggttcagcattcttgaatacccttatgg

SEQ ID NO: 229713 - DNA, 502 bp, Glycine max
gccttgtatctctcaattcctctgtttccttcttccttcatctttgcgtcatggccagaggttcctctcagtctcagtcctccacttcaacagccacgcgaccaggaccagcaggcatggctccccgcggttccgccgccgccaccgctggcatgcgccgccgccgtctcggcggaggaaacagctccgccagcaccggcgtcggaggcggcagcagcaacatgctgaggttctacacggacgatgctccggggctgaagatttcgccgacggtggtgctggtgatgagcctctgcttcatcggcttcgtcaccgcgctccacgtgttcggcaaactctaccgctccaaatctggcggcaccgtttgatcttacgatcctcttttggatttgtagttctgatccgcattcgatcgctttggtttcggtttttaattccgtaatttggttaacacttgctattttgctgtagctgtggaatcaaatcgttgactgtctactta

SEQ ID NO: 229714 - DNA, 487 bp, Glycine max
gataacatcgaaaaaaactttgatcaaattaataactggggcaaaagaaaccatcaaattcctttgagaaaaaggaacaatagcaaacctagctcattaatatacatacacgattaaataaacgacacagatcgatgtttatggccaaagccaaaattaaccacggtaagtagacagtcaacgatttgattccacagctacaacaaaatagcaagtgttaacaaaattacggaattaaaaaccgaaaccaaagcgatcggatgcggatcagaactacaaatccaaaagaggatcgtaagatcaaacggtgccgccagatttggagcggtagagtttgccgaacacgtggagcgcggtgacgaagccgatgaagcagaggctcatcaccagcaccaccgtcggcgaaatcttcagccccggagcatcgtccgtgtagaacctcagcatgttgctggtgccgcctacgacgccggtgctggcggagctg

SEQ ID NO: 229715 - DNA, 492 bp, Glycine max
ctacgaaagcattcaaatgcagagtatgtattcatgaggtaagggcaacacaataacaagtcatccataagcatataggatttctgagaggtacatgtaaagccagaagaaaaatatacaagatactcttcatccacaatgtctagtaaaaggaccctaaaaaaataaaatatgacatgatagggttttaactgatgatgaatctaaatttaacaggacattcatgaaaccccactaaaacatatttgtcagaatctagtgccacttcaatctttctttttatctttcaaaggtcctctgggtatcttgctcaacaccttcgcatcaaacactgcatattgcttcttaatctcggcaattgccttcccaccaaaagagtctacatgatcttcatatttctcataaagcacaggcacagtgtgcagcaaaacaaaagctatgtagaacagggtcaagaagttggcccagctacccaaaatagagaaaacccat

SEQ ID NO: 229716 - DNA, 594 bp, Glycine max
gaggatttggtgaatctgagagacgacgcagtcactgcagatgatcagggaaataaatttgctttagcactctttgctggtgcacctgctaataatgcaaatggatcatgggaagccttcccgtcaaatggacagccagaagtgacttcagcctggcaaaccccggcagcagagcctgggaaagctgattgggaattggcattggtagagactgctagcaatttgtcaaagcagaaggcagctttaggtggtgggttggatcctctattgttgactggtatgtatgatcaaggaatggtgaggcagcatgtcagcactacccaactgagtggtgggagtgcaagcagtgtggcattgccgggaccagggaagactccggttttggctctccccgccccagatggatctgtgcagccggttaatcaggatccatttgctgcatcgctgagtgttccaccaccatcctatgtgcaaatggctgatatggagaagaagcagcacttgcttgtgcaggagcagcatgtgtggcatcagtatgcaagggatgggatgcaaggtcaatctagcttgcccaactgaatggcgctggatact

SEQ ID NO: 229717 - DNA, 488 bp, Glycine max
gttaactctcctaatgccaaaaaaaccgttagttcttgtggtattgcctatccaacttgttaagcacctcttatatatatatataaaatgtgtgaacaatatatatatattgattaaaaaatatagtttaatttatatacacactttgatcctataaaaacatcttgacacaagcattcaatagaatttcaccactttatcatgacattttactataatgatgtggtaataaagtaaattcttgttgaatattttgtataaagatgctttatactcatggtttctgtgtataaattaagcttatatatatttacactatatattgccactttacgtttgtgtgatattaattatacagtcaagtatttattagctatctttgaatatggtgtatacactagtatacatgttgtatccagggaattatggttaaagagctatataaattgagaaataatgatgttctagagtgacaaaaaatgattaaa

SEQ ID NO: 229718 - DNA, 545 bp, Glycine max
ctcgagccgaatcggctcgaggttcatcatccccacactaaacaaccttgctagcatttggtttatggctctatttatctccatcattttaactagcgtgctggagctccgatggagtggtgttaccatcgaagccctttggcgtaacgagcaattttgggtcattggaggtgtttctgctcaccttttcgccgtgttccaaggcctcctcaaagttcttggtggagtagacaccaacttcactgtgacagcaaaagcagcagaggacactgaattcggagagctctatctcttcaagtggaccactcttctcatccctccaactactctcataatcttgaacatcgttggagtcgtggccggagtctctgatgccatcaacaatggatatggttcatggggacctttgtttgggaagctgttctttgccttctgggtcattgttcactcgtaccctttcctaaaggtctcatgggaaagcaaaacaggactcctaccattgtagtgttgtggtcaatccttctagcatctattttctcattgat

SEQ ID NO: 229719 - DNA, 493 bp, Glycine max
actacaatatatggttttgttgtatcatcaaatgaatacattgcaatcagacccaactttcctcttttaagactatgtacacagataactcttctaattaaggcaaaccactcaatagcagtaagaaaataaaagcatgcacacaagtgcaattaactcttatcattgggacatcaacatggcctctccacagagtcttattagcattccaccccacattgtttgagcactggaccagtttgcttgggcaagaagggatcaatcctgacccaaatcaatgagaaaatagatgctagaaggattgaccacaacactacaatggtaggagtcctgttttgctttcccatgagacctttgaggaaagggtacaagtgaccaatgacccagaaggcaaagaacagcttcccaaacaaaggtccccatgaaccatatccattgatgatggcatcagagacttcggccacgaatccaacgatgttcaagattatgagag

SEQ ID NO: 229720 - DNA, 560 bp, Glycine max
  unsure (1)..(560): unsure at all n locations
gcgccgcctcatctcttctgctctctcattacgctctttcctccgatctcaggtgttgtttaagcttcctgtgttggcttggtatccttgcaagttcttctgtagcagattccaaggtgaaggtgtcacgttaaagtttctttcatgtttgaacaggctactatccatttgggagcaactgagctgcttggattgtatttttcttcttctagaaaaaattacagaccctcaccacccagacttagttgtatgaacggttggccaccttccattatccttgaaggagattgttcaaggatacaggttaccttagaggctgaaatcacagctgcgtataatttgaattccagcatttgctgcctctgaatatctctggaactttgtaagtcaacaaacatggctttacagaacattggtgctgcaaacagtgatgatgccttctacaggtataagatgcctaggatgattaccaaaattgagggcagaggtaatggcatcaaaactaatgttgtcaatatggttgacattgcacaggcactggnctggcctgcgtcttacac

SEQ ID NO: 229721 - DNA, 537 bp, Glycine max
gaaaaacagcattatattatcaagacacgttttattaaaacaggggacgggatcattaccaaccaaaaaccaaaatacattagaacaacacaacacaaaactcactgacgcgtacatgctatactagtccagcaaccatgcacccctcacaccaagtttttagcaagtatagtagttgaacaacacatggggccaacaagacccttaattggaaataaaggacataacacaagcaagcaaacataagtaacggagaatgtaggacaaattattcttcctcggtttctgattctgcattctgaagccaatcaatgaaagggtgagcattcttccaaatcctagagttcttgttatcacccttcagtcccttttgataccactgcactatggtgttcttcctctaacacatcagcatcgtagagtgcctttagaaccagggcaacctccttcaaagcatttgaagtagacttgcaagaaaacttttcaatagcatgaagcaacaacggctggggatcccttttccggcacagcaacaga

SEQ ID NO: 229722 - DNA, 544 bp, Glycine max
  unsure (1)..(544): unsure at all n locations
agagaaagttcatttttggcacgtgatcagcaaataaactgtggttttgttaaaggtcctgaagggtctcaaagcactggatttgacttgacagaagatgatgcaaattacatcagcaggtgccacattgctgtgatttcatgcatatttggaaattctgatcgcttgaggaccccagccaccaaaacagtcactcgattgtcaaggaagaatgtctgctttgtgatgtttactgatgaaattacaatacggacactttcttcagaaggtcatgtgcctgatagaatgggtttcattggcttttggaaattagtggtagtgaagaatctaccctatgatgatatgcggagagtgggcaaaattcctaagttattgccgcatcgactttttccttttgcaaggtattcaatttggttggatagcaaattacggctgcagctcgatcctttacttatcttggaatattttttgtggcgaaagggttatgaatttgcaatatccaatcactatgatcggcattgcgtgtgggaagaagtngcacgga

SEQ ID NO: 229723 - DNA, 596 bp, Glycine max
  unsure (1)..(596): unsure at all n locations
gaaagtttgacaaattcagagagaaaagcttcactatctattaagaaagttgattacatgattgtttatacatctgatctagtaaaagcagttcgcaaagcagctggaaacatagagaaaccattggggggtttccatatagttgttgatgcaggcaatggagcaggaggcttttttgctgcaaaggttctggaacctctgggggcaataacttctggtagtcaatttttggagcctgatggcttgtttccaaatcatatcccaaatcctgaggacaagacagcaatgaaagctataacccaagcagtccttgataacaaagttgatcttggaattatttttgatactgatgtggacagatctgctgctgtggatttcactggccgtgaattcaacaggaatcgtttaattgccttaatggcagctattgttcttgaggaacatcctggaacaactattgtcacagacagtgtgacttctgatgggcttaccacgtttatcgagaagaaacttggtggcagacaccatcggttcanaagaggctacanaaatgtgattgatgaagctattccgttgaattctatcggtgaggagtc

SEQ ID NO: 229724 - DNA, 575 bp, Glycine max
gctttgtttacaagtcctcctttctcacagctaggtggtggtgattagtgtacatatatatatggttgaagtgggtatttatcagatccctacgagcactttcgacccatttgcggaggcaaaagaaacagatgctcccggggcaaaagagtatgtgcatatccgcatacaacagaggaatgggaagaagagtctgaccacagtgcaagggctgaagaaagagttcagctacgagaagatcctcaaagacctcaagaaagagttctgctgcaatggcaatgttgtgcatgacaaggagcttggcaagattatccaactccagggtgatcagcgcaagaacgtttctcacttcctcattcatgctcgccttgttaggaaggaccagatcaagattcatggtttttaacccactaccactagctaccacctttcttctattatgaaattaaacctatgggcagcgtttatgaaataagtaaggagtttgagtttggaatattttgtcattttctttctggatgattgaaaatccaagaatagtctttgagagtggttatatatattactacttcatg

SEQ ID NO: 229725 - DNA, 516 bp, Glycine max
gaaagcacaacatgaagtagtaatatatataaccactgtcaaggactattcttggattttcaatcatacagaaagaaaatgacaaaatattccaaactcaaactccttacttatttcataaacgctgccataggtttaatttcataatagaagaaaggtggtagctagtggtagtgggttaaaaaccatgaatcttgatctggtccttcctaacaaggcgagcatgaatgaggaagtgagaaacgttcttgcgctgatcaccctggagttggataatcttgccaagctccttgtcatgcacaacattgccattgcagcagaactctttcttgaggtctttgaggatcttctcgtagctgaactctttcttcagcccttgcactgtggtcagactcttcttcccattcctctgttgtatgcggatatgcacatactcttttgccccgggagcatctgtttcttttgcctccgcaaatgggtcgaaagtgctcgtagggatctgataaatacccactt

SEQ ID NO: 229726 - DNA, 542 bp, Glycine max
tgttgctaaaaaactgaggctgaactctgcaagtcctgttgcagatgctgagagcattgtatcaaaggctattcgtgatggtgcaattgatgctacattggatcatgccaatggttggatggtgtccaaagaaactggagatatttactccacaaatgagcctcagttagcctttaattctcggattgctttctgtcttaacatgcacaatgaggcggttcgagcacttcgatttccaccaaacacacacaaagagaaggaaagtgctgaaaagagaagagagagacaacagcaagagcaagagctggctaagcatattgcagaggaggatgacgatgatttctgataattgttttttttcaccctatgaattgctatctggataccttcatttccaacgtttgctcatcttttccttttgaagaactttcattatcatttcctttttcaaaaagtgaatctttcatttcctaagtggaagatctctgaatgtcagtttaacatatcgaaatatttacttttttttttcatccatgatgact

SEQ ID NO: 229727 - DNA, 574 bp, Glycine max
gaagcagaagggttcctcactctcttcatctgattgaacaaaatgtacacctcgaggaagaaaattcacaaggataaggatgccgagcccactgaatttgaggagacagttggacagtacttgttcgacttggagaacaccaatcaggatctgaaaagtgacttgaaagatctctacataaaccaagctattcaaatggatgtggctggtaatcgcaaggctgtagtcatctatgtgcctttcagattgaggaaggcattccgcaagattcatcttcgacttgtcagagagttggagaagaagtttagtgggaaggatgttgtcttgattgccacaaggaggcatcgtgcgaccgccaaagaaaggctctgctgttcagcgaccccgaacccgcactttgaccgctgtccatgatgccatgctggatgatgcttgtgtatcctgcagagattgttggcaaacgggccagatatagactgatggctcaaaaaaatgaaggttttctcggaccccaggagcgcaactcactgagtacaagctggagaccttttctggagtttacaggaagcttact

SEQ ID NO: 229728 - DNA, 543 bp, Glycine max
agccacagaaaatactctcccttggtgattttaatgtcagggaggtgaagaagcatcaaataaaattccagaagtcaaaattttggttattgtttaacataaatatgtaattctaacagaaaaatctgccaaaaaaacaatactccattaaaccaagcagcagcatctcaggcttctgagattggatactcaaatactacatcttttccagtaagcttcctgtaaactccagaaaaggtctccagcttgtactcagtgttgttgcgctccttggggtccaagaaaaccttcattatttttgagccatcaattctatatctggcccgtttgccaacaatctctgcaggatacacaacatcctccagcatggcatcatggacagcggtcaaagtgcgggttcggggtcgctgaacagcagagcctttctttggcggtcgcacgatcctccttgtggcaatcaagacaacatccttcccactaaacttcttctccaactctttgacaagtcgaagatgaatcttgcggaatgccttccttaatctg

SEQ ID NO: 229729 - DNA, 507 bp, Glycine max
gactatttgctatataagtcgggttggatttgtaggaggaagtaagaaaacacaacacgaatttcattgcagagtgttattttgagtatcagcatcaatggctccaattgcagtgggaaacgtgattccagacggcattttggcttacttggatgaagaaaacaaaccccaaactgtctccattcactctctcgccaccggcaagaaagtcatcatctttggggttcccggtgccttcactcctacttgcagcttgaagcacgttcctggcttcattgagagagcagaagagctgaaagggaagggtgtggacgaaataatctgtatcagtgtgaatgatccatttgtgatgaactcatgggccaaaacattcccagagaacaagcatgttaagttccttgctgatggtgcagccaaatacaccaatgcccttggtcttgagcttgacctcactgacatgggtcttggcgttcgctcaaagaagtctgctctgctggtggaagacct

SEQ ID NO: 229730 - DNA, 439 bp, Glycine max
gaaacaagaaatcttatttagttcgggaatattcaccatatcatggcccttcccagaccacacaacacaattacatttatgaaaaggaaaatgtttcttagtatattcttgcatcaaaagagtctcacaccacacattaaagacagttaaacagccaacaagaggattcaagggttttaaagggccttgatgatcttttcagcactggagatggggaactctcctccactttcaacattcgcaaccttcaccttggggtcttccaccagcaaagcaaacctttttgagcggacgccgagacccttgtcagtgaggtcaagctcaagaccaagggcattggtgtttttggctgcaccatcagcaaggaacttaacatgcttgttctctgggaatgttttggcccatgagttcatcacacatggatcattcccactgatac

SEQ ID NO: 229731 - DNA, 392 bp, Glycine max
  unsure (1)..(392): unsure at all n locations
ccagactgagaggaagagagagggagattctttgtttgctaccttctctcggaaaaatggttacgttcaggtttcaccagtaccaggtggttgggagggctcttcccacggaagcagatcagcaccccaagatctaccgaatgaagctctgggccaccaacgaggttcgcgccaagtccaagttctggtattttctgaggaaactgaaaaaggtgaagaagagcaatggccaagtgcttgccatcaacgagatttttgagaagaacccaaccaanattaagaactatggtatatggttgcggtatcagagtaagactggttaccacaacatgtacatggagtaccgtgacaccactctaaacggtgcagttgaggcaaatgtccaatggaaa

SEQ ID NO: 229732 - DNA, 499 bp, Glycine max
atcaaccccgacgaaggcaaggggtttttctcggcttcttcagatttctgaaatggcgcctgtttcagctttagccaagtacaagctcgtcttcctgggtgaccaatccgtgggcaaaaccagcatcatcactcgcttcatgtatgataaattcgataacacctatcaggctacaattggtattgattttctatcaaaaactatgtatcttgaagatcgaactgttcgactgcagttgtgggatacagctgggcaggaaagatttagaagtcttattccaagctacatcagggactcatctgtagctgttattgtatatgatgttgcaagccggcagactttcttaaatactgctaagtggattgaagaggtgcgaacagaaagaggcagtgatgtcattattgttcttgttgggaacaaaactgatcttgttgagaaaagacatgtctctatagaggaagggagaagcaaaggcacgtgagctcaatgtcatgtttat

SEQ ID NO: 229733 - DNA, 594 bp, Glycine max
tcgccgccgatcagttcgacgaggacacgcctgaggagaaggatgccaagagctcattcttcaactggtggtacttggggattgtggctggctcaactgcttctgtttttgttgtcatatatcttcaggacaatgttgggtggggagtggggctaggagtgctggcaggggtgttggctttggcattggcactcttcttgttgggaatcaaaaggtacagaaaggaaggccctgcagggagcccattcaccaggctggcccaagtctttgtcgccgcatcgcgcaagtggcgcgtgcaggccacgcacggtcaccacaattattgctatgacgaggatgaggagcatcatgagccccataatcatctccatgttcaacccaaaatccacactctcctccatactcatcaatatagatttttggacaaggcagcgatcatagatgaaattgatgccaagaggaagacaagagacccttggaggctatgttcagtgacacatgttgaagaagtgaagcttgtccttcgtttgattccaatatggctaagttgcttaatgttcactgttgtacaagctcaagtgcacacatttttca

SEQ ID NO: 229734 - DNA, 548 bp, Glycine max
caaagacagcacatgggagtagaagctgtgtgctgagttgcaaagccatcatcaatccaatcttgtgttactataagtatttaacagcatagacacacaccctttggttctggccaccctcaggtgtgaatacaataccttagcatgaaattcaactttgtgggactacatgttgaagtttgattggtgaacgaggtgcgctaatgccttcttaagttttgcttttctgtcactttccctctgtgttggtttgctctgatcacttttgtctgcattacaacctgagcctcagatctgatctcttgatccacaaaaccatggctgaaaaggtgaccatcatgaaactcaaggttgaccttgagtgtgagaaatgctacaagaaggttaagaaacttctcggcaagtaccctcaaattcgggaccagaagttcgatgagaaggaaaacattgcgttcatcacagtggtgtgttgtagccccgagaagataagagacaagctatgctacaaaggtggaggctctatcaagagcattgagatactggaactg

SEQ ID NO: 229735 - DNA, 463 bp, Glycine max
gttggtaaagaaacactttattttattaactcatcaaacgtaaggaaacgaaacatcatgacagtatagcatttataaccattaattacataacctttatttttgtttcccccctcattttttttggtcgttgaattttaaataacaaaaacattggattggacgtgattaaacatgatgataattgaaacaaattgtgaatggccaccatcatttacagaacccaataatgcaacgccgtggacgtaattgtcacataattatgcagccttgtggattctcttcgctgaaatattgatcaccacgggtcacataacagggtctgcctccaccgtaactatcatatacgggccttgcatagtacccgtcgtaacagaacatgggcccaccgtattcgtacccaggcccaacgggcctgccttcgtagcacggaggaggagcatagagcatcccaactggaacc

SEQ ID NO: 229736 - DNA, 423 bp, Glycine max
gcaaaaatatgcatcaattcaaacactaaacagggtgggatatttaggtcctatacgcaaaccacattaaactgagaagtaacccttactaaataatgtaccacttgctattctaacaactagaaagtaacagccactggagcattgcttcttaccctaaaaccagaaatcacctatgttctcgaccttcgcaccggcgaacgtgaacagctgcgatatctaccgtattcaggactcctgggcttcccataatcaggactcctgcgcctgccatagtcaggactcctgtgcctgccataatcaggactcctccgcatgtctggtccaccaccattgtacctatcatagacagggctgcgtggacgaccatagtcaggacttggtcgcctgtgataaggactggggtgatctctcataaccccc

SEQ ID NO: 229737 - DNA, 586 bp, Glycine max
  unsure (1)..(586): unsure at all n locations
gacgaattgtggacaaccttctcagagatggtaccatgttcctcgctcatggctgagctcaggtggtaactccatggttgtgtttgaagaatggggaggtgaccctaatggaattgctttggtgaaaagaacatgaaatgtgatgttttatgatgctcccttaaaaggagcagcattgacaagaaatgtatgtctaataacaaatgtctaggaaatgcaaagaagctgtcaagtgagtcctatgcggttaggaccctatgatgcagcaatttaccaaatacgtgtggttcagatcttattaggttcagtattaaaaaatatttgaagttaaatcattggtgctccatgtcttctggttgttcaagtatacctcaaaagatttccaaggcctaatcatgcatcgcctggccaaaaacaaagatgtatataagagaatttggatgcaaatatactgtacatagtcaagtcaggctatagtgctgaatattgctncatgtattacagggctcgtatcaatgaagattcagcccgtacacattttatttactatgatacataggaaagaattgtggacacgcagaaatgt

SEQ ID NO: 229738 - DNA, 116 bp, Glycine max
aaaaaaaaaaaaaaaaaaaaaaaaataaaaaaaaaaaaaaaaaaaaaaaaaaaagggggaaacaaaaaaaaaaaaataaaaaacacggggcggccgtcgccttcggtgcctgtggg

SEQ ID NO: 229739 - DNA, 471 bp, Glycine max
attccaaccaaacccatggttgttgaaactttctccgagtatgctccacttggtaggtttgctgttagggacatgcgtcaaactgttgctgtgggagtcatcaagaacgttgagaagaaggatcctaccggagccaaggtcaccaaggctgcccagaagaagaagtgaatcgtgcgggctggttcatcaggggatgttggttacaataaatgttggtttcttttctgtactcttgtgtcttcttttctaggtagcttgtttttcggacaaagtttgaagtctccaccatcatctcgcaactgttgttcccagaactgggttcttgatcgaaggtggcaaaattgcttttatttatctgtgttttaatgtgttgtgtttgtcggaacccctgattacatttttgttaagcgcagtgagtcttatgactttgctgcgttgtgctgctatggtttattcaatgtcaactctcta

SEQ ID NO: 229740 - DNA, 477 bp, Glycine max
ggaacacaaattatagggaaggggcaaaccaagccaaaaattgaacactacaaatagaaagttgacatttaataaaccaaagcaacacaacgcaggaaaagtcctgaaactcgctgcgcttaacaaaaatgtaatcaggggttccgacaaacacaacacattaaaacacagattaataaaagcaattttgccaccgtcgatcaaaaacccatttttgggaacaacagttgcgaaatgatggtggagacttcaaactttgtccgaaaaacaagctccctataaaagaagacacaagagtccagaaaagaaaccaacatttattggaaccaacatcccctgatgaaccagcccgcacgatttacttttttttttgggcagccttggtgaccttggctccggtaggatccttcttctcaacgttcttgatgactcccacagcaacagtttgacgcatgttcctaacagcaaacctaccaa

SEQ ID NO: 229741 - DNA, 596 bp, Glycine max
agctcgtgagctcaaagtgaaggacgcccttgtcatgtttcaaaacactctccgatggaggaaggacttcaacatcgacgcccttctggatgaagatctgggcgaccacttggagaaggttgtcttcatgcacggacacggcagagagggccatcccgtctgttacaacgtctacggcgagttccagaacaaggacctctaccacaaggccttctcctctcaggataatcgaaacaagtttctccgatggcgtattcagttgttggagcgcagtattcggcacctcgacttcactccttcctccggcatcaacaccattttccaagtcaatgacctcaaaaactcccctggccctgctaaacgtgagcttcgccttgccaccaaacaagctttgcagttgcttcaggacaactatcccgaatttgttgccaaacaggtttttatcaacgttccatggtggtatcttgctttctataccatgatcaatcccttcttgacttcgaggaccaaaagcaaatttgtctttgctggacccatccagtcccccgatactcttttcaagtatatttctcctgagcaagtgcccgttcagtatg

SEQ ID NO: 229742 - DNA, 510 bp, Glycine max
cttgaatctcacaagttgcaagctttcactgacgcatatgcagaacttgcacctgctttgtctgatctgaatgttcttgttgagacctactttgctgacatccctgctgaggcgtacaagaccctcacatctctgaatggcgtcactgcatatgggtttgatttggtccgtggaacccatactcttgatttgatcaagggtggatttcccagtggaaaatacctctttgctggagtggttgatggaaggaacatctgggccaatgaccttgctgcttctctcactacattgcagggtcttgagggcattgtgggcaaagataagcttgttgtgtccacctgctcctcccttcttcacactgctgttgatcttgttaacgagaccaagttggatgacgagatcaagtcatggctagcatttgctgcacaaaaaattgttgaagttaacgcattggctaaggcattgtctggcaacaaggatgtggccttcttctctgcttatgctgcagct

SEQ ID NO: 229743 - DNA, 457 bp, Glycine max
gcacaaaactggtaatatttcatatcaataaggattgcggggaaggggcaaagatacaacattcattagggaaaacaggagttgggaaaaataaggggagaggggttgaggaagaatcaattgctcacagagcatgctaaaacatctaaatattccacacacggttattgaaacaacccaatatagaaaatttttctttggtgtattataaaagcagaaccaatgaacttgtagattctactttcttataccattcacttggcaagttcgttacggatgagttttgctgcggcaaccatgtttgtgagggctggcttcacttcagtgtacttgcgggtcttgagaccacagtcagggttgacccacaagatgttcttttcgagcactgcaagcatcttattgattctgtcagcgatttcttcagttgggtggtattcttggggagtgggatgttaat

SEQ ID NO: 229744 - DNA, 562 bp, Glycine max
  unsure (1)..(562): unsure at all n locations
gcaatgtctgtctcaacaagatttggttgagtcttccttttctcctccttttgtgtttcatgcacagcacatgaactcatcctcctccgccgcagagtccaccatggaagaccgccgctcgaagaagcaccaccgccgtcaccgccaccaccccgccacgacgacaacaaccttgagcacgacgaccggggagtcggacggggaggtggaggaggcggaggacggcgacccggaggcgtgggtcaccctgaacaaggggttccggcaggtgcagtcggtgctggaccggaaccggctactgattcagcaggtgaacgagaaccagcagtctcggatgcacgacaacatggtaaaaaacgtgtccctcattcaggaactcaacggcaacatctccaaggttgtctctctctactctgatctcaacaccaatttctccaacgtttgccaacaacgctccaaaaactcctccaaataagtcaattcanaaggttcttcctaagtaatgtttcgtgtctgtgtcctctgtctatgtctattgcgtatgtgtctgttggtgaagttg

SEQ ID NO: 229745 - DNA, 621 bp, Glycine max
ctgtgacaactactacagctgtgctgatagtgctacttgttgctgtatttttgagttcggaaatgcttgcttcgagtggggttgctgtcctcttgagggtgcttcctgctgtgatgaccactacagttgctgccctgcagactatcccatctgcaacacttacgctggaacttgtctcaggagcaagaacaacccctttggagtgaaggcattaaggcgtactccagcgaaaccccattggaccttcggacgtaagaacaaggtcagcagtgcttaagcagtttaaggaaatgtgaacgtgcagaaggagccaatgatgaagtaaaagggaagacgaaggactaaagcaccagctggatgcacttcccccttcttcacataatgctgcacgtaacataaagatctttaccattttattatgatacaaaatagataatgttctgtatcaaatttcagtcagacattggctctgtaatagggttatattatcgatgcactgtatttgtattcaaattccaaatggcgaacatatttgattgctgttagttttcaaggttctgtagattatgtgacaatgcagcagcaatatttggatttgtcccatattacatgctatttaat

SEQ ID NO: 229746 - DNA, 532 bp, Glycine max
  unsure (1)..(532): unsure at all n locations
aaaggagaggggtccattgaattccacattgtaagcaaattggaatagcatgtgaatatgggacaaatccaaatattgctgctgcattgtcacataatctacagaaccttgaaaactaacagcaatcaaatatgttcgccatttggaatttgaatacaaatacagggcatcgataatataaccctatgtacagagccaatgtctgactgaaatttgatacagaacattatctattttgtatcataataaaatggtaaagatctttatgttacgtgcagcattatgtgaagaagggggaagtgcatccagctggtgctttagtccttcgtcttcccttttacttcatcattggctccttctgcacgttcacatttccttaaactgcttaagcactgctgaccttgttcttacgtccgaaggtccaatggggtttcgctggagtacgccttaatgccttcactccaaggngttgttcttgctcctgagacaagttccagcgtaagtgttgcagatgggataatctgcagggcac

SEQ ID NO: 229747 - DNA, 521 bp, Glycine max
  unsure (1)..(521): unsure at all n locations
ctctgagcttgtcaatgattattacaacaatggtttgccttcaaatctcactgccagcagaaaccccagcttggattatggattcaagggagctgaaattgccatggcatcttattgttctgaacttcaatatttggcgaatccggtgacaagccacgtgcaaagcgcggagcaacacaaccaagatgtgaactctctggggctgatttcatcaaggaagactcatgaggctattgagatcctcaagctcatgtcctccactttcctggtcgccctttgccaagccattgacttgaggcatttggaggagaatttgaagaacacggtcaagaacgttgtgagtcaagttgctaagaggactctcaccacaggtgtcaatggagagcttcacccttcaaggttttgtgagaaggacttgctcaaggttgttgatagggagtacacatttgcatacattgatgaccnctgcagtggaacataccctntgatgcaaaagctaaggcatgtgcttgtggactatg

SEQ ID NO: 229748 - DNA, 538 bp, Glycine max
  unsure (1)..(538): unsure at all n locations
actgaatgtaaatggcaaaggcacatcaaatagtgctagggagcaattgggggatcagaaacatttttcagtctcttgtggccatcttaaccactattctagttgtcgctgccatttatctaacacaggagggagaacaatggtctaatgaaaggaacaagttacattcattatcaaaatgtaacttgttttctggcaagtgggtttttgataatgaatcatatccactctacaaggagcatcagtgcacgttcatgtctgatcaattggcttgtgagaagtttggaaggaaggatctaagctaccagaattggaggtggaagccccaccaatgtgacttacccaggttcaatgccacagcattgcttgaaaggctaaggaacaagaggatggtgtttgtggggggattctctcaaccgaggccagtgggtttcaatggtttgccttgttgaatcttctgttcccccaactctcanatccatgcggactattgcanatgggtcactcaacatttttaaggccgaagaaacaatgcaac

SEQ ID NO: 229749 - DNA, 582 bp, Glycine max
gcttctcttattcccttttctctctccttctactctccccctctttctcattttccggtgacatggagtccaagtggggtggcgcccccgccagcatcatggcggcgaatttcgacgacttcaagtggatcgcctccatgttcgatcccggaaacgacgacgtcaagcccttctccgacgcagctttccaaaaccaggatgcagtaactgcattttcaacttgtggtggagtaacagatgatacccttgttcgttcccaaaacctcactcccattcaatccaccatttctgcaactattgattctcagtcttccttttgtgttgggagcccagtgtctgctaacaaaccaaacgtgagagataatcaagtaaaaggggtcgccaccactacaagtggttcctcacgtgagccatctgatgaagatgatgaagcaggtccttgtgaacaaagcacaaacgctattgatatgaagcgccttagaaggaaaggtttctaatagagagtctgcatggaggtccaggagaagaatacaagcccatttggctgacctggagtggcaagttgaacggctgagactggaa

SEQ ID NO: 229750 - DNA, 510 bp, Glycine max
  unsure (1)..(510): unsure at all n locations
atgcagtgaaagctgatccaatatttcgtgaggtggagaatgtgcgtgttatgtctcaatcaaatttggtaacttataagggtcctacaatgattgcttgtaccctccaagctattgcaatattattgaaggaaagttcagagtgggactggtttattaacctcagtgcctcagattatcctcttatgacacaggatgatttgcttcatgttttctcaaatctgtcaagaaatatcaatttcattgaacacacacgcattgctggttggaaactgaaccaaagagcaagacccatcattattgaccctgctctttacttatcaaagaaatctgatttagcattgactactcaacgaagaacacttccgacgtctttaaactgtttactggctcacttgggttgtactgactcggtcctctgtggagtattgtatatggngatgggataactttccacggactatgctaatgtattacacaaattttatctcctcgccagagggatatttt

SEQ ID NO: 229751 - DNA, 470 bp, Glycine max
gtaactcaacaaaaagtgttgcaattgcgtaaatgggtgcccggcggtgcaaccaaaagcgtgcctacaccgaaacaagcaccaaaactgctggtgtgagtgcttgttgattgttaatatgagaacctatattgaacacaaaattcagaccttttacatcagatatatatgatctataaccacacttatgtacacttgacatcattcattctacttggagggtacccctttgttacaaacactgtttgcttagagattctttagataacagcacctgaagcagctcacgtagcctctcagcaccaggtcctgacctaaacattgtatcattgccacgaacagaacaagggtctgccccaccatctgtgtagccatcacaccatgcaccaggtgaaaatttttgtgtgcgccacagaagttctttgtcaatcttgtctagcacaggatccttctttgcaaatttgcgcgcg

SEQ ID NO: 229752 - DNA, 581 bp, Glycine max
  unsure (1)..(581): unsure at all n locations
cactctttcacactcacctatggctccaatctcaaaactcattcctttcctattcttaacaacccttttagtttccctccaagttaatgccagagacagccaattcttcagcaaagtcacccctctcaacaacaacatcaaagagactgagactcccaaaaatgaaggccaagtaaacaagccagaacaacaaccaacattcattcctgaaactgaaaacagttatggcctatatggtcatgagactggtctgcaccctcccaccactacaacaactaatgctgcaccctacaccaccacttacaagccatacaaaactaccacagctgaagaggacactgccaagtactccaacaacaacaacttctacagcttcaagaaggatggctacaacaccaaccaaaatgagttgagtgaaacaacaagactcacaggcacttcttacaccaacaacaacaactacttctacagcggtaaggatgcttttgctaagcagaatgaatngagtgatacaaagtacactgaaggtggatacaacacgganaatcagaacagcaacaaccactacttctacaacggca

SEQ ID NO: 229753 - DNA, 609 bp, Glycine max
  unsure (1)..(609): unsure at all n locations
tcttcatgaatggaggtctttcaccaggacttgttttagtagtaataggaacaagacactcggggcattgtttaagcttaaggggaaagtttttgagttgtttaaaatctccaatggaaatgatgaatgttctctccacaagggtgatgaggttcaagacgaaggagggttgacctcgttcaaggaaaagattattggagtggttagaacgggtggctttgaagataaaagacctgcaaaactttctctccaggagcttctgcatttgctctctttgttcaatcaagctggcatttattttaatcaccgtggacgtcacaagattgaagatatgcttgacgacaatgatgaatagtgcaccctgctgagatgcttatcaactgctttgtgtttaacattatcattggtttgttttttttcactagaaagcaagcattcttgatttgatgatattttgagaaaaagtaatgcacaccaaagcaaaagtgagagtatgaaaaatgagaaaagttcactctaaccattaaatcttgcttggttggtcaagactggtttactttaacanaacataatgtgaggatgataacccaaatcagctcttttatgctc

SEQ ID NO: 229754 - DNA, 568 bp, Glycine max
caaagaaacagtgtttcatcatttgggtttcgcagaagagagagaaacccatttctagagagagaaactcgcagtcgcagacatgtcttccttcgatgccttcgccgacgacttgaacgtcaactcttcttccactcgccagcacgacgatgacgaggacaacttctctggctacggcggctactcctccttcaccggaggattctccgccgacggagatgtcgccgtcgatcactccgccgccgcgtcgccggagatctacggcttcactgattcgaatcccgcttactctcagtctcccttcgaatcggccaccgtagagaacgaaaacggaaacggatacggcgacggcgacggtgtttttgtctccgacggtccggtgcttcctccgccgacggagatggagccggaggaaggttacgctcttcgcgagtggcgccgtcaaaatgccattcagctagaggagaaggagaaaagggaaaaagaaatgagattgaagattattgaagaagctgaagagtataaggtggctttctatgagaagaggaagcttaatggtgagactaac

SEQ ID NO: 229755 - DNA, 623 bp, Glycine max
  unsure (1)..(623): unsure at all n locations
gaataatgatggatcacagaaaatctcaggagacagcttaaagaatgtgtacaaatcatatgtgacagattatccaattgtgtccattgaggatccatttgatcaggatgactgggagcactatgcaaaattaacagctgaagttggccagcaggtgcagattgttggtgatgatctccttgtcaccaacccaaagcgggtggagaaagcaatcaaggagaaggcttgcaatgcccttctgttgaaggtgaatcaaattggtagtgtaactgaaagtattgaagctgtgagaatgtctaaacaagctggttggggtgtcatggctagccacaggagtggtgaaactgaggataccttcattgctgacctctcagttggattagcaactggtcagatcaagactggagctccctgccgatctgaaaggcttgccaagtacaaccagctcctgaggattgaggaggaacttggttctgctgctgtgtatgctggtgccaaattcagagcccccgtggagccctactgattggttagcccaagattactaagcatcatttaaatagattctattgatgactgcatangacatgtaatttttgcgaaaaataaactggtctactact

SEQ ID NO: 229756 - DNA, 546 bp, Glycine max
  unsure (1)..(546): unsure at all n locations
caaagctcattccgagagacagagttaaagatgagtgaagacgcgaaaaagaacattgccggagctctaacggcgaggcccaactccgatgaccagaaaccatcgccgttaccgtcaccggcgccagccgtcccgccgaagaaggtcatcatcaagagcgccgacatgatccccgacatgcagaaggaggccgttgatatcgccgtcgccgcgtttgagaagtacaatgtggagaaagacgttgcggagcagataaagaaggagttcgataagaggcatggacccacttggcattgcatcgttggtcgtaattctggctcatatgtgactcatgaaacanaccactctgtttatttctatttggatcagaaagctggtttactctttaaatctggctagagaaagtgacaacaatgagaactgtctggtgattatgctaatggtattccgccttgtgctcgtatatttgatgtcatgctaactagttctcggttgggatatgaatttaaggattactccatttgagatcagtgggttttttttttt

SEQ ID NO: 229757 - DNA, 614 bp, Glycine max
  unsure (1)..(614): unsure at all n locations
agagagagaagctgcgcaccttttcacactagtgctgattgctgaaactggcatcgctcgccatttgcgcaaagatcccaacaacaacaccattcgaaagttgaaactgaaaaacaccaatccctcctcgtacgaggtttccttgttccgtcatcaattctcgtgtttaaggtcttgtgagtgtaagcagcatggaggatattcaattggatattagttgggacgatgtcgcctgtcccatatgcttggattttcctcataacagtgttctccttcattgttcatcttatgataaaggatgtcgtgcttttgtgtgtgacacaaatcaattgcactctaattgtttggatcgctttaaaaattcatgtggcatgccatcctctccagtgtctaatgcaacttccactgaaactactgnaaatagtgatgatcatgaggtatcaaatggtcaatgcaatctgacttgcncnttgtgtagaggtgaaggttctgggtgggttatagtctgataaagctcgcattcatcttgatgagaagaagcgttgttgtgatgaagtgcgatgtactttcatgggaagttacttggagctacaggaacatgctcaacttgaaca

SEQ ID NO: 229758 - DNA, 590 bp, Glycine max
  unsure (1)..(590): unsure at all n locations
atgatgctgtgcactactttgaggaactaaagttaactggcctcgatcctgatactgtttcttacaatcttatgatcaatggcctcggaaaatcacgtaggttggaggaagctctttctctttttagtgaaatgaagaataggggaatttctcctgaactttatacttacaatgcattgattcttcattttggaaatgctggaatggtggaccaagccggaaagatgttcgaggaactgcaatttatgggtcttgaaccaaatgtcttcacttataatgctctcatccgtgggcatagtaagtcaggaaacaaagatcgagccttttctgtcttcaagaagatgatgattgtgccggtgtagccccaatgcaggaacatttgctcaattgcctaataaatgttgattttattgagttatctcacggngaccttttcttatgttcccgatcccaaaatggaggcatgaagggtcactttgtcttggaaatggtcttggagattggaatcgcataccagtctttcagttaatgattgattggtatgcaaaatatatgtatcattctggaaattcctgctgattaatgctgac

SEQ ID NO: 229759 - DNA, 522 bp, Glycine max
  unsure (1)..(522): unsure at all n locations
ctgggtctgtttttattatatttattttaaaattttctttctttttttatatttttttaattaatattatttttttataacataaaaaaaaggggcgccaaaaaaaaaaaaagttcaaaaaaacaaataaaaaaaacaacaaattaaaaaaaaaaaaaaaaatgaaaaaaaaaaaaagaggaacaaaaaaaaaaaaaaaaaccttatttcccaatttcccaaaaaaaaaaaaaaaaaaaattttataaaaaaccccccaagacccccaaaaaaaatcctacaaaaaaaaaaaaaaatgccccaaaaaaaattatagcccaaaaaaaaaatctttttcaaaaaaaacaacgatatataaactccaaggactccaaaaaaaaaaaaaaaaatttccccccccaaccccaaaatttanaaaaaaagggtttaaatacctaaccccaaaaaaacattttaaaaaaaaaaccccccctcctccccccatttgagggaccaaacaaaaaaaaaaacgcccccgaaaaa

SEQ ID NO: 229760 - DNA, 524 bp, Glycine max
ggaagaaagagttggttctaaggtttgttgtgcttgctgtggctgttgtgaacacagtgcaatggaatggagaaggcacgcgtgtagggttctattcgagcacatgtccacgtgccgagtccattgtcaggtccacagtggaatcccaccttaggtcagaccctactttagctggtccaatacttaggatgcacttccatgattgctttgtgcgaggttgtgacgcttctgttctcatagccggtgctggcactgagagaacagcggggccaaaccttagtttgagaggatttgatgtcattgacgatgctaaggctaagatcgaggctctgtgccctggtgttgtctcttgtgctgatatccttagccttgctgctcgtgattctgtagttctgagtggtggactaagttggcaagtgcccacaggacgcatagatggaaaggtttcaattggatcagaagccttaactttgcctggtcctaatgataccgtcgcacccagaaggataagttttcaaacaagg

SEQ ID NO: 229761 - DNA, 522 bp, Glycine max
atatcattgcccacaatatttttaattattgctttagggactgggaaagcaaagtttttctggcactagatttaattaaggaggtgtatagaagtttaatcttggcacctctcagaaaagtatgcaattaattaattagtcttattaaccagtatccttaagtgatgattaatataattttaaatatttttttaattccttaatcaatattataaggatactgattaatatttgccttaattaattaatagcagaacatatcttgcgaatttcaccctgagaaccggtcttgacaccaatgttgctcatcttgatcatagactttccgaattggaccttgaagggacctgtggctaagtatttctgaacaaagcctcttgtggaagcattagtccaaagaacctgatcagaacggagaattccacggcctttaactaggtgagcgaagtatgacgtgtcgaatttgaattggcttcctgtgcttagagccactcgcttcgttggttgtgtttgggggcaaat

SEQ ID NO: 229762 - DNA, 528 bp, Glycine max
cgttcttcttcttttgttgttctgtgtttgtgtttgttttttctctcacctgaaaatgtcttgctgcggtggtaactgtggttgcggaagctcctgcaagtgcggcaacggctgcggaggctgcaagatgtacccagacttgagctacactgagtcaaccaccaccgagaccttggtcatgggagtggcacctgttaaggctcaatttgagggtgctgaaatgggtgtgcccgctgagaacgatggctgcaaatgtggaccaaactgctcctgcaacccctgcacttgcaagtgaggtgttgggagagcaagcttcaagcagagatagcccttaattaggaataatgataaactattaatgtgtagctaaaaacttatgtattatgtctgtgatggttttcgtgcactctgggttttgtgttaaacaaacatccttagataaagtggtcatgtcttgcctttcagcaagttcaaagtgttttggacttgtgatgggtgtgttaagctcatggttgcttcttttttttt

SEQ ID NO: 229763 - DNA, 440 bp, Glycine max
ttttttttttttttttttttttttttttttttttttttttttttttttttttgggtagggtttttttttttttttttttttttttttttcccccccaaaaaaattttaaatttaaaaggcggatattttaaattcaaaaaaccgccacttttttaaaaaacccccccttccccaaaatttaaaaaaaaaaaaaaaaaccccccttaatctaaaaacccccaaaaaaagtcaaaaaaattttaacttgggaaagggaaaaaaacccccctttttttttaagggggtttgttaaaaaaaaaaccccagggggccaaaaaaccaccccaaacaaaaaccaaagggttttacccccccattaaaagtttataattttcccaaaaaaggggctttttttgttagaaacttgcctccccaacccctcattttaaaaaacaggggtt

SEQ ID NO: 229764 - DNA, 448 bp, Glycine max
agaagcaacaactatactctcattgaaagactgagagagtaaagaaaaccctaaaaccctagaaattcagaattcagctgaagaagaaggaggaaccaatggacttcgacgagtacgaatacctggagaagacagtggaggaagacatagattcctccaagaagaagaaggacgtcacctcctccggctcagtctccaccaccagcttccactcccccaccagccccactcagctctcctcccactgcctcccctcctccttcatctccaccacccgcatctcctccccctgcctctcctcctgcggcatcttcaccacccgcatctcctccccctgcctcccctccttcggcatctcctgccccagccactgctcctgctgcttctactactcccttttcaccaccaccaggcaactcctgcaccagcaacgcctgcacccgcattg

SEQ ID NO: 229765 - DNA, 484 bp, Glycine max
agaatgcaacgttcgatacactaataatagtgccatacaaaaggactgtcctcgaatacaaaacctcccctcaaatctcccaagaatgcaagcaatgtacgtatataattcaaatacagtaattaataaactcccatgatcacatccacaaaataataatatataaaggtaaggtaaatagaaaaataacatgaattggcagaaaaatctgcaagtccgaagacagagatcgatgatgtctagaacaacaaggacagcaaagcacatccgaatactaagctcccaatcatcttctgaaaggaccacaacttttcagccccactatcatcgccagagggagagatggtggagaggctggggccgggagccaaggaaggagagagtgcaggagcaaccaccttggcaggagctggagctggagaagtggcttggtggaaaagaaaggggtgtatagggtcaatgcgggtggaggcgttcctggtgg

SEQ ID NO: 229766 - DNA, 419 bp, Glycine max
gattattgttacattatgttacatggttgtacttgtatatacatatcttgtcccacctttgtaaatacaattgggacactactaggattgggaagaagggtctttacatttatagtttggcaaatagatattgcaactacctttgtataattctatttctgaagaagcaattacaatttacaagggatggtgccatttacggcataaggattaaggagggataaagggaccaattgctttggaatatccactcattacaatgcatgtatgacaacacatagtaatatgatgtgtgtttttattcagtgggcaactggcagatcgggttttccctggtcacttttgtataattattccggaagaatttatgatgccaaaattattgtttaatattaaaaataacactatctaccaacttt

SEQ ID NO: 229767 - DNA, 530 bp, Glycine max
tgtcttcttcccccaacaaactaaaccaaaccataccattaagaaacaacacatctatctcagtccccaaaccaagaaaccctaaattaaattcatgtgctcctccaggtctaccagtgctgcaccaacaagaccttgttacttggaacaaggccacggcttggcttccttaaaacacatggatgcgtgtcataatcgtgccaacaactttgtctctaggtccatgaccatgggttacggcacttcctaccacagaactagtttaaggaacaacaacaacaacaacaacaacaacgtttctgtttcttcaccaagatctgcgagattctacgacgccagattcgaagatcaacaccacccccacttcctctgcgcttgtttcctctgcaaaaaatctctcggggacaatagagacatcttcatgtatagaggggacacaccgttttgtagcgaaaaatgcaggcaagagcagattgagatagacgaagcccaagagaagaataggaacctttcttcatcgatgaaagctt

SEQ ID NO: 229768 - DNA, 547 bp, Glycine max
  unsure (1)..(547): unsure at all n locations
agttaaaagaagagcatcactgaactaacaaagcaaccctatgtcgaaggtggtttgtgtcaccggagccagcggcgccatcggatcatgggtggtcctactcctcctccagcgtggttacaccgtccatgccaccgtccaagatatcaaggatgaaaatgagacgaaacatttggaggaaatggaaggagcaaagagtcatctccatttttttgaaatggatcttcttgacatcgactccattgccgctgccataaagggttgttccggcgtaatccaccttgcatgtcctaacatcattggtcaagtcgaagatcccgagaaacagatattggaaccggcgataaaaggaacggttaatgtgttgaaggcggcgaatgaagcaggggtggagcgcgtggtggcgacttcatcgatttcgtcgattatgccaagtcctaattggccagctgataagattaagggagaagagtgttggacggaccttgaatactgcaagcaaaaggtgttgtattatcccattgcanagactctagcagagaaagcg

SEQ ID NO: 229769 - DNA, 498 bp, Glycine max
agaggatcgaagaacgaagcatcattaagcaatacactctatgcccctcattctacctgccttcaccttcttcttcgttgcggtggtgccctagattctctctatccctttgatcgttcctgaattaccagccaccggccctcgctctagggtttcccatggattccgaggacgatatgcacgacgccgacgatgtggagtccctcgacgacgatttctacagcggcgagaccgaggacccttccatggattactacagtgactacgacgacaacgccgacgattacttcgacgacgccgacgattctgaccggattgagtctcgccgtcccgagcaaaactttaccatattgagggaactggatatccggcaaaggcaggaacacgacatagctagagtagcggcagttctttccatacctcgggtatctgcgagcatcctacttcgtcactacaacatgagtgttagtaatgtgcatgatgcttggtatgctgatg

SEQ ID NO: 229770 - DNA, 569 bp, Glycine max
ctcgagccgctcgagccgattcggctcgagcttcaatttataagaatggcactttctcctattcgttcttcttctttctcttcatcagctattgttgcattggctgtgttactgcttcttacagggacctcttcagctaacctctcaaagaacttctattccaagacatgtcccaacgttttcaacactgtaaaatctgtagttaaatctgctgttgtcagagaacctcgcattggggcatctattgttcgtctcttcttccatgactgctttgttcaaggctgtgatgggtcaatactacttgatgacactccaaccttccagggggagaaaactgcagctgctaacaacaattcagtgagaggctttgaagtaattgatgctatcaagtctgaggtcgagaaaatatgccctggtgtggtctcatgtgctgatatcttggacattgcttctcgtgactctgttgttcttcttggagggccattttggaaagttagacttggaagaaaggattccagaactgccaactttactgctgctaacactggtgttattccaccttccacatc

SEQ ID NO: 229771 - DNA, 391 bp, Glycine max
gccatataatttattccatattaaaattataaggttacacagggacaagttaaattgaactaaacaaacaattcacaatttcccaacccaagagaaatcacttaaacaacaaaaaagaccaaacaacttcccccttttgaagggtacaaagtttacaacaaacaaatttatgtgtcacttctaattaattcactctcctgcagttcttcctaatctcaccttgggacccagttaagggtttgatatctcccatcctaatcattgctttaacaaagtcagtatcaaatgccttgttattctggctgtaagttcttaccagtgaatcagtggatccaccattgaaaagcacttgatcagaattcaggagtccccttttgatgagaaggttttg

SEQ ID NO: 229772 - DNA, 546 bp, Glycine max
cgagcaaccacagacgataatcgcatcattatatcaaagtataacttgggtaacaataactgcacatctaatcttctacaagtaccatgaacacaggccaaacattcattttaaaacaagataatgtaattaaatagagcaaatcattctctagaaacaggaactaagcatctgaacctcttttggtcgctcaacggtagctacttaaagggtcagcagttttcccagttctagcatcagtccatgcttttgcaatggttttcttcatctcatcgtccccatcctcatacatattcttcatcatgtccataattcccgccattgggtctttctctttgtccagatttggcttaagcttgtcttctttgaagtgcaaatctagccagtttcctttggaagccttcaccaatgtaatgattgcccttttaggcttgaccacaaccttgcatttctccggtactatctcattgtgcaattttgatattgcacatcggtagttcttcccttgaacatcatggaacttaacatcgaatgacatcgacttaa

SEQ ID NO: 229773 - DNA, 428 bp, Glycine max
caacggccacgtcgggctgggcgtgaagtgcagcaaggaagtggcgacagctattcgtggcgcgattattctggcgaagctgtctgttatccccgtgaggagggggtactgggggaacaagatcgggaagccccacaccgtcccgtgcaaggttacggggaagtgcggctccgttaccgttaggatggttcccgcgccgagaggttcggggatcgtggcggctagggttcccaagaaggtgctgcagttcgcggggattgatgatgttttcacctcctccagaggatccaccaagaccctcggcaacttcgttaaggctacttttgattgcttgatgaaaacctatggattcctgacaccagaattctggatggagactcgcttctcagatctccattccaagagacacagatctactgggcaaacca

SEQ ID NO: 229774 - DNA, 563 bp, Glycine max
ctcttcaaaagggagaagaaaaggaaagaaaactctcaaaaaactattatagcaatggcagaacaaaaccaaaaccaaacaactgaagctggaaggcaccaagaggttggtcacaagagccttctccagagtgatgctctttaccagtatattctggagacaagtgtctacccaagagaacctgaatccatgaaagaactgagagagttgacagcaaaacacccatggaacatcatgacaacctctgcagacgaagggcagttcttgaacatgctccttaagctcatcaatgccaagaacaccatggaaattggtgtctacactgggtattcacttcttgccaccgctctcgctcttcctgaagatggaatagatcttggccatggacattaacagggagaattatgaattgggtttgcctgtaattaaaaaagctggtgttgaccacaaaattgaattcagagaaggtcctgctctaccagttcttgatgacatgattaaagatgagaagaaccatggaagctatgacttcatctttggtgatgcggacaaagacaactacc

SEQ ID NO: 229775 - DNA, 472 bp, Glycine max
aattgtccacagttttccacacgagtaggagagggaagtacagacacatatttttttttgaaagaaaagtattgattgcttttaaatgcattagcaggtgccacttcatgatgaccagtcatcactatagggtgtgcagaagaagcaacggtggtccacgattatgatgatcagaaatcacttgatccgacggcagatagtgattccatcaccaaccgggagcatgcaaatctcgatcctggggtccacagcgagggctttgttgagctccagcacgaagtccctgtagtacctaacatactttctaagaggagcatcagggggtgccaccacagatccgttccatagggtgttgtcgtacccgatcacgcccccaacttttacaagctctatcaacctcttgtggtagttgaggtagttgtccttgtccgcatcaacaaagatgaagtcatagcttccatggttcttctca

SEQ ID NO: 229776 - DNA, 439 bp, Glycine max
aggaccgcaacaagccgatcatcttcaccatggcaagacttgaccgtgtgaagaacatcacgggacttgtggagtggtatggcaagaatgcgcgcctccgcgagttggtaaacctcgtggtggtggccggagacaggaggaaggagtccaaggacttggaagagaaggccgagatgaagaagatgtatggcctcatcgagacctacaagttgaacggccaattcagatggatctcctctcagatgaaccgtgtgaggaacggagagctctaccgtgtcatctgtgacacacggggtgcctttgtgcagcctgcagtttatgaggcctttgggttgactgtggttgaggccatgacttgtgggttaccaacatttgccacatgcaatggtggtcctgctgagatcattgtgcatggaaaatctggttaccacattgaccc

SEQ ID NO: 229777 - DNA, 409 bp, Glycine max
ggggaccaataaacaccgaaattgaattggagagggcatatctttaaattgaattgatggggtggaacacccaaatttaaagatttccaatcatactcaatattgccacaacaaaaaagaaaagaataaaaaaaaaactatttttttgttttttgttttacacaaaacctacgcaaaatatcaaaaatcaacgacacttttttttttagactctttaaatccaaaaacagatcacaatcaaaattcaatggctttatttatgaaagctccataagactccaaacgaccaaaagccggtttctccattcatgttctcttcaaacatgattttactcttcaatagcaaggggcacagactcagccaatttgcggtacttgagagcatagaacatctcaaggtaacgtttgc

SEQ ID NO: 229778 - DNA, 574 bp, Glycine max
  unsure (1)..(574): unsure at all n locations
ctcgagccgtttcactcctgataaacccaaagacaacgcagtgatcaatggggattttgaagagggtccatggatgttcaggaacacttcactgggtgtgttgcttcccacaaatttggatgaagaagcgtcctcactacccggttggatagtcgaatccaaccgtgccgtccggtacattgattctgatcattactctgttccacaaggcaggagagccattgagttgctctcaggaaaggaaggaatcatatctcaaatggttgagaccaaaccagacaagctctacagcttgaccttctcattgggtcatgctgatgacaagtgcaaggagcctcttgctgttatggcctttgctggtgaccaggctcagaacattcactacactcccaattccaattccaccttccaaactgctaacgtcaatttcactgccaaggctgagaggactagaattgcattctatagcatatactacaacaccagaagtgatgatatgagttctctatgtgggcctgtggtggatgacgtcagggtctggttttctggctccaacngccttcgtgggttgggc

SEQ ID NO: 229779 - DNA, 480 bp, Glycine max
gtcatagcttaaactataaactaaaaacttaaggccagttcacatacaacattgttgacatggagagtgtgactttacctacacccccctcaacccaaaacaacctattaggcatatggtaatggtaataataaataaagcaagaccaaatgaaacccttttacatcagaaccaaaactagacccaaaattacaagcacaagccttcctaagcccaacccacgaaggccgttggagccagaaaaccagaccctgacgtcatccaccacaggcccacatagagaactcatatcatcacttctggtgttgtagtatatgctatagaatgcaattctagtcctctcagccttggcagtgaaattgacgttagcagtttggaaggtggaattggaattgggagtgtagtgaatgttctgagcctggtcaccagcaaggccataacagcaagaggctccttgcacttgtcatcaactgacccatg

SEQ ID NO: 229780 - DNA, 376 bp, Glycine max
  unsure (1)..(376): unsure at all n locations
acccctcttaataccaattttctagggtttatacaattttcgatggcttcttcagatgttgagtaccgttgctttgtcggtgggctcgcttgggccactgacgaccaagctctcgagagagccttctctcagtacggcgaaatcgttgaaacgaagattatcaacgatcgtgagactggaagatccaggggttttggatttgtgaccttcgcctcggagcagtccatgaaagacgccatcgaagggatgaacggccaaaaccttgacggccgtaacatcactgttaacgaagctcagtcccgtggtggcggtggcggcggaggcggtggaggtggtggattgctggttggtcgcggtggtggatantgttggtggt

SEQ ID NO: 229781 - DNA, 491 bp, Glycine max
  unsure (1)..(491): unsure at all n locations
ctgattatcatttcattaaatcgactataagcaaccagatatattggtcaaaaacaagaaccacggtgacacaaaaccataaagatactcaaactcaaacacaactaaaattactgagcataatcataaaccctaatcaacgacatcaagccctagtttctccagcctccatcaccaccgtcaccaccacgagagtaaccacggtcaccaccaccaccataaccacggtctctgccaccgtcatagccaccgccaccgccaccgccatatccaccgccgccgccatagcctccaccgccaccgctacggttgtatccccctccaccaccgngaccaccaccaccatattcaccaccgcgaccaccaccatattcaccacctccaccgncttcggcgtcaccgtcaccacgggactgagcttcgttaacagtgatgttacggccgtcaaggtttaggccgttcatcccttgatggcgtctttcatggactgc

SEQ ID NO: 229782 - DNA, 546 bp, Glycine max
aaattgctttgctgtaagtttctgattcctttcttcagaattccaagttttcatttcgttagggacttttgatgtctcccttctcaccattgaggagggtattttcgaagtgaaagccactgctggtgatactcacttgggaggtgaagattttgataacagaatggtgaaccattttgttcaggaattcaagaggaagaacaagaaggatattagtggaaatgccagagcattgaggaggttgagaacagcatgtgagagggccaagaggactctctcttccactgctcaaaccaccattgagattgattccttgtatgagggtattgacttctacacaaccatcacccgtgcccgtttcgaagagcttaacatggacctattcaggaagtgcatggagcccgtggagatgtgtttgcgggatgctaagatggacaagagcaccgtccatgatgttgttcttgtcggtggttctactaggattcccaggttcaacagttgttgcaggacttcttcacggaaaggagctttgcaagagcattaacc

SEQ ID NO: 229783 - DNA, 467 bp, Glycine max
agaccatatgcaacttatatcattgttaagttgaaacggggaaaagtacattaaaaaaacgagaaaagttaaatccaaatccaaaacataatgacaagacaggttattatctaaacttcaaaagggtcttcgcaaaatcaagaacaacccatgacaattggtctgcttaatcgacttcctcaattttgggtccagcaccgcttccactgccagcagcaggaccatcctcatccatggctccacccgcatcaccaccagctccttggtacatctttgctatgatggggttacaaatgctctccaactccttcatcttgtcctcgaattcgtcagcttcagcaagttggtttccatcgagccattggatagcctgctcaattgcatcctcaattttcttcttatcatcagcagacagcttggaagcaatcttatcatctttaattgtgttcctcatgttataggcgtaa

SEQ ID NO: 229784 - DNA, 479 bp, Glycine max
  unsure (1)..(479): unsure at all n locations
cagctttcatcagttttttacacattctcaatgggaactcgaagtcatttctttggacggactgttctgcatggtggggcaaaatatcgagctactggtcgtggttttgttgtagagcacaagagatttgctgaaatctatagactctttgcccgtagccattttgtgaaagcaattgaattggggctgatacttgtaatttatgcatcacatagtcctgtagctactgacacatttgtttatatagccttgaccatcactagttggttcttagttgcatcatggattatggcaccatttgtgttcaatccttctggctttgattggttaaaaactgtttacgattttgatgactttatgaactggatttggtacagtggaagtgtatttgctaaagctgaacagagctgggaagggtgtggtatgaagagcaggatcatctatagggtactggcctttggngaagctttggagatatc

SEQ ID NO: 229785 - DNA, 371 bp, Glycine max
ctcgagccgaatcggctcgagctacttatgtctcaaaagagcttggagaagcgttttggtcagtctccagtttttattgctgccactttcatggagcagggtggcattccaccttcaacgaaccctgcaactcttcttaaggaagcaatccatgttatcagctgtggttacgaagacaagacagaatggggcaaagagattggatggatctatggctctgtgacagaagatatcttgactgggttcaagatgcatgctcgtggttggatttccatctattgcatgccacctcgcccagcattaaggggttctgctcctatcaatctttctgatcgtctcaatcaggtgcttccgtgggccttgggttcaat

SEQ ID NO: 229786 - DNA, 470 bp, Glycine max
aacaaaacaacacaggaccttgttggctttcattaaatattcgcatgaacaaatttatattctgtggggaaaaaatataacatacacctcaacattactactgactattcttgtaaggaacatgtagataaataatagaaacagagagggtacattcccatctatttcaggggttcaatcctccagacaactttgataggctgaaaattcttgctatatacacgacagcaaccttgtgtatctccaagcaaaagggaataacaacacaaaatgaatcatacaagagaactaacagttgatgccacattgaccattggttaatttgttggagtcagaagtgaagggatcaatcctcacccacagcaaggagaatattgaagcaagaagaacggaccaaacaataacaatggttggggtacgattttgcctgcccaagagacccttcaagaatgggtatagatgggcaatga

SEQ ID NO: 229787 - DNA, 403 bp, Glycine max
tttggctcgatttgaaaacgatcgaacaatttcctttataccacctgatggatcgtttgatttgatgactacaggctcagtacacaggttaagcctttaatttgggtggaagcaaatgttgaaaagcattcaaagagtcggattgagattatggttacagctacgagtcaatttaaggaacgtagcactgccacaaacgttgagattgagttgcctgtgcctgttgatgcaaccaatcctaatgttcgaacttcaatgggatctgcatcatatgcacccgaaaaagatgcgttaatctggaaaattagatccttccccggaggcaaggagtatatgttaagagcagagtttcatcttcccaggataacagatgaggaagcaactcctgagagaaaagctccta

SEQ ID NO: 229788 - DNA, 607 bp, Glycine max
tgtaaattgcatcatccctgaagctgaacctcaaaaccctagctgtccgcctgtctgcaacggcgtcgttatgatcagttgagaatccaaaggaatcgagtcgaatcatctgaccggcgacagttatgtacagagagcgaggaggcgtcggatccaaatcggaggtaacttccgttgatcggaagcgaatcaacgacgtcctcgataaacagcttgaacgttcctcgccttccacatccagagccgccgccatcaacggcaaggaccgctcctcctcttccctcttagccgccgccaaggactcccgctccgcctccgtcaccgcccctatctccaagaattccaacgcttccgacgaggaatctgaaacagacagcgaggagtctgatgttagtggctccgacggagatgacacatcgtggatctcgtggttctgcaatttgagaggaaatgaattcttctgcgaggttgatgacgattacatccaggacgacttcacctgtgtggattgagcagtcaagtgccttactatgattatgctctggatttgatttgggatgttgaatcgtcccatggtgacatgtttaccgaggaacagaatgagtta

SEQ ID NO: 229789 - DNA, 575 bp, Glycine max
tgataatcaaaccattaatatcagaccctatttaaaagaaggaggttcaagcaagaagtgggccattataggtggcgtcgtaggaggtgttgttctcctccttgtgttgtttgcctggagattgtttacaaaaccaaagagagctcccaaagctgacatattgggagcaactgagttgaaaggtccagttagcttcaagtataaagatttgaaagctgcaacaaaaaatttcagtgctgataataaacttggagaaggaggttttggtgctgtatacaagggtactctgaaaaatggaaaagttgttgctgtgaagaaactaatgttggggaaatcaagcaagatggaggatgattttgaaagtgaagtgaagcttataagtaatgttcatcatcggaatctcgttagacttcttggttgttgcagcagaggccccgagagaatcctagtttatgaatatatggcaaatagcagccttgacaaattcttatttggttccaaaaaaggttccctcaattggaaacaacgttatgatataattttgggcacagcaaggggactagcatatctacatg

SEQ ID NO: 229790 - DNA, 236 bp, Glycine max
gaaaaaatgggttcttcttcttctatgtggacggtgtgtgtgattttggcatcactggcctgtgcagcactctgtgccaacccacgcaagccagtggatgtacaatttgggcgaaactacgtgcccacatgggcctttgatcacatcaaaattttcatggggggttctgacattcagcttcatcttgacaagtccactggtactggcttccagtccaaagggtcttacttgtttgg

SEQ ID NO: 229791 - DNA, 574 bp, Glycine max
gatcttctctcgtcgtcagatcggagttacgatacgcgaaggcctgacggaattaatttcccgggctcgacgacgctcacttagtcggcggtccgcccttttttatttttttttgtgaatacattatatttgtgtcatttattaaatgagattaataacttcaacggaggaaacttgacactgatatggatatacattatataaacattgtacactaggaagtggaaactgtgaatgctgtggcacgggtgataacaaatgaaacagagaagcaacaataataaagtgaatgagaaatttaaatatcacggactaaaatatctattcactcgaaatttaaatgtcacggtctcttttgcactcaggaggagagatatgaggatagcgtttagtgtcagtgcagtagttgtagatggtgtatttctggcgcacccatctgagcctacgccactgggcggcgtcaaggtcacggaactcaggctggtcccaccacctcttgccctgcgtgtcgcagaacttggcgttcaccgaaacctcgcacccgtcgatgtgaaaccccttgtacgctgctatg

SEQ ID NO: 229792 - DNA, 547 bp, Glycine max
ccttggaggaggtcaggcttgcaatagagtacattgtgattcctggtggagaacctgtggaacttcttcctagacgctctgaaattattgcccggcagcttgaactcgttcaaagttatcagttggctgctgaaaagtcaggtagcgatcagaatcccaggttgcaaattcttcccttgaggctaaatacaaaaaaaccctctaaatctactattggccgtaagaaaacaagtcctacctcaatgtctactggtgacagcggcaatggcatcagtgtcaccaaggcttcctatttttcctgaataattcaaattctttcccaattctaacatatttcacttcactggtttgtacatgtatgatgcatatgtaacatgtacagtcatgcaagtggtgtaaataatttatttatagcctaagaagagcttgtagctcaattggggtgtgacatttatgacggaagtttgatcctccgccaagctaccccttcttgtttcaaggtatatatattgaaaaaatcaatctacataaaatggtatatttaatt

SEQ ID NO: 229793 - DNA, 518 bp, Glycine max
  unsure (1)..(518): unsure at all n locations
ccctaaacgactctatctctcttcgttttgttcttccttgcgctcctcctcgttcgttcgttctccctcgcgtagatcggcaatggcggagaccgagacgtttgctttccaggctgagatcaaccagctcctcagtctcatcatcaacaccttctactccaacaaggaaatcttccttcgtgaactcatcagcaacgcctctgatgctttggacaagattagatttgagagtttgacggacaagagcaagctcgatgctcagccagagttgttcattcatattattcccgacaagactaacaattcgctgaccattgttgacagtggcattggcatgaccaaagctgatttggtaaacaacttgggtacaattgctaggtctggtaccaaggaattcatggaagccttggctgctggtgctgatgttagtatgattggacagtttggtgtggnggttctactctgcatatcttgttgccgaaaaggtcattgttacctnccagcacaatgatgatgag

SEQ ID NO: 229794 - DNA, 566 bp, Glycine max
cttccttctccttctcctcatcaacatcctgcaccttaccgtcctcatccttcttctcttcctcatcctcatcgtcagaaatctccttctcggtagtcttctcaacccaaagagaaattgggtagctaatgaactcagaatgcttcttaatcaaatccttcaaccggcgctcctcaaggtactctagctgatcctccttgaggaagagagtgatcttagtacccctgccaagaacctcaccagaggtatccctggtgacagtgaatgaacctccagcttgggactcccaaacgtactgctcatcatcattgtgcttggaggtaacaatgaccttttcggcaacaagatatgcagagtagaaccccacaccaaactgtccaatcatactaacatcagcaccagcagccaaggcttccatgaattccttggtaccagacctagcaattgtacccaagttgtttaccaaatcagctttggtcatgccaatgccactgtcaacaatggtcagcgaattgttagtcttgtccgaaataatatgaatgaacaactctggctgagcatcgagc

SEQ ID NO: 229795 - DNA, 554 bp, Glycine max
tggatttcttcacaaactgtggaaagattcgcttctactgttgggatactgccggacaagagaagtttggtggcctcagggatggatattatatccatgggcaatgcgccattatcatgtttgatgttactgcccgactaacttacaaaaatgtccctacctggcatcgggatctttgccgggtctgtgagaacatcccaattgttctttgcggtaacaaggttgatgtgaagaacaggcaagtgaaggcaaagcaggttactttccacaggaagaagaatttacagtactatgagatttcagctaaaagcaactacaattttgagaagcctttcctgtatttggccagaaaacttgcaggtgatcctaacttgcactttgtggagtctccagcattggctccaccagaagttctaattgatttagctgcacagcaacaacatgaggccgagcttcttgcagctgctagtcagccccttcctgacgatgatgatgaatcttttgagtaaaactatgccttttgagtcgtgctactgcttatgctacagtatgta

SEQ ID NO: 229796 - DNA, 465 bp, Glycine max
caccaaactatcgggacattgttctacatgatttcaataggaggaatttaaaccaatataatcatatcatttctttttggacgcaccaaactcgagaatcaaaatagcacttgggcacagcctagccccgctgtctcttcaagagagccaaataacacaaaagcacgtactacagcccttggctacaaggatatgtcaaactattgggagatttttttaagattaaagcaaaatgattaaatttctgacactcaaatccggcatccaaaactgtcaacattacaccccccaaaatacatactgtagcataagcagtagcacgactcaaaaggcataattttactcaaaagattcatcatcatcgtcaggaaggggctgactagcagctgcaagaagctcggcctcatgttgttgctgtgcagctaaatcaattaaaacttctggtggagccaatgctggagactc

SEQ ID NO: 229797 - DNA, 555 bp, Glycine max
  unsure (1)..(555): unsure at all n locations
gttcattaacatatacaaattctctgtgttgtgttgtgtacttgtgttaattgtgttgttgttgtaggaaatttaagtgaagagagaatgatgatgaagtctgctatgtgtgcattggtgcttgtggcactggttgtggttgaagtggggcccatggctgaggctgcggtgacttgcaacccaacacagttgactccttgtcttccggcaattaattcaggttctgcaccttcgagtgcttgttgccagaagctgaaggagcaaaagccatgcttctgtggctacctcaaaaaccctagcttgaagcagtatgttaactctcctaatgccaaaaaaaccgttagttcttgtggtattgcctatccaacttgttaagcacctcttatatatatatataaaatgtgtgaacaatatatatatattgattaaaaaatatagtttaatttatatacacactttgatcctattaaaacatcttgacacangcattcaatagaatttcaccactttatcatgacattntactataatgatgtggtaataaagtaaattctt

SEQ ID NO: 229798 - DNA, 505 bp, Glycine max
ggcactctagaacatcattatttctcaaggtatatagctctttaaccataattccctggatacaacatgtatactagtgtatacaccatattcaaagataggtaataaatacttgactgtataattaatatcacacaaacgtaaagtggcaatatatagtgtaaatatatataagcttaatttatacacagaaaccatgagtataaagcatctttatacaaaatattcaacaagaatttactttattaccacatcattatagtaaaatgtcatgataaagtggggaaattctattgaatgcttgtgtcaagatgtttttataggatcaaagtgtgtatataaattaaactatattttttaatcaatatatatatattgttcacacattttatatatatatataagaggtgcttaacaagttggataggcaataccacaagaactaacggtttttttggcattaggagagttaacatactgcttcaagctagggtttttgaggtag

SEQ ID NO: 229799 - DNA, 599 bp, Glycine max
  unsure (1)..(599): unsure at all n locations
atcctgcaagagtttcattcactgttgccagggctggtcagaatggataccaccaccgaactgagttgaacaagaaggtttacaagcttggcaaagctggagatgaatctcactctgctcttactgagttggataggaccgagaaagacattaccccaatgggtggtttccctcactatggtgttgttaaggatgattttatcatggtcaagggatgctgtgttggtcccaagaagagggtcattacattgcgtcaatccctccttaagcagacttctcgtgttgctcttgaggagatcaaactcaagtttatcgatacctcttcaaagtttgggcatggtcgcttccagaccacacaggagaagcagaagttctttggacgcctcaaagcataattatgttaattggatggaaatgctggaattctatttggttgccatcacttantaaacttgtagtgtttctgttttgatattatggattctcgggtagtgagttttttttctccttatagtgggcccacttttgtttcanggaagactgatcgtntatttcaaatttgttatgagtttatctatatatccgnngttatgaatttc

SEQ ID NO: 229800 - DNA, 476 bp, Glycine max
  unsure (1)..(476): unsure at all n locations
ccatcttcttctcttttcacgtcattatcctaaacttgcagattttcacatcccaagcaacatgaaggggaggttcatgtttctgtcggtgctcctttgtgccacctttcatgtctccttctccattactgacggcttagtagcaaacggcaacttcgagctgggtccgaagccctccgccctgaaaggaactgtggtgattggtggcagccactcgatcccagaatgggagatctctggcttcgtggagtacataaagtccggccagaagcagggcgacatgctgctcgtggtccccgagggggcctacgcggtgcgcctcgggaacgaggcctccatcaagcagaggatcaaggtgatcaagggcatgtactactccatcaccttcatggtggcccgcacctgcgcgcaggaggagaggctcaacatatccgtcactccagactgnggcgtcattcctattcagactttgtata

SEQ ID NO: 229801 - DNA, 490 bp, Glycine max
attcttaaaagttttatttcattgatcgaaaatttcaatgttgcccacccacaaatacaatttatataaaaacaagtgaatggtcttcaaatatccacacataaattgataagagaatacacagcgaatgacaataatatgaatacacgtcaaatgaacatgtagaatagaatacatgcaccaacacacaataagaagcactttggaatgattatatttataagattgataaatacgcactagaagttttccctgacaaatttagccttttcaagtacatatttgccctccttgtacttctgtgattcctcataagctctctgatacttccaaccaagcacctcatggcagtcagaacagtagacatcagcaacagtgtggagacccgtcatgagctccctgtcttcttttggtcctattgaaacgttcattgcacgagttaacagaaaagcccgtacacttttcccctgaaaggcctttggaaatcaca

SEQ ID NO: 229802 - DNA, 428 bp, Glycine max
  unsure (1)..(428): unsure at all n locations
agccaacacccttccgtcctcgccgtcttcgaagaccgccgccgccagctccacaccacgcgctccccgcagttcctcggcctccgcaaccagcgcggcctctggtccgaatccgactacggctccgacgtcatcgtcggagtcttcgacaccggcgtctggccggaacgccgcagcttctccgatttgaacctcggccccattccccgccgctggaaaggcgcgtgcgaaaccggcgccagtttctctcccaaaaactgcaaccgcaagctcatcggcgccagattcttctccaaaggccacgaagcaggtgcgggttccggccctctcaatccgattaacgagaccgtcgaattccgatcccctcgcgacgccgacggtcacggnacccacaccgtctttcaccgtcgccggacgctacgcctttc

SEQ ID NO: 229803 - DNA, 422 bp, Glycine max
caagcaattacaacacagagtgagaagtgaggagtgaggagtgaagagtgaagaattgaagagaaatgggtgctgattggggaccagttattattgctgtggctttgttcatcctcttatctccgggtttgttgttccaatttcccgcaaggtatagggtggttgagtttggaaacatgagcactagtgggatcgcaattttggttcatgccatcattttcttctgcatacttaccatcttggttgtagcaataggcattcacatacacatcaattgaatcctttgttcaccttatgtagtcaccacaaatctccacatatatgtttacgattactttctctctcttttttttttggctcctttgatgtattaattaatttccctttgaagtttttcatcttggtttctcttctggggtact

SEQ ID NO: 229804 - DNA, 419 bp, Glycine max
gcataattcctatagttttagatctccttttcccttttgaacaatatttggtacacagtaccccagaagagaaaccaagatgaaaaacttcaaagggaaattaattaatacatcaaaggagccaaaaaaaaaagagagagaaagtaatcggaaacatatatgtggagatttgtggggactacataaggggaacaaaggattcaattgatgggtatgtgaatgcctattgctacaaccaagatggtaagtatgcagaagaaaatgatggcatgaaccaaaattgcgatcccactagtgctcatgtttccaaacttaaccaccctataccttgcgggaaattggaacaacaaacccggagataagaggatgaacaaagccacaggaataataactgggccccaatcaggacccatttcttt

SEQ ID NO: 229805 - DNA, 564 bp, Glycine max
ctttgttcctaagagggcaccttttgacctctttgacacaaggaagaagcctaacaatattaagctttatgtccgccgtgtctttatcatggacaactgtgaggagttgattcctgagtatttgggctttgtcaagggtattgtggattccgaagatctaccactcaacatttcaagagaaatgttgcaacagaacaagatcttgaaggtcatcagaaagaacttggttaagaagtgccttgagctcttctttgaaattgcagagaacaaggaggattacaacaagttctatgaggctttctccaagaacttgaagctaggtatccatgaggattcacagaacaagggaaagattgctgaattgctcaggtaccactccaccaagagtggtgatgaaatgacaagcctcaaggattatgtgaccaggatgaaggaaggtcagagtgacatctactacatcacaggtgaaagcaagaggctgttgagaactctccattcttagagaagttgaagaagaagggatacgaggttctctatatggttgatgccatcgatgaatatgct

SEQ ID NO: 229806 - DNA, 381 bp, Glycine max
atagctaattagctaaatatccattgaacactgccatcaatgcaaaataaaaaaaggagaaaaaaacatagccaaaaaaggcattaaagacgctactaacaagaaacgcatcatatttaattgtaatcaacctcctccatcttgctgccctcagcatcaacctcggtctcctccagtgggggcatttgaacatcagcttcacctgcatcctcgtcaatgctcagtccaagcttcaacattatgtggatcctgattccaaaagagttgggctcgtcaaggctgaaaccacaagtgagaagagcagtctcaaacagcaacagaacaaggtcccttacggattagataatcttgactgcatcagcacgctaactgagctcctcc

SEQ ID NO: 229807 - DNA, 439 bp, Glycine max
aatcttggatgttttggcaagggagaaaagtataaatataggaacaacttggatgagattgaacttacagtgatggttaataaaaatgttatatacttactatacatgataagcgcttaatctgaagtattcacaatgtctatactgtatatttcctttcctctgttgttggtatcatccacgacataaaccttttcaatcattcgtttcatcaaataccataaccttaccacaaacaggacaggtgtcacttatttccatccactcataaatgccaccaagatgaaaatgatgagagcattttggaactatcttgggattctcttcaatgtattcttcaagacaagttggacagacatgctcctcttctgaggatgaatagacaaccccagctccagatgtaaattctgctgatgagagtattacagaggacttgaac

SEQ ID NO: 229808 - DNA, 473 bp, Glycine max
ccaacatgttttttaatgcaagaactccttggtgacggcattcctgggcgtgcattgtgtcaaacctgttggaggtcaaaagatccacaagaggtttgacctcaaaggctcttctcatggtcgatcaacagataagccaagggaacaaattgatgagactaccactctcaaagaccttgatcttaactttgtctttcgccttgaacagtcttggtttcaagagcttatatgcaacttggtagagattgtgagttcctggaagtagagggaatcatggattacaatcttctaattggcctgcattttcgtgatgatagctcagttgatgaaatgaaaagttcacctcgcagttctcattcaggcaacagagacatgtttgataatgagatgctcacatgttggggacctctaatccagctggatcatggaacatgcctgccacagctgagagtgtgcaaggctggattggatca

SEQ ID NO: 229809 - DNA, 390 bp, Glycine max
cttcgtccttttttttttttttttttaactgttaatttatggaattttatatatttattactgggtcaaggggatgattcacatctaggaccgactgaaagttttctggggaaaaaccttgagactatcttcttttagggggggaatacaggacaatgtgcagccaatctagctacacaggatggggatgcacactccaccttaaaggccttgcagggggtccatatacttcctgttactcgtagcttcaactgtttcctgtctccacctgagaagaaaagtgccatgttgcggtaaatgatgagaccatcatgactgtctgtgaccttcttatggctatctgtaatgctccttggactcccctcaagagttacggggacgggcattttc

SEQ ID NO: 229810 - DNA, 441 bp, Glycine max
cttggtcgggaggtatacagctctcacatgcaacttggtggacctaaaatcatggcaactaacggagtcgttcatcttacagtttccgatgatcttgaaggtatttcttctattttgaagtggcttagctacattccttctcatgtaggtggtgcacttcccattgtaaagccgcttgatcctccagaaagaccagtggagtatttcccagaaaactcgtgtgatcctcgtgctgccatttctggaaccttggatggtaatggaagatggctgggaggaatttttgacaaagacagctttgtggagacactagagggatgggcaagaacagttgttacaggaagggcaaagcttggaggaatccctgtgggaatagttgctgtagaaacacagacagtaatgcaaataatacctgctgatcctggtcagcttgattctcac

SEQ ID NO: 229811 - DNA, 564 bp, Glycine max
atgcattaaaaacaatgttacacattattacaattttattcaaatataccaaaagaatcaatcaaccagcaaataaatagatggaacatggtgatgccggttgtgatcctctaactgcataaattaattaccatccaaactcatgtcatttacactttgaagcaacggatcccttcggcaatgagggatgctacagcctcctttcacttgggtataacaacttaaccaagggaatcaacacaaataaatgtggtacaataataagacacgaaaaaggtcctctaaccaagtaccttgcgaagttcatcggtcaacttcacgcgacccgatggctccaacttgcttaaaagggcagcaagaccttgaggtagagcttgcaaatctagagctgagtcaccaatatttgtcaattgaagcaacactttctgcgcacgcaattcctttagtttattctcgtaatttgcaggattatccttccatctgaagaaggctttgtcatccaaccaagcatctgctctacctttgggcatatcagaatttaaataccattctttgagcaagttc

SEQ ID NO: 229812 - DNA, 499 bp, Glycine max
tcgcccaatacctactctccgctcccaagagcacgcaccaccactattgcacttcttcctcgttctccctctttttcttcttcttcgctaaacccttttttctatctcactaacacaacaatgggagacgagaagaagggcaagcctgctgcttccggcgtgtggtccaccatcaagcctttcgtcaatggtggagcctccggcatgctcgccacctgcgtcattcaacccatcgatatgatcaaggtgaggattcaacttgggcaaggatcagctgcgcaggtcacttccaccatgcttaagaatgagggttttgctgccttctataagggtctatctgctggattactcaagcaggctacatacaccactgcccgtcttgggtcatttaaaatcttgacggccaaagctattgaggctaatgatgggaagcccctgccactgtatcagaaagctctatgtgggctgactgctggtgctatcggagcaactgttggta

SEQ ID NO: 229813 - DNA, 517 bp, Glycine max
  unsure (1)..(517): unsure at all n locations
aggaagagcttgatattgatgttcttgttcatggagaaccagagagaaatgatatggttgagtacttcggtgagcaattgtcaggctttgccttcactgttaatgggtgggtgcaatcctatggttcccgttgtgtgaagccaccaatcatctatggtgatgtgagccgcccaaagccaatgactgtcttctggtcatctctggctcagagctttaccaagcgcccaatgaagggaatgcttaccggtcctgttaccattctcaactggtcctttgttagaaatgaccaacctagatctgagaccacctaccagattgctttggctatcaaggacgaagtggaggaccttgaaaaggctggcatcactgttatccaaattgatgaagctgctttgagagagggtctgccactgaggaaatcagaacaagctcactacttggactgggctgtccatgccttcagaatcaccaatgttggtgtgcangataccactcagatccacacccacatgtgcta

SEQ ID NO: 229814 - DNA, 608 bp, Glycine max
  unsure (1)..(608): unsure at all n locations
ttcagtttcttaatttggcgcaaaacaagctctacggttgtgttccggacaacctttgtcaaattccttctatccggaacaatgggaatctctctttggcggataattatttcaaggaaattggaccttcgtgttggagtttgatcaagtccaaggttttggatgtgtcaagaaactgcattccggggcttccagaccaaaaatcacccaaagaatgctaccagttttacaaaacaaagaagacatgccctaaccagaattcattttactacgtcccgtgtaaatcccactgggggacacagagcaacaagccccctgctccaccttctgagcctgtgacttacaacgctctcaaaccacatcgcttgagattgtgatgatcagatatcataggatggctcatattagtcccttggtgttgtattattatttttagtttttcacatatctcactggatggaaacatctctctcaaggggatttcgaatcttggttcactcggttcatgttattaacgcggntatggtagtatatttctctctcatgataagcnntgtgtattttgtatttatctatgcccatgaataagtactgccctggaattgggc

SEQ ID NO: 229815 - DNA, 490 bp, Glycine max
gagagaaaaagaatgaagttgtgtatagaaacatatcagaataacaagattaagaagcaggctatgagcatcaacaatagagatggacagtgtacagcttgatttgcagtgtcatctgctgatactgctgatggtggcactgcaggacaagcaagaccaaactttccttcacgacactcactagaaaagaggccaggagggtattttccatagagattaatgtaactaaacatggttgatgcacactcattcgttaaatcatttaatacatcggcataagggcaagcaaattctttaaaagccccacaacattctttgggagggtaccggggtcctttgcatttgcttgtgattactgtgtagtttaaaaactcgaaattcacagaacaacctgcaggtgcaaggtgaaaaaacagtatcatcagactaatgtttagctttggtcaaacatggcatgcgtgctatgtacatctatattgggaatcaatgg

SEQ ID NO: 229816 - DNA, 539 bp, Glycine max
gttttgaagagctatgcatcaagatagaagccattgagggagaagagaagttttgtgcaaaatccttgggaacagtaattggttttgccatttcaaagctgggaaagaacattcaagtactttcaagttcctttgtcaataagcaagaccaatacactgtggaaggagtgcagaatcttggagacaaagcagtgatgtgtcataggctaaatttcagaactgcagtattttactgccatgaagtccgtgaaacaacagctttcatggttccattggtggctggtgatggaaccaaaactcaggcacttgctatttgccactcaaatacttctggaatgaatcatcaaatgcttcatcaacttatgggagttgatcctggaactaaccctgtttgccatttccttggaagcaaggccattttatgggtacccaatttatctgtggacactgtctatcagaccaacattgttgcttaattagtccatgcatcttgagcaccatgagaatgagaatgtgtataaaataaattatcatgtgct

SEQ ID NO: 229817 - DNA, 460 bp, Glycine max
gaggcacgagataaccactttttaccatatatatatagagagagagaatacgaagcacactgatcacaggatgatgctctctttaagtagggaagcagatcttatcagtacacataggtaggttgaaattctagctctagcaatctagctagagaaggtagtacttgcacaacacacagcacatgataatttattttatacacaatctcattctcatggtgctcaagatgcatggactaattaagcaacaatgttggtctgataggcagtgtccacagataaattgggtacccataaaatggccttgcttccaaggaaatggcaaacagggttagttccaggatcaactcccataagttgatgaagcatttgatgattcattccagaagtatttgagtggcaaatagcaagtgcctgagtttcggttccatcaccagccaccaatggaaccatgaaagct

SEQ ID NO: 229818 - DNA, 533 bp, Glycine max
gttagttgaagactcccaccttgacatactatcacgtattctcagaagcaaaggtgctgctaggaggtccatccagtatagctataagcatggcttctctggattcgttgcagttttaagtcagtctcacgctaagctcattgcaggatgtggcagcatcaacttatgttgaggatacactggccattggctcttttcatgctgtagccaaaggaatttctgtgtatgctctggtggcaattctagtccatatccccaaactgtcataaacactgccccttggcttattaccgtttctgccagaaccattgatagagaatttccatctaggattatcatgggaaacaatcaaactctacagggtcagagtttatatacagggaaagatctgagcaagttttatcgtattgtgtttggagaagacatagcagcttcagatgctgatgaaaaaagtgcaaggagctgcaattcagggagcctgaatgccaccttagcaaaaggaaaagcaattctttgtttccagtctcggtcac

SEQ ID NO: 229819 - DNA, 437 bp, Glycine max
gaaaactcatgaataatatatgtattttaaaattttaatgttaaatattcatgacatgatttaataatcaatctttgattataggtccatgtatgtttaaagttggcattaaattttgagataaacctctaataatgaccggaaaacaacactaaaaacggtgaaatttgttgcatattgtctttaatccataccctttgtgagataaaaggctagtgcagcggggctccaagttggatggatagtctttataagtgcaacaataccagttatgtgggggcatggcatatggaagttcctgactcaatgttgaagttaaggggatgtaaatctgactcatcttcatttgcagcatcagataccaaacgggcagaaaaagcgggtgaccaagccgccagaatattaaccccaggagcagcaatatcaggcttcaacac

SEQ ID NO: 229820 - DNA, 402 bp, Glycine max
ttcgtttttttttttttttttttttttttttttttttttttttttttactctttttcttttggttattacacatgatttgggcctttttcaacttaaaagcggacgataacatcggaccatgaccgcgacacatgcaccacctaataatcataatgggacatctttacatacaaaatacaaagactttaaaacttaaaaagaagaaaagagataaacagatcatcttaatgaaatgaaaccaaaacccacaaacattggctagatttttgatgatggagatggcccaacttgattaagcatgaaccgattgactgaatcacttggacttgaagggaatggccctgattacgacctgagggtagagtgctgcaagagctgccccgatgaatggtcccacccag

SEQ ID NO: 229821 - DNA, 497 bp, Glycine max
cgttgtttctacaatggcggagctgaaactctctgagagccgcgatctgacccgcatagagcgcgtgggcgcgcactcccacatccgcggccttggcctggactcctccctggagccgcgcgccgtctcggacggcatggttgggcaaaccgccgcccgcaaggccgccggcgtgatcctccagatgataaaagacggcaaaatcgccggccgtgcagtcctcctggccggccagcccggcaccggcaagaccgccatcgccatgggcatggccaagtccctcggcctcgaaacccccttcgccatgatcgccgccagcgaaatcttctcccttgagatgtcgaaaaccgaagccctcacccaggccttccgcaaggccatcggcgtccgcatcaaggaagaaaccgaggtcatcgagggcgaagtcgtcgaggttcaaatcgacccgtccgcggtggctggcgccgccgcgaagaccgggaagctgacgctgaagt

SEQ ID NO: 229822 - DNA, 512 bp, Glycine max
agggaggaaatgctcagtaatagcataaattgggtacagcttgccatgttcatagtatataagttgcacagtcgtgcacagttcaaccgcgggaaagtcctggggatcaatatcaaacacaattgaagtgcattgaccaaccagatcatggaacaaattgctgcaacttatagaaagactaaccaggaaattacgaactctctaacagatgtttgtaaatctaagagaccatggcattggtttcatcttcatcagcttctcctgtttcattgaacatgtactgactttggtactccattaggtactgtgttgatcttttgacatccaaaaacagattgtaaacccgatttatatcatccaactccactgtcttcccctttcgcttttggcatgccaatgcagctgctgtgattagatgaatagcatatctcatagatgtttctacacctattttggttaacaaacactttgcaccttcactcatgtctacgtctttctcttggcatctgata

SEQ ID NO: 229823 - DNA, 523 bp, Glycine max
  unsure (1)..(523): unsure at all n locations
cttcaaacctaacgcagcatcgctattctcttcattccatggctttgcccaaccagcaaaccgtggattaccctagtttcaaactcgttatcgtcggcgatggtggcacaggaaagacaacctttgtgaaaaggcatctcaccggagaattcgagaagaaatatgagccaaccatcggtgtggaggttcacccattggattttttcacaaactgtggaaagattcgattttactgctgggatactgctggacaggagaaatttggtggcctcagagatggatactatatccatggacaatgtgctattatcatgtttgatgttactgcccggctaacatacaaaaatgttcccacctggcaccgtgatctttgcagggtctgtgagaacatcccaattgttctttgcggtaacaaggttgatgtcaagaacaggncagttaaggcaaagcatgttacattccacaggaaagaagaattgcagtactatgagatttcagctaagagcaactaccactttgaaaa

SEQ ID NO: 229824 - DNA, 500 bp, Glycine max
gttgaaaaaaccaatcctctcatctttttaacgttcatggatatatagtaaaatgagattttaaacttaagcaacaaatctgatcataattgattcagatcctcgaattcacatccaaaatgtcaacactacaacccccaacagcacatacggtagcatacaaataccaacactcaggaagacagtccacaaacactcaagccctctactcaaaagattcatcatcatcgtcaggaaggggctgactagcagctgcaagaagctcagcctcgtgctgttgctgtgcagctaaatcaatttgaacttctggtggagccaatgcaggagattctacgaagtgcaagttaggatcacctgcaagtttcctggccaaatataagaatggcttttcaaagttgtagttgctcttagctgaaatctcatagtactgcaaattcttcttcctgtggaatgtaacctgctttgccttaacttgcctgttcttgacatcaaaccttgta

SEQ ID NO: 229825 - DNA, 511 bp, Glycine max
ggagaagaaaatagtcgttcgagatggcccgtacgaagcaaactgctcgtaagtccacaggaggaaaggctcctaggaagcagcttgcaaccaaggctgcacgtaagtctgcaccaactactggtggtgtgaagaagccacatcgttaccgtcctggtaccgttgctcttcgtgagattaggaaataccagaagagtaccgagcttttgatcaggaagctccccttccagaggctggttcgtgaaattgctcaggacttcaagactgatctgcgtttccagagccacgccgtgcttgcattgcaagaagctgctgaggcataccttgttgggctctttgaggacactaacctgtgtgccattcacgctaagcgggtaaccattatgcccaaggatatccagctggcaagaaggattcgcggtgaacgtgcttgaggtggtggttgtgaagatgaagatgaagatgggttgctgcgggtgggtgtttttgttgttcagattccctttttttt

SEQ ID NO: 229826 - DNA, 500 bp, Glycine max
gaggctgcgaacccgatacgaatggtggcgggggtggaggcggaggtggttcgggtgatagggcagtgccggcgcgcgctgaagtttgctaggttcatgagcaggttcgggaagagttaccgaagcgaggaagagatgagggagaggtacgagatattctcgcaaaacctcaggttcatccgctcccacaacaagaaccgcttgccctacactctctctgttaatcattttgctgattggacttgggaggagttcaaaagacacagactaggcgctgcccaaaattgctctgccactcttaacggcaaccacaagctcactgatgctgttcttcctcccacgaaagactggaggaaagaaggaatagtgagtgatgttaaagatcaaggcagctgcggatcatgctggacattcagcacaactggggctttagaagcagcctatgcacaagcatttgggaagagtatctttctttctgagcagcagctagtggattgtgc

SEQ ID NO: 229827 - DNA, 582 bp, Glycine max
acaatacaatatgtaactatgaactatcaatatatgatcgttatttatgtctgtgatacacacaattcaggccatgatattcttacgtgatttacagcaacttctaacttatttaatacatcataccaacccaactaggagcaattttcattatacaatgacacttatctttaaactctgaagcatgacaaggtggtagtcaccagggaccatattcttatgcaatttatgccacaactggataagacgcacaagttgcaacaccacacatgttcttccccaattccattttgaagtagccattctcaccccaactttctccccatgaattttttatgagccaatatgggacgccattttcaactccataccccacagcaaggacggcatggttcacatcctgtgaagtgctaccgcaaatgtcactagtgtaaactccattctcgtagaaatggaacccattcaccacctgaaaggccacactaaccggccgaacaaatgcaactgcatgttttaattcattctcagcaacccagggtgatatttgaccgagtcaatgacttgaacggcaacattttcagc

SEQ ID NO: 229828 - DNA, 545 bp, Glycine max
  unsure (1)..(545): unsure at all n locations
gttggttctttctttccccaatttgtgagtgttactattgaatcgattggattgacatggcgagcgcgatggttgaggacgccaacttcgaagatgaccagctcgccaatatgaccaccgacgacgtcgtcagagcttctcgtcttctcgacaacgagattcgcatcctcaaagaagagttgcagaggaccaatttggagttggaatcgtacaaggacaagatcaaggagaatcaggagaagattaagctcaataagcagttgccctacctcgttgggaacatcgttgagatattggaaatgaacccagaagacgaagctgaagaagatggtgccaatattgatcttgactcacaaaggaaaggaaagtgtgttgtgctaaagacttctactcgacagacaatctttctacctgttgttgggcttgttgaccctgacaagttaaaacctggtgatctggttggtgttaacaaggatagttacttaatcttggataccttgccttctgagtatgattctagagttaaggcatggnagttgatgaaa

SEQ ID NO: 229829 - DNA, 544 bp, Glycine max
ggttaaaataaaattctgatcacagccttaacacgtcttgtttgtttatcatagagattcgcagcctgatcaacaagattttaaatatagcaagccgatcaaatttctattgctactacaaagttgacgatcagattgtgttttttatatataaaaaaaaatatatcatgactctggcaagctgaaggttatcacacgattaaagattgccaaaaaataagaaaaagataataaatgtcaagcatccgcttaggttctccattggcttgaaatatctcaatggatctttgtaaactgaaaaatagcttgttccacaatccagcctatgcataatagttcagacttgctttcttctttgcttggacttgaataataccttcattaaaatcctcgtggttcacctcagttgcatcacggcgtagagccaacatgccagcctcaacacagacagccttcagttgtgcgccattgaaatcatctgtggaccgggcaagttcttcaaagttgacatctgggtgaacattcatcttccttgaatgaatct

SEQ ID NO: 229830 - DNA, 505 bp, Glycine max
gtttgttcaaaggccaactcctctagcagccctcttgaccttcctatggttgccaattggcatcatactctccatcttaagggtctaccttaacatccctttgcctgaaagaattgcttggtataactataagctattaggaatcagagttattgtgaagggtacccctccaccacccccaaagaagggtcaaagtggtgtcctatttgtttgtaaccaccgcacagttttagaccctgtggttactgcagttgcacttggaagaaaaattagctgtgtcacatatagcataagcaaattcactgaaataatttcaccaattaaagctgtggcactctcaagggaaagagagaaagatgctgccaatatcaagagactacttgaggaaggggacttggtgatttgccctgaaggcacaacttgtagagagcctttcctttgaggttcagtgcactatttgctgaactcactgataggattgtcccagttgctattaacacaaagc

SEQ ID NO: 229831 - DNA, 458 bp, Glycine max
acataaactgtaatttttttccggccagtgatcagattttatttctatcataattctaagggttttggaaacacattgggcaccaatacagaataatcaaaagggagaacttaatttctctcccttttcaagccttcttcttagatggaactgtcccatctgtgcctgcaagcatggcatatttgctcttcctagacaaatttgtgcactcaaatcccaaagtccctgcaagaaccctttgaatgtagtttgcaacttcaatagctgatttccctccactgcatgtgagctccttgggaagctggttcaagaaagtgatctcatatgttggcattggattcatgaacacaaagttcgggtccaacaacttgtgtccgcaaaccgtgggtccgtagaacacactttgctttgtgttaatagcaactgggacaatcctatcagtgagttcagcaaatagt

SEQ ID NO: 229832 - DNA, 353 bp, Glycine max
tctgtgacgagcatcatggcctcgagagcagtgctattgttggctatgtgtgtgcttccggccatggttgtggccattcgcccagcaaagaaccctttttgcgtgaagggtcgcgtctactgtgacccttgccgtgctggttttgagacctcagcaaccacctacattgccggtgctgagattatgttgcaatgcaagagcagggttagcaacgaggttgtgtacaccaagaaggggtacactgactcaactggggcatacacaatgtacgtggacgaggatcacgcagatcaaatatgccgtgccaagcttgtaagcagccctcaccctcaatgcaaggaagtcaccccggg

SEQ ID NO: 229833 - DNA, 128 bp, Glycine max
aaataggagcattagctatgtttgttaatgtcactttatgttatgtgggtaagtcacctaagacactccacgtacccttgttgtctcttacgcggctttaataaatcttctgcccttgttccatattt

SEQ ID NO: 229834 - DNA, 129 bp, Glycine max
aaatatggaacaagggcacaagatttattaaagccgagtcggagacaacaagggttcgtggtgtgtattaagtgacttacccacataacataaagtgacatgttacaaacatatctaatgatcctattt

SEQ ID NO: 229835 - DNA, 597 bp, Glycine max
agagctttaccctgattattgccctccattttcctctgctgtagctaatggatccatggtgatcaacgattgcagtgagtatgatgttgatggggctgaagaagagccgaacttcgatgttgaggaccggaagcccgaccatcttcatccatcaaaccttgggatggagagaatgatgggaaggatgccaattcagcaaccttctcatcccatgaagggagatgttgtcacaaacctagatttcatccggaagaggaagatttctagtgacttcaacatgatgatggatcagaaaatctacacatgcgagcatccccaatgcccttacagcgaagttcgccttggtttccatgataggtctgctagggacaatcatcaattgaattgtgcatatagaaacagttctgcagattatggtggtggtcccaatttccatgctactgaggttaagccagtcatattcccccagtcctttgttcaacccaacactacagctcagtctggcaagttggttgcaccttcatttgatctaactggtcttggagttcctgaggatggccagaaaatgattagtgaccttatgacaatctatgatac

SEQ ID NO: 229836 - DNA, 520 bp, Glycine max
gaagttctggatgttgcttggtcaggtatatgttttgttgctggatctcaaccagtgaatgctttggcatttgttattgatgggatttattatggggtatcagactttggatatgctgcttactcgatggttctagttggactagtttcttcaactttccttctggtggcggctccagtagggcttcctggagtctggactggattgtttattttcatggctttgcgtgttctagctggagtttggaggtgaagtatttaattaatatggaaggtgataattgtgaaacttcatgtttgtgtattattacccattgtcgtactcattcaaatcctagctcaaagaacaatggcaaaatgatacaggacatgttggatgaatgtaacatgacatcaagtcgcatgttatttgttctcttttatgtcggtattttattgggtaggggcaggatactctatggataacatgatcaaaattttcttcataggatttatattgagttaatattcttggttttctt

SEQ ID NO: 229837 - DNA, 467 bp, Glycine max
acaccccacaaggccaacggtgccacgtgtcaccctgaggaagaagcgggcctgttgggcttcaaatccggtatccgatccgacccgtccggcctgctcagtaactggatatcgggtacggactgctgcacatggaccggagtagaatgccactataacagcacccgggtccaaagattattcttaacgggtcaaaaacccgaaaccatcttatcgggtaccatctcacccaccctctcaaaactcaaactcctcgatggactctacctcataaacctcatcaacatttcgggtcccttcccaaattttcttttccaacttccaaatctccaatttatctatctagaaaacaacaatctctcgggtcgaatacccgataacatcggtaaccttacccgattagatgtactcagtttaactggtaaccggttcatcggacccgtaccgagttcaataaccaagttgac

SEQ ID NO: 229838 - DNA, 568 bp, Glycine max
aaagtaaatatatatagtatatattgaaagttaaaattacaatttacttattaaattacataattattggaaaacttagcagtaaaaggaaattaaacacttgaaatcatcaacaacaaagcttactacacttatgctttgttgcagggtggcaaaggagaaccacagagacaatcatttccaacaaaagcacttgccggaaacttattcttgggaagctgaccacaaagatggttatagctaacattcaacttctcaagcccaacaacactgtttggaaccttcccaaacacccaattacgagacaaatccaaaaacttaaacctctccccaaaccttaacttccccaaatcaaacttcaacttgttccccgaagcccaaaaccccaccaaatactcagtactattcaccaacccaattgcactccctgaaatttcattccccgaaagatcaataaaatcatagaaataagtctccgaaggcttaaaatcctctagcctcatctttattccgcaattcacaagcttcagagagaatattatcggcgacgaagccacccacttgggaa

SEQ ID NO: 229839 - DNA, 480 bp, Glycine max
ggagaatcctgaaaaccgcttgattttaatcaaagggtcatcaggattcgggcacccatatctcgtatcactccttctctcctctgttgtcttagaaagaagaccaagaaaagcatcaatttttgcaagcaatcttcttcttttgccctttctcttgtcttaaacacacacacacaacaacccagctgctgaagctgaagcatcacaactcacacatgattcgagtggccacaaattaagcgtgttggtgttatgagtgagagaatggaatcgagtagcattgagagcagcactgtatcatcgatgactatgatggaagaggatgagcatccccatcagttttcttcaatctcgaagcttcatagcaatggccccaccactaccagtgtccatgaccttcttgaatgccccgtttgcaccaactctatgtaccctcccatccatcagtgccacaacgggcacacactttgttcaacttgc

SEQ ID NO: 229840 - DNA, 478 bp, Glycine max
  unsure (1)..(478): unsure at all n locations
gttttcttcagaaatttgccatcgttgagagaagcgtgagagccttagtcgttcaagatgagagctaagtggaagaagaagcgcatgaggaggttgaagaggaagcgccgaaagatgagacaaagatctaagtaggtgcttgagcaggagttgagatgagctttccatctgctaccagcctcatgacattttaggctgttatggctcttatgatcttgaggtctagtcgctaggggagcttcactcttgacttagtttgctttactggtcctggtcctggtccaagactattgagtgtgggttaagttgtgatgtttagtgttttgtggtatctaattatgtactggtttttatactttctggttgaatagctatatattagtatcgagacttccatgaaaatttgatccttangaacaaactctatgtacccctccattcatcattgccacaacgggcacacacttttgttcaactt

SEQ ID NO: 229841 - DNA, 545 bp, Glycine max
  unsure (1)..(545): unsure at all n locations
gtgggatggcctcctataagatcattccggaaaaattcattggctaccacttcaaagaacaatgaagaagttgatggaaaagtgggggttggtgcactgtttgtcaaggtcagtatggatggtgctccctatttaaggaaagtagacttgaagaattactctacatatccagaattatcttctgctctagaaaagatgttcagctgttttactatgagtaaatgtggatctcatggaattctgggcagggagatgctgaatgaaaccaagctgaaggaccttcttcatggatcagaatatgttcttacatatgaggacagagagggcgattggatgcttgtgggtgatgttccctgggagatgtttattgaaacatgcaagaggctgaggatcatgaagagttctgatgccattggtctagctcccagggctgttgaaaaatgtaagagcagaacctangcagtaccagtgttcctcttcgaacatggtgtattggaagcgagaactgaaggcatatgggactggatagaatctcatactaagct

SEQ ID NO: 229842 - DNA, 481 bp, Glycine max
cacacaaacataggacaccccgttgagacgctgcaaaattaacacatcaaagatccttcaaccataacattaactcgggtacataaaatatagctactcccacagtcaagtcttagagttttgttaagttttatcacaacaatcttgaaaagaagcttactaaatcataaacgccatgacaacataaaacggacacataataaacaatagaaggattatggcagcttagtatgagattctatccagtcccatatgccttcagttctcgcttccaatacaccatgttcgaagaggaacactggtactgcctaggttctgctcttacatttttcaacagccctgggagctagaccaatggcatcagaactcttcatgatcctcagcctcttgcatgtttcaataaacatctcccagggaacatcacccacaagcatccaatcgccctctctgtcctcatatgtaagaacatattctgatccat

SEQ ID NO: 229843 - DNA, 354 bp, Glycine max
caaaggtttaccaagaaccccagaggcattacccttcttcagaggatgggaattggccttgtaatccacacactgatcatgatcattgcatctgggactgaaagctatagactcaaggttgcaagagaacatggggtagttgaaagtggagggcaagtccctttgagcatattcattttgcttcctcagtttatactcatgggaactgctgatgcattcttagaggttgcaaaaattgagtttttctatgatcaatccccggaacacatgaagagcattggaacttcatattccacaactaccttaagccttggtaacttcatcagttcctttcttctttaacagtgtcaaatg

SEQ ID NO: 229844 - DNA, 586 bp, Glycine max
  unsure (1)..(586): unsure at all n locations
ccttcttcccccaagtcctacgccatctcctacgcgcgccagcccacgcgcagatccaccctctaccttttcctctccgccctcctcctcctcttcctctttggaatcgtcgccttcctcgcccagattcgcggcagccgctgcgtcaacgcgcacccccggtcggtacgcgtcgtttgggaacactccgctggcgctggcaccgttgccggcgatgggggcaggcataaggtgatggggtttgtgggcattcaaaccggattcggatccgctgggcggagagtgtccttgaggaagacgtggttcccctctgatcgccaaggacttcaacgcttggaagaagctactgggttggcttttaggtttatcattggtagaacaagtgacagagcaaagatgtcagcgcttcagaaggaagtagcagaatatgatgatttcattttgttggatatccaagaggagtacagtaagctcccatacaaaacgttagctntcttcaaagctgcttatgcactnnttgatgctgaattntatgtcaaagctgatgacgacatatatttaaggccagatcgtctatcattactac

SEQ ID NO: 229845 - DNA, 496 bp, Glycine max
acacaatcattcaaactcccatttttgaagtacaagaatgagaatatgtataaccccaagaaagactgacattaaaatcaggaaattagtaaattaacaatgatctcttgatctattctctcatgtagtatataaaagccttccctaaagaacgttcctcatatcggccaatgcaaacctctccaagtataggggaatgaaaactaaggaaataaaacacagtcaccctctcttctaataactggaagaaaggagaattagaaagatcaaaagaatggaagtggtagcatatcgtggcagtgatcaataacaagagcagcaattccttcacactaccttctgagcttactttgctttatattatacccacaaattctattcatcatctgattccagagttgggctcttagagcaggcttccttttgatggagttccaacattttcttttctggattacataggcctgaacactgtggaatatcccacactgcaata

SEQ ID NO: 229846 - DNA, 324 bp, Glycine max
gcagctggtgctgcaataaggttctttgacaaggctattgggattaatgttcctcgatcacgattccttcctgtgaaggcaacttcagatttgcttcttgtccagtctgacctctacactttggaagatggatttgtcattcggaacaaagctagggcaaatcctgaaaacccttctattgaacttgggccagaatttaagaaggttagcaacttcttgggccgcttcaagtcaattcccagtattgttgagcttgacagtctaaaagtggctggcaatgtatggtttggagctggtgttatcctcaagggaaaaatcagtatc

SEQ ID NO: 229847 - DNA, 380 bp, Glycine max
aattatatcacttcttagtacttgtggtagtgaaagaaaatgtgattatacaaaatgacataatggggaagaactcatgtctctgtctctcttggtctaaatcgcatcagaagacaaactaaaagggacttattttctttgcccatcaaacttgggagtagtaataattggaaaaaacatgagaccatacagatagtatacaggctgatacttctaaactcagcgggcttcctcacaggaggtcctctgggccattaatttccttatccgaaatgacagcaccatctggaacttccagtttaacaccaggattggccacgatactgatttttcccttgaggataacaccagctccacaccatacattggcagccactttt

SEQ ID NO: 229848 - DNA, 519 bp, Glycine max
  unsure (1)..(519): unsure at all n locations
catcgttaggaactgctgatgaggatatttatgaagaaataaaaaatgttctctacaccgatagtgctgttgctggcgaggctgctggtattagtatgggcttactcatggttggaactggcagcgagaaagcaaatgagatgctcacttatgcccatgagactcaacatgaaaagattattagggggttagcattgggaatcgctcttacagtttatggaagagaagaagaagctgacactttgattgagcagatgactcgggatcaagatccaatattgcgttatggtggcatgtatgctttggccttggcgtataggggaacagcaaacaataaggccattcgccagttactgcactttgctgtgtctgatgtgagtgatgatgtcaggaggactgcagttctagcattagggtttgtgttgtactctgatccagagcagactccacgaatngtttccctcctatcagaatcttacaatccacatgttcgatatggagcagctcttgctgtggggt

SEQ ID NO: 229849 - DNA, 492 bp, Glycine max
gagaatggctcccaagggtttaacctttctggctgtgttaatatgcgtttcagcactgtcactgagtccttctgttgcgggggaagggcaaaataatggccttgttatgaacttctacaaggaatcatgccctcaggctgaagacatcatcacagaacaagtcaagcttctctacaagcgccacaagaacactgctttctcctggctcaggaacatcttccatgactgtgctgttcagagttgtgatgcttcactgttgctggactccacaagaaggagcttgtctgagaaggaaacagatagaagctctgggttgagaaatttcaggtacattgagaccatcaaagaagctttggaaagagaatgccctggagttgtttcatgtgctgatatcctcgttctctctgccagagatggcattgtttcgctaggaggtccccatatccctcttagaactgaagaaaggatggtagaaggagcagagctgatgtg

SEQ ID NO: 229850 - DNA, 285 bp, Glycine max
agaaagaacaacctagctttatgagtatgaatatcataagcattgtcactgccatcataacagcactcacacgcatacataacataattaacaccatgaacatgcccttctacccaactctaagctacttgcatagtactacatatataatatccttattgaaattaaaaaaaaaacagcagtaacatcggaagattaaaaaacatagcctcttaatcctgccatccccatgaacctgcagtgggctcgggtcattgaaccagcccatttaaaggacaagacctt

SEQ ID NO: 229851 - DNA, 549 bp, Glycine max
gaaagagtgaagcagtaaatctatgatctagctatctacatgggtggtggaggaacactcgtgcaagggattcgacgcttgtttaaacgacgcgcttcttctcctgcttctgacgatcacaaccacaacaatgtcaatgccaataatagccgcgttttagtgagagatttgcgcgcgcaattggcttcaattcccaacactcttgaccccgtttccgatttcgatttctctaccttgaagcccatcaaagttcccacaccaatccccttcagaccctcttccatggatcatcacaaaaagggtgcacaagagacagagttttttaccgagtacggggaggcaagtcaatatcagatccaagaggttgttggaaaaggaagttatggtgtcgtgggttctgctattgatactcacacaggtgaaaaggttgcaatcaagaaaattaatgatgtttttgagcatgtatcggatgccacacggatccttagagaaattaagctcttgcggttgcttagacatcctgatattgtgggaattaagcatattatg

SEQ ID NO: 229852 - DNA, 525 bp, Glycine max
  unsure (1)..(525): unsure at all n locations
agcaaaaagaaagaatcccaggcgaggagaaagatggaggggaaggagcaggatgtgtcgttgggagcgaacaagttccccgagagacagccgattgggacggcggcgcagagccaagacgacggcaaggactaccaggagccggcgccggcgccgctggttgacccgacggagtttacgtcatggtcgttttacagagcagggatagcagagtttgtggccacttttctgtttctctacatcaccgtcttaaccgttatgggagtcgccggggctaagtctaagtgtagtaccgttgggattcaaggaatcgcttgggccttcggtggcatgatcttcgccctcgtttactgcaccgctggcatctcagggggacacataaacccggcggtgacatttgngctgtttttggcgaggaagttgtcgttgcccagggcgattttctacatcgtgatgcaatgcttgggtgctatttgtggcgctggcgtggtgaagggtttcgaggggaaaacaaaatacggtgcg

SEQ ID NO: 229853 - DNA, 413 bp, Glycine max
gcaaattaaattacacaatcacagtcgtacatcacacatgagttgggcctcttccaacttaaaagcagaggataacattggcccatgacgcgacacatgcaccacctaataatcataattttacatctttacatacaaaatacaaagactttaaattgtaaaaagaagaaaagagataaacagatcatcttaatgaaatgaaaccaaaacccacaaacattggcttgatttttgctggtgttgttggtcccaacttgattaagcatgaaccgtttgattgaatcacttggacttgaagggaatggccctgattacgacctggtggtagagtgctgcaagagctgcaccgatgaatggtcccacccagaaaatccagtgttcattcccaaccaaggtccttgttgaagatgata

SEQ ID NO: 229854 - DNA, 359 bp, Glycine max
attcataactccttcaactagatgatccacacaaaggaccgtctaaaaagctagcaagggatacacctgcgtactatattatagtatagcaatctaggatttcttagaatgcatattaattaatattaataattgtaaggttttaataagtgacagcacgagtttatgaatctattatcagcagcccacatacgagggataattttctagagcatgggatgggaaagatccatgggaaatggattgcctagaacattatgcatgtaatagtgtggatggctcggatccatcagcacaaactgaatgtcccttgaaggcttcagtgccgtttcctttgattaataaccagttgttgattt

SEQ ID NO: 229855 - DNA, 569 bp, Glycine max
aaaaatacgacttgtaaggttctccgtgcaatagataattaagctaattcctgtgcagtattaattctagctatttcctgagggagaagtgttggtaaatatttgtgttttaatttaaaatttataaatatatattaattctatcttataaaataaaatatttattttagattttcttaagattttgttttaatgagtcaaactagtttgttagatttgttttgacaactataggttagtttccaacggtcatattttgtttgttgcttaaggtgatttgtgactatatattatctttccttatttctaaaaagatgacagaacaacagtctcatctttttctcccaaaattttttatttcttctcttataaaataatttatttcttgagagtaagagcattggtgttcataaggttcggggatcctttcgctgcacacgatcggaaccaacgggttgtcgtatcttgggagaggagcgcaatcaaatgttcctaccagtgcagtggggcgttttctctctaggatagcgtttacgcgctttcacccaggctataactttctttctcta

SEQ ID NO: 229856 - DNA, 507 bp, Glycine max
ataaggtactctattaggaatagaacaaacaaaatataaagcttcaccaaagtgtttattttattgtttttatgttttatcaatgagttataaataaagagacaatcagtcaatatgtaacaacaaaatacttgcagcagtaataataacgttaaacaataaaaattaaaaaccaaacaacaaatgtcctgattttaaagacttgtgttcacaggatcatttgaccaagtaaaggatagttttctaatcatatatgaatgaaattagaagtatgcttttagtttttcacataaactaattctaaaagcattttctcttcaaaaccatcattaatgaagaaaatatattttaaattttaaattataagaaaatatttttcaacaatctctcacttatgtaaaatttaaggaaatgaaatactatagtaaaacattgttaataaagcataatacattgtgtcttcatccattaatttgtcagacttacttaacagggaactcaatcata

SEQ ID NO: 229857 - DNA, 460 bp, Glycine max
ttctttcttttttttttttttttaaagattgcaaatgcttttgttatttttatattagagggggtcctgagttagccccagttgttggtaattcatgtagtcaatgccgtttaatctaatacaacataacacatgctctggtagctcctcctgtttgttcccctgaattgtgaggccaacatctagagtgcaaacctttaatctgtccaaaaaagcttcaaaccctttcctggagatataactgaatctatgcatatccaaatcaatctcaaagtaattttcccccatgtaaaactcatgttggggacgcgaaagaacaggcttctcattgtaagcctgcataagcttcctttctgcagcactcaaatgaagatctttcaagttgatgacacggtctaatattttcaacctttccctgaaggggcaattgtttttacggaaaaccctttaccttttaact

SEQ ID NO: 229858 - DNA, 611 bp, Glycine max
ccgtactgcacaactccaccactgtgcaatggccgacgaggaacctgttgatcagaagagatatcttgaagagtcttgcaaaccaaaatgtgtaaaaccattactagaataccaggcgtgcattaaaaggatacatggtgatgaatctgggcagaaacactgcactggacaatattttgattattggtcttgtattgacaaatgtgttgcaccgaagctattcaccaaactgaagtaaatcgggaaggatttgatggctatcattgcattctgttctgttttcattcccaaataacttcgtctaaacattcgatgttataatatccaaactatatgccctatatggttattcttgtgtttaccgtgaagttttgagcctgtggagaccttagagtatgattaataagaacattatgccaaatttttacttccgagatttggaaggatgtattttggatggatccaacgttgttattgagttttgaaataagttctgaagtgtggatttttgtattttctgtttacttggctggctaaaaacgtagccctgcaccaaaaaatagtcctccgattacatctaatcgaatcaaactgtagttggcatttcagag

SEQ ID NO: 229859 - DNA, 499 bp, Glycine max
ctctgaaatgccaactacagtttgattcgattagatgtaaggggaggactattttttggtgcagggctacgtttttagccagccaagtaaacagaaaatacaaaaatccacacttcagaacttatttcaaaactcaataacaacgttggatccatccaaaatacatccttccaaatctcggaagtaaaaatctggcataatgttcttattaatcatactctaagggctccacaggctcaaaacttcacggtgaacacaagaataaccatatagggcatatagtttggatattataacatctaatgtttagacgaagttatttgggaatgaaaacagaacagaatgcaatgatagccatcaaatccttgccgatttacttcagtttggagaatagctccggtgcaacacatttgtcaatacaagaccaataatcaaaatattgtccagtgcagtgtttctgcccagatacatcaccatgtatccttttaatgcacgcctg

SEQ ID NO: 229860 - DNA, 229 bp, Glycine max
gtcggtggacatggaagccatctctcctccacctgaggaacatataataagaactcgtcatggtcgtgtctccgttgctgtgtatggggaccaggacaagccagcgctaatcacgtatcctgatttggctttaaattatgtctcctgctttcaggggttattattttgtccagaagcctgttcactgctgctccacaatttctgtatatatcatattagtccacctggg

SEQ ID NO: 229861 - DNA, 474 bp, Glycine max
acagtggtaacaagaactttattatttttatttgggcaaaaacaacaatttcgaagctttaccaaccaaacgaaagtctatgattacaaatcaaagaatgactacagctgctttcaactaaactcttccccctttttttccctctgtttatttctttccaagtctccctctatctacaaggttatgacatccctcccttgtcagatttttgacaaaacaaagaactatatataaacttgttcaacaatcaaaacaaaaagagcggctatctttattcacctactactactactatatcttcacggaaatccgtgtctttattggtttcaatttcaaacccatactctctggagagtaaagctcaggagaaatgcaagagggactcaggggacttcttgggctgacactcagcttagatggtctgtacaagccatatcccatgagaaaatactccattggtattaacatggcatg

SEQ ID NO: 229862 - DNA, 524 bp, Glycine max
  unsure (1)..(524): unsure at all n locations
ggcgaactaaaaccaactattttctgtgctgttccccgtgtgcttgatagagtgtactcaggtttgacgcagaagatttcttctgggggcttcttgaagaagacattattcaactttgcttattcatataagcttaataacatgaagaaagggcttagacatggagaagcatctccacttcttgataaaattgtgtttgacaaggtaaagcaaggtttagggggtagagtacgtcttattttgtctggagcagcacctttatctgcacatgtggaaggttacttacgggtggtgacttgtgctcatgtcctacagggatatggtctgactgaaacctgtgcgggaacctttgtctcattaccaaatgaaatagaaatgcttggaacagtgggccctcctgtaccaaatgtggatgtttgcctggaatctgttcctgaaatgggatacgatgccctagcangtacaccaagaggagatatttgtgtaaagggaaaaaccttgtttgcagggtactacatacgtga

SEQ ID NO: 229863 - DNA, 469 bp, Glycine max
acttagataagtccggtagaatagataatatgacgtgaaaaaaaaaatcaaaataaatgacgtatccatatataactactcagcgtatatacagtcaccaaaaggaaacaattgaacggagacaaacaccatcacatacagaaaataaattatctcccaaatcaggtctcaggcactgggtttacttccactcttatacatgttgtcaatggcattctgatagtatttaagcaactgtggcctcttcttcttgtatgttggagtgataagggcacgttccatgtcaaatggaattgagtcaaggtgaactgcttttataaactcaaaacctttcaacttcttttccttcgcaatctttgagagctcttcaattatgtaactttttgctcgagcattttcacagagagaattgaagtccatggatataccattttcttgggcccaatgttcaagtgcttgcttactgggg

SEQ ID NO: 229864 - DNA, 361 bp, Glycine max
cgattccttctcgagcctcgcaatcttaggtcgcttcagacgctcttgatgtctcacattctcccgacgcgaatcgcctctcaccactggccctccgacgacctccgccaccgcactctctccgatcaccgcctgcatttggcctccaagccctccggccatagaaccgtcgactccgccgagatcctccgcgccgacgacgtcctccgccccgacggcgtcatccacggcatcgagcgtctcatcgtcccccgatccgtacaggaggacttcaaccgccgccgcaacctcgccgccatctccgccgtccttcccgagggagcgccggaggtcgatccccgtactcaccgcctcaagaagc

SEQ ID NO: 229865 - DNA, 429 bp, Glycine max
gagcagaaatctccaagtataacaattatgaaacaggatacaacaggggtgacaatattacaaaaagttagtatctatggttacatagaaaatcagattatacccaaatggcaaaagagggagggtggttgatcaagctacataaaagggtacataaactacaaacatgcgagggagggtggttgaccaaactacaaaaaaggggacattataaactacaacaatatcaacagactaaaaaacaacctgtattaatgacacaacaaattcacttccagagcttgacaaacttgtcatgactggctgaagcaaccaaaccatttacagtagaaaccgccaatgccgcaataagaccttcatgagcagatagtgtcatcgtcttgttctcagtcatgttccagagctccaatgactggtaacaaccaacga

SEQ ID NO: 229866 - DNA, 384 bp, Glycine max
atgaaatcaaatattgaacaaagcaggaattacaactatataggggagggacatcatgcccaaattgccagcgaagacatcaatgcaaccccaaggaaaagcatgcagtatgacagtatctgccgcctaaagttacaactgatcctcttgctaagaaaatccgcagcgatcaaatctaccaaagccatataaaccaaagtccccgacgacaaggaatccaagataccttcggcgatgagtgcaccggggctgtaagggttataccccgaagagatagccattccaatcccaacacccaaaggtgtagtcagtgcacaagagcacgccattatagttgctgacgaggctttaaactgcgcttgggaaatgcaacctccaagcgca

SEQ ID NO: 229867 - DNA, 479 bp, Glycine max
aaagaccataactttggaggttgaaagctctgacaccattgataatgtgaaggcaaagatacaggacaaggaaggtattccaccagaccagcagaggcttatttttgcagggaagcagctggaagatgggcgtaccctggctgattataatatccagaaggaatccactctgcatttggtgttgaggcttcgtggtggtatgcaaatatttgtgaagactctgacagggaagaccgtaaccttggaggtggaaagctctgataccattgataatgtgaaagcaaagattcaggacaaggagggtattccaccagatcagcagaggcttatttttgctgggaagcaattggaagatggtcgtaccttggcggattacaatattcagaaggaatccaccctgcatcttgtcctccgccttcgtggaggtttctgagtctgtctgttatgtccaatattagttgaattctctgttgttatgt

SEQ ID NO: 229868 - DNA, 538 bp, Glycine max
cacgaggtacgtacagttagaaatttatatttataatttcatattgtttgttactgaattgaccatagaccaattccctttttattagggagtattcaatacatccataattctgagtttcatgttactcattccaagagacatgtcagattcagggcatcccaattaaattaaatggaatgacagtttctcattcggaatctgtacaataaaaatttttatcaaatcacacatcgcagtatactagactttctaattcctttagagatttatctaaaagatttgcgatataactaggaagacgtttcaaataccacacatgagttactaggcatgccagttttatatagcccatttgatatctacgtatccgagaatcaataaattctactccgcattgttcacaaaattttgggtcgtcctttttatctctgattactcgataatttccacaagcacaaatcccactttgtataggcccaaaaattctttcacaaaataatccatctttttcggatatattggttttgtaatgaaa

SEQ ID NO: 229869 - DNA, 526 bp, Glycine max
atgggaatcaaaagctgatggagcatttgcaatttcagaagatacatggaatgaacctctagggcgtggaactgagattagattacacctcaaggaagaggctggggagtacttgcaggagtctaaactgaaagaattggtgaagagatactctgaatttattaacttccctatctatatttgggcaagcaaagaggttgatgtggaggttcccgctgatgaagatgattccagtgatgaagaggattcatctgaaagcagctccaaggaggaaagcgaagatgaagatgctgataaaagtgaagacgaagaaaaaaagcccaagacaaagacggtgaaggaaacaacttatgaatgggaacttttaaatgatgtgaaagctatatggctgaggaatccaaaggaggttacagaagaagaatacaccaaattctaccactctcttgccaaggatttcagtgatgagaaacctttagcatggagtcatttcactgctgagggcgatgtcgagttcaaggcagtcctg

SEQ ID NO: 229870 - DNA, 541 bp, Glycine max
gtcagtggactcatcaggatcctcatcagcaatcctacggatcatatcaagggctttcctaataagtttcttcttgattgtctttagactactatgttgctgaagcatttctcgcgatacattaagtggcaatgtgtcagaatcaacaagacccagcaaaaagtttaggtacttaggcaacagttcattaaattcatctgaaatgaacacacgtctaacatacaacttcaggttggatttgtttgcgttataatagctctcgtataaatcttgaggtgccttaggtggtacaaacaggactgccttgaactcgacatcgccctcagcagtgaaatgactccatgctaaaggtttctcatcactgaaatccttggcaagagagtggtagaatttggtgtattcttcttctgtaacctcctttggattcctcagccatatagctctcacatcatttaaaagttgccattcataagttggttccttcaccgtctttgtcttgggcttttattcttcgtcttcacttttatcagcatcttcatct

SEQ ID NO: 229871 - DNA, 513 bp, Glycine max
attcaattctgttcatcctttgcttcccaaagaaagagaaaataaaaagcaatgggtagccttgaagcggaaagaacaacagtaggattggcagcaagagacccttcagggattctctccccatacacctacaatctaagaaacacaggccctgatgatgtttacataaaagttcactactgtggaatttgccattctgatctccaccagattaaaaatgatcttggcatgtccaactatcccatggtcccaggacatgaagtggttggtgaggtactggaggtggggtcagacgttagcaggttcagagtgggagagttggtgggagttggactcctcgtaggttgctgcaaaaactgccagccatgccaacaagacattgagaattactgcagcaagaagatctggtcttacaatgatgtttatgtcgatggaaaacccacgcagggtggctttgctgaaaccatggtcgttgagcaaaagtatgtggtgaaaattccagagggtttggcg

SEQ ID NO: 229872 - DNA, 402 bp, Glycine max
aatatccaacttcttttttctttcttttaagggcggaacaatacaacattttttttacacagcaaagctatggtcaaacaggaagtttggtatcttgtgctttccacgagaatctgatatcaaatattttaatgaacggcgtgtgaccaaaacagagaaaacagagcactctttttaataaacaaacacagctttagttcaatgaaaaacttttccagactcttgatgatgatggatggatgtcgcgggtgtcgagctggaatactttcttttactaaacaacaagtttgctgcctttgacattcactacaaacctgtatataacatcgatcttctccaaccttatacaggctttgttaatgtaatccatgtttaccactgtaatcatcgaactgagaccct

SEQ ID NO: 229873 - DNA, 524 bp, Glycine max
ccaagatttaggtggcaatatgttatacatctcttcttcatatcctaggcattatgtctaacaccaaatctcatgctggcattcccattttggacctttctcagccattgcagccatgttctctatcctctctctataatgcaagcaaagattggggtcttttccacataatcaaccatggaatctccaaagatctttgcagccagatccagacactatccaaacacctcttcaacctcccttctaatactaaacttagacttggtcctttgtcatctttaaattcttacacccctcttttcattgcctctccattctttgagagcctccgagtcaatggacccaacttttatgtttctgctgataattctgctgagatcctctttgacaaaaaggactccaaattcagtgtgataatacaagaatattgcagtaagatggaagatttgtctaagaaaatttctaagcttgtattgatgagcataggggatggcattgagaagaagttctatgattctgagttc

SEQ ID NO: 229874 - DNA, 504 bp, Glycine max
gtgaagaacagatattgtaacttttgcaacatttacaactgagccttgatcgaagcaaagtctctaactgtgaaacccaccttatcaaatctacctctttcattgctctctctaaatttcaaatagtccaagcacacaaatggtttgtacttccttttattcccttctccaacaacttcatctggtgccaaaatcaccttgtcatcctcaaagcaccaaaagaatgatagagaaaaccggttctcatgatgtttcaaaacaactctatgttctgaggatcttagtttgtcattgctccaagcttgcaacatatcacctatgttcaccactagggttccctcagatgggtttatatctatccactctccctcatttgatctcacttgaagccctcctatctcatcttgatataagatagtaatacaactcatatcagtgtgcatcccaagcccctcaacttgatcttctataacttctggagctgagtaattgtttaccctcaag

SEQ ID NO: 229875 - DNA, 519 bp, Glycine max
ggctgatgaaatgctttcacgtggtttcaaggatcagatctatgacatcttccagctgctgccatccaaaattcaggttggagtgttctctgctacaatgccgccagaagcccttgaaattacaaggaagttcatgaataagccagtgagaatcctggtaaagcgtgatgaactgaccctggagggtataaagcagttttatgtcaatgttgacaaggaagagtggaagctggagacattatgtgacctttatgagactctggctatcactcagagtgtcatttttgtgaataccaggcgcaaggtggactggctcactgacaagatgcgaagcaatgaccacacagtctctgccacccatggtgacatggaccaaaacacacgtgatattatcatgcgtgaattccggtccggctcttctcgagttctcattaccacggaccttctggcccgtggtatcgatgtgcagcaagtgtctctggtcataaactatgatctgccaacccaacctgaaaacta

SEQ ID NO: 229876 - DNA, 503 bp, Glycine max
agacaagaaagttaatgcatgtttgagcagcatcctgctaattaagggattagacaaaatttatagaatccaatacaaatagcatcagatcacatgtctttgatctctaatgggcaaaatatatagagagaaaatgagcacaaataatacttgccaaatagaataagaacctgatgacttaacagagaacaaacattaactcatcagagtaaatgagcaacatttgatggcagctcctctacagtcacattggagaacttctgaatatcagacagcatcctggaatcatctgtcgtgacaaagtttatagcaactccttttctttcaaatcgaccactacgtactatgcggtggagatagttttcaggttgggttggcagatcatagtttatgaccagagacacttgctggacattgataccacgggccataaggtccgtggtaatgagaactcgagaagagccggaccggaatttacgcatgagaatatcacgtgtgttttg

SEQ ID NO: 229877 - DNA, 480 bp, Glycine max
agcaaagcaaagcagagccaacaacaagaagaacaaaaccaacatcaacaaccacaagaagaagaagcttgcaaattagaagaatcttcagttgaaagggaagaacacacaagaacaaagagaggaagaaacgcgaatgaagggagaattagagttgccaccagggttcagatttcaccccactgatgaagaattggtgaatcactacttgtgtaggaagtgcgcgggtcaaccaatcgcggttcccatcatcaaagaggtcgatttgtacaagtttgatccatggcagcttccagaaattggctactacggcgagaaagaatggtacttcttttctcctcgggatcggaaatacccgaacggttcacggccgaaccgtgccgccggaagcggctattggaaagccaccggcgccgataaggcgatcggaaaaccgagagcgctagggatcaagatagctctgtttttttacgccgaaag

SEQ ID NO: 229878 - DNA, 558 bp, Glycine max
tcctgtttttgttcttttctctttacaccaagatccaatccaaatactagctcatttcaaccgaattccacattccctgatctctctagaacaaagaataagaatagtttactaagcttggcctagtccacaaaatgttaggtgcaatgcaattgcacacaaatgctgacttttactacaaaaaaataataaagatatttgcgggtcccatcatcttgtccaaaaaaaacggatcgttttcacatcttctgtaggtacatgaacatgtcctgcaagggcgagagctgacccatttggtactgaacagtgccaaaggggtcatcgacgacggaaaggttattatcgtccaagtaattaaactgaaaatcaaacgcgttttctagctgtaggcccagatcataatcatcgttattccacttggggtcgctctgcacttccctctcgcacctgacatcgggcgaaaccacgtgctccgagctgctcgagtccgtgtgcaaccttggcaccgaatctgaagtctccgtgtacaacaatggctcatttccagcttatgaatct

SEQ ID NO: 229879 - DNA, 469 bp, Glycine max
aagaagtgcagttcccaaatggcaataatctttctttcaagctccgcaattcttcttccaagtcttgctttctttctcacattatttaaccttgcaagttccgaatcattcatcggcgtgaactacggacaagtcgctgacaacctgccgccgccgtcggcgacggcgaagctgctccagtcgacggccatcggaaaggtgcgtttgtacggaaccgacccggccataataaaagctctggcgaacacggggatcggaatcgtgatcggagcggcgaacggggacattccggggctagcctcggaccctaacttcgcgaaaacgtgggtgaacaccaacgtcgtaccgtactaccctgccagcaacatcatcctcataaccgtcggcaacgaagtgataacctcgaacgacccaaacctcgtgaaccagatgctgccggcgatccagaacgtgcagggcgcgctcgacg

SEQ ID NO: 229880 - DNA, 451 bp, Glycine max
cacacataaacaaagcatcaatttgcttctgataaagactaaaaaaggggagactccaaatagaggaagaagatcctcctccatacatgaacactccaagaaccagaacattttttagcaattaagagagaataattaaaacaacaaaaagggccctcctttatctacttgttttctgggttaggcatttcctccagcataaagacaactcttgtaacttggattattcgttgacaacatggctgtttgcgagaaatcacaagtcaatggattccgtccagctgtttgatacaatagattcatggcatatgcagcatggtttaccaaagggttaggttcaaaacaagcccctccttgttgaattgcggtacaatcaatcccttgcccacaagcataatccaaatttgcttggaactgtgcatctgccactcctcctttgggcacacaccat

SEQ ID NO: 229881 - DNA, 517 bp, Glycine max
  unsure (1)..(517): unsure at all n locations
gcagcatcgattgagatggttcctcgcccccaacgtaaaaccaagagcgcggatgccatcaagaaatgtgaccatgatccccatgttattgctgctgtggccaaattattctggcatgataggaaggtggacaaagccaggacttggttgagtagggctgtgacactagctcctgatattggggatttttgggcattgctatacaaatttgaactgcagcatggaactgaggagaaccagaaggatgtactgaagagatgtattgctgctgaaccaaaacatggagagaaatggcaagcaatctcaaaggctgttgagaattctcatcaaccaaccgaatccatcttgaagaaagtagtggttgcacttgggaaagaagagaatgcggctgagaataataaacattgatttgccaagtttcagctgtgtcataaatgattagttntgaagagaactttgaacattattgaatgtctcttgtagaatattgaaggaacttgtatattagtttgatcca

SEQ ID NO: 229882 - DNA, 365 bp, Glycine max
ggatcaaactaatatacaagttccttcaatattctacaagagacattcaataatgttcaaagttctcttcaaaactaatcatttatgacacagctgaaacttggcaaatcaatgtttattattctcagccgcattctcttctttcccaagtgcaaccactactttcttcaagatggattcggttggttgatgagaattctcaacagcctttgagattgcttgccatttctctccatgttttggttcagcagcaatacatctcttcagtacatccttctggttctcctcagttccatgctgcagttcaaatttgtatagcaatgcccaaaaatccccaatatcaggagctagtgtcacagccctac

SEQ ID NO: 229883 - DNA, 384 bp, Glycine max
gcagcagaagcaggtcattgtggagaagcttggtgagccagcccaaggctatgaagatttcactgccagccttcctgctgatgagtgccgttatgctgtttatgattttgagtatctgactgaagggaatgtccctaaaagcagaatttttttcattgcatggtcccctgacacatcaagggtgaggagcaagatgatctatgcaagctccaaagacagattcaagagggagctggatggaattcaagtagagctgcaagcaactgatcctactgagatgggtcttgatgtgttcaaaagccgggccaactaagatgattatagaaaatagtaggctttctggtgggagcagcactccttaagccttatttactcatggaaaat

SEQ ID NO: 229884 - DNA, 539 bp, Glycine max
cgaggatgttgatgacgaggacgatgaagacgaggaggagttgaagaagaagccctttgggttctctcgctccagcaacaaggctgcttctaagcctctctctcgtggatcagcaactgtggaatcaaaggggcaagctgagaagtgtgccaagagaaagaggaagaaccagtatcgtggaatccgtcagcgtccatggggaaagtgggctgctgagatccgtgacccaagaaagggggttcgtgtttggcttggaactttcagcactgctgaagaagctgcaagagcttatgatgctgaagcaaggaggatccggggcaagaaagccaaggtgaatttcccggatgagccttcaggcgctgctgcttcctcaaaacgcctcaaggtgaatccagaggctcagccaatgaaggaaaatctgaacaccgtgaagccgaaaatgaaccagatgttcaattttggtcacaatctggagggctactacagcccaatagatcaggtggaacagaaaccactggttaaccagtatgttaaccctg

SEQ ID NO: 229885 - DNA, 408 bp, Glycine max
  unsure (1)..(408): unsure at all n locations
aagagaatggctcccaagggtttaacctttctggctgtgttaatatgcgtttcagcactgtcactgagtccttctgttgcgggggaagggcaaaataatggccttgttatgaacttctacaaggaatcatgccctcaggctgaagacatcatcacagaacaagtcaagcttctctacaagcgccacaagaacactgctttctcctggctcaggaacatcttccatgactgtgctgttcagagttgtgatgcttcactgttgctggactccacaagaaggagcttgtctgagaaggaaacagatagaagctctgggttgagaaatttcaggtacattgagaccatcaaagaagcttttgaaagagaatgcccttgagttgtttcatgtgctgatatcctcgntctctct

SEQ ID NO: 229886 - DNA, 448 bp, Glycine max
aacagtgtataatgcccatgggccatgatttatttatttagaaagaacaacctagctttatgagtatgaatatcataagcattgtcactgccatcataacagcactcacacgcatacataacataattaacaccatgaacatgcccttctacccaactctaagctacttgcatagtactacatatataatatccttattgaaattaaaaaaaaaacaacagtaacatcggaagattaaaaaacatagcctcttaatcctcccatccccatgaacctgcagtggtctcggttcattgaaccagcccatttaaaggaaaagaccttaattattttttgcataatatattacagattttcttcctcgatcatagacaaggggaggaaaattcaagggtcctgatcatggtgcttgttggcaacattgcactgctttctgacctcacccttt

SEQ ID NO: 229887 - DNA, 516 bp, Glycine max
atttctcagcctcttttcctgtttcttcgtttctttctgaatatttaaatttttcgttttaaatcctcagcattgaaaccaaaaactgatcttcgaatagcatcgcaaagactcaaaaccaccccaaaataaaaagaaaatccaattttttaggctctcacaaaaacgggtggagaaaaaaaaaacttgaacactgaacctacgttgaagctgaaagtggttgaaagggggttatggagagttccgttgggggagagaggagtggacgcgtggcactatcagaggtggtggcagattgtgtgaaacggtggttcagagatgcactgaaagaggccaaggcaggggacataaacatgcaagtgttggtgggtcagatgtacaacagtggctatggggttcctagagatgctcagaagggaagagtttgggttaccaaagcatcaaaggctaagtcttcagtttggaaagtaggtgataagcacccaggttataatgcaagtgactctgattccgatg

SEQ ID NO: 229888 - DNA, 592 bp, Glycine max
  unsure (1)..(592): unsure at all n locations
atcactctcaactttactcctcttcaatcagttgcatattctttgctattccaatggccactgttgaggttgtgtcagccaaggttgccctcccagaggacacaaaagaggcatcattgaaggttgacgaggagaagaacacagaagaagttgttgagactccaacaccagaaactgtggtcactgagcaaaccaaggaggaaagtactgaggccccacgacctgcagcttcagaagacaagccctcggttgaagttcagactaaagaggtggcagaggaagttgtgtctgagaccatcacacaagagccaacagttgagaagcaagaagctgctgagggaacaaaagaaaatgccgatcctgctgagattaagacaccagaagctgcagaagatgttaatattaaggaagagaaagaagctgaggctgangctgagcttaaggaggaagaggccccggcagagaaaagtgaggagaaggttgagacagaagggtcagctgaaaagaaagaggaggaagtgattgaagaagcttagggctaaaaaangaggaggtcacagtcacggacacagaggcttcacagagtaaaaga

SEQ ID NO: 229889 - DNA, 567 bp, Glycine max
ctcgagccgcgccggaggagcagaaagaaaacaaacttccagagttccttcctcagttctgtctctttctagaatcttccaattccaaccttattttttcttcaataacaccattaacttactgagtagcgagaacgagtcatggaatccaaacccggtcaaactatcaagctcctctgcagctacggcggcaagattctccctcgcgccaccgacggcgaactccgttacgctggcggccacaccagagtcctcactgtcgcccgttccatttccttttcagaattgatggtgaagctaagcgagttctgtggttcgtctgtgatcttgcggtgtcaattgcccaagggagacttggagaccttgatctccatcaccaacgacgaagatctcgctagcataatcgaagaatacgaccgtgcctcgttgaaattggcgcatccgttgaagatcaaagccgttctatcgccgccgaaatcgtcgaagaagactccgtctgctccgtcgtcggcgtcgtccagcgccagtcactctccgtccagatcggccgacaccttcacagattcg

SEQ ID NO: 229890 - DNA, 587 bp, Glycine max
agaacatcattatttctcaatttatatagctctttaaccataattccctggatacaacatgtatactagtgtatacaccatattcaaagatagctaataaatacttgactgtataattaatatcacacaaacgtaaagtggcaatatatagtgtaaatatatataagcttaatttatacacagaaaccatgagtataaagcatctttatacaaaatattcaacaagaatttactttattaccacatcattatagtaaaatgtcatgataaagtggtgaaattctattgaatgcttgtgtcaagatgtttttataggatcaaagtgtgtatataaattaaactatattttttaatcaatatatatatattgttcacacattttatatatatatataagaggtgcttaacaagttggataggcaataccacaagaactaacggtttttttggcattaggagagttaacatactgcttcaagctagggtttttgaggtagccacagaagcatggcttttgctccttcagcttctggcaacaagcactccaaggtgcagaacctgaattaattgccggaagacacggagtc

SEQ ID NO: 229891 - DNA, 535 bp, Glycine max
gcaaccaaggaatgtatatataaaaataacaaaatcgcccatagcgtacatatataccagatacaaatttttcacgacatatgatattacaaatgactaaaacttctagataacaacgaacaaaagctatataatgaattcccacactaccacgcagttcaaaattattgcataccaataatttcaagaacccttattaactttcactttcaaagggattggtacaacaatatcatatgctaataaatataatcttaagatgaagaagcaggtttggaagatgggttgaaaggaacctgctcagcgcatgtaaggatttcatggggcccagcctgttctcgaccaacacctagaaggtcaagataatactggtaatgggaaacgatattgttcatcgagtccacatcaccttgtccacaaacaccatccccatagagaatgtccattgtagtgccaaatccaggaagacgattctccatagtatcattcttgctaggcttccagttgccgacaaaggcatcatgcgcagagggct

SEQ ID NO: 229892 - DNA, 488 bp, Glycine max
gaaatcgaaagacaagtatgaagttgtgcttaaggctaagccatttgcttatgcttcaaagaagcattttgaagactgctacaagcccaagccttcaccaactccttactactacaagtcgcctcctcctccatctccagtttacatatacaagtcgccacctcccccagcccctgccgcagatgactatgaagccatatagacacttctgtttgtaagtttgtctcatttttactttatggaataatctcatgtctgctataagtttatattgggagtcggaagaaggaaataatttattgtttgtattcttggacataaagctcgtaattaatcatcaatttcaataaaaaaaaaaaaaaaaaaaaaaaaaaaaaaaaaaaaaaaaaaaaaaaaaaaaaaaaaaaaaaaaaaaaaaaaaaaaaaaaaaaataaaaaaccaaaacaaaccaaaaatcaaaacaaaaaaaaaaagggggggcccccca

SEQ ID NO: 229893 - DNA, 612 bp, Glycine max
agaacccttcctagcagaatccaccaaggaattatagaagagaggcataatgtcaggcactacttacaagttgaagtgcgacccaataatacccaaacggagaccgaagcgatgaatatccagtctaactattccaagtgcttcgatgatgatggtcgcttgaagagaacaggaacattttggatggcaactgctcatatcatcactgctgtgataggctcaggagtcctttcactagcatgggcggttgctcagcttggttgggttgctggacctattgtcatgtttctctttgccgtcgtcaatctctacacttccaacctattaacacagtgttacaggaccggtgactccgttactggacacagaaattacacctacatggaggcagtcaactccatcttgggaggaaaaaaggtcaagttatgtggcctcatccaatatatcaatctgtttggagttgcaattggatacaccattgctgcctctgtcagtatgatggccataaaaaggtcgaattgttatcacagcagtcatggaaaagatccctgccacatgtcaagcaatgggtatatgataacattcggaatagcagaagtgatattttcccaa

SEQ ID NO: 229894 - DNA, 553 bp, Glycine max
cggctcgagggaggactatcttggaaagcgtttaatgaagaaacaaccactactgatgatagttcgttcactgtgactggcttgttggagcagataaatgcaaccagagatttatctgattacttgtggtactccacagatgttgtgatcaattccaatgaaggatttttgaggaatggaaagaatcctgttcttacagttttgtctgctgggcatgctttgcatgtttttatcaacaatcagctgtcaggaactgcatatggaagcttagaggcccccaaactaacctttagcgaaagtgtgaggctcagagctggtgttaacaaaatctctcttctaagtgttgcagttgggcttccgaatgttggtccacattttgaaagatggaatgctggtgttctaggcccaattacattaagtggtctcaatgagggtaggagggacttaacttggcagaagtggtcatacaaggttggtcttaaaggtgaagccttgaatcttcattctcttagtggaagttcctctgttgagtggctttcaggggttttagttt

SEQ ID NO: 229895 - DNA, 529 bp, Glycine max
cccaaacaatgacaatggctatactacaatatatggttttgttgtatcatcaaatgaatacattccaatcagacccaactttcctcttttaagactatgtacacagataactcttctaattaaggcaaaccactcaatagcagtaagaaaataaaagcatgcacacaagtgcaattaactcttatcattgggacatcaacatggcctctccacagagtcttattagcattccaccccacattgtttgagcactggaccagtttgcttgggcaagaagggatcaatcctgacccaaatcaatgagaaaatagatgctagaaggattgaccacaacactacaatggtaggagtcctgttttgctttcccatgagacctttgaggaaagggtacaagtgaacaatgacccagaaggcaaagaacagcttcccaaacaaaggtccccatgaaccatatccattgttgatggcatcagagactccggccacgactccaacgatgttcaagattatgagagtagttggagggatg

SEQ ID NO: 229896 - DNA, 512 bp, Glycine max
gaaagcaaatccagactggtaggctcagatctcaaaccgttttcaccccaagcaagcagcatcagtacataagatttttaaatcaacatgagcatattaataaacaaaagaaaatgttatactcacaccaagtcattcaaatggccacccagaatacccagcatgatgatgatggctattctcagggatagttggtgttggtgtgctgcttcctgttgcttcatcattactgctagaatgagaagaacgaaaaggccacaaaaaggaaaatggatttctccttccatggctctccctaccactactacttacccttgcacttctacttctaccattggcgccaccgttactactactcaatccttgtggcggcagttcttggcggcaaacggggcaggagttatgctgcaccaaccatggaacaatacaatctgagtgatataaatggttgcatggcatttgtcttgctttggatcccagttcaaatttatctttgcacaccggacaatgcg

SEQ ID NO: 229897 - DNA, 591 bp, Glycine max
  unsure (1)..(591): unsure at all n locations
ccctgcctctgctatgttggctggtgcttctgctgttgcaggtcagatcactggggctaaccctacaattcctggaatgtttccaaatatgtttccgttggctacaaatcagatgcaacaatttagtgctctccctgtcatgccagtgcaggctatgactcaacaggctactcgacatgctaggcgggtgtatgttggaggcctccctcctacagctaatgagcagtcagttgcaactttcttcagtcaagttatggctaagattggtggaaacactgctggcccaggtgatgctgtggtcaatgtttacattaatcatgacaagaagtttgcctttgtggagatgaagtctgttgaagaagctagcaatgcgatggctctggatgggattatttttgaaggggcacctgttaaggtcaagagacctactgattataatccttccttagctgctaccctaggcccaagccaacctaacccaaaccttaatctgggtgctgttggcttaacacctgngtccgccggtggacttgatggtcctgatcggattttgatggtggacttnncatatactttactgaaacacagatc

SEQ ID NO: 229898 - DNA, 617 bp, Glycine max
  unsure (1)..(617): unsure at all n locations
gtccgccgtgtctttatcatggacaactgtgaggagttgattcctgagtatttgggctttgtcaagggtattgtggattccgaagatctaccactcaacatttcaagagaaatgttgcaacagaacaagatcttgaaggtcatcagaaagaacttggttaagaagtgccttgagctcttctttgaaattgcagagaacaaggaggattacaacaagttctatgaggctttctccaagaacttgaagctaggtatccatgaggattcacagaacaagggaaagattgctgaattgctcaggtaccactccaccaagagtggtgatgaaatgacaagcctcaaggattatgtgaccaggatgaaggaaggtcagagtgacatctactacatcacaggtgaaagcaagaaggctgttgagaactctccattcttagagaagttgaagaagaagggatacgaggttctttatatggttgatgccattgatgaatatgctgttggtcagctcaaggaatttgagggcaagaagcttgtctctgccaccaaggaagggctcangcttgacgagagtgaagatgagaagaagaagcaagaagagttgaaggagaagtttgacaa

SEQ ID NO: 229899 - DNA, 534 bp, Glycine max
gttaggtgtcgtgaagcaccctaatttggtgaaattggttgggtactgtgccgaagacgatgagagagggattcagaggcttttggtttacgagtttatgccgaataagagcttggaggatcatctccttgcaagagtaccgtcgacgataatcccttgggggaccaggttgaggattgcgcgggatgcggcgaggggtttggcgtatcttcacgaggaaatggattttcagctaatatttcgggattttaagacatccaacatcttgctggatgagaatttcaatgcaaagctttctgattttgggctggctaggcaaggaccctcagaagggtctggctatgtttcaacagcagtaagaatttgtctatactcttgagaaaactcattatatttacaatattgcatgacaacatcagaatagtgtgccttctggcagcttattttgagtaaattaactatatttcaccatattcaatgtgaatgattctaatttataaaaagttacaatgataatctgaagtctgaatcttt

SEQ ID NO: 229900 - DNA, 562 bp, Glycine max
gaaaaaattcagagcggagatttataagaattaacataaaaaaaattcttacattttcactcacattttaaagggatagtaaactcgaccttagtgaaaaatattgggaatgcagaaattcatccaccatagtcctttatacatgaagtacaattctagctcgtagaggttttcactcaatcccaaaccacgaccaaagatcagtaaaagtatatctaaaatttatgatacttccggttgagcatcagaaccttggtcttcatcttcttcacttccagcatccttaatttgggcttcatcatgtagacttccagcttctttattcttttcactgaattttaagcgaagcggtcgtcccattaactccttcccatccacagtataaatggcagcctctgcatactccctggtaagaaaagaaacagatccgtacccagcagatcgtccagaaaggctgtcaaagacaaccctggctgacgatggcgttttgaaattctcagcgaagacttgtctgagatgggtagatcttgctttccatgcaagggtggatgcataaattaca

SEQ ID NO: 229901 - DNA, 557 bp, Glycine max
ggaatcaaaacatacatctgtcttattatggagatctctattctaggctggattgagcatataactaaaaataatgaagggctaaggaaagttcaactgactttcttcctggatagcctcaattttataatgtaaacataaatagaatcacttgagcaagccaaagcggcagctgtgtactaacattacccacccggacttcacagtaacattcacaatctgtggcatccaacaggaaaatttattagtcagccctggattggccagcacgagaagagaggatgatgccaacaatgagaccgtataatgccaacgcctcagcaaaaatgaggatgagtatcattccaacaaaaagctttggctgctgagcatttgctctaacaccggcatcgccaacgatgccgatggccatgccagcggagaggccagcgaggccacaagcgagacctgaagagaagtgggcgtagccgtcaaaaagatagtacgatttggccttaaggttaatgcccgtacttatgataaccgcaatgatcaaaccgtagatacccaacacacca

SEQ ID NO: 229902 - DNA, 497 bp, Glycine max
atgaaactgggatatgcaatcgttattgcgcgccttgtaccaaaacatttaattttcatatattacaacaaaaaaacagactttagaaatctgccaagactaaataacgttaccagccaaaacctaaagggtaaatttatcacgcagttataactgcattatgcaaacaaaagataaaaaccatgcagaaattatagaacctctactaccataaattgcactactgttgagcacattgcactcgttgaccagatggctcatcatcatcttcatcatatgcctcgcgatattgctgttgctgctttcgtctcatctcctccttaaagttgacatcatgcaaagtggtctcctcacaatcatgcagctccatgtctgacacatgcttgctgctcttttgaggtaacaccttttccagtaactggcattggtcaggggaaagaaaccctgagtctgggaaatcaacattaaactggatgtaaaggcgacccttcatgaat

SEQ ID NO: 229903 - DNA, 498 bp, Glycine max
cacgataatgcaaataataattatggaaatacttttgttacataaaaatcacgagttgataacaacgtgcttagaattaatggtgatgatatgattgttacgttattaattattatgatcctgttattaatagcatacttattattcttgatacgcgaaaggggacacttgcacatctattgtgcattgaagagtagttcttagggaacatagccaccatggccaccaccacttccaccacctcctccaaaaccaccaccatgtgctccaccagccccataccccctcctccaccggcacccgcgccgccaccgtatccacctccatgagctcctccatcaccataacctcctccactccctccaccacttccaccacctcctccatagccaatgccatgttctccaccggcaccatagcctccaccagctccacctccagctccaccaccatagccagcagcaccatgatctccaccagcaccataccctcctccac

SEQ ID NO: 229904 - DNA, 490 bp, Glycine max
tgtcgatcctgaaaccggtcattctttacccagaaaccaatccggtgaaatttgcataagaggcgaccagattatgaaaggttatctaaatgatggagaggctacagagagaaccatagacaaagatggttggttgcacacaggtgacatcggttacatcgacgatgacgatgagttattcatcgttgacaggctcaaggaattgatcaaatacaaaggatttcaagtggctccagctgaacttgaagcccttcttctcactcatcctaagatctctgatgctgctgttgttccaatgaaggatgaagccgcgggagaggtacctgttgcatttgtggtcatatcaaatggttataccgacacaaccgaggatgaaattaagcagtttatctccaaacaggtggtgttttacaaaagaataaaccgagtattcttcattgatgcaattcccaagtcaccgtcaggcaaaatcttgcgcaggggatctaga

SEQ ID NO: 229905 - DNA, 534 bp, Glycine max
tatttttttccacactctctttctctatctgactttcttttcctcactttctctctctactttttgtttctctttatttctagtcttctctgtctatcacagatctcgaactgttctggcatgaactcagagcacttgctgcttgcagcatcaaaatgggcttctctctgttaccaaaagcaactccttgcattctgttcttggctctgctgtattgtacttgcttcacttcaacagatgcttatgatccgcttgacccaaatgggaatatcacaatcaaatgggatattataagctggacccctgatggatatgtggctgctgacacgatgaacaacttccaacaatatcgtcatatcgcttcacctgtctggtcaatgggatggacatgggcgaagaaggaggcaatatggagcatgatgggagggcagaccactgaacactgggattgctcaaaatgtaagggtggtattccacattgctagcagaaagatccgacggatgtagatttgcttcctggaacaccttacaatc

SEQ ID NO: 229906 - DNA, 511 bp, Glycine max
attataattacagtttacaatataataacgatacgtacatcattgaattacaacaaacacaaaggacaatagcaaattctaccaccaatgtaaatcctcttggaacaaatcatgggacacgtgatctaatcttggatgtcatcctcccatatgcttcaaataccaaattgacatcacagatgagtcaaaactggtctgactgaaaattttctattacaaggctaagtgtaccacagattgaaactttatgcgtgagcataaaataccaaggctaccaaagatgctatcactaaagaaaacaaggaaaccttttgcctagcaccagcattaggtaaccacggataagaatcaggtggtggcattacacagttgtcaccggtgaagtagacccttcgaggaaaagcccaacccttatcaaaagtaaaagttgctttatcctttcggaagagtagctctgattgaacattgccattagggccagcttggttgagaatatcattatagaacttaa

SEQ ID NO: 229907 - DNA, 428 bp, Glycine max
aatattataagcagagattcataattcagattaggcgaactttatacagaagcgaccaattaccaaacattaaaaaaaaaaaaaagaagcaaccatgagcttaacacacccatcacaagtccaaaacacttgaacttgctgaaaggcaagacatgaccactttattctaaggatgtttgtttaacacaaaacaccagagtgcacgaaaaccatcacagacataatacataagtttttagctacacattaatagtttatcattattcctaattaagggctatctctgcttgaagcttgctctcccaacacctcacttgcaagtgcaggggttgcaggagcagtttggtccacatttgcagccatcggtctcagcgggcacacccatttgagcaccctcaaattgagccttaacaggtgccactcccatg

SEQ ID NO: 229908 - DNA, 615 bp, Glycine max
aattaaataataatttgtcatttcacacatacaaggtatatatacatatatgtagttatgatctaatagctacattcaatgattttattacctttgtccgcatttatatatacttaattccctactccaatattacaaatcaagttatacaacacatattcctacatataccgtaccataagggataaatttcataattgaccacccatgtctttggaagaatgtgatgcaaggccttttttcacctgcttcattttccatgataccatcccaaaaggccttgtccattgtctgctttattttcccctcagtgtccttggagtcaaaatccatgggggttgccacatggaaaacaccagtgcaacctttaatggcttcatcaaagcttccctcttgagcaagatcagccttccacagagacaatttggtcttggaatctggcggctccaccaaatgcttcaccttcttcatgttagctgaagcatgcatataataataataataataataataataataataataataataataataataataataataataataataataataataataatgtaataaataaaagtggtaagtattatttatatatattctaat

SEQ ID NO: 229909 - DNA, 504 bp, Glycine max
agaaactgtactacttgattcttcactgggttgcaagatgtgtggatttgggctctgcaggctggtgagcgaggagtctctcctccgtcctagtttccgcttgagcactgaaccaaaaggtgctttcacatatacagatccagagtttcagagaactggaatactaaccaccaagtctgacatctactccttcgggctcatcattttacaacttctcactggtaggactccagttggattagcagttttagtacgcaatgcagtttcatgtggaaagttgtcttcaattcttgattcttcagctggagaatggccctcagctgtggcaatgcaattggttgaactgggactgcaatgctgtcaacaataccatagagacagaccagagttaacacctacacttgtgagagaattggagcagttgcatgcttcagaagagcgacctgtaccatcttttttctcatgtccaatccttcaggaattaatgcatgatcctcaagttgc

SEQ ID NO: 229910 - DNA, 578 bp, Glycine max
  unsure (1)..(578): unsure at all n locations
ggttttccaaggcttgaaatctgaaaatgacgattggtagtctagcacctaaggcagagaagaagaaatcaaggaagaacaagactgttgttgttaatgagaatgcacccttgttgccaaaaagtcatgttcaggagagtgatgctggttttgatgatttcaatggagcttcattttctggggctgtttttaacttatccaccacaattattggtgctggtatcatggccttgcctgcaaccttgaaacagttgggaatgatacctggtcttcttgccatcatcatcatggctttgttgacagagaagtcaattgagcttttgattcggtttacccgggctgggaagtctgcttcttatgctggtctcatgggggattcctttgggaattatggaaaagctctggtgcagatatgtgttataatcaataacatcggtgttctgattgtttacatgattataattggtgatgtgctctctggaacatcttcaagtggagatcatcactatggtatccttgaaggatggttnggtgtgcaatggtggacaggccggacattngctgtactttntactaca

SEQ ID NO: 229911 - DNA, 530 bp, Glycine max
  unsure (1)..(530): unsure at all n locations
tcgcgatctagaactattacactcacactctttgtgaaaaaggggagtttcttattctttctagacgcttgcattgatcggcgatttcttagacatggcggagcatcacgaacacgaggaagtgaagggtgagtccttgttggagaagatttctgggaagatccacgaccacgattcgtcatcttcgtcggattccgacaacgagaaaaccagcgcttctgactccttgaagtcaaaggttttcaggcttttcggcagagaaaagcccattcaccatgttcttggtggcggaaaaccggccgacgtttttctctggagaaacaagaagatatctgcatcgacactcggagttgcgaccgctatatgggttctgtttgaattgcttgagtaccacctcctcaccttggtttgccacttcctgatccttggtctagcggtgttgttcttgtggtccaatgcatccactttcatcaacaagagtccacccaagaacccacangtgcacattccagagaaaccctgtttagaat

SEQ ID NO: 229912 - DNA, 386 bp, Glycine max
tttttattttttttctttttttactgtttttttaacctttcattttttttttattattatatttggtttatttattttttattattttatttatttttttttatcatttttatacacttttaaaaaaaaaaaaaaaacacatatccacccccacaacttatgaaaaataccacaaaaaaaaacaaaacgccccccataaaaaaaaaaaaaaaaaaaaaaaaaaaaaaaaatacaaaaaaaaaaaaaacaaaaaacagaaaaaccaactgccccccattaaataaaaaaaaaacactatcaaaaaccccaagtttaggaacaaaaaaaaaatttcctaaaaaagggccaaggacaaacagaaatgaaaaataaccctgaaaagagga

SEQ ID NO: 229913 - DNA, 532 bp, Glycine max
aattataaagtaaatatcatttattcaaacctaaagaaacacagtaacacaccatcacaaactcatgtaaccctgccaataaaccatcacccctaaactccagcaccagcagcttgctcacttcaatacacaactcccagaatttctcatgtcaccacgtggcaagcacgctgatgtggagccaagtgttgtgcttacacgtaggtgtaccctccataatacaaccaaagacttaagcatcatataataatattaataaagtaaactaaagaaataaaaagaaaaaaaaaaaagaggcttttcaacatggcatgcaaaatggtagacctgatccccacaactaggaccatttttaaacttgtttttctcactcacactgtccataggtctaagcttcagtcttctcaacaggaacctctactggggtttcaactgactcagctggtttggtctcttactctgtggttgctggtggtgctgctgctgctgattctgtttcagtagttactttaggctcctctgctgcttcttt

SEQ ID NO: 229914 - DNA, 600 bp, Glycine max
atcaaatccaaacacataatagcagtatcagggcattagcacttcaactcacaaaccttacacattttttttataaagaaaatgaagctctcggcgttgcagcagagttacctcacgcgccgggcgaacagcttcagaggatcggcgcagttggattcgtccgccgacggcgcggtgaagtcgccggcggcgattttctggcttgtaatccacggcgtctgctgcctcatcagcttggttctcggcttccgcttctcgcgcctcgtcttcttcttcctcttctcgacaagcctctacaccgcgccgttccggagcggttcggaaatcgcggctccgcatgacgttcctccggcggcgaaccggacggcgatgctgagcaccgcgagccgcgtggtagtcgggcggcacgggatccgaatccgcccgtggccgcatccggatcccgtggaggtgatgaaggcgcaccgcataatcgagagagtgcagagagagcagagggcgctgttcggagtgaaaaaccctaggacggtgatcgcggtgacgccgacgcacgttcgcacgttccagacgctgcatttgaccgtgtgatgcacgcgctga

SEQ ID NO: 229915 - DNA, 607 bp, Glycine max
  unsure (1)..(607): unsure at all n locations
ggaagagacatttggagacagagtagatcagcaatgagtaacgcaaaattggatatccatggtagactgatgaaagcttataagcaagtaccagaatggtggttcctcagtatattgtttgggagcatggcgctatccttgctaatggcttttgtgtggaaaacggatgtgcaactgccatggtggggtatgctctttgcttttggtttggcttttattgtaacccttcctattggtgtcattcaagcaactaccaaccagcaacctggatatgacattatagcacagttcatgattgggtatgtccttcctggacaaccaattgcaaacttgctcttcaagatttacgggagaatcagcaccgtccatgctctctctttcttgtcagatctcaaacttggccactacatgaaaattcctccacggtgcatgtacaccgctcagctggtgggaactctagttgctggtgtagtgaacctggcagtggcttggtggatgttggatagcattaaggacatctgcatggatgataaagtgcaccatgacagtccttggacatgccctaagtacagagtgacatttgatgcatcangtatatggngtctga

SEQ ID NO: 229916 - DNA, 418 bp, Glycine max
aaaatcaaagcaattcaggttatggacatttcaaattccttgaaattttgagatttatgatccaaacacaaaaggttacagaattgctgagcaattgggtattccttttaccctttagctattatcattatggctgatcagtatttgaatactggacagccattaacctgaattcctggtgcaattgggcaagtggccaatgggcaatggtccaattaactttcccaccatttgagattatggccagcattttgcagggccaagaatatgagaacccccataaaagctgtgcctgaatccagtgctgcagattgtccataattgaacttctgccaccagcgtttgttgtgacggaacacgaagttattgaagatctttccagtcactagccagcttgcaattttggcaagagttgctg

SEQ ID NO: 229917 - DNA, 555 bp, Glycine max
aatccataaagatgtgtttatcgtattccatgcatatctcacaaagcaatatacactttactacttgatcaatcaaaatgcttctttgaatcagtaggtacgaacaagtactcaaattagtacataagaactcactttctcctcccctttaagctagatcacttggaaaacaaaaacttaaattttacataaaaaactgttgagacaaaaggctaaccagcaagtggattagcatgtattgttacacgattgagccttatctctgcaagcggtcagacccctgcccctgactgagttttattcatgagatcaagaactgaagatgcatggcttactttgccaaacacggtgtatagcccatttaaatgaggctgctttgcataagtcaagaaaaattggcttccattagtatttggaccactattggccattgctaataatcctcttgcattgtgcttcagagattctcttatctgatcgttaaatatcttgccccatatactggttccccctttgccagttccagttggatctccaccttgaatcataaaaccc

SEQ ID NO: 229918 - DNA, 588 bp, Glycine max
ggggtggcaaatctgaataatacacttgcttattcttttgtttatgcaaatcgcacaatggaactgtatgttaacttcccgagcaccaaaaaggcaaaaatagtaagaatgaagatgtaatacttatcagacaaaattaaaaaaaaagtagaacaaaaaaaaaaaagaatgtgaagagacgatataaacggatattacaacttcagagcaactattgcttctgatttaaaatcaactcgcagacccaatacacgcctaacctctgctggagttaatctccaggtcataggtccagagttctcaccccagaaatctagaatctcagaaaccttttctaaatttagaattgttgccatttgagtaagacgtgcaaacttgtctctaacagttctctgtgtcatgacactgaaacggcttaccaaagctctagcatcttggtcaagctgaagaccacctagctgactaaatcttttctgcatcataatgacttctagccttttcacaatgaagtcaattatcaaatgaacaaacgtgtcataattgttagcagtcattaattgctgcagccatgccacatttgactcaacg

SEQ ID NO: 229919 - DNA, 612 bp, Glycine max
gttaaatgttaacgtgtgtgattatttatatgaatgatgattggcccaaaaaagagttatcatttaattaagttacatgcacaccagtgatttacattcatcctattcctatcctaatggccagcaaagtgaatgtaaaaaagtaatcaaatggttagattctcctgaatggcaatgaatgatcctacaatctttcctcccacatccggaaactcttcgtggcccgggagggatcttaccttaccctttcgatcgacttctaccgggtacttgagcagatgccctgtcatttctgttacatcatttgatgcaaattgcttccagttcagctcacccattgttctaatcctactaacacattcaaggctctctggttgtaagaagcagtcttcaatcgtacccgtatgttcagcccaaagtgacatcctatatccatggatttgcccacgaggatgatactggcttcttgcccaggtatgatgaggttggtacgcacccattgcaatctcggtgtcccttgttacttacatagagcgctggttgatgtttgcagaccccattatgacatattcatcatcaactatcatgccttttgaatgaacttaaatcatg

SEQ ID NO: 229920 - DNA, 458 bp, Glycine max
cttggctaatgccatttttaatacattaagatcacaggattacatccatacatgtatagagagaagaagatcaagttactgtctaaagtctcaataactcttgctaaagttttttcctcttctttttacaaatgctcatgtttggtctgaaatcagcttcatattgcacacacaatgtagccattggcagtggcgtgctgaagcccaacatgtcaacttttggtgctgaccaattcgatgacttcagacccaaagaaaaagtgctaaaattttcatacttcaactggtggtcgtttaacactgcatttggcactttagccgctacactgtttgttgtgtacattcaagagaggtttgggtggggattgcggtatggaatatcagcattgaagcatttcatttggacgtagaggcatacaaacacatggttagtatcgatggattgatcctcgcatgtg

SEQ ID NO: 229921 - DNA, 593 bp, Glycine max
  unsure (1)..(593): unsure at all n locations
gtagaccgcaatccaaatgtctttacacttctcaatcgaacttgttctttggttgaccctgacacaatcaaagacccaaacaccttcaattatggaatattttttgatgctctagattcacgtgttgtagaatcaacaacagattttcctcagaagttcttctactgcttttggtggggtttgcgcaatttaagttctcttggacaaaatctaaagactagtactgatgtctcagaaatagcttttgcaatcttcattgccatctttggattggtcttattctcattacttattggaaacatgcagaaatatctgcaatctacaactgtaagagtggaggagatgagagtgaagagacaggacgcagaacagtggatgtcccaccgtatgctacctgagaacttgagggaaagaattagaaagtacgaacagtaccaatggcaagaaaatagnggtgttgaggaggaggcattaattcgtaaccttcctaaagatctcagaagggacattaagcgtcacctttggctaactnntagttanaaagtgccaatgtttgagaaaatggatgagcagttgttggatgcatgtgtgat

SEQ ID NO: 229922 - DNA, 517 bp, Glycine max
ccggacagacctttacaattgaacctatgatcaatgccggtgtctggcgggatcgaatgtggcctgatggatggactgctgttacagcagatggtaaacgaagtgctcaatttgagcagactcttttggtgacagagactggtgttgaagttttaacagggaggttgcagacatcacccaatgtttttccttggttaaattcataattgggtgaatcatggagacagaagctggtagtgtctgaataccatacaattaatagacaacatttctttgatctacatctctggttttctcttttgggtatcatgtttgcaagttatacaaaaaaacagaagcaaaattcaattgagttttgatgataagtatgattaatgattgtttgtgtaattgaagaaaatttaagaattttgtccttcgttctttgtatggcttatgttggccaagtcaataatgtttgagcgaagttttgaacactggcttaatcattaatttagttcctttgtttattgaaaac

SEQ ID NO: 229923 - DNA, 565 bp, Glycine max
gaaacaaagcaacacaacacaatagcttattcattagttctcatccattaatttccattgaagtccgaaaacagaaaccaaaaatacaggatgatgaaatctcaaaaagcaaaaacaaatgggaatgtagtttaagtacaaacaaacaaagtggggtggcggctacaaatgctttgcaaatttttcacacttagaagcctgggggcttgtaggcgatgaagctgatgcactgcacttggcgaacgttgtcgaatccgatgatacggatgaagccgttggggtatgcagtcttagcctcttgaagctccttcaacacctgagaagcatcagtgcaaccaaacataggcagcttccacatggtccagtagcgtccatcgtagtatcctggtgacctgttgtgctcacggtacacgaaaccgtgctccaactcgaattccaagcaaggaatccatcccttcctaagaaggtattctacttcctttgccaattgtgcatcatcaaggtctggcaggtaggaaagagtctcaaacttcttcttgccaactggtggccacacctgcatgca

SEQ ID NO: 229924 - DNA, 532 bp, Glycine max
aatattctaaacagcatcataatggaaatttcagtgtcattaagaaaataggcagttcagaaacgcgtataaatggaaggacaaactaaaatagcccagtacatccacaattcataacgaagaacacgaatgcccaaaatctcagtaacattgagattagcattcaacaccttctccctttgaaaacattacagaagggaagttcaatgactaataagcagagagtatggtatgtttaattttgttccccgtcacctttgggtgcggcttctttaatttcatctgcaccatcgtcctgcatgtcagaggtccagagggtgaggttatcacgtagcagttgcatgatcaaagtgctatccttgtatgactcctctcccaatgtatccaattcagcaatagcctcatcaaaagcctgttttgcaaggctgcaagcccgatcaggagagttaagaatctcatagtaaaacacggagaagttcagagcaagacccagcctgatagggtgagttggaggcaactcggtattagcaat

SEQ ID NO: 229925 - DNA, 507 bp, Glycine max
  unsure (1)..(507): unsure at all n locations
atataattcatattcttcttaaaagaaaacattcaatatgtatttgtccaaataacaatgaaactctcactctaattttcaagtcactgtgtttctctttgtttcactattgctatgctcactttccggggacaaagtttgtagcataggcccaggcattattgtttaccgggtcagctaggtgatcagcaaggttttccaaaggtccctttcctgtcacaatggcctgaacaaagaaaccaaacatggagaacatggccaacctaccattcttgagctctttcaccttcaactcagcaaaagcctctgggtcatcagcaaggcccaatgggtcaaagctgccacctgggtagattgggtcagtcacttcaccgagaggcccaccagcaatacggtagccctcaacagcacccatcangataacttgagtggcccagatggcaaggatgctttgtgcatggatcaggcttgggttgcccaagtagtcaagcccacccttactaaata

SEQ ID NO: 229926 - DNA, 578 bp, Glycine max
  unsure (1)..(578): unsure at all n locations
agtagataggcttgcagggagggtatcagcctttgagtcaattattagcaaaggtgggaaagttgtggaaacagatgtgcttaatctgattgagttattgatgaatcaattgcttaaattggatggtataatggctgatggggatgtgaaactacagaggaaaatgcaggtaagaagagttcaaaagtatgttgaaactcttgatgtgctgaaagttaagaattctatgcctagtagcaatggagaccaagccccagtgaagccccatcagaagcattcaaatggtcaaaggaagggaccaattcaagagcaacaacaaaagcattcaaatggacgtcatagattagccttagcaccaattcaggagcagcaacaagaacaaccaaggaactcaagtgagaattctctagcactatatcaagagcaacaagaacaaccctcaaggaattccacctcaggagttgtagttaccacaaattgcgagttgtttgattctgtcccaccattaaatcctgtgcaagccacatcaccacccncacccttctcagtgaccaataaatcaggtccctccaagttca

SEQ ID NO: 229927 - DNA, 519 bp, Glycine max
agtagataggcttgcagggagggtatcagcctttgagtcaattattagcaaaggtgggaaagttgtggaaacagatgtgcttaatctgattgagttattgatgaatcaattgcttaaattggatggtataatggctgatggggatgtgaaactacagaggaaaatgcaggtaagaagagttcaaaagtatgttgaaactcttgatgtgctgaaagttaagaattctatgcctagtagcaatggagaccaagccccagtgaagccccatcagaagcattcaaatggtcaaaggaagggaccaattcaagagcaacaacaaaagcattcaaatggacgtcatagattagccttagcaccaattcaggagcagcaacaagaacaaccaaggaactcaagtgagaattctctagcactatatcaagagcaacatgaacaaccctcaaggaattccacctcaggaagtgtagttaccacaaattgggaagttgtttgattctgtcccaccattaaatcctgtgc

SEQ ID NO: 229928 - DNA, 516 bp, Glycine max
ctgggcaacaatgatggcatgaatctctcagcccctcaaaccttccgctctaaggaaatctccaagagcaatgttgttgacgatatggtcaacagcaacgccatcctctatgagcccggtgaacatccagaccatgtggttgtcattaagtacgtgccttatgtaggggacagcaagagggccatggatgagtacacttctgagatattcatgggtggaaagaacacaattgtgttgcacaacacatgtgaggattcactgttagctgctcctattatcttggacttggtccttcttgctgagctcagcactcgaatcgagtttaaagctgaaaatgagggaaaattccactcattccacccagttgcgaccatccttagttacctgaccaaggcccctctggttccaccgggtacagccagtggtgaatgcgttgtcaaagcagcgagctatgctggaaaacatcctgaaggcttgtgttggattagctcctgagaacaacatgatcctagagta

SEQ ID NO: 229929 - DNA, 531 bp, Glycine max
  unsure (1)..(531): unsure at all n locations
ctgagttctcaaaattgggtctttttgacaccaaagggcatgtcacttcatgcacccttgcatctgttgctgttatgttcctcattgtactctatggtgttctgaggtgcactagtgtgtgggctcatttgggttcaggcatgctcttagggttgctttggatgcaaagtgcttatgtgggccatgattctggccactatgtggttatgacaaccaatggtttcaacaaggttgcacagatcctctctgggaactgcttgaccgggataagcattgcttggtggaagtggactcacaatgctcaccacattgcgtgcaacagccttgaccatgaccctgatctgcagcacatgccggtctttgcagtttcgtcgcggttcttcaattccataacctctcatttctatgggaggaagttggagtttgatttcattgctaggttcttgatctgctaccagcactttactttntacccggtaatgtgtgttgccagggtcaacttgtatctgcagacaattctgctattgtttt

SEQ ID NO: 229930 - DNA, 458 bp, Glycine max
acatgatatgaatttgtattgatgcaaagcacatgaactgcagtaacatctggatcaccatccatttgtacaccacacctaacaaaaagttaaattcaaagcccaatctggaaaagtgggggctagcaaaatcacaatgagaattttttttctttttaaagagaaaacaaaaaaaaaagaccttgacaaaatcctaaactctaaaaactccaaatgcctcagccatgggtattaacagcttcccacaacaaattcttaggggcagggtttgttaagtccctagcttgtagggcagcagtcctgagggtcctaattgtccactgattgggctcccaaaatgacaagctcctataaggcaaattatgcttcttgcaaaggtcactaaccaaaggcgaaatcttcctcaattggcaccgaggtagccttggaaacaaatgatgctcaagctgaaactggaa

SEQ ID NO: 229931 - DNA, 543 bp, Glycine max
ttggacccaagttcctcaacgccagtgttggttttggtggatcctgcttccagaaggatatcttgaaccttgtttacatctgcgagtgcaatggccttccagaggtggctgagtactggaaacaagttatcaagatcaatgattatcagaagagccgttttgtgaaccgtgtagttgcatcaatgttcaacacagtctcaaacaaaaagattgctattctgggatttgccttcaagaaagacactggtgacactagggagacccctgccattgatgtatgccaggggctacttggtgataaggccaacctgagcatatacgatccacaagtaactgaggaccaaattcagagggatctatcaatgaacaagtttgattgggatcatcctatccacttgcagcccacaagtcctactactgtgaagaaggtcagtgttgattgggatgcctatgaagcaacaaaggatgcacatggactttgcattctaaccgagtgggatgagttcaagactctcgactaccagaggatatttgacaacatgc

SEQ ID NO: 229932 - DNA, 511 bp, Glycine max
gttaaattgacctacttggcaccttcaccacccttttctctttctctttgcataccattaccaacactcaaagcagcaacaacacccttttttctttcctctctctctctctctctctccattctccattttcttcgagagtggtagggaaaacatggaaaccaccttggtttccaaaatgcaatttgcagcattcttttgtttggcgttgtggttgggttttcagcttgagcaggttcactgtagcgttacctacgacagaaaagccatcctcatcaatggccaaaggagaatccttttttctggctctatacattaccccagaagcaccccagatatgtgggaagatctcatttacaaggccaaagagggaagtctagacgtcattgaaacctacatcttttggaatgttcacgagccttctcgtggcaattataactttgaaggaaggtatgatctggtgaggttcgttaagacaatacagaaagcgggactatatgctcatcttcgc

SEQ ID NO: 229933 - DNA, 407 bp, Glycine max
aaaaaaaaaccgaacccactctattgagttgagtcttttgataatgtcgtcggcgtcgacgggaagcagcagcagcagcaaaatccggcgcattgtgcgcgtgcggcaaatgcttctccggtggcggaggaaggtggcggtggacgttccggcgggacacgtggcagtgtgcgtggggcccagcaggaggaggttcatcgtgcgcgcgacgcacctgaaccacccgattttcaagatgcttcttgtgaaggccgaagaggaatacggtttctgcaaccacggtcctctcgctattccctgcgacgagtctctcttcgaacaccttcttcgggtggtggcccgacccgtacccctacccggtttctcctcgctcgaggattttcagacacgctgccacgtggactttg

SEQ ID NO: 229934 - DNA, 498 bp, Glycine max
  unsure (1)..(498): unsure at all n locations
ctcaatcctctccaagcaaaatccttgtgttttcttctctcatcctggtttgctgctggctgctttctattcttacctcaagagaaataagagaatgggtgcaaagaaatggtttaagataatagtcaaattgaagaaatcgaagaaagataaatccaaagaagaaaagatcactgatgaaaattcaaacgaatactccaacgggaagcagagtactcgtgaagagtcaagtagcattcccaatgaaggtttaatgatggacaggacagttccttcaaagttgatggatgatattgcagctactcggattcaaaatgcatttcgttcatttatggcaagaagaacattacaccatctaaagggtgcagagaaattcgaagctttgattcaagaccacctggccagggagcaaacagcaactgcactaagctatatacattcatggagcagaatacangaacannatagagttcgaagaatctgtatgataacagaagc

SEQ ID NO: 229935 - DNA, 497 bp, Glycine max
gcggggaagcattatcaaagggatattgttcgaggtgtagaaggttatattgttaccgggtccaagcaagtggaaataggaacaaagttgtcagaagacagcaggaaatatggtgcagaaaatacatgtaccagtggtaatacactgtcgagagctgcactaagttttgcgcaagcccatgctcaaattgagaaggagcgtggaaacttactaaaagctcttgggacacaggttgcagagccattaagggcaatggtggtgggagctccattggaggatgctaggcatcttgctcaacgttatgacagaatgcgacaggaagcagaagcccaggctattgaagtttctaaacgccaggcaaaagtatgagaaatgccacccaatggagagaatgctatgaaattagaagcaggtgaagctaagctgcaggatctgaagacagacatgaccatactggagaaggaagcagctgcagctttggctgctgttgaagcaca

SEQ ID NO: 229936 - DNA, 534 bp, Glycine max
aacaaaaaattcatttataaattctacaagatgatcacaaaaggaaaagctggcctctatatctcaaatcaatttgttttacaaaatcaaaacatacatacaaaattcgcaggttaagaaaccaacccctcaggaaaatcttgaaagttaaaacacttcagccaccttgctcgcaagaacccgctccctccgttcaatgtaactaaacggaaaccaacctgccctgcctttgcattcaccctcggcccatccgctgtttgtcacctttcgaacaacaacgtaatcaccaactgatagatttagctccacttcagatacagcagaatatggaaataaaacctctcctaagaagtaacccatgctatctgttgatccattgtgtgcctgagaagcaaagacaccattcacttcttcatatgacggaggtggtggcatgctgttatccacactaagagttgtgggggtttcaattcggtgtcgctctgatgtcacctctccctcaagctgatcaagtttttgtagactatttgatga

SEQ ID NO: 229937 - DNA, 565 bp, Glycine max
  unsure (1)..(565): unsure at all n locations
cacaatgtggagggtgacaaaaactacaaagcctacatgaaccccgattacttcgatgctcatctcactcccttgggatggcaacaggttgacaatttgcgtaagcatgttcgcgactctggccttatcaacaccattgatctagtcattgcatctcctttgatgaggactctacaaacaactgttggggtatttggaggtgagggctacacagataaaacagacgtccttcctcttatggttgcaaatgcaggaaatagctaccgtgctgcaatttcaagtctaaattccccaccaattgttactgttgaactttgtcgtgaacatttgggagttcatccctgtgacagaagaagaagtgttagcgagtatcaatttctttttcccgctgttgatttttcactgttagatagtgatgaggatacctggtggaaggccaatgttagagagacaaaggaagaacttgcagctagggggatgaagttccttaactggttgtggacacgataagagaaggagatagcantngtgacacatagtggattctggtttcatactctgaatg

SEQ ID NO: 229938 - DNA, 434 bp, Glycine max
ccaacaaggttataattgttaacaaatattttctgcagacaataattgataaatttcaagacagaatcagcacagtttgtataatctgacataatcatgttagattttgtaatagtgaacttcaaatagaagaaccaatgcttgaatggtcctgaacacatacaaacaagtagaagaagccaaatccattatttctcagacttctcatgtgcaacatcactagggaggtccagccctgaaggtatcttgcctggatagttagtggttgattgttccaatcctatcatacctttatccacaatgaccatggagcgaagttcacaattagcaaagcgcttggatatttctttctttaccaaggggtggcaatcacttccaaaggcattcagagtatgaaacaagaatccactatgtgtcacaattgctatctcctt

SEQ ID NO: 229939 - DNA, 583 bp, Glycine max
  unsure (1)..(583): unsure at all n locations
tggtcgtcaacacagtctaattaatatctttttgctccttcgcttatgaatcttcttcttcttcttcttgttcctgcaacgcactgaattcgatcaatcaatccatcttcaattgctttgtttcgatcggaggaaaatggccgatcagttatcgaagggagaggaattcgagaaaaaggctgagaagaagctcagcggttggggcttgtttggctccaagtatgaagatgccgccgatctcttcgataaagccgccaattgcttcaagctcgccaaatcatgggacaaggctggagcgacatacctgaagttggcaagttgtcatttgaagttggaaagcaagcatgaagctgcacaggcccatgtcgatgctgcacattgctacaaaaagactaatataaacgagtctgtatcttgcttagaccgagctgtaaatcttttctgtgacattggaagactctctatggctgctagatatttaaaggaaattgctgaattgtacgaaggtgaacagaatattgagcaggctcttgtttactatgaaaaatcagctgattnttttcaaaatggagaagtgacaact

SEQ ID NO: 229940 - DNA, 427 bp, Glycine max
agactccagcaacctcattaaaaactcattttttgaattcagtcagaccaattcaattaaaaccaaagcaggtacactctgtaagtggatgtgtaagacgaacaactggacagacacacatagtagtacaatgtaaatcatcaaacaataggtccaaccaccaggaatattaaaggtacaattcaagtaagatcatcctcctcaagttctttggctttcagcttttccttcacccttaagagaagtgtggtcttccaagaatccagagggggcatactatcaaattccttgacaacattagtaaactttgcaacatcttcttcatcaattgcagcagcaatgtgcgccaacaatctatattcacgtggtcctgataatgttggatccagtttctgatatcgttctaatgcattggttattgcaacaa

SEQ ID NO: 229941 - DNA, 482 bp, Glycine max
accagacctgctgcatcttcttcttcttcttcttcgccggcaaagaagaaaaagcccgcagctgccaagtccaagcctaagcctaagcccaagcccgctgcgaaagccaaggatactaaggcaactaaatcgaaggcaccagctaagcccaagccagctgctaagcctaaagccaaagctccagccaaggccaaacccgctgctaaaccaaaggcttctgctgctgccaagcccaagcctgctgccgccaagcccaaagccgctaaaccagctgccaagtccaagcctgctgctaaaacaaaggctgttcctgccaagcccgcggcaaagcccaaagccaagcccgtcaaggcttcaaggacgtcgacgaggacttcaccagggaagaaagcagctcctgctgctaagcccgcggcgaagaaagttgcggtggcagcgaagaaaacgccagtgaagagtgtgaaaccgaagagtgtaaagtc

SEQ ID NO: 229942 - DNA, 534 bp, Glycine max
  unsure (1)..(534): unsure at all n locations
cttccttctcatcattctcatattattgtcgccacttcgacctcaatcaccctcgcgccctcgctcttcccttcctggtggcgacaatgtcgactcctgctaggaagaggctgatgagagacttcaagaggctgcaacaagacccgcctgcagggatcagcggtgccccccaggataacaacataatgctgtggaatgctgtcatatttggtcctgatgatactccatgggatggaggcacgttcaagttgactctccagtttactgaggattatccaaataaaccaccaactgtgcgatttgtgtctcgcatgtttcatccaaatatttatgctgatggaagtatttgtttggatatactacaaaatcagtggagtcctatatatgatgtggctgctatactcacatctatccagtcattgctttgtgatcccaacccaaattctcctgcaaactctgaagcagctcgaatgtttagcgagaacangcgtgaatacaatcgaagagtgaggggaatcgtggaagcagagtgga

SEQ ID NO: 229943 - DNA, 437 bp, Glycine max
  unsure (1)..(437): unsure at all n locations
atcccatccagtgccaatgttgaggacttagctggaatgtcagcagctggactttatgaatcaatacccaacgttagtccttccaatccaacagtttttggaaatgcagttagccaagtatgggcttcactgtacactcggagagcagttttgagccgccgtgctgctggtgttcctcagaaggaagcttcgatggcaatactgatccaagaaatgctttcaccggatttatcatttgtactacataccgtgagcccaacaaaccaggataataattgtgtggaggctgaaattgcttctggccttggtgaaactctagcttctggaacccggggtacaccatggcgtatatcatctgggaaatttgacgggcaagtgcaaacattggctnttgcaaacttcagtgaggaattgctggtacgaggtgcagggcctgc

SEQ ID NO: 229944 - DNA, 457 bp, Glycine max
  unsure (1)..(457): unsure at all n locations
ttttgacatatggaggactagacatttgtattaacagtgcggggattagtagttctgtaccattccgtgatgatcaaacggatggcacccgaacatggagatacactgttaatgtgaatttcactgctgttattgattccactcgccttgcgattaaaatcatggaagcttccaaaaggcctggtgtgattatcaacttgggttctgcttctggtctttatccaatggtggctgacccaatttacagtggctctaaaggtggtgttgttatgttttctagatcacttcgtctatacaaacgtcaaggaattcgagtcaatgtgctttgccctgangttgttgaaactgagatgggaaatagattgatcccanngatcatcaattgagtggnggctttgtacctatggaaatggtngtgaaagggtgctttgagctcattatggatgaaagtaaagct

SEQ ID NO: 229945 - DNA, 536 bp, Glycine max
agagaagtcactgtgatgaagaatcaactaagtttgatgctttagatggtaagaaggacatggaaagactggacaaggttaccccactattccaaagacttctttgtgctctaattgaagaagatgaaaatgaagaatcatatcaccaaagtgatgcaaagaatatatctcgacaatgtgctagtgatgattctcactgtggttcttgtaatcaaattgattttgaacccaaagatcgggatagaatggactctgaagttgagtcagaggtggatcttcaaattcagaagaactgcatgttggatagactatcttgtgataagagcaccacatccaacacatttagatacccaaacacatccagctctttacaaagcactggagtttggcagggagatgaagaattttctctttcagatatcacacataccggcgaaatatgttcaaatgatcttgatcaactgcagcctgctgaattaagtgttcctagctttccttctcctgatggccagtatcagcagatgtcactggatgat

SEQ ID NO: 229946 - DNA, 590 bp, Glycine max
taactttggacagtatccatatggaggtttaatcctaaacaggccaaccattagcaggagattcatgcctgagaaagggtctgatgagttctaccctgagaaggagtttttgaagactattactggcaagaaggagaccctcattgaccttacaattatagaaatcttgtcaaggcacacatctgatgagttctaccttggggagagagatggtggtgactattggacttctgatgctggtccactagaggccttcaagaggtttggaaagaagcttcaagagattgaacaaaagcttatacagaagaacaaggacgagacgttgagaaaccgcagtgggccggctaaaatgccttacactttgctctatccttctagtgaggagggattgactttcagaggaattcccaacagtatctccatctaggggctctatggttgttgcagtactttccctggttttcaataaaagtgaatagaaggaatatgattccttcatctacctatgtatggttaagttatgtatttggggtgattgaatgttctcgtgtttgcttgtaagtgttaatgaagaaattctgtttgataac

SEQ ID NO: 229947 - DNA, 404 bp, Glycine max
atacaaacagaatttcttcattaacacttaacagcaaacacgagaacattcaatcaccccaaatacataacttaaccatacataggtagatgaaggaatcatattccttctattcacttttattgaaaaccagggaaagtactgcaacaaccatagagcccctagatggagatactgttgggaattcctctgaaagtcaatccctcctcactagaaggatagagcaaagtgtaaggcattttagccggcccactgcggtttctcaacgtctcgtccttgttcttctgtataagcttttgttcaatctcttgaagcttctttccaaacctcttgaaggcctctagtggaccagcatcagaagtccaatagtcaccaccatctctctccccaaggtagaactcatc

SEQ ID NO: 229948 - DNA, 525 bp, Glycine max
ctcgagccgaatcggttcgagagactttacaacctactaaaccaggctcagactcggataatgcagcagcagcagcagcggtgtctattttcagactcacacgtgagcagctcaacacactgaaagccaagtctaaagaagatggcaacacaatcagctacagttcttatgagatgttggcgggtcacgtgtggagaagtgtatgcaaagcaagagcacttcctgatgatcaagaaaccaaattgtacattgcaactgatggaaggtcaaggttgcaacctcctcccccaccgggttactttggcaatgtgatattcacaaccacacctatagctgtggcaggtgatctcatgtcaaaaccaacatggtatgctgcaagcagaatccacaatgcattgttacgaatggacaacgattatttaaggtcagctcttgactatctagagctgcaacctgatctaaaagctctcgttcgcggggctcatactttcaagtgtccaaatcttggtatcactagctggacta

SEQ ID NO: 229949 - DNA, 464 bp, Glycine max
gcacaaactgtaataccaaattaactgttgttaaagttcgtttatgttttacagattataaaaatgtataacacttaatgtagtccatataaaactgaaatgagtcccattaacagttgcataccgttggtcaaaagcatctaaagataacataaggtaccgggggggataaaaacaccacctagaaacattgtggcgttccatatggctgacagccaatgattcctcaaatgtcatacaagaaatccttaaacaccttcatatggtcgggctgaagagctatggccacagataagctcccatcattggttgagcttggaattatgaaagacaggccctcgtatgcaattccaccaggtcccatgaatataggcctttcccaaccaaagtcagcatcatggattggaagcctagtccagctagtgataccaagatttggacacttgaaagtatgagccccgcga

SEQ ID NO: 229950 - DNA, 559 bp, Glycine max
gctcggagcttgaaagtgtaaaccgctttatcctccagtgtgtgtgtctgcatttgagctactttttttggcagaaaatcatgttaagaatgggtttgaggaagctacaagacaaggttgcgctgatcacaggcgcagctagtggaataggaaaagccacagctacaaaattcatcaataatggagccaaggttattattgctgatattgatcaagagcttggccaagagactgcaaaagaactaggacctaatgctactttcatagcatgtgatgttactcaagagtcagacatttccaatgctgttgatttggccgtttctaaacacaaacaacttgatatcatgtacaacaatgcaggaatagcctgcagaagtcctctaagcattgttgacttggacctggaactgtttgacaaagtcatggacataaatgttcgtggcgttgtggcaggcatcaagcatgcagcacgtgtaatgatcccacgtggaagtgggtccattctctgcacagcacgtgtcacaagtgtgataggaggggtgtcacaacacacttactc

SEQ ID NO: 229951 - DNA, 422 bp, Glycine max
atatgaactcctccatgtttatatatacttctttgtttgcctttatttgccccatgtaggactttattgttctctaacaagaagagtaaattaattcaattgactcactcttattgaattacttaattttaacattgttacctttatctaaaatataatttgtacaaactcctactgcacttgatttggtgcaggcaagtccaaattcttaaaagatgtgaaacctccatccacaaccaagttgtgtccactaacatatttggcatcatcagacacacggaaaagtgcagcattagcaatatcattgggttcacaatttgctccctttaagacaccaacattgcgaacaatgtgctcatgtgtttgagcatcaacatgaggatatatctgactcatttcctccatgacaagaagagggggga

SEQ ID NO: 229952 - DNA, 589 bp, Glycine max
  unsure (1)..(589): unsure at all n locations
cctttgttcactcttcttctcttgcggtttgggttttagcgcagcttcttctagatttaaggaagatgggtaaggaaaaggttcacatcagtattgtggtcattggccatgtcgactctgggaaatccactaccactggtcacctgatttacaagcttggaggcattgacaagcgtgttattgagaggtttgagaaggaagctgctgagatgaacaagaggtctttcaagtatgcctgggtgctggacaaacttaaggctgagcgtgaaagaggaatcaccattgatattgctttgtggaagtttgaaacaacaaagtattattgcacagttattgatgcgcctggacatagggatttcattaagaatatgattactgggacatcccaagctgactgtgctgttcttatcattgattcgaccactggtggttctgaagctggtatttccaaggatggacagactcgtgaacatgctctgctttcattcacccttggtgtgaaacagatgatttgctgctgtaacanaatggatgctactacacccaagtattnccaggccaggtatgatgaaaatgtgaggaagtctct

SEQ ID NO: 229953 - DNA, 591 bp, Glycine max
  unsure (1)..(591): unsure at all n locations
tggggttttaaataataataatggcttttgggctttccaaactccacgaatgcgaacatatactaaggttcaaaagcgtggctctgttggaagatgtattgatgttacccgttacaagggatatgatgaactccggcatgatttggctagaatgtttgggattgaagggcagctagaagatcctctaaggactgattggaaattagtatatgtggatcatgaaaatgacattcttcttgttggtgatgacccttgggatgaatttgtaagctgtgtccagagcataaagatattgtcatctgcagaagtgcagcaaatgagcttggatggggatttaggtggtaatgttccaatccccaatcaagcttacagtgggacagacagtggcaatgcatggaggggacagtatgaagataactcagctgcctcctttaataggtaatgatgtcaaatgctgacgcttaagagagatcaacttgtgcatttcaagtggtggtggagaaccaacttcttaacctaacanaacttctggttggtgcttctcaaatggaaagtacacattcattacanatgatgcagtttattggggat

SEQ ID NO: 229954 - DNA, 608 bp, Glycine max
ggctgaggataaggagatgtctacctctgtcatcaatgggaatgattccctaactggtcacatcatatctacaactattggaggcaaaaatggggaacccaaacagactattagctacatggcagaacgggttgtaggaactggatcatttggaatcgttttccaggcaaaatgcttggaaactggggaggcagtggcaattaaaaaggttttacaagacagaagatacaagaatcgtgaactgcagttaatgcgtgtgatggatcatccaaatgtgatctctttgaagcattgtttcttttcaactacaagtacagatgaactttttctcaatttggtgatggagtatgttccagagtccatgtatagagtcttaaagcactatagcaatgctaatcaaagaatgccaatcatctacgtaaaactttatatgtaccagattttcagggggttggcttacatccacactggtcccaaagtttgccacagagatttgaagcctcaaaatatactggtggatcctcttacacaccaagtgaagctatgtgattttggaagtgcaaaagtctagtcgaggtgaaagctatatatcatactatgttcacgat

SEQ ID NO: 229955 - DNA, 617 bp, Glycine max
gtgatgctcgcattttttgtttaggggttcgtattgttaaaaggcgcagtatgcagcagatcctaaactcaatcccaaaggagtctgatggtgagaaatttgaagacgcccttgcacgtgtctgccgttgtgttgggggtggaaatgcagttgatgatgctgatagtgacagtgatttggaagtggtttcagatactttcactgtcaaccttcgttgtcctgtatggctttcatcaatagatgaattattttagcaattcatgaagtcctactaatcagttttttatttttggtgaaaattttagatgagtggttcaagaatgaagattgctggaagatttaaaccctgtattcacatgggttgctttgatcttgaagtgtttgtggaaatgaaccaacgatcaaggaagtggcaatgtcctatatgtctcaaaaactatgcgttggagaatatcatcattgacccttatttcaatcgcatcacttctatgatgatgaattgtggcgaagaaattgcagagattgaggtgaagcctgatggttcttgccgtgtaagggtaagagtgaaagtgaacgcctggaatagggaatctacacagtggcgccttctgatggac

SEQ ID NO: 229956 - DNA, 589 bp, Glycine max
  unsure (1)..(589): unsure at all n locations
caaaaatgtctcacttcggactttcgggtcccccagacatttccgacacttactctcttctcgttctgaacatcaccttccgtaccaccgccgacgacctattccctctcttcgacaagtatgggaaggtcgtcgacatcttcatccccaaggatcgaaggactggtgaatcgaggggttttgcgttcgtgcgttacaagtatgctgatgaggctcagaaggccgttgagaggctcgacgggagaatggttgatggtcgcgaaataacggtccagtttgcgaaatatgggcctaatgctgaaaggattttttcaaattgcagtcacaaaggaaggattattgaaacatccccaagatcaaggcgatcaaggagccgtagcccaaggaaaaggcatcgtgatgattacagagacagagattataggagaagaagtcgcagcagaagttatgataggtatgaacgcgacaggcatcgtgggagagacaaagattatcgtcgcagaagtaggagccgtagtgccagtcttgattacaagggtcgtggtagaggacgctatgatgatgagncgtatagtagaagcccgagcag

SEQ ID NO: 229957 - DNA, 565 bp, Glycine max
ttgtgctgagagagataatttcacattcttttgggaattcctgtcaagctagtccccttaaaaggttggtcgagtcaaatgccgctggcaagagaaatgatgggaagtctatggcactgaaatggaaaggtagctccaatggtaaaccaggaaatggttttatgcctctggttgaagattggcaagagacaggaacctttacatttgctttggaaagagtagaatcgtggatcttttctcggatagtggagtcagtgtggtggcaggctttgacaccctacatgcattctccagttggggactcttcaaataaacccattgggaagctgatgggacctgctcttggtgatcacaatcaagggaacttttccatcaatctgtggagaaatgctttccaagatgcttttcaacgactctgtcctgttcgagcaggagggcacgaatgtggttgtttgcctgtattggccagaatggtcatggaacaatgcatagctagactagatgttgccatgttcaatgctcttcttcgggagtcggcccttgagatcccgactgatcctatatc

SEQ ID NO: 229958 - DNA, 494 bp, Glycine max
aaatttgccaattgccatttcaatccttagtttcttcttcaacgtcctcttacgagcagatcccaattctccttcccagtttcaaaccctaattccctcattcccatggcctcagaagagcccactgtcgcggtggaacccgctcccgaacctgccaccgccgagcctcccccggaggagaaggaggagcccaaacctgaagccaaggctaagaaaaccaaggaacccaaacctaaaaaggtttccagaccacgcaaccctcccactcatccttcctacgaggagatgattaaagacgcaattacctcgctgaaggagaaaaccggttcgagccaacacgcgattgcgaagttcatcgaggagaagcacaagcagcttccaccgaacttcaggaagcttcttctctaccatttgaagaaacttgtagccgctggaaaactcgtcaaagtcaaaggctccttcaagctcccacctacccgaccttctgcatcttc

SEQ ID NO: 229959 - DNA, 568 bp, Glycine max
ggatatgattcatggggtcctttgtttgggaggctattttttgccctttgggtcattgtacacctttaccctttcctcaagggtgtcatgggaaaacaagaaggtgttcctaccatcattttggtctgggctattctcctgtcttcaatcttaaccctactttgggtgagaatcaacccattcttggccaaaagtgatgtggtgttggaaatttgtggattgaattgtgactaaaggtaacaaaaaatggaagggcatgccatggtttgacgttttacactgataagatctgcaacatgcataagtttttggtcaaagacacatgacacatccctggatctgttggtgagaactgccactgcaaaaaaaaatgttatttgtgggtggtgtttgtagatacaacatatgttttgagaggtttcattatttttttttatacatgtgcattatctaaattagtctgaaatcacaggtgagatgttatttataacttcttcggaataaggcatctctcatttgtaatcataaagtgtgcccatgtgttttttagaaattccctataagttgg

SEQ ID NO: 229960 - DNA, 518 bp, Glycine max
aaacagggggcaatgttaagacctatttttagcgaacacttgagccttgtcgattgttagtttggatttggaactaccaaaagccgaacgtcgcacaaaaaccccaaacctagcaaccattgagttttgtttgctttgaaacatcgtgtgcacagtaccccagaagatcgaacaaggatctccacaaagacaaaccccagttctcaactgtgttttacctctctctcacctactttcagaccatacccagggtttttgctttttctttttaaattagtttcagtgacattaacgaggctgagaagatgcagcagacaccgccaatgattcctatgatgccttctttcccacctacgaacataaccaccgagcagattcaaaaataccttgatgagaacaagaagctgattctggcaatattggacaatcaaaatcttggaaaacttgcagaatgtgcccagtaccaagctcagcttcaaaagaatttgatgtatttagctgcaattgctgatgcccag

SEQ ID NO: 229961 - DNA, 544 bp, Glycine max
tctaatggcagttccagtgattgatttttcaaagctcaatggtgaagaaagagccaaaactatggcacagattgctaatggatgtgaagagtggggattttttcagttgatcaaccatggcattcctgaggaactccttgagagggtgaagaaggttgctgctgagttctataagctggaaagagaggagaatttcaagaactccaaatcagtgaagctactaagcgatttagtcgaaaagaagagcagcgaaaagctggagcatgcggattgggaggatgttatcactctccttgatgataacgaatggccagaaaaaacaccaggcttcagggaaaccatggcgaaatatcgggccgagctaaagaaattggcagagaaagtgatggaggtgatggatgagaatcttggcttaaccaaagggtacatcaagaaggcactgaatggtggagatggagacaatgccttctttggcaccaaggtgagccactaccctccatgtccccatccagggcttgtgaagggtctgcgagctcacaccgac

SEQ ID NO: 229962 - DNA, 644 bp, Glycine max
  unsure (1)..(644): unsure at all n locations
gagcttcccagaggagaccaaataacatttgcactttccaaggcaattcaagagtccaggattgctattactgtgctttctcaaaactatgcttcttcctcgttttgtttagatgaacttgtaaccatccttcactgcaagaggaaagggttgttggttataccggtcttttacaaaatagatccttctgatgtcagacaccagaaaggtagttatggagaagcaatggctaagcatcagaagagcttcaaagctaagaagcttcagaaatggaggatggctttgcaacaagtagctgacttgtctggctatcatttcaaagatggagattcatatgaatacaagtttattgggagtattgttgaggaggtctctaggaagattaatcgtgcttatttacatgctgtggattatccatttggtcaatggtcacaagtgatggaggtaaggaagcttttggatgttggatcccatgatgttgtccacatcatagggatccatggaatgggcgggttaggaaaaacaacacttgctctggcaagttataatttgattgctcatcattctgataaatcttggtttctttgaaacgtgcgagaagaatcaaataaacatgggttaaagcaccttcaaagcatnctact

SEQ ID NO: 229963 - DNA, 481 bp, Glycine max
cggctcgagcggctcgagggatggtatttctaagataagaacccataatattggggtgtgtacagaaaaaaaaaaaaaaaaaaaaaaaaaaaaaaaaaaaaaaaaaaaaaaaaaaaaaaaaaaaaaaaaaaaaaaaacaaacctaaaaaaaaaaagatacacaaacggggcggcccccaaaaaccgaccatttaacccggaaaataaacccctaaccgaacccggaaggcacaccaccttccccaaaaaggagcctaataaaaactggaacaaacaatgccaaaacgaatccccagtgcaaaaaggttatccgccaaaaattccacccaaaatccgacccggaagcaaaagtggcaaccccaggggcccctaataaaggacccaacccccattaattaagcagggctcccggccccatttaaagacagaaaacctgccctgccaccaggtttaataaattgaccaccccccgagaaaaggc

SEQ ID NO: 229964 - DNA, 601 bp, Glycine max
ttacactaaccttaaccgcttagtttcttaggtgatatcatcactgactgcatctctgagatttgatggtgccctgaatgtggatgttactgagttccagactaacctggtaccatatccgaggattcacttcatgctttcatcctatgctcccgtgatttcagcagagaaggcataccatgaacagctttcagttgcagagatcacaaacagcgcgtttgagccatcctctatgatggccaagtgcgaccctcgccacggcaagtacatggcttgttgtctgatgtacagaggcgatgtggttcctaaagatgttaatgcagccgtagccattatcaagacaaaacgcaccatccaatttgttgattggtgtcccactgggttcaagtgtggcataaattatcagcctccaacagttgttccagggggagatcttgccaaggtgcaaagagcagtgtgcatgatctccaactccactagtgttgctgaggttttctcacgcattgaccacaaatttgaccttatgtatgccaagagagcgtttgtgcactggtatgttggtgagggcatggaagaggtgagttctctgaggctcgtgaag

SEQ ID NO: 229965 - DNA, 600 bp, Glycine max
  unsure (1)..(600): unsure at all n locations
aaagttgaatttgaagacaatcaagattgccttaatctttttgaaaagaaaccactggggctactatccctgttagatgaagagtcaactttccctaatggcacagatttaacctttgctaacaagcttaagcagcatttgaattccaactcatgcttcaaaggagaacgagaaaaagcctttactgtgcgtcattatgcaggggaggtcacttacgatacatctggattcctggaaaagaacagggacctattgcacttggattccatccaacttctatcctcaagcaaatgtcatcttcctaagttatttgcatcccatatgcttactcaatctgagaagcctgtagtaggtcccttacacaagtcaggtggggcagattcccaaaagctaagcgttgccacaaaattcaagggacaattgttccaattgatgcaacgtttagagagtactacaccacattttatccgatgcatcaagcccaataatctccaatcacctggatcatatgagcaaagccttgtactgcagcagttgagatgttgtggngtcctggaagtggttcggatatcaagatcgggctttcctactagagtatct

SEQ ID NO: 229966 - DNA, 520 bp, Glycine max
  unsure (1)..(520): unsure at all n locations
ctcagaaccttctgaggttaatgcaaaatacaaagagagagagagagagaaaatgatgaagccatcgatgctcagatctctccactccgccgccacccgcggcgcctctcatctcttccgccgtgggtacgcctccgagccggtgccggagcgcaaggtagccgttctcggcgccgccggcgggatcgggcagcctctctcccttctcatgaagctcaatcccctcgtttcgagcctctccctttacgatatcgccggaactcccggcgtcgccgccgatatcagccacataaacaccagatctgaggtagtggggtaccaaggtgatgaagagcttggaaaagctttggagggtgccgatgttgttataattcctgctggtgtgcccagaaagcctggaatgactcgtgatgatctttttaacatcaatgctggcattgttaagacgctgtgtactgctattgctaagtattgcccccatgcccttgttaacatgantaagcatcctgtgaactccact

SEQ ID NO: 229967 - DNA, 267 bp, Glycine max
ataatgtccgtgattttagttttgtgattaagctttcgataagaggagagaaagagaaggaaaaaaaaagttgcttttttttttgttgttgcatgatttggatcttgattggaaaagcttcgaattggggtagttttacccatcaattcataaaaaaaaaaagagaataaaactaatcaaaaaaacaaaaactaaaacatacaaaaacaaataatataaaaaaaaaaaatactaaaacccgaaaaaaaaaactgggggggccccccc

SEQ ID NO: 229968 - DNA, 380 bp, Glycine max
gtaccgtgagggaagggatattttgatgtcagaaggccagcttccaacatggacccatacgtggttacttccatgattgcagacacaaccattctgtggaagccatgagcaaaacctgcatgttttctccctttggatggaaaggaacagttatgcttttcttagtaggatttggtctctctctctttttaccttttgattggtactatggttggtgccttgttggttggtgcaactaactggcaagggttgatcattgttttcttctattcctttccctcgttttccgattgttacaatgacaataatttaatggttattatcagtcttgaacaaagaaatgctgattgtgaagtataataataatatatgaaactgtc

SEQ ID NO: 229969 - DNA, 442 bp, Glycine max
catgaaagcccccaatatagtaattgatgttaaggaaagttctggttcagatgatgaggatgagaactatctagatgctcttgatacactttctagaactgaatcattcttcatgagctgtagtgtgagtggtttgagtgaatgggatgatcaagaggtccaactatcaggaaatttttcaacagatcaacaggcacgtgatttcatgattggcaggttcttgcctgcagcaaaggcaatggcttctgaaacacctcaaattcagcacaactctaggaagccacttgttacacaagaacaaccaaaacaggcatggaaggtagttagtggagcgaattcccgtcctcttaatccaaaatggcaaaaggtttctgccgcattatgctcaagatattggtagggaagagagcgaagatgaaagtgatgattatgatggatatga

SEQ ID NO: 229970 - DNA, 564 bp, Glycine max
attcaacaagccaatttctttgggtcgctgacccaggcatcagctatcagagtggggtctttccaaggggaagaaatatatgctccattcaagagcctgcttccaatggtgaaccctgatgatgttgtgtttgggggatgggatatcagtaacttgaacctggctgatgccatggccagggccaaggtgtttgatatcgacctgcagaaacagttgaggccgtacatggaatccatggttccactccccggaatctatgacccggatttcattgctgccaaccaaggagaccgtgccactaacgtaatcaggggcacaaagaaagaacaagttcaacaaatcatcaaagacattaaggagttcaaagaaagcactaaggttgacaaggtggttgtcctgtggacagccaacacagagaggtacagcaacgtagttgtgggactaaacgacaccatggaaaacctctttgcttccttggacaggaatgaggctgagatttccccttccaccttgtatgccattgcttgtgttatggaaaatgttcctttcatcaatgggagcctc

SEQ ID NO: 229971 - DNA, 400 bp, Glycine max
aagcacaaaatactttgataactttatattatgttacatgcatgcatagcatatatcgcctgctctcatattagtcagcaggaacaaatattgtgagatccaaccaccctttaattgcacatttgccactcaaatatatacttaaaagaggggctgggagatgaaataagttctgagctcattcaactacacgtggccaaaccatttctattaatacttggaacttgagctggctccaggatcatgttgctctgaggagctaatgcaacacagggcctcatgatgacttgcaggatacctcggtgctttgacagggcattatcgaccggcgtactcggtggaaccagaggggacttggctctggctagtgatgatggtcgctactgagaggaatgagtgg

SEQ ID NO: 229972 - DNA, 575 bp, Glycine max
  unsure (1)..(575): unsure at all n locations
cgagcaactaccatggctaccgctcctttgcttctacactcatctgggtcctcttttttctctcaatttcgtgcctttcaattctcttcttcttcgctgtttcctcatggaaacaggcatgggaatgccgtggtctctgtgaaggcctctgcttctggggttgtgttggtggagaagtctgaggcagagaaggccaataggctcaaaacagcttacactgagaaaattattcccttgctcatggaagagttctcttacaccaacaaacaccaggtgcctaaaattgagaagattgtggtgaactgtggtattggagatgctgcgcaaaatgcaaagggtttggacgcggcaataagtgatctagcactgatcacagggcagagacctattaagactcgggccagggcttctcttgccacttttaagatcagggaaggtcaaccgcttgggattgctgtgacactaagaggaaatatgatgtattcattcctagaccgagttatcaacctgggacttcctaggacangagatttccaaggtgtgaaccccaacagctttgatgggcatgggaacta

SEQ ID NO: 229973 - DNA, 602 bp, Glycine max
gcggaggacttgatcgtgaaggaagggttggttgctggggttgtgaccaactgggctctggtttcgatgaaccatgacacgcagtcttgcatggaccccaacgtgatggaggctaaggttgttgtgagctcttgtgggcacgatggaccttttggcgccaccggggttaagaggttgaagagtattggcatgattgatagcgttcctggaatgaaggctttggatatgaatgctgcagaggatgctattgtgaggctcacgagggagattgtgcccggcatgattgtcaccggcatggaggtggcagaaattgatggctccccaaggatgggtccgacgtttggggcgatgatgatatcagggcagaaggcggctcatttggcgttgaaggcgttggggaggaacaatgcaattgatggaacgtgtggagttggaagggaagaaccccagcttattttcgcttctgcagacactgaggaaattgttgatgcttaaacttactttcaaattagctagatatatagcttttcttttcttttctttctgtttggtccctactttaatatgattctaaatttggataaatgaacacatgtgaatat

SEQ ID NO: 229974 - DNA, 581 bp, Glycine max
gaataatggtggttgttggcaggataatttagcttacatcaccgcatgcaaggatacgttccgtgggagagtatgtgaatgccccctggtggatggtgtgcaatttaaaggagatggttatacaatctgtgcagctagtggacctgggcgttgcaagataaacaatggaggttgttggcatgaagctaggaatggacatgcatattctgcttgttcggatgatggaggggttaaatgccagtgtcctgcaggctttaaaggtgatggtgtcaaaaactgtgaagacattgatgaatgcaaagagaagaaagcttgtcagtgccctgaatgtagctgcaagaatacttggggaagctatgactgcacttgcagtggggatcttttgtatataagggaccacgatacttgcataagtaaaactgccagtcaggagggaagatcagcctgggctgctctttgggttattttagttggcttagttgtggctgctgcaggggcataccttgtgtacaaatacagaataaggtcatatatggattctgaaatcagagccatcatggcacagtatatgcccttggaca

SEQ ID NO: 229975 - DNA, 581 bp, Glycine max
gtgaaaagcgacacgacacaacacaacttatagctttattctttttcttcgcttcttctgtacagcacccaagattgaagatgatagaccttgcgcgcgtgcagaaggagcttgtggaatgcagcaaggacgcggagggatcgggcatcaaagtcagccccaaaaacgacaaccttgttctcttgatcggcaccattcctggccccgtcggaactccatatgaagggggcattttccagattgatatcacattgcctgatgggtacccgtttgaaccccccaagatgcagtttaaaaccaaagtttggcatcctaatatcagcagccaaagtggagctatttgcctggatatcttgaaggaccagtggagcccagcactcactctgaagactgcacttctttctgtgcaagcacttctctctgctcctcagcctgatgatcctcaagatgccgtggtggcacagcagtatctgaaagactatcagacatttgttaacactgctcgctactggacagaaagttttgccaaggcttcgtctcgtgggattgaagataaggtacagaaactcgttgagatggga

SEQ ID NO: 229976 - DNA, 461 bp, Glycine max
cttttcctacggactacgtgccaactgtttttgactatttcagtgcaaatgtagctgtggatggaagcactgcgaatcttgggttgtgggatactgctggccaagaagattacaatagattaagacccttaagctatcgtggagcagatgtattcctgcttgctttctctctcataagcagggctagctatgaaaatgttgccaagagatggattcctgagttgaggcattatgctcctggtgttccaattattcttgttggaacaaaacttgatcttcgggatgataagcagttctttcaagaccatcctggtgcagtgcctatcaccacagcacagggtgaggagctgagaaagcttatcggtgctccagtttacattgaatgtagttcaaaaacgcaacagaatgtgaaggctgcttttgatgcggacagtcaggtagttctgcagcccccaatacag

SEQ ID NO: 229977 - DNA, 614 bp, Glycine max
gacagatctgagcactttgctatcgtgtattaattttccttgggggcagtccatggaatatgaaatttacaaggcaactaacactatcaaggcttataatcagataggttttctaaagctcgagaagtcaattccagatgccattctaagacaagcaaaaggccttgcaattatcactgtggtcaaagtaggagtgggggttacttacaatattggaacaggacttgtggttgcccgtagggaagacggttcatggtctcctccatctgctgtttccacctttggtgtagggtggggggctcaggctggaggcgagttgacagacttcatcattgttttgagaacaaatgatgctgtcaagacatttggtggcaatatgcatctttcacttggagcaggtttgagtgctgcagtaggctttgttggtaggtcagttaaagctgatgttcgagctggtgatggtggctatgctgcttgttatacctacaactgcagtaaaggtgcatttgttggatgttcacttgaaggagtatggtgactactcgcacgcaagaaaattcccgtatctatggcagccagtctataactgcaacagatatacttttttggctcgt

SEQ ID NO: 229978 - DNA, 575 bp, Glycine max
  unsure (1)..(575): unsure at all n locations
tcttggttttcttctctggaccccaatgtgctgaccaagaagccctcttggagccaccaatgctagaagcaactaagcctaagcactttgttggggagagtagtactagcactacgaaagtaaccaagcacttcgaaaacgagaagaatccttcgaagctagaggtgctgcctctgtcagaagggcctagggatgtttttcagtttcaagctagactttggcaagctgttaccaaagctgtgaagaagatcaagcgaaaaaatgggccccatagaggagaggatttcaccttgtcacaggcaatggccaaggctgatttttgggtcatgttcttctctcttgtcatgggctgtggatcgggcttgacaatcataaataacatgggtcagatttgccaatcattgggagacaacaatgtcaatgtttatgtctcagttatcagcatatccaacttccttggtcgtgttggtggtggctacttctcggaggtcatagtaaggaattctgggtacccaagactngctgcattggcagtgattcaagcagggatgtctctgggactttgctactatgtc

SEQ ID NO: 229979 - DNA, 581 bp, Glycine max
gtctgtggtttcgttggtttgtaaccttatacacgcactatttctctcgctcataaatataaatgaaagagagaagaaaagtcaaagacaatgtcagggatcattcacaagattgaggagacccttcatgtgggaggccacaagaaggaggaggagcacaagggtgagcagcaccatggtggagaatacaaaggggagcatcatggtgaacacagtactgaatacaaaggagagcatcatgttggtgagcacaagccggagcaccatggaggagaagagcacaaagaggggttcctagacaagatcaaggacaagatccacggcgaggagggtggcgccaccgccgagggcgagaagaagaagaagaagaaggagaagaagaagcatgaacatggccatgacagcagcagcagcagtgacagtgattagattatctcccactgctgcatcacctatatatcttataaggtgtatgggaccatagtagtgagggctgtgtctttctctgttttttcctacttggtcattatatttatgagcgagagaaatagtgcgtgtatctggttgctaattcgagtgct

SEQ ID NO: 229980 - DNA, 452 bp, Glycine max
aaggataatatacaatccagcataaccaaagcagaggggttacaaaccaacgaaaccacagactaatagcactcgaattagcaaccagatacacgcactatttctctcgctcataaatataaatgacaagtaggaaaaaaaagagaaagacacagccctcactactatggtcccatacaccttataagatatataggtgatgcagcagtgggagataatctaatcactgtcactgctgctgctgctgtcatggccatgttcatgcttcttattctccttcttcttcttcttcttctcgccctcggcggtggcgccaccctcctcgccgaggatcttgtccttgatcttgtctaggaacccctctttgtgctcttcttctccatggtgctccggctggtgctcaccaacatgatgctctcctttgtattcagtactgtggtcaccatgatgct

SEQ ID NO: 229981 - DNA, 416 bp, Glycine max
ggctctttgaggacactaacttgtgtgctattcactccaagcgtgtgactattatgcccaaggatattcagctggcaagaaggattcgtggtgagcgtgcttgagttggtgcgttctgtgtttgtgaagatggattgttggtggctgcggatggtgttttgttactaagttttctttttgttgaagcctataggttattagggaaaaataggtgtttacttggtagtcatattaattgtcattggcaaatactgcctaagacactgtgaaggtctggttgttagaaatttggcatgtatttgatttttttggatcctttatttctcgttttatttctggttgtgcagccactttgggaattgtattggacaactttctgttgccatctaatctagttgaagctagcttatcgtgtc

SEQ ID NO: 229982 - DNA, 561 bp, Glycine max
tgactgccgtgcacaaagcaaatattattaagctttcagatggtttattcttggaatcttgtcgagaggttgctacaaagtaccctggaataaagtataacgaaattattgtggataactgctgtatgcagcttgtttcaaagcctgaacagtttgatgtcatggttaccccaaatctttatggaaatctagttgcaaatactgcagcaggcattgctggaggcactggagtcatgccaggaggtaacgttggggctgagcacgctgtgtttgagcaaggtgcgtcagcaggaaatgttggtagtgataaaataagggaacaaaagaaagccaatccagtggcccttcttctctcgtcagctatgatgcttaggcatctccagtttcctgcatttgctgaccgtttggaaactgctgtggaaaaagtcattttggagggcaaatgccgaacaaaggatcttggagggacaagcaccacccaagaggttgtggatgcagtgatagatgctttagattgagtcattttattagttgctgatttccaaatgaagtcagtctcgt

SEQ ID NO: 229983 - DNA, 590 bp, Glycine max
ggaatgcaaagactgattggaacaagcttgcaagcattgaacttgtttcttctccctttgtcttaccagaagctcctttcctgttcctaagcggagttagggggtcaaattgaattcatttgcaacaaacacctttttgttaatgttgttgcattctcttttcctattgccgtaaacgggtcctgtcctcgcttttctcacaagccactgaaaaattttgcacctttcgccccaaaactttaacagaggggtgttgttcaccgcaattcctcaccccgatggaagaatcaagtgaattgcaatcagaagaaaataaagtctccaatgagaaaaataagaaaagaaagctgaaaacaccggcccagcttaaggccttggagaatttttataatgagcacaaataccccacagaggaaatgaaattagtacttgctgaggagttaggattgacagaaaagcaaatatctggatggttttgccacagaaggttaaaagataaaagattgatgaaagatgaagcttgtgctaatgggcgacagatcgttcaagggtgtcatccagatcgtgcagtggacttgggcagattcatg

SEQ ID NO: 229984 - DNA, 599 bp, Glycine max
  unsure (1)..(599): unsure at all n locations
cattaccaaacttctctacaaaacaaatttcaacccccccctccttaaggccttaacttttgagtcaaaatttatcatttcaaagcactctccaatagagataagtttgattcatccatcccagttggttggttgtaacccggctctggcactgttaaaggtttcaatctctcattgttgccagcttttgtgtacatgccagtttatagcaacctttaccacttcttttaaaccaaaacaataagcttttttcccttcattgttgtctcagaaaaaaaatggccccttctggaaggacaacaacagcatcaacaaggacaacctcaaagacgacaacaacaacaagaagaacaagacagcagagaagaacaacagcaacaacaacaaacttcaagaagaagcagcacaacacaaagagcaacaacaaaaaacaacaagaacaggttcttgttccaactgttttgccctctagctgcagctcctcctccataagctcacaagactcttctaattcanaggaagtgaancacaacatgcatggttctgccgagggtgatgatgttgtttgcaacagcaacaccaacaagtcatgttccaca

SEQ ID NO: 229985 - DNA, 574 bp, Glycine max
  unsure (1)..(574): unsure at all n locations
aatgaccttctcagcaattttctctatttcgtacacgccccaaagtagcattttttgtacccaaaaatcaaatccattatccctaaagaccttattattcccaccccaagttgggaagaaacttgtccaccaacctctaaggtacaaagggttttctcccaagggggatgttggcaaaatcaaggcatcaattaagtgggaaaagggctacaagaaagttgagatctccagtaaggagcatcttgctgtatcattggcttatgatgttgctcagctctctaacaaattcacaagagagagaggtgctttcactgtcgttttgtccggtgggtcactcatcaagtacctcaggaaattgcttgaacctccgtatattgattccatagagtggtcaaaatggcatgttttctgggtggatgagagagttgtgccaaaggataacttagacagtaattacaagctcgcctatgacggatttctctctaaggtgacaatntctncggtaaatgtttatgccattgatgatgccctagcagcagatggagcagctgatgtttatgagacaactctcaaa

SEQ ID NO: 229986 - DNA, 545 bp, Glycine max
gttttgcacatatgcgttggagttccctgctgtagccaaaaaagattctgtaaaggaggaagagagaccaaatgtgagaaggagcatcttgtatcaacataaagaaaaatattagacaaaaccaggaaacacagcactaacagaacaagacaaattacctttccaaatgcagaaggatttctgatcgataggtgaaccagttatagtctgaataacttcaaacaacatgctctgcggagtgctcctgagctcttgtacaaccccatatatagttttcccattatcaaagtaaatgtgattattggggtgttttgtcttgcaaccagcatgtcgctcaaattcaaatgcattaataacctgaagaaatgtaacattagtcagagatagcaatttggctcgaaaaggattctcctctatgataaatggcttggagaaactttaccttggaaaaattacatgagtgacaactgcacaaatagccagcaccttttataacacctcggagttccttctaacaagcataggaagaatgcagacatgtgatg

SEQ ID NO: 229987 - DNA, 602 bp, Glycine max
  unsure (1)..(602): unsure at all n locations
gtctcttcatctcgagaaagagacagataaaagacagagagatggggaagaaagaaaaagctaaggaacgaagagaacaacgattgcaagagatacaccttcagaggaccattccctattctcatcaccagaggtggtggtccaaggaaactgtggctgtggttacaggtggaaatagaggaatcgggtttgagatttgtagacaacttgccactcatggattgactgtcatactgacatcaagagacgctagtgctggtgttgaatcagttaaggctttgcaagaaggtggtctcagtgtggtttatcatcaacttgacgtagtagactattcatccatcaaccagtttgttgagtggttgcgggaaaattgtggtggcttagatattctggtaaataatgctggtgttaattttaatcttgggtctgataactcagtcgaaaatgctcgtaaagttattgaaacaaattattatggcaccaagcgtatgactgaagctattatttcattgatgaagccatcccttgttggggcgcgtaatgtaatgtaagctcacgtcttggtcgactaaatggaagacggaataggntcagcaatgtag

SEQ ID NO: 229988 - DNA, 557 bp, Glycine max
cctcaacagtaaattttccggtgtttgtatacttgtaaatattttacatcaactatactaggagctttgctttcctactttcttcaacctgtatatctttcttcaattactgttggtctgccccttgacattcttgagaattttcgtttggaggacagcttgaaaagagctttgtatgaacgtatgctgcccctatcgaatgaactgacatctccatttctagtgaaccagcctatatttcacgctgcaccagtacccccaaaggactttcagcaatctgagagtgctgctaacactttaacatgcggatattcaatatgttggaatgaatgtggcttgcatgacgtcatcatgggaactaccggaagaaagcaaggcacctctgcaaaaggggcactctacccatcaacacagtcatctttatgcaaaaagaggctgttggaggttttcttgtcactgggaccagaaaatttgattggttctctacccaatgggattacttatcgagaacttaaggatggagctgaagaatatcatttggcttccaaatttttaaa

SEQ ID NO: 229989 - DNA, 535 bp, Glycine max
cctcaacagtaaatttgtcggtgtttgtatacttgtaaatattttacatcaactatactaggagctttgctttcctactttcttcaacctgtatatctttcttcaattactgttggtctgccccttgacattcttgagaattttcgtttggaggacagcttgaaaagagctttgtatgaacgtatgctgcccctatcgaatgaactgacatctccatttctagtgaaccagcctatatttcacgctgcaccagtacccccaaaggactttcagcaatctgagagtgctgctaacactttaacatgcggatattcaatatgttggaatgaatgtggcttgcatgacgtcatcatgggaactaccggaagaaagcaaggcacctctgcaaaaggggcactctacccatcaacacagtcatctttatgcaaaaagaggctgttggaggttttcttgtcactgcgaccagaaaatttgattggttctctacccaatgggattacttatcgagaactaaaagatggagctgaagaatatc

SEQ ID NO: 229990 - DNA, 569 bp, Glycine max
caagaacgcttcgcatgatgatctgattaaggcttacaagaaagccgccattaagaatcaccccgacaagggcggtgatcccgagaagtttaaagagctggcgcaagcttatgaggttctgagtgaccctgagaagcgtgagatatatgatcagtatggtgaagatgcgcttaaggaaggaatgggtggtggcggtggccatgatccatttgatatcttttcatctttctttggcggtgggagtccctttggatcaggtggaagtagtcgaggtaggaggcagaggcgcggagaagacgtggttcaccctctcaaggtctctttggaggacctttatcttggaacttccaagaagctctccctctccagaaatgttatatgctccaagtgcagtggcaagggttctaagtctggtgcttcgatgaagtgtgctggttgtcaaggaactggtatgaaggtttctataagacatcttggcccatccatgattcagcagatgcagcatgcctgcaatgaatgtaagggtactggagaaactatcaatgacagagatcgctgcccacagtgca

SEQ ID NO: 229991 - DNA, 637 bp, Glycine max
attgtttgttgttgtaactcgttcttcttcttttgttgttctgtgtttgtgtttgttttttctctcacctgaaaatgtcttgctgcggtggtaactgtggttgcggaagctcctgcaagtgcggcaacggctgcggaggctgcaagatgtacccagacttgagctacactgagtcaaccaccaccgagaccttggtcatgggagtggcacctgttaaggctcaatttgagggtgctgaaatgggtgtgcccgctgagaacgatggctgcaaatgtggaccaaactgctcctgcaacccctgcacttgcaagtgaggtgttgggagagcaagcttcaagcagagatagcccttaattaggaataatgataaactattaatgtgtagctaaaaacttatgtattatgtctgtgatggttttcgtgcactctggtgttttgtgttaaacaaacatccttagaataaagtggtcatgtcttgcctttcagcaagttcaagtgttttggacttgtgatgggtgtgttaagctcatggttgcttctttttttttttttaatgtttggtaattggtcgcttctgtataaagttcgctaatctgaattatgaatctctgcttataatattaaatactattactgg

SEQ ID NO: 229992 - DNA, 586 bp, Glycine max
  unsure (1)..(586): unsure at all n locations
ctcgagccgaatcggctcgaggattgttttgactttttcttcttcgtcgttatcttcttcttttgttgtttgtgtgtttgttttttctctcacctgaaaatgtcttgctgcggtggtaactgtggttgcggaagcgcctgcaagtgcggcaacggctgcggaggctgcaagatgtacccagacttgagctacaccgagtcaaccaccaccgagaccttggtcatgggagtggcaccagttaaggctcaattcgagagtgctgaaatgggtgttcccgctgagaacgatggctgcaaatgtggagctaactgcacctgcaacccctgcacttgcaagtgaggtgttggagagctaaagcttcaagcagaaatggcccttagaaataatgataaaaactatatgtagtttcaaaacttcaaaattatgtagtatgtattatgttgcactctggtgttttgtgtctaaacaaacacccttagaataaagtggtcatttcttgcccttgagcaagttcaagtgttttggacttgtgatgggtgtgttaaggtcatggntgcctcttttttatatatatatatatatataa

SEQ ID NO: 229993 - DNA, 592 bp, Glycine max
gctgcttcctgctgagtatctgcgtttttaggaggagcttgttgagggaagttctaatggcaactttgtgcttgagttggactttgaaccgtttaatgcatccttccctcgcccaactctgaacaagtccattggaaatggcgtcgagttcctcaaccgccacctttcggccaagctcttccatgacaaggagagcatgcagccactgcttgaattcctcaggcttcacagttataagggaaagaccatgatgttgaatgacaaagttcaaagcctggattctctccagcatgttttgagaaaagcagaagagtatctgacttcagttgctcctgaaacaccctactcagaattcgaaaacaaattccgggaaattggtttggagagggggtggggtgacatcgccgagcgtgtcctcgagatgatccagcttctcttggaccttcttgaggcacccgacccttgcaccctcgagacattccttggaagagttcctatggtcttcaatgttgttatcctttctccccatggttactttgcccaagataatgtcttggggtaccctgacactggtggacaggttgtttacatc

SEQ ID NO: 229994 - DNA, 549 bp, Glycine max
ctccgcactccgtcttcatcaatcagcttcaccactgctccaacacaggggaaaatgagggagatccttcacgttcagggagggcaatgcgggaaccagatcggttcgaagttctgggaagtggtgtgcgacgagcacggcatagatccgacggggaagtacgtcggaaactcagatctacaactcgagcgcgtgaacgtgtactacaacgaagcttcctgcgggcggtttgtcccacgcgcagtgctgatggacctggagcccggaaccatggacagcgtgcggactgggccgtacgggcagatattccggcccgacaacttcgtgttcgggcagtccggcgcgggcaacaactgggccaaggggcactacacggagggcgccgagctcatcgactccgtccttgacgtcgtgcgcaaggaggccgagaactgcgactgccttcaggggttccaggtctgccactcgctcggcggaggaaccggctccgggatggggacgcttttgatttcaagatcagagaggagtaccctgacagaatgatgctca

SEQ ID NO: 229995 - DNA, 531 bp, Glycine max
tggagctgaatttgaaggtgctgttattgctctgttccatttgttgataactagaacagacaaggtccgtgctcttcgtgaggcattttaccggcagaatcttcccaatgtgacaaatttgcttgctactgtcttgatcttcctaattgtgatatacttccaaggtttccgcgtggtcttgcctgtaagatcaaagaatgctcgtggacagcagggttcatatccaatcaaattgttttatacctccaacatgcccatcattcttcagtctgcccttgtttccaatctctacttcatctcccagctgctccaccgtaagtacagcggaaacttcttcgtagatctattgggaaaatggaaggaatctgaatatggaggtggtcagtctgttcctgttggtggcattgcatactatatcactgcaccatccagcttagctgatatggcagccaatcctttccatgctctgttctatcttgtgtttatgctttcagcctgtgccttgttctctaaaacatggattgaagtctc

SEQ ID NO: 229996 - DNA, 531 bp, Glycine max
ggtgaccagggtcacatgtttggctattccactgatgaaacccctgaattgatgccattgagccatgttcttgcaacaaaactcggtgctcgtctcaccgaggttcgcaagaacggtacctgcccttggctgaggcctgatgggaagacccaagtgaccgttgagtattacaatgacaatggtgccagggttcctattcgtgtacacaccgtgctaatctccacccaacacgacgagactgtcaccaatgacgaaattgctgctgacctcaaagagcatgtgatcaagcctgtgatcccagagaagtaccttgatgagaagaccattttccacttgaacccttcaggccgttttgtcattggtggccctcatggcgatgctggtctcaccggccgcaagatcattatcgatacttatggaggatggggtgctcatggtggtggtgctttctccgggaaggaccctaccaaggttgataggagtggtgcttacattgtgagacaggctgctaagagcattgtggcaagtgga

SEQ ID NO: 229997 - DNA, 357 bp, Glycine max
aacgggaacaccctctttttgattttgattttaaaaaacacattgggggggcttacttacaaacagagagtacctgtttttagtggatcccggtaaaaatttcaaaagaacattctattaacaaatttggggggagaggggagaaacccccagagttagagacgtggaaagttttggtttttagacatattttaagggcgacggtcaaaaaactttccacataaagcaggggaatgaatttcttaggccttttcccacttgagggggtgggccacttcccatgggaaggcagggttttttctttaaagtggccataggcagcagttttcaaaaacctggttttttccccccttttga

SEQ ID NO: 229998 - DNA, 522 bp, Glycine max
gatcgatgagctggagtaagaatctgcttcttcggccggagcacgtggaggcttcgaggatgacgctgcataggttcgggaacacttcttcgagttcgatttggtacgagttggcttacacggaggcaaaggggaggatcagaaaggggcacagggtttggcagattgcgtttgggagtgggtttaagtgtaacagtgcggtgtgggaggcgcttagacatgtaaacccttcacccaacactccatgggaaaactgcattcataggtaccccgttcacattcatacataataattaccactatcgctttcaagagacttccattcatctctaattcatcgccgtttctttaattgaattaattgggtcagtcagggaacctctttagaaaatcagagtcaattattcattctgttttcgtcggtcacttgagctttggacatgactgtattgtgaatttgtgatttgattacatcatttttttttcattcaaattcttcggattagtgttaatttttttttt

SEQ ID NO: 229999 - DNA, 424 bp, Glycine max
aaaaaaaaaattaacactaatccgaagaatttgaatgaaaaaaaaatgatgtaatcaaatcacaaattcacaatacagtcatgtccaaagctcaagtgaccgacgaaaacagaatgaataattgactctgattctctaaagagggtccctgtctgacccaattaactcaatttaagaaacggcgattaattacagatggatggaattgtatcgtaatcgataatcttcagaattgtggatgaatgtgaacggcgtacctatgaatgccgctttccacatggagcgttgcgtgattggtttacatgtgtaagcgcctaccacaccggactgttacacttaaacccactcccaaacgcaatgtgccaaaccctgtgcccctttctgatcctcccctttgccttcgggtaagccaactcgtcccaaa

SEQ ID NO: 230000 - DNA, 590 bp, Glycine max
  unsure (1)..(590): unsure at all n locations
tgaaaccagctggcaacatgcctgggattacacctgtttatctcaatgtctatgacttgacaactgtaaatggctatatgtattgggcaggaattggtattttccactcaggggttgaagtttatggagtagaatatgcatttggagcccatgactatccaacaagtggtgtcttcgaggttgagcctcgacagtgtcctggctttaagtttaggaagtcgatattcatgggaactacaaacttagatcctttccagattagagagttcatggagcgccagtctgcaaattacaatggtgatacttatcacttgattgtgaagaattgcaaccatttctgtgaggatatttgttacaagctaacaggcaattctattccaaaatgggtcaatcgtcttgcaagaataggttccttttgcaactgtatactccctgatgctcttaaaacttccactgttcagcatgatgatcccaactttcaagggtgtgatagtgagaaacgaagactacgaaccgncttcagttgcttgtcatcaatctcaatgcctcagaaggaagtgtcaatgtcttcatttattatgcattctcac

SEQ ID NO: 230001 - DNA, 594 bp, Glycine max
  unsure (1)..(594): unsure at all n locations
gcacaaaccaacgtttcatgccccctcctcctgattaggcaaccattgccactattgttgagatgggcttctcaagggcaagggctgaggaagcattgagaagagttgaaacaaatagtgttgaaatggccatggagtggctgtttagtcatgctgatgatcctgtccaggaggatgatgaacttgcacgggcacttgctctgtccctaggaagtagttctgaatctactaaagctgagagtgctgagaagactatagatgttctaactgaagagggacatgtgaaaaaacctccagttgatgatatacttgctgcatctgtaaagttgtttcagagtagtgattcagtgccatttcagttgacagatttgcttgtaacactttgcagtcagagcaagggtgatgatcgtccaaaggtaacatcttatcttctgcagcagctaatactttgtccgttggacttttcccaggataactgtgcattgagtgtgttagcacatatcttggcactgcttctttctgaggatggaagtacacgggaanatgctgctcagaatggcattatatctaccattatagatatcttgacaaact

SEQ ID NO: 230002 - DNA, 569 bp, Glycine max
gggatgcgccacaggacaccctagttttttgatgttctgctccttcaccaaccaggtcattgctcagcttgagttgtggaaggagaagagtaccggcaagtacgagaagaaagtttacgttttgcccaagcaccttgatgagaaggtggctgcacttcaccttggcaaacttggagctaagctcaccaagcttagcccggcccaggctgattacatcagtgtgcctgttgagggtccatacaagcctgctcattacaggtactaagtaattgagattatcaacggaaagtgagggaaagacaaaatcggttttatgaatcggattgattgtttaattttcctttttttgaatttttgttgttagacttttcagatttgaggtagaagaagtttagctttttttatttttaatttccgtagaatttctgttcgagtgggtgggacgggtaaggaggaagacatcctgttggtttctgtgatatgaaaccaatttgggttgaatcagcatgttttgtttggggaatgtgtgtgcattttgcttttgctttataaatactaaattatgtgtt

SEQ ID NO: 230003 - DNA, 587 bp, Glycine max
ggctgatcactctaccatcattatgatttaaattcttgagacctacacaggttttgagagtcttaaatctctggttgatgttggtggtgggactggagctgtaatcaacatgattgtctcaaagcatcccactattaagggcattaattttgatttgcctcatgtcattgaagatgccccatcttatcctggagtggagcatgtaggtggagatatgtttgcgagtgttccgaaagctgatgctatttttatgaagtggatttgccacgattggagtgatgagcactgcttgaagtttttgaagaactgctacgaggcactaccagacaatgggaaggtgattgtggcagaatgcattcttccagtggctccagactctagcttggccacaaaaggtgtggttcacatcgatgtgatcatgttggcacataatccaggtgggaaagagagaacagagacagagtttgaggctctggccaagggtctggattccaaggcttccgagttgtttgctgtgctttcaataccaacatcatggaatttctcaaaagatttaagctctttggcatggattcatgtcaagctgc

SEQ ID NO: 230004 - DNA, 412 bp, Glycine max
atatatataatccttaaaatgtaatttgctattcgatattggcagggtacattgaacttgttcattattcttttcctaagagaaaattacgtttttccgggaaagctttggaaagtagcaccacaaccacaacctgaatctcaaaacccaaatgcagcttgacatgaatccatgccaaagaacttaaatctttttgagaaattccatgatgttggtattgaaagcacagcaaacaactcggaaaccttggaatccagaccctttggccagagcctcaaactctttctctgttctctctttcccacctggattatgtgccaacatgatcacatcgatgtgaaccacaccttttgtggccaagctagagtctggagccactggaagaatgcattctgccacaaatacctttcca

SEQ ID NO: 230005 - DNA, 568 bp, Glycine max
ctccattagattaccaatctctgcaactttgcttctcaacatggagtatcgtctcctacccatttttactttactcaatattgcactggtggcaacccatgctgctttaccccctgaagtttactggaagtcggtgcttcctactacgccaatgccaaaagccatcactgatatcctttactctgattgggtggaagagaaaagcagctcagtgcatgttggaggtggaggcgtgaacgtgcatacaggaaaaggaggtggcagtggcaccactgtcaacgttggtggaaaaggaggcggaggcgtaaacgtgcatgcaggccacaagggaaagccagtgcatgtttcagttggctcaaagtctccatttgattacgtctacgccgccacggaaactcaattacacgatgaccccaacgtggcactcttcttcttggaaaaggacttgcattctggacaaagttggacttgcacttcacaggagtacatctaatcaagccacgttcttgtcacgccaagttgcggattcgatacccttttcatcccacaaggtgggacttatattcac

SEQ ID NO: 230006 - DNA, 496 bp, Glycine max
tttctttttttttttttttatactattctaacactttattcgcaaataaaaaaagcatggggggttattcataggaagccacacatagcatctaaataaacagcaaaaaagtatacatatctagagaactatataggacgagcaaatacatgcatcgagttctgtagctgatgctattgaagctagttattcaaggacatatatggaaaaaggacttgaatgcaaatctacttgggaacccaaacaacatgatcctcaagaaggaagtggcagacaggaatagttcctggcttaactttgaacacctgaaaggccaaatgtttagggttccattctgatgtgtcagggtggcacactgctaccgctttaaccctaaccccattagtaccctccaaaggcacaaagtaagctctggtggactcggctttgtgacagtaaaaaacagcaataaggtagttctggttatggcacacaacagccttgtcccctgataact

SEQ ID NO: 230007 - DNA, 577 bp, Glycine max
  unsure (1)..(577): unsure at all n locations
acgagtttgaggcaaggcttgtgaatcatactcactaatactactattctaatgcaccccttttgaactttgataccctttcttctgaaatcttaatctcatagatgattggcgcagaatttacatgtactagggcatgaaaaccttcgagcttctttgttccgaggcggccatttccattgctccaacattgctgatcggagaattgaccgatgaatcagaatcaattggacttaagagctcatcattctggatcaacacaatcagaggagtcggctctggaccttgaaaggagctactatggtcatcctaacccctccagtccttcacccttgcaaccttttgcaggaggtgctcagcattctgagagcaacgctgcctatttttcttggcctacattgagccgctggaacgatgcagcagaagatagagccaactattttgggaaccttcacagggtgtgctccctgaaactntgngtcgattgccaacaggacagcaagctactaccttgctngaactgatgactattanggcatttcatagcaagatcttacgcagattcagtcttggcact

SEQ ID NO: 230008 - DNA, 594 bp, Glycine max
  unsure (1)..(594): unsure at all n locations
cactcacactctcttctgtcatagctgtaccacgtttttcttctccatctcagcctctgtcccaacaccattctcatggctgctctagctctagcactgcttcttctggctttcactggcacttcaagtgctacatggtgcgtttgcaaggatggaagcgacgcgatcctgcagaaaaccttggactatgcttgtggagctggtgctgactgtaatcctctccaccaaaacgggccttgtttccagcccaacaccgttagggcccactgtaactacgccgtgaacagctacttccaaaggaagggtcaagctcaagggtcctgcgactttgcgggaacagccattgttactgcatctgaccccagctctggcggtacttgtgtctacccttctagtgtcagcgctgcaggcactggtacaactccagtgactaccacaccaaccatgggcaccactcctacaactggaactccatcaacaagcaccggcacgggcaccggcaccggcacaggcaccactccatacagcacaacacctggagtattangagggcattgcagtggcatgggaccctcaggatccngcatgaatgac

SEQ ID NO: 230009 - DNA, 532 bp, Glycine max
ttctctctctctccctctctctctctttttctctctctcatacttattctccctcgcgcgaaagataaacacatttttagttgcaactaatgggaactgttgaagctgcaaacaaggatgcaaatggaagcctcctagagaaaaatcctacagttgtttttgtgttaggtggcccaggcagtggaaagggtacccagtgtgcaaatattgtcgaaaattttgggtatactcacctcagtgctggtgatcttctgcgagcagaaatcaaatctggttctgaaaatggcacaatgattcagaatatgattaaagaaggaaaaattgttccctctgaggtaacaattaagctcttacaaaaagcaatgcaggaaagtggcaatgacaaatttcttattgatggttttccccgcaatgaggaaaaccgtgcagcatttgatatagtgacaggaatagaaccagcatttgtcctattttttgagtgccctgaggaagagatggagaggcgactacttagtaggaaccagggtagaga

SEQ ID NO: 230010 - DNA, 493 bp, Glycine max
gggtgatataatcccacacaaatctttattgcaattatcaatgaatgagtcaacaagatataacacattagaatacagaggtaaaacccttaggtataaactacaattgtctatagcttaataacaaaatgtgacacaatagaaaaagcagccaacactgatatgacctctaaatttccaccatggagtgaaggtgaacatgctcaatcagccttctgattctttggaccaaaaattcctttgactgtctcaaatacctcttcgataggccttgcagcatcaatcttgcgaacttttccctttgcatcataataattaatcacgggaagactagactccaagaaaaccataaatcgcttacttattgtctcaatattgacatcttctctaccctggttcctactaagtagtcgcctctccatctgttgctcagggcactcaaaaaataggacaaatgctggttctattcctgtcactttttcaaatgctgcac

SEQ ID NO: 230011 - DNA, 472 bp, Glycine max
cagagacttgcttacataaacaccattgtctacccctttacatcccttcctctggttgcatattgttctttgcctgcaatttgccttctcacaggaaaattcatcataccaacgctttcaaaccttgctagtgccctctttcttggactttgcctgtccattatagtcactagtgtgctcgagctgcggtggagtggtgtgaccattgaagctttgtggcgtaatgaacaattctgggttattggaggagtgtcagcgcatctatctgccgtgcatccaaggattcctgacgatgtgggcaggtgttgacaccaacttcactgtcactgccaaagctgctgatgacaccgagttcggtgatctatacataatcaagtggaccacactcttaattcctccaacaacccttatcatcattaatatggttggtggtgctgctggattttctgatgcactcaatggaggatatgag

SEQ ID NO: 230012 - DNA, 493 bp, Glycine max
aatgatccaactgtctgatctttacacaggaaatttcatccaatgcatggaaaagaagtaacaaccatgtttgcaaccttacatttaaagtgcttacacatttcaactgcggctcaaatcacaatcaatcatcatcatcatccatatttttaacatatggtcaaaactttttatataggcagatgacttagcaatctatagaaatgcaggtctgggaaatgcttgcactgtcaggtctgctgataaaagggttaatcttgacccaaaccagagagaaaacagaagccaacatcactgaccacagaataacaatggttggggtgcggttttggcgacccatgagacccttgaggaatggatagagatggaaaatgacccagaaggcaaagaaaacctttccaaaaagtggtccccaagactcatatcctccattgagtgcatcagaaaatgcagcaacaacaccaaccatattaataatgataagggttgttgg

SEQ ID NO: 230013 - DNA, 483 bp, Glycine max
  unsure (1)..(483): unsure at all n locations
gaacaagtagttgagatctaagaaggttaagcaaatggcttcctcaatgatctcttccccagctgttaccactgtcaaccgtgccggtgccggcatggttgctccattcactggcctcaagtccatggctggcttccccaccaggaagaccaacaatgacattacctccattgctagcaacggtggaagagtgcaatgcatgcaggtgtggccaccagttggcaagaagaagtttgagactctttcctacctgccagaccttgatgatgcacaattggcaaaggaagtagaataccttcttaggaagggatggattccttgcttggaattcgagttggagcacggtttcgtgtaccgtgagcacaacaggtcaccaggatactacgatggacgctactggaccatgtggaagctgcctatgattggttgcactgatgcttctcangtgttgaaggagcttcaagaggctaagactgcataccc

SEQ ID NO: 230014 - DNA, 510 bp, Glycine max
aagagtctattcattaggtctcatccattaagttccattgaagtccgaaaacagaaaccaaaaatacaggatgatgaaatctcaaaaagcaaaaacaaatgggaatgtagtttaagtacaaacaaacaaagtggggtggcggctacaaatgctttgcaaatttttcacacttagaagcctgggggcttgtaggcgatgaagctgatgcactgcacttggcgaacgttgtcgaatccgatgatacggatgaagccgttggggtatgcagtcttagcctcttgaagctccttgaacacctgagaagcatcagtgcaaccaaacataggcagcttgcacatggtccagtagcgtccatcgtagtatcctggtgacctgttgtgctcacggtacacgaaaccgtgctccaactcgaattgcaagcaaggaatgcatcccttcctaaggaggtattgtacttcctttgcaattgtgcatcatcaaagtctggcacgtaggaaagaggttaaactt

SEQ ID NO: 230015 - DNA, 402 bp, Glycine max
gagcttcataggttcttcttcttttctttccttccttctctcccttcagacaaagggacaaaaaatcagtgtgtgagagagagagagagaaatatcaaaaccgtgtgccatagtcatctaagtttggcctttgggattctaggtaacattgcctccttcgtgtgctttctggcaccactaccaacattttatagagtttgtaagaagaaatcaaccgaagggttccaatcaattccatatgtggctgcactcttcagtgcaatgctttggatcttttatgcctatgtgaagaccggagaaacgcttcttatcaccatcaatgcattcggttgcgtgattgagacaatttaccttgccgtgtttatcacttactgcccgaagatagctaggatgtcgacattg

SEQ ID NO: 230016 - DNA, 519 bp, Glycine max
ggcttcaattggaggaatccacagtgtttgatcttttgataccctccctgtcttacacaaatgatacagtgtatgatgttgagttggtgaggaccatattggagcagtttatgtcacaaggccagagtcccccaactagtcctgcaagatctaggtttgcctttgaaagaagaaggtctcgttcagctgagaatattaacttggagttccaagagagtaggaggtcctcttcagcatctcacagttcaaaattgaaagtggcaaagcttgtggataggtatcttcaagaagttgctagggatgtgaattttcagttgtcaaaattcattgctcttgctgagattataccagatttcgcaagacacgatcatgatgatctctacagggctattgacatttatctcaaggctcatccagaactcaacatgagtgaaaggaaaagattgtgtcgaattcttgactggcaaaaactttctatggaagcatgcatgcatgcagcacagaatgaactacttcccc

SEQ ID NO: 230017 - DNA, 526 bp, Glycine max
ggagtcgcctcgtgtttccgtttccgtttcaatttcctctcacaggctttaaccttaccagctcgagataagacatggaccggatcaaaggcccatggagtccggaggaggacgaggctctgcagaagctggtggagaaacacgggcccaggaactggtctctgatcagcaagtccatcccgggccggtccggcaagtcctgcaggctccggtggtgcaaccagctgtccccccaggtggagcaccgggccttcacggccgaagaggacgacaccataatccgggcccatgcccgcttcggcaacaagtgggccaccatagcccgcctcctccacggcagaaccgacaacgctatcaaaaaccactggaactccaccttgaagcgcaagtgctcttaaccatgatcgacgacaacacccaaccgctgaaaagatccgtgagtgccggcgcggctattccagtctctactggactctacatgaacccgcccacaccgggtagtccctccggatccgatgtgagcgag

SEQ ID NO: 230018 - DNA, 562 bp, Glycine max
attccttcttggtaaccttattacacattcacactactctttcattatggaattcagatccaagtcatgcagagatgaaaggctgcagattgaaaggtactgtggaggcaaggtggccccaacaagcatgcaagatctgaggtgttacagtgctaataatgctgcttatgcaaaccagataggtagtaaggaggtgaaggagaagaaagggaaaagcacagtaactaaaccatcaaaaagttggagcttcagtgaccctgagttgcagaggaagaagagagttgctggctataaaatatatgctgctgagggcaaaatgaaaggctctctaagaaagagtttcaggtggatcaagaatgcataaacgcaagctctctatggatggtggtgaatcatgtcttattctctttttcttcatatttttttttctttttctggaatgagagttacttatttgtttgtttctcagtaagtgtttaaattaaatcctccatctgccgtagtagtcttatctggttggagcaggattgtctccattgagtcttttaccaaaagtcccaca

SEQ ID NO: 230019 - DNA, 563 bp, Glycine max
tttggtttttttttttttttcatcttatttttgaagtgataattaagaaactcagcagtggtaaccaaactacacacccataagccatggaatctcatacaaaaaggaattgaacttttgaaaggatgtgggacttttgggaaaagactcaatggagacaatcctgctccaaccagataagactactacgggagatggaggatttaatttaaacacttactgagaaacaaacaaataagtaactctcattacagaaaaagaaaaaaaaatatgaagaaaaagagaataagacatgattcaccaccatccatagagagcttgcgtttatgcattcttgatccacctgaaactctttcttagagagcctttcattttgccctcagcagcatatattttatagccagcaactctcttctttctctgcaactcagggtcactgaagctccaactttttgatggtttagttactgtgctttgtcctttcttgtccttcacctgcctactacctatctgggttgcataagcagcattattagcactgtaacacctcaaatcttgcatgc

SEQ ID NO: 230020 - DNA, 553 bp, Glycine max
gttctgaggttgcatcttctcagattttctctctcccatccaagttgacctttcattccacttcttcgaatcccaagtctcaggtctggtaaccttttgaggttgttgggtgcagaagggagcgatggctgcttcagaggagaatagtgcactgttcccaatattcattttgacaataatggccattcctatagtgccatatacaataacaaagttgtgccgttttgccagtaagaaatcaaagagcattcactgtcagtgctctgagtgctcgcggtccgggaagtaccataaatcgatattcaagaggatttcaaatgtctcaacctgtagtaacttgacattgttactactttgggtggttatgattgttctggtttattacataaagaccatgagtcgtgagattgaaatttttgatccgtttaatattctaggattagagcctggagcggcagagtctgaaataaagaaaaagtataggcgactttctattcaataccatccagataaaaacccagatccagaggcacacaagtactttcgtgagtac

SEQ ID NO: 230021 - DNA, 595 bp, Glycine max
aaagcacaaagcaaagctcattcttgatttaaaaaatggcagcagcttcttccatggctctctcatccccatccttggctggcaaggccgtgaagctgggcccatcagccccagaagtgggaagggtgagcatgaggaagaccgtcaccaagcaggtctcctcaggaagcccatggtacggcccagaccgagtcaagtacttgggcccattctctggcgagcccccgtcctacctaaccggtgagttcccaggcgactacggctgggacactgctgggctttccgcagacccagaaaccttcgccaagaaccgtgaactcgaagtgatccactccaggtgggccatgctcggagccttgggctgcgtcttcccggagttgctgtcccgcaacggtgtgaagttcggagaagccgtgtggttcaaggccgggtcccagatcttcagcgagggtgggctcgactacttgggcaacccaagcctgatccacgcccagagcatcctcgccatctgggccacacaagttatcctaatgggtgcccgtgaaggttatccgtatgctggtggccccctcgtgaggtcactgacccaatctac

SEQ ID NO: 230022 - DNA, 473 bp, Glycine max
gtaaaaagtaagtatttttaagttggattcggatacacaggataattcacattatctgaagtacttcaccaaacacaaatctaaaaactctcaaaagtcatttcgttctttgacgctcactttccggggacgaagttggtggcataggcccaggcgttgttgttgacagggtcagcaaggtgatcggcgaggttctccaatggaccctttccggtgacaatggcctgaacaaagaagccaaacatagagaacatggccaatcgtccgttcttgagttccttcaccttaagctcagcaaaagcctctgggtcatcagcaaggcccaatgggtcgaagctgccacctgggtagattgggtcagtgacctcaccgagggggccaccagcaatacggtaaccttcaacggcacccattaggataacttgtgtggcccagatggcgaggatgctctgggcgtggatcaggcttgggtt

SEQ ID NO: 230023 - DNA, 548 bp, Glycine max
gctggttcagtgtttacatttttcattacaatttccacaacaaagaaataatctaacgtttaatcataatctaagaatgctataacatacaaagtactcttctttcctcgatattggataacccacaattcattcggataagaaatctcttctatttgtatttagaggaagcgcagctgcagcaattttctcccgcaggttgaatttctttgcaattagtggccggacatcatcaacaccaaccaagctctccaagaacggaagtaacaaaaacaattcttgatctgaacgatcatcaaaccaactctcgattgggattccattatccacttggaatccaaatgcctgtggggaattgtcaattattataacatgtgccaaatcacgaccaagcactgttaaatctttgaggtaattcccctccacataaacacaggactcacggtatacacggtggcgaaatatcttccgctttggatcaagcacatttaagaagttgctcggcataaatgctctgactagcagtaaatttaataatctcaaaaaga

SEQ ID NO: 230024 - DNA, 329 bp, Glycine max
ttctctctgtctcgtttacacatctctctcaacctttctctttcgtttctcagttttattcgaatccctctctcaatctcctttccaaatggccagcgttgaggttgcacagcaaacaccaacaacagttccagaaaatgaaacaaccgaggtaagcaagacccaggaaacaaccccagtcactgaggctcctgcaacagaacaaccagcagctgaggttcctgcaacagaacaaccagccgctgaggctcctgccccagaatcaaccaccgaagcaccaaaggaagaaaccaccgaggcaccaacagaaacagtagaaaaaacaacta

SEQ ID NO: 230025 - DNA, 487 bp, Glycine max
attcaaacctaaagaaacacagtaacacaccatcacaaactcatgtaaccctgccaataaaccatcacccctaaactccagcaccagcagcttgctcacttcaatacacaactcccagaatttctcatgtcaccacgtggcaagcacgctgatgtggagccaagtgttgtgcttacacgtaggtgtaccctccataatacaaccaaagacttaagcatcatataataatattaataaagtaaactaaagaaataaaaagaaaaaaaaaaaagaggcttttcaacatggcatgcaaaatggtagacctgatccccacaactaggaccatttttaaacttgtttttctcactcacactgtccataggtctaagcttcagtcttctcaacaggaacctctactggggtttcaactgactcagctggtttgttctcttcctctgtgggtgctggtggtgctgctgctgctgattctgtttcagtagtttct

SEQ ID NO: 230026 - DNA, 466 bp, Glycine max
gtaaaagtcagctaacgataaagaaattaaatcgctttctgttaatactgaagattctttttccagtttgctggaacttgcttctaacaatgatattgaaggcttcaaggtgcttttagagaaagattcttcttcgatcaatgaggttgggctctggtatggccggcaaaacggatcgaagcaatttgttcttgagcacagaacccctttgatggttgctgcaacttatggtagcattgatgttatgaagattatactgttgtgccccgaggcagatgtaaatttcgcgtgtggggcgaacaaaaccactgctcttcactgtgctgcttctggtgggtctgccaatgctgttgatgctgtgaagattcttttatcggctggggccgatgtgaatggcgtggatgcaaatgggaatcgccctattgatgtgattgctgttcctccgagctgaaggtgcaaagccgtc

SEQ ID NO: 230027 - DNA, 422 bp, Glycine max
aaaatatggaatgacaattattttataaaagaaaaaatggaatatccttcatgtgactctgcagccaaccgatcctccattcctttactacacttcctttcttgtctttccaaaaatttcaccaaaagaatatgtaccttacgaaattaaatacctatctcaacaagatatgtaaagggtcaattttgactagactacaagctgatccagctgcatttgctcaagccaggctcctaaaacagaatggtcaatggattcaattggggaatttgaatttggtccatcagcagatgccgcaggcataggagatgcaaacttctctttgatcatctcaggtggggattccttcaccagagattggacccaagagagatcaggctcttccccgttgttcttgagctcaaacgaggatgatcttcgca

SEQ ID NO: 230028 - DNA, 489 bp, Glycine max
cttgatgaagaagagaatactcatatcttcacaaaagttgctgggacaattggttacatggctcctgagtatgctatgaggggttacttgactgacaaagcagatgtctatagctttggaattgtagctttagagattgttagtggaaagagcatcacatattataggccaaaggaggagttcgtatatcttttagattgggcctatgttctgcaagagcaaggaaaccttctggagctggtggatccaagtcttggttcaaagtactcctcacaagaggccatgagaatgctgcagttagcactcttgtgcaccaatccttctcccactcttagaccatgtatgtcatcagtagtgagcatgcttgatggaaaaactccaattcaagcaccaattattaaacgcggtgacagtgcagaagatgtcagattcaaagcctctgagatgctatcacaagacagtcaaactcaagtctcttctgcattctca

SEQ ID NO: 230029 - DNA, 524 bp, Glycine max
  unsure (1)..(524): unsure at all n locations
tttggcagcaccacttatgagcgagaagttcagaactacattgtatcaactcgtcattatagggctcctgaagttatccttggacttggctggagctatccatgtgatatatggagtgtgggatgtatattggttgaattatgcacaggtgaagctttgtttcagactcatgaaaatttagagcatcttgcaatgatggaaagggtacttggttcattaccacagaccatgatgaagagagtcgaccgacatgctgagaagtatgttagaaggggtagattagactggcctgagggtgcaacctcgagggagagtatcaaagctgtaatgaagcttcctaggcttcagaaccttgtaatgcagcatgtagatcattcagctggcgatctcatacatctcttgcaggggttacttagatatgacccctctgaaagacttacagccaaggaagctcttagacattccttctttatgagagaacactntagaagatgattcactttcttaactgctgcatcattgac

SEQ ID NO: 230030 - DNA, 580 bp, Glycine max
ctgttcatcgtatctagatttattcaaaaattcctacataagggggtttcagcatagcattggggagaggacagctgcagaaaaactagccatcacacaggtgagttcatttgcccacatcttcaaatccttaggaaggtcaatgatgcagcagttaagaaagtgaatcatcttctaaagtgttctctcataaagaaggaatgtctaagagcttccttggctgtaagtctttcagaggggtcatatctaagtaacccctgcaagagatgtatgagatcgccagctgaatgatctacatgctgcattacaaggttctgaagcctaggaagcttcattacagctttgatactctccctcgaggttgcaccctcaggccagtctaatctaccccttgtaacatacttctcagcatgtcggtcgactctcttcatcatgggctgtggtaatgaaccaagtaccctttccatcattgcaagatgctctaaattttcatggagtcggaaacaagcttcacctgtgcctaatttaaccaatatacatcccacactccatatatcacatggatagctccagccaagtc

SEQ ID NO: 230031 - DNA, 457 bp, Glycine max
gccaaacgatgcagatgatgtttgatgttgttgctagagaattgaaatcaatgcagcttactgatgtgcacccacaagattacctcaatttttattgccttggtaatcgggaacactttaatgaagatagttcaagcacaaatggtgcacaggtctcaacagcatataaatatcgccgttttatgatttatgtgcatgctaaagggatgatcgtcgatgatgagtatgttataattggatctgctaatataaaccaaagatctatggctggtactaaagatactgagatagctatgggtgcatatcaaccccattacacgtggtcagcaaagaaaagacatccacatgggcagatttatggttacagaatgtcactctggggagagcatcttgtcatgttagatgaaacttttgaagaaccagagagattgtagtgtgtgcatatagtgaataaaat

SEQ ID NO: 230032 - DNA, 475 bp, Glycine max
ctataaactgggtatcctctcaaaatatgaatcaattctgtgtgaaagatttacaagtgatctgaacaatcatttttaagtacagaaagctacataactttacccccaacttctttttctgtcctctttctcaggaaggggcaggcaacaaatcacaatctttacaaatcttcaacgacatgaattcaggagtttaagttgttaggatatctggaattgtcgtggagtgagcccccagtatcttacccccggcatcggggaaattctcacagtcaggtagggatctaatcttgccatcggaatctacctgtgcaggatacttaagaagatgtccctgcaaaagtgagaaatcttcagaagcgaataattgccaattgttgtctgcaattttattcactttatgcacacactccaatctctctggttcttgaaaagtttcatctaacatgccaagatgctctccccaaagtgacat

SEQ ID NO: 230033 - DNA, 525 bp, Glycine max
gtgcggtaggctcatccgagtccggattcagcaatggggatcgatctcaaggccggaggtaaaagcaaaaaaaccaaaagaacagcacccaagtccaatgatatctatcttaagctcttggtcaagctttatcgcttccttgttcggagaactggcagcaaattcaatgccgttatactcaagagattgttcatgagcaaggttaacaagcccccattgtctttgttaaggttgattaagtataccaaggggaaggaagataagattgctgtggtggtgggcaatataaccgatgatattcgtgtttatgaagttccagccttaaaggtcacagcactcaggtttacagagactgctcgggcaagaattgagaaggcaggtggtgaatgcttgacgtttgatcagttggctctcagggctcctctgggacagaacacggtccttcttagaggcccaaagaatgctcgtgaagctgtgaagcactttggtcctgctcctggtgtgcctcacagccacaccaagcct

SEQ ID NO: 230034 - DNA, 659 bp, Glycine max
  unsure (1)..(659): unsure at all n locations
aaaaaagaagtggtgggttcggcattgncgagtcntggaggagcaattgcccgggttgacgcagctcactacctcggcggaccgcccttttttttgtttttttgggagcaataaagggtggccaacttatgtacaacttcaaacctgaaaatgatgattatgatgaacacaaataacaagaaaactgcttcaaccgtctaagatataaggaaattttgaatttcacagaatagaacactatttatcacatcaaaccctaaatcctctgctgttcctccttcctctagccctctcaaacttccttccctttgctcgaacataaggcttggtgtggctgtgaggcacaccaggagcaggaccaaagtgcttcacagcttcacgagcattctttgggcctctaagaaggaccgtgttctgtcccagaggagccctgagagccaactgatcaaacgtgaagcattcaccacctgccttctcaattcttgcccgagcagtctctgtaaacctgagtgctgtgacctttaaggctggaactttataaacacgaatatcatgggttatattgcccaccaccacaggaatcttatcttccttccccttggtgtacttaatcaaccttaacaaagacaatgggggcttgttaaccttgctcatgaaca

SEQ ID NO: 230035 - DNA, 441 bp, Glycine max
gcccctgacacggagaatgtgaatggttttcggggcttcaaacacaacgacatgtccgatattcatcagcatgtattcttcttcgacctaaacaatgatggagtggtctacccattggagacatataagggattccatgcactcggatgcaatgtgattctttccttcatatagacgattggtatgcatgtgactctcaattaccctactctttctacatggctgccttcaccttttttgccaatttacataagaaacatacatagggcaaagcatggaagtgacactggtacctatgacacaaagggaaggttcatgccagcatatttggaattgatttttagtaagtacgcacgcgaggcgcctgataaatcgacattgaaggagctgtggcacatgactgaaggaaatagagttgcatatgacttcttaggctgggct

SEQ ID NO: 230036 - DNA, 360 bp, Glycine max
gggcaaacaacacaacggggggacaattttgaaccaaaggaccttttgttttgcaaaattgggggaacttaaaaaacagaggggaacaataaccgccaagccatccttccgacagaacctttgggggttttagcacaatactaaaaaaagctcccatgaaagcaaccccccacagcttgttttgacacaaaccctggtgcatttgttgccaggacatacaaaactccccactcaaatttactgggggcccaaccaaaaaaggaataagcaaccttatttccttcaaggatgtgccccagctccttcaatggcaattgattaggcacctgccgtgcgtgctgactaaaaaggaagtccaaa

SEQ ID NO: 230037 - DNA, 553 bp, Glycine max
agctcagtcagcactgcaccgcaaatttttctttgcttctttcgatgagtaacgccacagactccgccggcgagatcccaccggagacgaggtccgccgagagtgacggtggtgggccccggcccacgattaagatcaatgttacgcacggttcctctcaccacgatttacacctcccggcccaatcaacttttggggatgttaagaaactccttgtcaataaaactggtttagagcctgcagagcaacgacttttcttcagagggatagaaaagggtgataaccagcgtttgcaggctgaaggtgtaaaggataagtcaaaactttttcttttggagggcattggtagcaaagagaggaaacttgaggaaaccagaaaagaaaatgagatgtctaaagcttttgaggctattgccagtgttagagctgaggtggacaagctctcaatagggtgacttccatagaagtatctattaatggggggaacaaagcttccgagaaagagtttcttgtgctgacagagttgcttatgagtcaattgctgaaactggat

SEQ ID NO: 230038 - DNA, 553 bp, Glycine max
ggcagacgttgaggttgatgtggcggtttcggcggctgcggcggctgcagggcagccaaagaagagaacgttcaagaagttcagcttcaggggggtggatctggacgcgcttctggacatgtccactgacgaactcgtgaagatgttcagtgctcgcgcacgcagaaggttccagagaggtctcaccagaaagcccatggccttgattaaaaagctccgcaaagcgaaaagggaagcaccagcaggtgagaagccagaaccagttcgcacccatctccgcaacatgattattgtgcctgagatgattggtagcatcattggagtctacaatggcaagaccttcaaccaggttgaaatcaaacccgagatgattggacattatctcgctgagttctctatttcatacaaacccgtcaagcacggtaggcctggtattggtgccactcactcttccaggttcattcctctcaagtgaaaaaaacctctgcaaaatccccatctttttcagattttgtttttattttcagcttgctattgtatggtttatcatgac

SEQ ID NO: 230039 - DNA, 355 bp, Glycine max
aaaaaggaacaaggtatcgaacttgacgaaatcaaaagactaaataaaacgttgatactatggaatcaagtcatgataaaccatacaatgggcagctgaaaataaaaacaaaatctgaaaacgatggggattttgcagaggtttttttcacttgggaggaatgaacctggaagagtgagtggcaccaataccaggcctaccctgcttgacgggtttgtatgaaatagagaactcagggagataatgtccaatcatctcgggtgtgattccaacctggttgaagggcctgccattgtagactccaatgatgctaccaatcatttcaggcacaataatcatgtttgggagatggggg

SEQ ID NO: 230040 - DNA, 541 bp, Glycine max
tgaggtgaccgtgttctaaccgagaaggtttcgttcttctttagaaagcctgatgtttcggatatagtcatttttaaagcgcctccttgtttagaggagtttggttttagttcgtctgatgtgtttataaagaggattgtggctaaggctggggacactgttgaggtgcgtgatgggaaactactggtaaatggtgctgctgaagaacggcaatttgtagtagagcctctagcttatgagatggatccaatggttgtgccagaaggatatgtgtttgtaatgggagacaatcggaacaacagctttgattctcataactggggccctctcccagttgagaacattgttggtaggtccatgtttcgctactggcctccatccaaagtatctgacactgataccctaagtaaactcccacctgggaacaaacctgtggcaatttcttgacaagattcccgctgctttctgaaagtgatgaaggtttccagatacgttcatctattctaaatggacagttttctcccgtctttgcctgggaatg

SEQ ID NO: 230041 - DNA, 509 bp, Glycine max
ggtgaccatcatgaaactcaaggttgtctcttgagtgtgagaaatgctacaagaaggttaagaaacttctcggcaagtaccctcaaattcgggaccagaagttcgatgagaaggaaaacattgtgttcatcacagtggtgtgttgtagccccgagaagataagagacaagctttgctacaaaggtggaggctctatcaagagcattgagatactggaactgcccaagcccaaggccgagaagcctaaagcagaccctcccaaagctgagaagcccaaggccgagcccgagaaaaagaaggacggtggcggcgagaagcccaaggccgagcccgagaaaaagaaggacggtggcggcgagaaacccatggccgagcccgagaaaaaaaaggatggtggggagaagcccataggggatgctccgaaaaaggaagccgagaagcccaagcccgggcccgagaagcccaaggacaagcccgcgccagctcccttacccgtgcagccacatatg

SEQ ID NO: 230042 - DNA, 450 bp, Glycine max
gaatctcaaataacaaaaacattggattggacgtgattaaacatgatgataattgaaacaaattgtgaatggccaccatcatttacagaacccaataatgcaacgccgtggacgtaattgtcacataattatgcagccttgtggattctcttcgctgaaatattgatcaccacggttcacataacagggtctgcctccaccgtaactatcatatacgggccttgcatagtacccgtcgtaacagaacatgggcccaccgtattcgtacccaggcccaacgggcctgccttcgtagcacggaggaggagcatagagcatcccaactggaaccgccataggtgcagccatatgtggctgcacgggtaagggagctggcgcgggcttgtccttgggcttctcgggcccgggcttgggcttctcggcttcctttttcggagcatcccctttggg

SEQ ID NO: 230043 - DNA, 488 bp, Glycine max
cggctcgaggagagtgagagagtgagtgagatagagagagacgcttcgcaaatctcaatcgaatctcagaaaaatgagagaaatcatcagcattcacataggtcaggccgggatccaggtcggaaactcctgctgggaactctactgcctcgaacatggcatccagcccgacggcatgatgccttctgactccaccttcggtgtagcccacgacgccttcaacaccttcttcagcgaaaccggatctggcaagcacgtcccccgtgctgtcttcgtcgacctcgaacccaccgtcatcgacgaggtccgctgcggcacctaccgtcaactcttccaccccgaacaactcatctccggcatggaagacgccgccaacaacttcgcccgcggccactacaccgttggcaagagatcgtagatctgtgcttggatcgcgtccgcaagctcgccgacaactgcaccggcctacaaggctttctcgtcttcac

SEQ ID NO: 230044 - DNA, 525 bp, Glycine max
  unsure (1)..(525): unsure at all n locations
gcgagataaacttaagatttcaactttggacatggacaattgggaatacttgactgaggatcgcaaacaacaggtcctaaaccaccaaatagaagcataatgttgatcacttcacagtttgaataatggagaactatatcacacagcaggagcaaaaacaaaaaagaacgaacaataatggttcagggtaatgtaacgaagcatatacccttttaactcggaaacaattacattgataacaaaaaaaaagccttcgattatcaatagtcctctccttcctcatcatcttccgctccttcagctccaacctcctcatagtccttctcaagagcagcaaggtcctcacgagcctcagaaaactccccttcttccataccctcaccaacataccagtgaacaaaagccctcttggcatacatcagatcaaacttgtggtcaatgcgagagaacacctcancaactgcggggttgttgctgatcatgcatacagcacgcttgacctttagcaggtcaccaccaggaaca

SEQ ID NO: 230045 - DNA, 566 bp, Glycine max
  unsure (1)..(566): unsure at all n locations
gacttgcttccaagatggttctgctatttaagctctgggatgacgttgttgctggccctcaacctgagcgtggccttggcaagctcagaaaactcaccaccctcaaaactattgatgaaggagacagtagcaagctgcagaagacgttgtcgatgccgtcgacaccgacaaccccgatgactcccacgactccaacgacaccgggatccgcgcgtaaagctgacaacgtttggaggagcgtcttccatcctgggagcaactccgccacaaagaccatcggtgctcagatgtttgacaaaccacttcccaacactcccactgtctacgactggctgtacagtggggagaccagaagcaggcaccgctgaaaggataagctaagaaaaccgtgggttgcatgtaaatattgtcgtttttcgttaagcacctgccacgtttgaatctactactaccattatgcgtcggaaattaattgctctgttgctgactcaaatatatattactagcgtgtttgattntgagcaagtgaatgtaaaatgctaaataattaccgtaattagcatcag

SEQ ID NO: 230046 - DNA, 541 bp, Glycine max
  unsure (1)..(541): unsure at all n locations
ggttcaagttcgaacagaggcacgggatagagcgcgtgagagtggcgcgcgtgtggaagacgaggcaggggcagcacttcgttgtggagtggcgcgtgggcatcactctcttctcagactgcgtcaactcgtatctccgcgatgacaactctgacatcgttgctactgataccatgaaaaacacagtgtatgcaaaagcaaaggaatgctcagacatactctctgctgaggactttgctattttgcttgctaagcactttgtatcattttacaagaaggttactggtgctattgtgaatattgtggaaaaaccatgggagcgtgtcattgtggatggtcaacctcatgaacatggtttcaaacttgggtctgagaagcatacaacagaggcaatagtacaaaagtctggttcacttcagttgacttctggtattgaaggattgtcagtgttgaagacaacccagtctggttttgtgaatttcataagagacaagtacacagcacttcctgatanccgtgacaggattctggcaacagaagt

SEQ ID NO: 230047 - DNA, 567 bp, Glycine max
aaaaatatatattaaatttttttcactgggtattaaaccataaaccacgtgtttaccagtttggtgacaactctgggtttataaatcttgactataatgtatgagtatgaccataaaaaagcattgcatcaacgtcatagtaagacataattcagtttccataataaggacactaggaatttattggaatttaggacatcaaaaacttaacattggtgtaacttgcagaatatccctcctggaagttattcatgcataatagttctccacgaaacaaatacaacgatgacaaaaaccagaattacaagacacattaatggaaagcactatctctaaggccaggttcggtattttaggctgcactggcaatccaccacagaagggatgagcaccatagcttctgcagtttctacagctttgaccaaaggcggctcaagctagcttgaattgacccatgaggctcatccgttggcaagtacacatcatcctcaaacttcacaataggaccatccttgtttgagatattgacaggtaagaaatgaagatttggcatctttagactgacat

SEQ ID NO: 230048 - DNA, 544 bp, Glycine max
aaacgattggagaattattacccggtttttttccgtggagtcaatggaacagttgctcatgaattcatcattgacttgagaggctttaagaatactgctggaattgagcctgaagatgttgcaaagcgcctcatggactacggttttcatgcaccaacaatgtcatggcctgtgcctggcacactcatgattgagcctactgagagtgaaagcaaggccgagttagacaggttctgtgatgctcttatttccattagacaagaaattgctgagattgagaaaggaaaggttgacattaacaacaatgtacttaagggcgcccctcatccaccatcactgctcatggctgatgcatggacaaaaccatactccagggaatatgcagccttcccagctccttggctccgtactgcaaagttctggcctaccacaggacgtgttgataatgtgtacggtgaccgcaacctcatttgcacccttctcccagcatcacaggcttgtgaagaacagcagctgccacagcataatgtgttcaaatgacaac

SEQ ID NO: 230049 - DNA, 489 bp, Glycine max
cctgtgattggatgaaacttatgagcaggggattatcatcattggcacatatgatgaagcaatattcaacaagtgcaagaactgtatgaataggaataagagtttatgtacaacgggaaatgaaaatagttgtcatttgaacacattatgctgtggcagctgcttgttcttcaacagcctgtgatgctgggagaagggtgcaaatgaggttgcggtcaccgtacacattatcaacacgtcctgtggtaggccagaactttgcagtacggagccaaggagctgggaaggctgcatattccctggagtatggttttgtccatgcatcagccatgaccagtgatggtggatgaggggcgcccttaagtacattgttgttaatgtcaacctttcctttctcaatctcagcaatttcttgtctaatggaaataagagcatcacagaacctgtctaactcggccttgcttttactctcaagaggctcaatcatga

SEQ ID NO: 230050 - DNA, 556 bp, Glycine max
ggtgctgctgacaagccaattatcgttgttaactacaagggtgaagagaagcaatttgccgcagaagaaatctcttccatggtgctcatcaagatgcgtgagattgctgaggcttacctaggctccacagtgaagaatgctgttgtcaccgtccctgcttacttcaatgattctcagcgtcaagctaccaaagacgctggtgtcattgctggtctaaatgtgatgcgaattatcaatgagcctactgcagctgccattgcatatggtcttgataagaaggccacgagtgttggtgagaagaatgtgttgatttttgaccttggtggtgggacatttgatgtgtctttactcaccattgaggagggtatctttgaggtgaaagccactgctggtgacacccatcttggaggtgaagattttgataacaggatggtgaaccactttgttcaagagttcaagagaaagaacatgtaggacattagtggacaccccagagcacttagaaggttgaggactgcttgtgagaggggccagagaacactttcatcgactgctc

SEQ ID NO: 230051 - DNA, 459 bp, Glycine max
aactatatgctttatgcaacgttcatatcagaagggggaaatagtttgaatcccatccaacaaaaatcatgcgattaaaatccaattaaaaaagcataaagtaaaataagtttttaaaacaggtatctggaggaaagcaactacatttagtccacttcctcaatcttggggccagcaccactttcaccagaaggaggagcagcatactcatcctctggtgcaccagcaccacccacgtgtggaccagcaccaccttggtacatcttggcaatgattggattgcagatgctttccaattccttcattttgtcctcaaactcatctgcttctgcaagctggttgctgtctaaccactggattgcttgctcaattgcatcctcaatcttcttcttgtcagccgggtcaagtttctcaccaatcttgtcatccttcacggtgttcctcatgttgtatgcatag

SEQ ID NO: 230052 - DNA, 521 bp, Glycine max
ggagaatggaattgaaattcaagagtatacagccgtatgctctgatgcgacattgcttgcaactgatgagctagatgctgtatctactgccaaggctgctttagccgaaacagaggccagaaaaattcccagtgaaattgataagagtgtaaatggtgaacatcaagcagaagaaaatagtaatgacctcatatgggctgatccagtttcatgctgttatgcactgtatgcaaagttgaaccccgatacagttctcttgcagcaatcacctttagcccttgcaaaagctttaaagaactcggtggagttggatgggttaaaaaaggcacatattcgggatggtgcagcagttgtgcaatatcttgtctggctggataagaagatgcaggatatttatggagcttctggttactttttggagaaggattctgtgaaaaaggagaaacatttgcaatctttgaaattgactgaggtgactgtaagtgaccagcttgaaggttttcgagcatcaaaagagcatt

SEQ ID NO: 230053 - DNA, 549 bp, Glycine max
  unsure (1)..(549): unsure at all n locations
gaaaaaaaaagaaagggggatgtctgatctgncatcgatngnagcnaattgaatgatttaaccgcgacgacccgctcactagtgcggcggaccgcccttggttttgggtttcgagtctatttttttatgcagcaaaatattgatatattggatatgctgggcatagaaatccgaaggaataaccattcccaaggatatctaaaatctagattacagaattatggatacggaagacactaaaattacgctgaaccatcttgaagctattgaactttgcaactccaaacacaggtcatgcacctacagggtcaggggctttcttcagccatgcattttaaactacatccaaatatggcgccagaataatcctacatgtggcgtgataggagtacaaccaatgtagctcctcgggacttagaaggtgcaggtcaatcaactgcgcctgatatggcgcccaggtaatgggttcaaaagataagtaacctgtatcaccaaaagtgaaagtgggatcagcctccttgacaataagcacattctccaggcttatcc

SEQ ID NO: 230054 - DNA, 537 bp, Glycine max
  unsure (1)..(537): unsure at all n locations
gcagaagttggaaagctttggcgttgtatagaaggaattagtattcaaagaggttcttccacatacttcaaaattaatgactgatgtatttggcaactatgtaatccaaaagttttttgagtatggaagccctgagcagagaaaggaacttgcaaatcgacttcttggccagatactgcctttaagtctgcagatgtatggctgtcgtgtaatccaaaaggcacttgaggttatcgatcttgaacagaaagctcaacttgttcatgagctagatggaaatgttatgagatgtgtccgtgaccaaaatgggaatcatgtaatacagaagtgcattgaatctattccaactaaaaacattgactttataatatctgcatttcgtggtcaaattgctcttctatctatgcatccatatggttgccgagtcatacagagagttctagagcattgttcaaatgaggctcaatgtcaagttattgctgatgaaatcttggagtcagtttttactcttgctcangaccagtatgggaattatgt

SEQ ID NO: 230055 - DNA, 557 bp, Glycine max
aagtatacaaatctttgattggccccacactaaaaccacagtggagcagagaatatccagtaaatttacatcacgaaggatttcctcccaactaattatacccaagcaatcatacaaaccaatttacttaactgacattacattaagtgcacaacatgtatgcatacactgatgtttcttgaagccatgaatgtcggaactatcagatatgaagccacagtagcattcgttttttcaatgggaaaagcccaaagatccaatatctcatctgtctcctgtaacacagaaatactagttgtgcttgcatggaagcattgcgcaagacctttattgtcatcatgatccatttgtttggttctcttctccaagtagctgttcaaaccgagccacaatgtgttttccataagtgtattttttcaaagcatgagcatgaagtcttatgcgagaaagtaatgttgctcgctgattttcagaacagatctcaaaaaccttctggatcacataatttgcaaattggtctttcatcattgtcaataaattatcattttgtttgtcat

SEQ ID NO: 230056 - DNA, 454 bp, Glycine max
tatctctccgccacgcgccaccatgtctgtctcacactccctccagctccgcctcttcacccctccccccaccgccattcccacccacaaccacctgcctccccccacccttcttctgccgggcgccgcccaccgccgcttgctgtccctccgggcctccttctccccggaaaccctggtctccgacaacaacggcgccccctccgccgcgtccacctacgatccgggcgccgtcgaggcggactccgtggcggaagccgagctcaaggagaacggattgcgcagcacgcgcaggaccaagctcgtctgcactgtgggccaccgcacgtgcgggtttgagcagctggaggcccatggcgtcggaggcgtgaacgtcaccagaaccaacatgtgccacggcaccagggagtggcacatggaggtcatcgaccgcgtccgacggctgaaccacgag

SEQ ID NO: 230057 - DNA, 540 bp, Glycine max
  unsure (1)..(540): unsure at all n locations
gtcatgggcaaggtcaagatctgaatcttcggatttggaagaattggccgtttggttgccagagtcgctctgcaaagagacgatgtggagctcgttgccgttaacgaccctttcattaccaccgattacatgacatacatgtttaaatacgacagtgttcacggacactggaagcatcacgatgtcaccgttaaggacgagaagacccttctcttcggtgacaagccagtcactgtttttggacacaggaaccctgaagagatcccatgggggtcaactggagctgatatcattgttgagtccaccggagttttcaccgataaggacaaggccgccgcacatttgaagggtggtgcgaagaaggttattatttctgcccccagtaaggatgcccccatgtttgttgttggtgttaacgagcacgagtacaagccagagcttgatattatttccaatgctagctgcacaaccaactgccttgctccacttgctaaggttattaatgacaggtttggcattngtgagggtttgatgaccact

SEQ ID NO: 230058 - DNA, 483 bp, Glycine max
tttcttttttttttttttgttttaattctcttatttctttcgcaaccaatttttttttttgggttttttttttattttggccgcccccaaaaacaacaaagcgcccgggccctcagggaggtttttatatttcaaaaactccatccccttccccgaaaggaccaccaaaaaaagcttattgcccctaacagggggacaacaccgggtccccaaaccggagggttgaaaccccctatttcggcccgggcaaaaagacccttaatgggggctaggcccccgcccattgtggttaaaccagctttttttttttggaggcaaccttaaaaagggcttttgggaacaaaaacaacacgggtaatgccacgggggctggatcccccctcggggggtaccaagagacaaggttaacaaaggttttatttaatgccagtcccccccttgggataaaaacacttggggtggttttgcccccaaggggggggg

SEQ ID NO: 230059 - DNA, 592 bp, Glycine max
gagagagagagagaaacagattcaacatccaaccatcaagggaagttagtgagagagagagagagagagagagagcggaagatgaatggtggtgaatcttatggtgctattgagacacagtacataagaaggcatcacaaacatgaaccaagggaaaaccagtgcacctctgcacttgttaaacacataagagctcctgttcaccttgtgtggtcgctggttagaagatttgatcaacctcagaaatataaaccatttgttagcaggtgtatcatgcaaggggacctaggcattggaagcgttagagaagtgaatgttaaatctggccttccagccacaacaagtactgagaggttggaacaactggatgatgaggagcacattcttggaataaggatagttggaggtgaccacaggctgaggaactattcttccataatcaccgtccatccggaggtcattgatgggagacccagtacaatggtgattgaatcatttgtggtggatgtgcctgatgggaacaccagggatgaaacttgttactctgtggaggctttgatcggtgtaacctaagctctctagctgatgtctc

SEQ ID NO: 230060 - DNA, 537 bp, Glycine max
ggttcaacaaatatatttacttataactatagggaacacaccatgcacaaaatccagaaagaatatagcaggtaaaaacttccacccctacatccctgtgttttcatgaggccctgaatctcatcttacaaatattgaagaagagaaacttagctgttcaaaagagtgattacacagctaaaaagtgcaagaggggtggtaaggggaatgtatccatgatacagaggaaaaaagttccaaaacttctgggaacatggaaggtatactccaaccaatgtccacacttgaactacgatcagagagcaatggatcatgtaatttgtatgaacccagcttcattcttccctagacatgcttaatggttgataggatcggttcgaccttgcacggccattctctctgagacatcagctaaagagcttaggttacacctgatcaaagcctccacaaagtaacaagtttcatccctggtgttgccatcaggcacatgcaccacaaatgattcaatcaccattgtactgggtctcccatcaatga

SEQ ID NO: 230061 - DNA, 546 bp, Glycine max
cctgaaacaatttctccaaccctagcgttcacacacactcacaatcctttctctctctgaaaccgtacgttacgtaaccgtaggcgatatcacaaattcacagcacacacagtccccactctctacaatggaccggtcaacgcagctcctacggcaagcgctcccactcgcactccgattccgacgccggctccaaaaacaagcgccgcaaccccgccgccgacgagtcctcctcctccctcatcaccgatgacgacaccgtcttccgctacctctgccccgtacgcaagatcggcagcgtcattggccgcggcggcgacatcgtcaagcagctgcgcgccgacaccaaggccaagattcgcatcggtgacgcgctacccggctgcgacgagcgcgttgtcaccatccacagttcctccgaggagaccaaccattttgacgagaccgatgatctcgtctcgcccgcgcaggacgcgctagttagggttcaccagcgcgtgattgcgggaggacgcacgtgaggatgaggacgaggagaggaatcat

SEQ ID NO: 230062 - DNA, 488 bp, Glycine max
gcaacgtcaaactgagaactgtggcggttgcggcaaccttcgatcttaatcccacggggcaacgttggatctgttgaacttcttcttttatatgcactctgtgatttcgctacaccctcactccgcttcgccaccctatgggggacaacaacagcaacaacgatgccttcatgcgcaaccaaaacgccgccgttcaggcccgcaccaaagcgcagaaccgttccaacgtccttcagctcaaactgattggacagagtcacccaaccggtctaacagcgaacctgttgaagctcttcgagcctaggcctccgttggagtacaagccgcctccggagaaacggaaatgtccaccgttatcagggatggctcaatttgtgagcaagtttgcccagcctggcgatccagaatatgctccacctgtcccagaaaccgagactcctgcacaaaatagagccagaatacacaagctaaggctagagaaaggagct

SEQ ID NO: 230063 - DNA, 524 bp, Glycine max
ctggaatcacaatcctgtaacaaaaacttcttagcatttaacatactactagacaacatgaccaccacattggaaagaggtttctcggaagagcaagaagctctggtggtgaagtcatggaatgtcatgaagaagaattctggagagttgggtctcaagtttttcttgaaaatatttgagattgctccatcagctcagaaattgttctcattcttgagagattcaacggttcctttggagcaaaatcccaagctcaagccccatgccgtgtctgtctttgtaatgacctgtgattcagcagttcagctgcggaaggccgggaaagtcactgtcagagaatcaaacttgaaaaaattaggtgctacccattttagaaccggcgtagcaaacgagcatttcgaggtgacaaagtttgcacttttggagaccataaaagaagctgtaccagaaatgtggtcaccggctatgaagaatgcatggggagaagcttatgatcagctggtcgatgccattaaaatctgaat

SEQ ID NO: 230064 - DNA, 509 bp, Glycine max
ggtttgctcagccgatttttgaactctttgacggcattgcagagagaatgcaaagcaagggaccttaccttgttcttcatctaagaatggagaaggatgtgtgggtgaggaccggatgcctccccggtttgagtcccgaatttgatgagattgttaacaatgagaggatacatcggccggagctcttgactgcaagatcaagcatgacttaccatgaaaggaagatggctggtctatgccccttgaatgctgtggaggttactaggcttttgaaaggtctaggagctccaaagaatgcaagaatttactgggctggaggacaaccattgggtggaaaaaaagccttgcttccattgatccaagagtttcctcatttttatagcaaggaagatcttgccttgccaggagaactacaaccatttgcaaataaggcttctataatggctgccatagattacatagtctctgagaagagtgatgttttcatgccatctcatgggggaaatatg

SEQ ID NO: 230065 - DNA, 461 bp, Glycine max
ggctttgtgagtctgttgacttataatttaaataccaaggatgatctgaagcttcctactgatgaggcattgcttgctcagattaaagatggattttctgaaggaaaagatcttgtggtttctgttatgtctgcaatgggagaagaacagatctgttcactgaaggacatcggtcccaaaaattaatatgatgctatggctgtagctatagctgatagcacgctttttcttcttatgttgctaacaggtagtatattctccgatacatgtgtgcaaaataaacttcataagatggaaatttgcctgtgcttgaaactcaaatgcttgggatagaagaaattgagctaagtttagcttttgtccattaattaaggaacacaacggtcttgggtggatgaaattctcataaacatctcatattatttgtttttgttgagtttaatatataaccctatttgttc

SEQ ID NO: 230066 - DNA, 462 bp, Glycine max
gaacaaatagggttttattctatactcaacaaaaacaaataatatgagatgtttatgagaatttcatccacccaagaccgttgtgttccttaattaatggacaaaagctaaacttagctcaatttcttctatcccaagcatttgagtttcaagcacaggcaaatttccatcttatgaagtttattttgcacacatgtatcggagaatatactacctgttagcaacataagaagaaaaagcgtgctatcagctatagctacagccatagcatcatattaatttttgggaccgatgtccttcagtgaacagatctgttcttctcccattgcagacataacagaaaccacaagatcttttccttcagaaaatccatctttaatctgagcaagcaatgcctcatcagtaggaagcttcagatcatccttggtatttccattatcagtcaacagactcacaaagccc

SEQ ID NO: 230067 - DNA, 592 bp, Glycine max
ctctgccttgctcatttacactcctctccaacctttcactttcagctttatttgaatccctctctctcctttccaaatggccagcgttgaggttgcacatcaaacaccaacaacagttccagaaaatgaaacaaccgaggtaatcaagacccaggaaacaaccccggaaccagtaccagccactgaggctcctgcaacagaacaagcagcagctgaggttcctgctcaagaagaacaacaagcaactgaggttcctgccccagaatcaaccaccgaagcaccaaaggaagaaaccaccgaagcaccaacaacagaaacagtagaaacaacaactacagaagaagccaagccagaggagcctaaagaagttgcagttgagaccgaggaggtggtgacaaaggagacagaggaagagaagccagcagcagaagagaaatcagaggagaaaactgaagaagtgaaagaagaagcagaagagcctatagatactactgaaacagaaacagaatcagcaccagcagcaaccacagaggaagagaacaaaccagctgagacagtggaagccccagtagaggtcctggtgagaaaactg

SEQ ID NO: 230068 - DNA, 493 bp, Glycine max
ggaatcatcatttattcaaacctaaagaaacacaataacacatcatcacaaactcatgtaaccctgccaataaaataaaccctcatccctaaactccagcaccagcagcagcttgctcacttcaatacacaactcctagaatttctcatgtcaccacgtggtaagcacgctgatgtggagccaagtgttgtgctcacacgtaggtataccctccataatacaaccaaagacttaaccatcatataataataatatattaataataaagtaaactaaagaaataaataaaaaaaaaagcttttcaacatgacatgcaaaatggtagacctaatgatccccacaactaggaccatttttaaacttgtttttctcactcacactgtccataagtctaagcttcagttttctcaacaggaacctctactggggcttccactgtctcagctggttagttctctctctctgtggatgctgctggtgctgattctgtttc

SEQ ID NO: 230069 - DNA, 578 bp, Glycine max
caaaaaccacttacaaagtagtactacttggtttcaatcaaaacaaaaactcacactttggtggccacagcaacaataacaatggcagcctcactacaagctgcagctaccttcatgcaacccaccaaggtgggcatggccactcgcaacctcaaatctacacaatgcatttctaaggcttttggcttggaacccgctgcagctaaactcatttgctcccttaagcccgatctcaaagattttgctcaaaaatgtgtcgacgccaccaaaattgcaggattcgcccttgccacctcagctctcgttgtttctggagcgagtgcagaaggtgttccaaagaggctaaccttcgacgaaatccagagcaagacatacttggaagtgaagggaactggaactgctaatcagtgcccaaccattgaaggtggagtggactcatttgccttcaaggcagggaaatacaaggcccagaagttgtgcctggaaccaacttccttcacggtgaaagcagagggtgtggccaagaatgccccgctcgaatttcagaacaccaagctcatgactcgtctgacctacac

SEQ ID NO: 230070 - DNA, 587 bp, Glycine max
gctccaaaaggctcactcattctttttaattgtaagcattataagggaagtcattataatatacacacatgataacgctctgagtgcttcgccaactggggtcacaagaccgtggatggagttacaagaaagtagagttacaacattaagaaaaggtctatgagtcaagctgagcataccagatgccttgaatcttaacatccttaggagctttagcccccaaatcagtatcagaaggctgaacactctcgaacaccccaataacctcaccagtctcaggcttggacttggtgacactcaaggtgattttccctttggaagatgaagcacttttattgttctccttggcaagttcctcttcatctcctcttccaccagcaggcaaagcaacagcattgtcataaccagttgaggcaccccttcccttggggtccaagaaagaggaaccacggtaagacggcactaggaactccccactgaagctgtctggtttcccagatgccaccaactgcttaatggtgaagaagaatggcacactcttctcccctggaagctgttcagtgacagcagcatagtcaattccgctt

SEQ ID NO: 230071 - DNA, 494 bp, Glycine max
gacggcctaggatacatcgtacacagctggacgcgtactgcagccgtgataagctcggagcttagtcccaattttataggggtgtatttattttccgttggcttctgcagatgttgagtaccgttgctgtgtcggtgggctcgcttgggccactgacgaccatgccctcgagagagccttctctcagtacggcgaaaatcgttgaaacgaagattatcaacgatcgtgagactggcagatccaggggttttggatttgtgaccttcgcctcggagcagtccatgaaagatgcgatcggagcgatgaatggacagaacttggacggccgtaatatcactgtcaatgaagctcagtcccgcggtggcggcggcggcggcggcggaggaggaggaggatacaatcgtggtggcggtggatatggtggtcgtagtggcggtggcggtggcggtggtggataccgtagccgtgacggtggttatggcggtggctatggt

SEQ ID NO: 230072 - DNA, 586 bp, Glycine max
ccatcttccactctttcacactcacctttggctccaatctcaaaactcattcctttcctattcttaacaacccttttagtttccctccaagttaatgccagagacagccaattcttcagcaaagtcacccctctcaacaacaacatcaaagagactgagactcccaaaaatgaaggccaagtaaacaagccagaacaacaaccaacattcattcctgaaactgaaaacagttatggcctatatggtcatgagactggtctgcaccctcccaccactacaacaactaatgctgcaccctacaccaccacttacaagccatacaaaactaccacagctgaagaggacactgccaagtactccaacaacaacaacttctacagcttcaagaaggatggctacaacaccaaccaaaatgagttgagtgaaacaacaagactcacaggcacttcttacaccaacaacaacaactacttctacagcggtaaggatgctcttgctaagcagaatgaattgagtgatacaaagtacactgaaggtggatacaacacggtaaatcagaatcagcacaacaactacttctacaacg

SEQ ID NO: 230073 - DNA, 505 bp, Glycine max
ctcttcagcagctgctgcagcttctatctccttcttctctcgtctcggatcttcctccgacgcaaaagctcctcaaatcggttcgtttcggtttccggagaggtcgcttgtttcgtctgttgttgtcaatgtaactcaacgacgctccttggtgaggccactcaacgccgaaccgcaacggaacgattctattgttcctcttgcagcaactatcgttgctcctgaggttgagaaggaagaggaagattttgagcaaatagcgaaagaccttgaaaatgcatctcctcttgaaattatggatagggccctcgagaaatttgggaacgacatcgctattgcatttagtggtgctgaagatgttgctttgattgagtatgcacatttgacgggtcgaccctacagagtgtttagtcttgacactgggagactgaatccagaaacctacaaattttttgatgcggttgagaagcattatggaattcacattgagtacatgttccctgat

SEQ ID NO: 230074 - DNA, 533 bp, Glycine max
  unsure (1)..(533): unsure at all n locations
cttttgtgttgtgttgggaaaccctattccccgttttcggtgagatcgagatcgatcgaacatggatgaggagtacgatgtgatcgtgttgggcacgggtctcaaggagtgcattctcagcggtcttctctccgtcgatggcctcaaggttctgcatatggataggaacgactattacggaggagaatccacttcgctcaatcttattcagctttggaagagattcaggggagatgacaagcctcctccacatttgggcgctagcagggactacaacatcgatatgaaccccaagtttattatggctaatggcaatttggtgcgggttctcatacataccgatgttacaaagtatctctatttcaaagctgtggatgggagctatgtgtttaataaaggaaaggttcataaggtgcctgcaaacgacatggaggccttgaagtccccacttatggngctatttgaaaaacgccgggcacgcatgtttttcatttatgtgcaaaactacaacgagagcgatcccaagacccacg

SEQ ID NO: 230075 - DNA, 540 bp, Glycine max
gtatgtaatggttggagagacgtgcaattaacatttaacaatatgaaaataacactacattaccaaactaaaaccactgcagaaggcaatgtatgtgaacacacaacagagcttctggacgggaaaaagttccccagccacacaaatcttgttttaaaaaaagaaaatatttattataaaacgttaataacattcgttgtcaagtccatcatcacggaacccatcagcaacagatcatcaccgagttttctttactcttctgcagcactagcagcactaagatccacactaaggtcaataacctttccagttatcaatgtatacatgttgagaacgtcatccacagtcgactcaaagtgagtagtagcatcataacttgttgatataaagcagttgtccaaagtgggttcgttgactggttcatatctgtcatagatatcaaaaaatatctcatcaacaggtcctagaaggtcaattccaggtttcagttcaattgcccgctgatctgtctttgcctcagttgatacaaaatgcataaat

SEQ ID NO: 230076 - DNA, 524 bp, Glycine max
cagaaacaagatggcctatgctatgtttggattcacattccagttggtagagttcaagcagatgatatggatgagttggcgcgattggtggacaaatatggaactggagagctcaggctcacagtggagcaaaacataataatcccaaatgtggatagcaacaaaattgatgccttgctcaatgagcctctcttgaaggagagattctcacctgaaccttctctattgatgaagacactggtggcatgcactggcaaccagttttgtgggcaagccataattgagacaaaggaaagagcattgaaagtgactgaggaagtggagaggcaagtggctgtgactaggcctgtgagaatgcattggactggctgccccaacacttgtggccaggtgcaagttgctgacattggtttcatggggtgcatggctagggatgagaatggtaaggccactgaaggtgtggatattttcctgggagggagaaatggaagtgattcacatctagctgaggtgtattaagaagg

SEQ ID NO: 230077 - DNA, 424 bp, Glycine max
gtatattattctatttacggaaaaaaaaaaggggggcttagggactagcaaagaagggacatgtcttatccaaaagggtacatgcatatgatataaagcatgcttcatgatcatccctttttcttttatgtagaggacactgattcttttgttcagggacaatggcagatttagtaaagaaactaaaattgccaatggccataaagaggaatcttccccttcctctctattccttgggacagcccccaaaggctttactagtatgtctaccccaataggcaccaagttcttgcaaggcacaccctttttatacacctcagctagaggtgaatcacttcccattctccctcccaggaaaatatccacaccttcagggggcttaccattgttatacctagccctgccccccatgaaaccaaagtca

SEQ ID NO: 230078 - DNA, 537 bp, Glycine max
agtatcagcagcagcattgtccagtgtcacttagccgctatgagtcacagaagagaagggactggaacacttttggacaatacttgaagaaccagagacccccggtacctctctctcagtgcaattgcaaccatgtgctcgatttcctccgttatctggaccagtttggcaagaccaaggtccaccttcaagggtgcatgttctatggccagcccgaaccccctgcgccctgcgcctgccctcttaggcaggcctgggggagtctcgacgccctcataggcaggctcagagctgcctatgaggaaaacggaggctccccagagactaacccttttgccagcggctcaatccgcgtctaccttagggaggtcagggagtgccaggctaaggctagaggtatagcttacaagaagaaaaagatgaccacaaaggaaaatgctgaagaatcatcaaactcttccatccacttctcttgaatattcttctctggaagttgtggtttcacctaatatgggataatggggcatatatatataa

SEQ ID NO: 230079 - DNA, 469 bp, Glycine max
  unsure (1)..(469): unsure at all n locations
gataagctgttttccgtcaattcactgtcagcttcagcgtatgatggtgaaaagaacatcttcagcgcggtgcctttgccggaggaaacatttaccgtggacgtgtccaaaggagaggacgaaaggcctgtttcttatttggtctctctgacattggtgagtaggctcgagcttcggaagttgagggattacctcagtggaagcgtgctttcgatccctagggatgttttgcacggcttggatttggtggtgaaggaaaatccttcgaagcagtgtgtttccttggggcggtgcttcttccccatgaaccctcctttgaggaagaaagatcttaaccatggcataattgcgattggagggtttcagcagagtcttaagtctacttctcagggattgtccttgtgcctggactattcggttntgtcctttcggaagaagctgttggtgttggattttctgcacgagcata

SEQ ID NO: 230080 - DNA, 521 bp, Glycine max
cgaggccatcagggttggaggatccaactcacagtcatgccacccaggacctttacgattcaattgctgctggaaactatcctgagtggaaactctacatccaaacattggatcccgaaaacgaagacaggcttgactttgacccccttgatgttactaagacctggcccgaggacgttttgcccctccagcctgttggccgcatggtcttgaataagaacattgataacttctttgccgagaatgaacaacttgcattttgccctgccattattgtacctggtgtatactactccgatgataaattgcttcaaactcgcgtattctcctatgctgatacccagagacacagacttggaccaaattatctgcagcttcctgctaatgcccctaagtgtgcccatcacaacaatcaccatgatggtttcatgaatttcatgcacagggatgaagaggtcaattacttccctcaaggtatgatcctgtccgtcatgcggaaaaggtccccgttcctcctcgta

SEQ ID NO: 230081 - DNA, 378 bp, Glycine max
  unsure (1)..(378): unsure at all n locations
tttcctaattatctcagtcntagnancnaanttaaggggtagacgcgcatactcatcggcggccgcccttcctttttttttttgactattataacttttcattattattatgcaaacgaaagataaaagaagagtaggcccaagtaaacagagaatcatggaactgtccagatcctcatgcttatcacactgtgcctatagtgatttaagcggacaagtcaccaagtggaggtcatccaagcaacaatataccccatagcaatactgaaataaaaggaccaagcctttcaaatgaatcctgcggcaccaacttcttacttggacccacatctgcatctcttaaaagctaggggtgccaccaccaagcaaatatacttg

SEQ ID NO: 230082 - DNA, 573 bp, Glycine max
  unsure (1)..(573): unsure at all n locations
ggcggcttgaaatcgctggatcgattctcttacataaactcagttgtttatcctctgacttcaattcccttaattgcctattgtgcattgccagctgtctgtctgctcactgggaagttcattgtccccgagataagtaactatgccagtatcattttcatggccctcttcatctctatagctgcaactggcatcctggaaatgcagtggggaggtgtcggtatacatgactggtggaggaacgagcagttctgggtcattggtggtgcctcctcacatctctttgctctctttcagggtttgctcaaagttctggcgggagtcaacacaaacttcacagtcacatccaaggcagcagatgatggagagtttgctgacctctacatcttcaagtggacatccttgttgatccctcccttgaccctactaatcataaacatcatcggagtcattgtcggtgtctcggatgctataaacaatggatgattcatggngtcctttgtttgggaggctattctttgccctttgggtcattgtacacctttaccctttcctcagggtgtcatgggaaaa

SEQ ID NO: 230083 - DNA, 589 bp, Glycine max
ctacaatctttgaaccttggtatggtgttataatgttggcgatgttggagtgactactttagcatatgggtgtcctgatcttaggatagttgacttgtgtggctgtgtccgtataacagatgacagtgtgattgctttggcgactagatgcccccatctgaggtccctaggactgtactactgcaagaacatcacagatagagcaatgtattccttggcacacagcaaggtgaacaacaggatgtggggaactgtgaaaggaggaggaaatgatgaagatggtttaaggactttgaacattagccaatgcactgcactcaccccatctgctgttcaagctgtttgtgactcattcccttctctccacacatgctcagggaggcactcactcatcatgagtggctgcctcaacttgacatcagtgcattgtgcctgtgctgtccatgcgcaccgtgcattcaccactttcccttatcctgcccattaagaagctcatgcttttgatgttgaacacacttcgaggatgtgccccttgaaagggctcagagagtgatagaagtgaaatccaccccccttgagatgtatgcct

SEQ ID NO: 230084 - DNA, 456 bp, Glycine max
actaggaacatgccagctctagcatccaaaatgtctcgagcttacacaattcggggattaaagcaaaccgagtttaagacataaagttgaagaaaagatgtacataatcagctagattcaagtctctcttatgcaggcatacatctacaagggggggggatttcacttctttcacttctctgagccctttcaaggggcacatcctcgaagtgtgttcaacatcaaaagcatgagcttcttaatgggcaggataagggaaagtggtgaatgcacggtgcgcatggacagcacaggcacaatgcactgatgtcaagttgaggcagccactcatgatgagtgagtgcctccctgagcatgtgtggagagaagggaatgagtcacaaacagcttgaacagcagatggggtgagtgcagtgcattggctaatgttcaaagtccttaaaccatctttatcat

SEQ ID NO: 230085 - DNA, 529 bp, Glycine max
  unsure (1)..(529): unsure at all n locations
ctcgggctcgctccctaagagcgtggtctacgcgcctttcctcaccgaggttctcttcttgaagaaccagttcgaagggtgtctgcccttcgaaatcggttacctcaagaaggccgtagtgttcgatataagtgaaaatctcttgaccggtcccatcccgctctccttcggatgcctgaagaaaattcaatttctcaatttggcgcacaacaagctctacggctgtgttcccgacaacctttgccaaattccttctatccgcaacaatgggaatctctctttggcgaacaattatttcaacgaaattggaccttcgtgttggagtctgataaagtccaaggttttggatgtgtcaggaaactgcattccggggcttcctaaccaaaagtctcccaaagaatgctaccagttttacaaaacaaagaaaacatgtccgaacccgaattcattttactacgttccgtgcatatcgtactgggggaggcagagcangcccactagtccaccttctgagccagtgacttacaag

SEQ ID NO: 230086 - DNA, 573 bp, Glycine max
  unsure (1)..(573): unsure at all n locations
gaaatttcccgaaggaggaggaggttctgatcttctttcttttttgtctggttccttttcttccttcaaccaatttcgagatccgaaaccggcatcagatccgatccgaaatgtacggattcgaagctctcaccttcaacatccacggcggcttcctagaggccatcgtccgcggccaccgcgccggcctcctcaccaccgccgattacaacaacctctgccaatgcgaaaccctcgacgacatcaagatgcacctctccgccaccgagtacggtccttacctccaaaacgagccttctccattgcataccacaacgattgtggagaagtgtactcttaagctggttgatgattacaagaacatgttatgccaagccacggaacccttgtcaacctttttagagtatatcacatatggtcacatgatagacaatgttgttctgattgttactggcaccttgcatgagagagatgttcaagaattactagaaaaatgccatccactcggcatggttgacagtattgctactctggctgttgctcagaatatgcgggnagcttacaggctggttc

SEQ ID NO: 230087 - DNA, 538 bp, Glycine max
gatactcatattttgttagcaagtttattccatagaaatatttactgcaaaagtcacaacatacaaattgaatcttaacatctttaaaactgaacatatttcaatcaaatttgactaaaaaaatcttcctttcatattacagaagatcttatcagcataagattaattatttttatctcaatcttctgaacagtgtctgtctagtgtctaccaatcaacaactcagatggagaatgcagaaagtatacaaattgtcccaacgaacatacaaactataacgagccatccaactaaaatatgaagacaacactgtcatgaactctggacttctgattctgagcaacacattctgaaatccacattaagttcctgatctcctgttgccttaacctcatatatgcgaagaacacagcataatgaaactgttgctcaaaagccaagcaaagccttttcacctccttctcgtagaatgccttgtcaagcatctggctctctccatatgatagccttagcaaaaaatagattgatagggggggat

SEQ ID NO: 230088 - DNA, 543 bp, Glycine max
acgagcaatgcctttaattgtagaccctgggctttacatgtcaaccaaatctgatgtattttgggtcaatccaaagagacctttgccaacagcatttaaattattcactggttcagcatggacggtattatcacacgactttgttgaatatattgtatggggatgggacaatctgccaaggacccttctcatgtactacactaattttctgtcttcccctgaaggctacttccagactgttgcatgcaatgcgccagaatgggctaaaacccttgtcaatagtgacttgcattacattgcctgggatgtccctcctaaacagcaccctcacgtccttaacatcaacgacacagacaaaatggttgaaagtggtgctgcctttgcaagaaaatttaagcaagatgatccagccttggattggattgataaaatgattctccgcaagagaaatggactatttccactcggtggcttggtgcaccggcagacccaaatgctccgagattgggaacatttataaactcatacctggtcccggatctc

SEQ ID NO: 230089 - DNA, 544 bp, Glycine max
  unsure (1)..(544): unsure at all n locations
gaggaacgctagggactctcatgttcttttgttagcttcacttcccattgggtttgccgtcttcatggttcacttggctacaatccctgtcactggaaccggcattaaccctgcaaggagtttcggaccagctgtgatcttcaacaacgacaaagcctgtgacgaccaatggatttactgggttggaccgtttgttggagctgcggtggctgcaatctaccatcaatacattcttagaggttctgcaatcaaagctcttggatccttcaggagcaacgcttaattaaaaaaaaaaaaaatcaagtttctccactacctaaattatgatgatttggtcctgtgtcacccaaaacaagaacagtgtttcagttcaagtctgtctacaggtccctctcttttggcttttctgcttacccgtgggtttgggggaaaagccaaataccgtgggctcttgaatttgtagataagaatgcttttatgtcaagggtgtatntgtatcccttttgtttttaatttcttttttcttccaagtatttatcatcat

SEQ ID NO: 230090 - DNA, 546 bp, Glycine max
caaaagttgctgtcaaaggctaatgattagaatgctgatgaaattcaattggatgattttcctggtggtcccaaggcttttgaaatatgtgcaaagttctgctatggaatgactgttactcttaatgcttacaatgttgtggctgctcgttgtgccgctgagtaccttgagatgactgaggatattgatagagggaacttaattttcaaaattgaggtgtttcttacctcaagtatctttcgcagctggaaggattctataattgttctccaaactactaaatctcttttgccatggtctgaggacttaaagattgttgggagatgtatcgattccatagcttctaaaacttctgtggatccagcaaacatcacttggtcttacacttataaccgtaagttatcagagcttgataaaattgttgaggacaagataacaccacacgagaaaattgagcctgttcctaaggaatggtgggttgaagatatatgtgaactggacattgatctttataaacgggtaatgattactgtcaagtcaaaggga

SEQ ID NO: 230091 - DNA, 91 bp, Glycine max
aaaagagaatatatgaattttttagacttaaaaaagcacactggatattcatcaaagcatcatcaaagcacactgcatcctaacagcacac

SEQ ID NO: 230092 - DNA, 501 bp, Glycine max
  unsure (1)..(501): unsure at all n locations
tgggcaaggtcaagattttaatcaacttatttggaagaattggccgtttggttgccagagtcgctctgcaaagagacgatgttgaactcgttgccgttaacgaccctttcattaccaccgattacatgacatacatgtttaaatacgacagtgttcacggacactggaagcatcacgatgtcaccgttaaggacgagaagacccttctcttcggtgacaaggcagtcactgtttttggacacagaaaccctgaagagatcccatgggggtcaactggagctgacatcattgttgagtccaccggagttttcaccgataaggacaaggctgccgcacatttgaagggtggtgccaagaaggttattatttctgcccccagtaaggatgcccncatgtttgttgttggtgttaatgagcacgagtacaagccagagcttgatattatttccaacgctagctgcacaaccaactgccttgctgcactcgccaagttatcaatga

SEQ ID NO: 230093 - DNA, 484 bp, Glycine max
ggatgataaaaggttggaaaatgcctgctatcagaaggaataaagcccgagtacatctgcaagtatataagaatccaaaaaactccatcccctacacagaagaggcaacaaaaaaagagcttaatgctcgtaacagggtaacaacactggttccggaaaccgatttattcatacttctcaatttttgcacgagcaagacactaaatcgcagcttgaccagcacataatgttagaaccaccttaattaaaaagacttcttggcaacgattacaagcaggtcaatgacacgtgaactgtatccccactcgttgtcataccaagagacaagcttcacaaaattcttattcaatgcaattccagcctttgcatcaaaaatacttgatctggtatcaccaacaaagtcggtggagaccacatcatcttcagtgtaaccaagaattcccttcaacttgccctctgattcctccttgatagcatttttaat

SEQ ID NO: 230094 - DNA, 239 bp, Glycine max
ttgtgttcaagtgacgttcaaatccattcaggaaagagagatttgaaatgtaaatgccaagtaaatgtgaaaagtacagtccatttttagtgatctctttaatttatttgttcatagattaatatggtcgtgtatgattgcttttctatttattgtggcatttttgtgttgtaccctgttgttgtgtttgcaataattattagtaataaagcagcaaattcaatttgtgttcatgcatc

SEQ ID NO: 230095 - DNA, 240 bp, Glycine max
gatgcatgaacacaaatttttatttgctgctttattactaatgattattgcaaacacaacaacagggtacaacacaaaaatgccacaataaatagaaaagcaatcatacacgaccatattaatctatgaacaaataaattaaagagatcactaaaaatggactgtacttttcacatttacttggcatttacatttcaaatctctctttcctgtttggatttgtccgtcacttgaacacaa

SEQ ID NO: 230096 - DNA, 549 bp, Glycine max
ctttgtttcccaatttccattgcctcctcttccacctcgcaaccatgatcatcccggagaagaaccgcaaggagatctgcaaatacctcttccaagagggagtttgcttcgcgaagaaggacttcaatttggccaagcaccctgagatcgacgtgccgaatctgcaggtgattaagctgatgcagagtttcaagtctcgcgagtacgtgagagaaacttttgcttggatgcactattactggttcctcaccaacgatggcatcgagtttctcagaacttaccttaaccttccttccgaaattgtccctgctactttgaagaagcaagccaagccacctggcaggccctttggaggcccatccggtgatcgccctagaggtccaccacgctttgaaggggagcgtaggtttggtggtgatcgtgatggataccgtggaggtccccgaggaggacctggtggtgactttggaggagacaagggaggagctcctgctgactacaggccctctttgggggtcctgggcgaggggcccgcttggtcgtggatct

SEQ ID NO: 230097 - DNA, 491 bp, Glycine max
aacactcaaaatctaaaatctccattgaacgaaaaactgaatataaagtaaagatcaggccgataaaacgatctataagagatggaaaattatcattgattccaactacagacacgtgtttctagaaaactaaacaaaaaataaagcagaaaacattatacttggggaagatttgagctggttggcgctccaaaaccaccagatccacgaccaaagccgggccttccgccaggacccccaaaagagggcctgtagtcagcaggagctcctcccttgtctcctccaaagtgaccaccaggtcctgctgggggacctccacggtatccatcacgatcaccaccaaacctacgctccccttcaaagcgtggtggacctctagggcgatcaccggatgggcctccaaagggcctgccaggtggcttggcttgcttcttcaaagtagcagggacaatttccgaaggaaagttaaggtaagttctgagaaactcgat

SEQ ID NO: 230098 - DNA, 495 bp, Glycine max
aactttgctggcgtactcatcgtgacgtaattaacccaacagcacacagcactttccccaaatcaaatcatcgaaaccctaactcgcgattcccgatcgaaaccctaactcgcgatggcgatcttgctgggcgaaattcttcaatcgctggagctgtggctgaagctgatcaagaacccgcagcctcagccctacgtgaaccctaatctggaccccgttttgctggtgcccggtgtcggaggctccatgctgcacgccgttgacgaatccgaaggaagccgagaacgcgtctgggttcgcttcctcaacgccgagtacacgctcaagaccaagctttggtcgcgttacgatccttccaccggaaaaaccgagtccatggatccaaattcaagaattatggttcctgaagataggcatggactccatgcaattgatattttggaccctgacttgatgttgggaagtgattctgtgtattatttccatgacatgatc

SEQ ID NO: 230099 - DNA, 560 bp, Glycine max
gccacaacaacttttttacgattatcattatatacaagaatttcagaacgatggtattcattttcataactgatacatacgcttcacatatcatacataaatcgggagggatatggcacagcaacatcaaacgaatatcattatatacaagagatgtcatccataatcaacaatacatgtgagtgtttggtttgccgtttgcacagctccaaactccgttcacgtgttccatagcagcaaacggaacagttatatacagctggattggaaaaaaaaggggggttacgtcgaacccaacatttttccaaacacgcagaaaggcttcaacagaatgttattcatgaggcatcaactgaaacagccaaagcattcagttgaacgtgttggttaccctcactgtctgggtgaacaatgacagtagcatgagcctcagaataagattgattggctccttcttgtgaaactgatatggaacacactttatctgctgtgctgctttggtcatcttggactttggaaataatttcccattcctctttaagggatgctacttctacacc

SEQ ID NO: 230100 - DNA, 543 bp, Glycine max
  unsure (1)..(543): unsure at all n locations
cctcaagttgccaagaacaaatcaatgtggctgcatcctaaggttttgggttttaatcctcctgaaagatggggccactctgcttgcttctccaacgggcttatgtatgtctttgggggttgctgtgggggactgcatttttgcgatgttctcacattggaccttaacaaaatggtttggagcaagcttactaccacaggtgaaaagccagggccaagagatagccatagtgctgtttttgtggggcataaaatgatagtgtttggtggcacaaatggcttcaagaagatgaatcacattcatgtacttgatctcgttaccaaagagtgggttcgacctgagtgtaaagggactcctccttctccacgtgaaagccatactgccacacttgttggtgatgaaagaatagtgatatttggtggtagtggagaaggtcatgctaactatttaaacgatttgcatattcttgatcttcgaaccatgagttggacttcctctgagttgaaaggtgantttcctgtccctagggacagtcatagtacc

SEQ ID NO: 230101 - DNA, 591 bp, Glycine max
gttgttctaaactcttttcaccaaaacattttatttggttttttttattcttttttattacttttttatactttttaactttcattttattaatttttttttttttttttttcttccaaaaaaaaaacaccaaatttttgggcggcccctttgagggaaaaaagggaaaaaaaaaaaaaaaaaccccccccccccttttctcccaaaaataaaaaaaaaaaaaaaaaaaaaccccccccccaaaaaaaaaaacccctgaaaaaaaaaaaaaaatgccccccccccaccgggaagggtgttatggccccaaaaaacaaccctggggaggggcccccccaccattaaaaagggaaaaaaaaaaaacccccccgacagggggggggggcaaaaaaaaatgggggaacaaaccacacccccccctaaaaatatggccaaacaaaaaacccctaaaaaaacacccacagtgtgggtcacccccaaaaaaccccccctcttacaaaaaaaaaaacctctaaaaaaaccccgggggagggtgcaccacaaaaaaacaccccccccctcttataaaaaaaaaaaaaaacaacttttttt

SEQ ID NO: 230102 - DNA, 477 bp, Glycine max
aaattgcataaaatgtttttcttcagggtatgtattctaaagtagtttttctttcgttttttggttcattctaaagcattccatttattaacttttatttcgaaattgtgaaaaattaaataaattaatataagatttaaaataactaacataaatcatctgcatcagttgttctggagtcttggtttacatcaatgttttcatgtagatataaaatgcattacattcctgcatttcatgtagaagtactaatagttttagatctttttgagatatgttagccgtacattttatgacattctctctcattggcttacatttacttgaaaacattattttagattcacttcttatgagtctgtttcctaattgtatagttatcaataaattttaattgattacagagtgcgttaaatattttagagtggtgtgtgttactagcacttctcatattttggtaaacaagcacacttcttc

SEQ ID NO: 230103 - DNA, 578 bp, Glycine max
aagcttccatgtaaaatttataaacttgacttgctacaatctaaatagatggtatactggtgtgtttggttcctgcggtgtggtgaaagggatacaattatttttttcacattcaatctcaccacaactctttgtagcctccagatttctacataaaaaatgtgacttttgtggcgccagcatgaaaccaagcatcaacctaatacagtttacttaacatgattatgtaaaatagagatttatttacacttagttcttattttaagcttcacattctggaaaatgtgtagtccatcgcatccacaaggaagtctgcatcttctttggtgaaacataggggtggtgtaattctgaatacatttccataatagccaccctttgcaatcagcactcctaattctttcatttggtccatcacatgcagggtttcactttgtgctggtgttttaagtttgccatcactgacaagttcaactccaagcatcatgcctcttcctctaacatcaccaattaattcatatttgtccttgagtgcattgagtctctttttcaaataagaacccactacaaaagcattt

SEQ ID NO: 230104 - DNA, 581 bp, Glycine max
actctctctcaccaaattcttattagatcgaaaaaagaaaagaaaagaaaaaagagcgatttttccctcaccaaagaagaaccaaaacaatggcggatcaactcaccgatgaacagatctccgagttcaaggaagccttcagcttgttcgataaggacggcgatggttgcatcacaaccaaggagcttggaactgttatgcgttcattggggcaaaacccaactgaggcagaactccaggacatgatcaatgaagtggatgctgatgggaatggtaccattgacttccctgagttcctaaacctcatggctaggaagatgaaggacactgattctgaggaggagctgaaagaggcattccgggttttcgaaaggatcagaatgggttcatctctgctgctgagctccgtcatgtgatgaccaacctcggggagaaactcaccgatgaagaggtcgatgagatgattcgtgaggctgatgttgatggagatggccaaataaactacgaggagttcgttaaggtgatgatggccaagtgagtgatcatcacattatggccacaagaacctaaattgaagagtg

SEQ ID NO: 230105 - DNA, 544 bp, Glycine max
attctcatccatatcttaggagaatccatatcacacattgacttttcaaataaactacgatgcatgtcaaatatcacaatattcgtcatctttcaaaaaaaaaaaaatgagcggtagaatgcgaagtgacattaacattacaaccctttatttcttggaaaaaattacagacaaactaagaaggttcagttccactacatccattagtagcaggaattgccactaattgacattttaaggttggattcaaaaaccgtcaaatataaatgtaggaagaagaaaggacaaggactactacatcactgttatacagcccaaacccttgtgcttccccttacctctgtttttttggtcatttccttttaatcaacacttcttcatttaggttcttgtggccataatgtgatgatcactcacttggccatcatcaccttaacgaactcctcgtagtttatttggccatctccatcaacatcagcctcacgaatcatctcatcgacctcttcatcggtgaggtttctcccgagggttggtcatcacatga

SEQ ID NO: 230106 - DNA, 555 bp, Glycine max
  unsure (1)..(555): unsure at all n locations
gttgttctgttctctttctctctcttcttgcatcaccggcatgttcttcgaatcccgatccctcctcttcccgctccttttctctctcttcctttcttccgccttcgcttcagactcagatcacaagtatcaacacgatgaaccagttaacctttgggtgaacaaagttggtccttataacaatccacaagaaacatacaactattacagcctcccattttgtcatccatctagtagtgctagtgctgcacacaaatggggtggtcttggtgaggtcctgggtggcaatgagctcatcgatagccaaattgaaataaagttccaaagaaatgtggataagactgtcttttgccagatagatctcgatgaagcaaaggtgaaacagttcaaggatgcaatagagaataattactgggttgaattcttcatggatgatctacctttgtggngatatgttggtgagttacatcctgataagaacagtgataatggcaagcatgtcatttatacacacaaaaacatgattgttaaatacaacaatgatcagattattca

SEQ ID NO: 230107 - DNA, 487 bp, Glycine max
acaagagttgtattatgaattttttatctaaaattataaagacgggcaattacagccggggaaaaaaaatctcagggcttccccaatatagaaaaataatacatcctcattctcaaaaccctgtggattcacctgttaacattgttaggtttccccacacatgaccagaggcttcctccaaaaatttattgtcttcagcaacaaacctatggaagtgctcaggtctgactcaaaaccttaatcgcacttgatatttctgtagatcctcctcacgaacaaatttgaaccaagaaaacccacagctccacatagaattcctagtccaagagaaaacatcgaagtgtatccaaaataaaagctggtgtggaagaagcctgacatcttcgtcttcacatagaagtagtatattgagtacaaataaacataaacagctgttgaggcagctgaaaagaaagaagttcattgccagtggttgttctcagcattt

SEQ ID NO: 230108 - DNA, 538 bp, Glycine max
agaaaacaaaaaaagttctcctttgaatcttctctgggctatgttattttgaaagaagttacttcgcatcaagaatgggttcaggtgattggtttaagacaataattagcttaagaaaatcaaaacaaggtagatcaaagaaagcaaagggtatcttagctcaagagaaactaaatgcatcaaagtcaaacagctatccaggaaaagagtctggtggtttagcaaatggtactaaaagtgaaaaccttgtgtcagctggggtgtcagttgaaactattgctgcaaaaaggatccagactgcattccgagcttataaggctagaaaagctttacgtcgcatgaaaggatttacaaaactgaagatcctaacagaaggtttctctgttaaaaagcaagccagtacagctataacataccttcattcatggagcaagatacaagttgagattagagctcgccgaatctgtatggtaaccgaagacaagatcaggaggaagatactggagtctcaataatactggaggcatagctcatgatc

SEQ ID NO: 230109 - DNA, 507 bp, Glycine max
  unsure (1)..(507): unsure at all n locations
tgttgaagcagctttgttggttctaaattttgcaatatatcacaaagaactgacagaaatggaggagcgtgagcaagagagggagagagagctggacaggaagcgcaaggctgatcatgatgaaaatgatggtcctgatcgtggtcctaaagatagaagaggtcctaaagataaaagagggccaacatcaacggatgccatggaagtagatgataactcagcaactcatgctgctgtcggacccacccctgaaagaattgaagaatttaattctctatttaatcagcatatgcatgccaaccgcctggaacaaataactattgcaaacttagggaatgttatcaacagagggcaagatccaccaccttacagtgctgcagatatactactcctattagagaggttgcaagacgacaatagagtcatgataactgatggagtggtgcatatgatatcatanaatgtaagattggtgcacaatctcttgacgaatattcagactgggag

SEQ ID NO: 230110 - DNA, 582 bp, Glycine max
caagaatggcacttcgttgcttggtgatttccctttctgttctcttcactcttggtcttgcgagagaaagccatgccagagacgaagatttttggcatgctgtttggccaaacactcccattccaagttcattgcgagatcttctaaagcctggccctgcaagtgttgaaatcgatgatcaccctatgcaaattgaagaaacacagtacccgaaaaccttcttctataaagaagaccttcatccaggcaaaacaatgaaagtacaattcagcaagcctccctttcaacaaccatggggtgttggtacatggttaaaggaaattaaagacactactaaagaaggatatagttttgaagagctatgcatcaagaaagaagccattgagggagaagagaagttttgtgcaaaatccttgggaacagtaattggttttgccatttcaaagctgggaaagaacattcaagtactttcaagttcctttgtcaataagcaagaccaatacactgtggaaggagtgcagaatcttggagacaaagcagtgatgtgtcataagctaaatatcagaactgcagtattttact

SEQ ID NO: 230111 - DNA, 536 bp, Glycine max
agctcaatgtgaggctttagataaccactttttaccatatatatatagagagagagaatacgaagcacactgatcacaggatgatgctctctttaagtagggaagcagatcttatcagtacacataggtaggttgaaattctagctctagcaatctagctagagaaggtagtacttgcacaacacacagcacatgataatttattttatacacaatctcattctcatggtgctcaagatgcatggactaattaagcaacaatgttggtctgataggcagtgtccacagataaattgggtacccataaaatggccttgcttccaaggaaatggcaaacagggttagttccaggatcaactcccataagttgatgaagcatttgatgattcattccagaagtatttgagtggcaaatagcaagtgcctgagttttggttccatcaccagccaccaatggaaccatgaaagctgttgttttacggacttcatggcagtaaaatactgcagttctgaaatttagcctatgacacatcact

SEQ ID NO: 230112 - DNA, 547 bp, Glycine max
atcgttttcatctctgtttcagatctgtgctctcgtatattccccagccatggccgaaaaggtcaccataatgaggctcaaggttgatcttcagtgccacaaatgctacaagaaggtcaagaagattctctgcaaattccctcaaatccgagaccaggtgtacgacgagaagaataacatcgtgaccatcgcggtggtttgctgtaaccctgagaagctcagggacaaaatttgctgcaaaggttgtggtacgatcaaaagcattgaaattgttgagcctcccaagcccaaaccaccacctcaaccagaaaagcccaaggaaccagagaagccaaaagagccacagaagccgaaagagccagagaagccgaaagagccagagaaaccgaaggagccaccgaagcctaaggaacctgaaaaaccaaaggaaccagagaagcccaaagagcctgagaagcccaaggagccagagaagcccaaagagcccgagaagcccaaggaacccgagaagcccaaggagcccgagaagcccaagcctgaatgccct

SEQ ID NO: 230113 - DNA, 515 bp, Glycine max
attaacttgggaaagtgtaagatatcacagtatatagtatcagttacatacattacagtaaaaacatttattctttagctagctagcctctggtatcatatcatattatctatatttgtttcacgtacgaaacattttgtactcccaaacacaaaaaaacaaagatcattattccttggattgatgagggtgatgatcgctccaacaataagatggaagaacgcgccgttgcaacaacttgcatgcatgggcggcacaagagagagagattcgatgaatgaagtaagtaagtaataatgcgatcgatcacataattgtgcaagcagaggtgttttcttcacagaaatattcatcgcaacggctcacgtaacaaggcctgctcccaccgtaactatcataaacaggccttccataataagcgtcataacatggtgggggcccaccgccgtacccataaagcatggccaccgggccgacttctagcatggacacagcaaccccaatcggaccaccac

SEQ ID NO: 230114 - DNA, 540 bp, Glycine max
  unsure (1)..(540): unsure at all n locations
cgatcccttcctcgctccttggtagcttttgctcacggacgattgcgcgaaaatccctttctaaacaatagaaccttttcttagattctgtggaaaaagcttctcaagctttgaataagataaacaacaatgtcttcacttgcagctgctagagcagacaacttttactatcctccggaatgggaaccgagtcagggttcgctgaacaagtttcatggtcaacatgccttgcgggagagggcaagaaaattagatcagggtatcctgattataaggtttgagatgccctttaatatatggtgtggaggatgcaattcaatgattgcaaagggtgtccggttcaatgcagagaaaaaacaagttgggaattattactcaacgaagatatggagtttcgctatgaaatctgcctgctgtaaacatgagattgtcattcagactaatcctaagaattgcgagtatgtcattattagcggngcccagaaaaaaactgaagattttgatattgaggatgccgaaacttttgaattgcctgctgat

SEQ ID NO: 230115 - DNA, 608 bp, Glycine max
  unsure (1)..(608): unsure at all n locations
ctgagggttctctcaggaaaaatgcatttcagaaacatgttttggaagcaatgtctcatagaatgcatgtagacaacagtgtaaaacttattgggaagcttttatttggtattgaaaagggtccagaagtactcaacgctgttagaccggcaggatcggcacttgttgatgattggcactgccttaaaaccatggtgaggacttttgagacacattgtggatccttgtctcagtatggcatgaaacatatgaggtcctttgcaaacatctgcaatgtagggataaagaatgagcaaatggctgaggcctctgcacaagcttgtgtctctattccttccaatccttggagttctctgcaaaggggtttcagtgcataataattcctgtaatgtgcaccagtaaagaccaaagtatgattattgttacattatgctatatgattgtacttgtatatacatattttgtcccgcctttgtaaatacaattgggacactactaggattgggaagaagggtctttacattnttagtttggcaaatagatattgcaactaccttngtataaatctatttctgaagaagcaattaccactttcaagggatgatagc

SEQ ID NO: 230116 - DNA, 285 bp, Glycine max
cccctaaaaaacaacccaaaacaaatcaaaaaaaaaaacaaaaacacaaaaacatccaaaaaaaacataatatgcacacaaaaaaaaacaaaaaaaaaaacacaaaaaaaaaaaaaaccgtaaaaaaaaaagtcaaaaaaaaaaaaaaaaaaaaaaaaaaactcaggggcacaaatacaaaagaaaacaacgggcaaaaaaaataaacacataaacaacgcaacaaaaaaaggggcccaaaaaaagcaagcgaaaaaaggaaaaaaacaatccattgcggccccc

SEQ ID NO: 230117 - DNA, 523 bp, Glycine max
  unsure (1)..(523): unsure at all n locations
ggccaaaattggactagtttttgctgctgttgcactcactgaatcagttgctgttggccgatcttttgcatccatgaaaggataccatctagatggaaacaaggagatggtgtcattagggttcatgaacatcataggatgcttcacctcatgctatgttgcaactggttcgttctcccgcacggtggttaatttcacagcgggttgtgaaacattagcgtccaacattgtgatggccattgtggtcttgatatcactacaatgtttgacaaagctattgtactttaccccaactgctgttctcgcttcaataatgctttctgctctcccgggactcattgacatgaatgaagcttacaaaatatggaaagttgataagcttgattttcttgcttgtgttggagccttctacagngtgctctttgcgtcagtggaacttggtctgctagcggctgtgggtatatcttttacaaagatatatggatctcaataggagcaggcacagaaactctgggaagacttc

SEQ ID NO: 230118 - DNA, 593 bp, Glycine max
  unsure (1)..(593): unsure at all n locations
ccgtgttgaccattattgtctacaagatacagagtgacaccaaaatccccggtaacaccgaatgtgacggcgttggcattttgggcatcgcttgggccttcggtggcatgatcttcatccttgtttactgcactgccggaatctctgggggacacatcaaccctgcggtgacattcgggttgttccttggacgcaaggtgtctttggtgagggcgttgttgtacatgatagcacagtgtgccggtgcaatctgcggtgctgggttggccaaagggttccagaaatcgttctacaacaggtacggaggtggggttaacactgtcagcgatggctacaacaaaggtaccgctttgggtgctgagatcattggtacctttgttcttgtctacaccgttttctccgccactgatcctaagaggaacgctagggactctcatgttcctgtgttagcaccacttcccattgngtttgccgtcttcatggttcacttggctacaatccctgtcactggaaccggcattaaccctgcaggagtttcggaccagctgtgatcttcaacaacgacaaagcctgggacgaccaatggatttact

SEQ ID NO: 230119 - DNA, 572 bp, Glycine max
  unsure (1)..(572): unsure at all n locations
ttcacctgagctttttgtgaggattcctaagcatggcttcccttgcagcatccactgctgctgcttcccttggcatgtcagaaatgcttggaaaccccatcaacctcagtggtgccacaaggccagctccatctgcctctagccctgcctccttcaagactgtggctcttttctccaaaaagaaggctgcacctccaaaaaaagctgcagctgctgctcctgccaatgatgagcttgccaagtggtatggtcctgacagaaggatcttcttgcctgagggtctcttggaccgatctgagatcccagagtacttgaccggagaagtccccggagactatggttatgacccatttggtcttagcaagaagccagaagatttttccaaatatcaggcatttgaattgattcacgccagatgggcaatgcttggtgctgctggattcatcattcccgaggccttcaacaaatatggagcaaactgcggtcctgaggctgtttggttcaagactggagctctgcttcttgatggnggtacctngaactacttcnggaaacccatccccatcaatcta

SEQ ID NO: 230120 - DNA, 493 bp, Glycine max
gttgtatgattttatttaattagacgcagaaaaatcggaagaaattcaagaattgagttccaaggaacaaagccaaatgccttaatatctcagtgatatgtattgtacattaagtaagattggagaaaaacatgaagatgaatgatttagagagttggagctctctcagcagatccagaaatgacagtgagcaagttgttgccaaaagggtcactgagatgttttgcaaggttctcaacaggaccttctccagtgacataagcttggaagtagaaaccaagcatggcaaacatagcaagtcttccatttttaatttccttcacctttagcagtgcagcttggtctggatcatttgcaagccccaatgggtcaaatggaccacctggatgaagtttgtcttcgaaattcaggccattaataattctgtagtactctgcacctcccacaagaacaatctcagcaatgacagccacaataagattgatggggatgg

SEQ ID NO: 230121 - DNA, 557 bp, Glycine max
attttctctctcacttttcaagaatcgtttgctatgggaaagtcttacccaactgtgagtgctgattaccagaaggccgttgagaaggcgaagaagaagctcagaggcttcatcgctgagaagagatgcgctcctctaatgctccgtttggcatggcactctgctggaacctttgacaagggcacgaagaccggtggacccttcggaaccatcaagcaccctgccgaactggctcacagcgctaacaacggtcttgacatcgctgttaggcttttggagccactcaaggcggagttccctattttgagctacgccgatttctaccagttggctggcgttgttgccgttgaggtcacgggtggacctgaagttccattccaccctggaagagaggacaagcctgagccaccaccagagggtcgcttgcccgatgccactaagggttctgaccatttgagagatgtgtttggcaaagctatggggcttactgaccaagatatcgttgctctatctgggggtcacactattggagctgcacacaaggagcgttctggatt

SEQ ID NO: 230122 - DNA, 445 bp, Glycine max
attctggaaatcgtaatagctatagacggtaagaacgaagttgggtcctaaagatcactatcattatcgctgaacaatgttatttaacaaaagtatcaaccacaaataaaaacaacaacccaacttcccaatcatcgtcacgtccagcaaaatacattcaaaagctatctaaaatctggggaacccacattggcattaaaaaccatgaccatacaattttttagagaaatattatgggcaccatgcctcttcaacaatcccctaaacgttgcttaggcatcagcaaacccaagctcggaaagcttttggtgagcctcagcgtaatcagcaaagaaggcatcttcgtccgctgcatatttatcaacgagagggcggaatacagggtcagacaaaagagccttgtcagaaggtagctgaaggagaaccttcttctaccactcaacac

SEQ ID NO: 230123 - DNA, 577 bp, Glycine max
  unsure (1)..(577): unsure at all n locations
ggcaagcgcttctcctctttgtgttctgtctatgcttcttggcaagagttagatcggacgaggattgcgtgtacacggtgtacgttcggacgggttcgatcatcaagggaggcaccgattcagtaattggtctgaagctatacgacaagtccggctacggcatatacatcaccaacctcgaggcatggggcgggttaatggatccgggtcacaactactacgagcggggcaacctcgacatattcagtggtagaggcccttgcttggaagcacccgtttgcgaggccaacctaacttctgacgggtcggggccccatcacggctggtacgttaattacgtcgaggtcaccaccactggggtccacgcgccttgttctcagcagcagttcacctttgagcagtggctcgccaccgatacgtcgccgtatcagctctgggctgtcaggaacaactgtccaaacaacttgggcccggcccagctcaccgatgttgccatccctcgggctgggcctgctttctctattctggaaatccaccgccgcgtctaagttatgttggtngctctacttgagtgtcg

SEQ ID NO: 230124 - DNA, 555 bp, Glycine max
atggattaaaaatggagggaaaatgtctgctatcagaatcaataaagcccgagtacatctgcaagtatataagaatccaaaaaactccatcccctacacagaagaggcaacaaaaaagagcttaatgctcgtaacagggtaacaacactggttccggaaaccgatttattcatacttctcaatttttgcacgagcaagacactaaatcgcagcttgaccagcacataatgttagaaccaccttaattaaaaagacttcttggcaacgattacaagcaggtcaatgacacgtgaactgtatccccactcgttgtcataccaagagacaagcttcacaaaattcttattcaatgcaattccagcctttgcatcaaaaatacttgatctgttatcaccaacaaagtcggtggagaccacatcatcttcagtgtaaccaagaattcccttcaacttgccctctgattcctccttgatagcatttttaatttcatcatatgaggcttccttctccagcctcaccgtgaggtcaacaacagagacatccacggtgggaaca

SEQ ID NO: 230125 - DNA, 413 bp, Glycine max
aatttgccgcccgaattgtttctggattttataaggagggtggaagacagtgagactacctggccagcacgagccgttgtggtttattgtggttcagtttgtaaatcgtggagggccgttacgaaagagattgttaagactcctgaacaatgtggaaggctcacatttcccatttcattgaagcagcctggtcctcgtgattctccaatacagtgttttatcaggaggaacagagaaacttcaacatatctgttgtacattggcctggtaccatcggagaacgagactgataagttgttattagctgcaaaaaaggtgagaagggcaacaggcacagacttcatcatatctttggttgcagatgatttttctcgctccagcaacacatatgttggagactcatgtctaatttt

SEQ ID NO: 230126 - DNA, 573 bp, Glycine max
ctaaaatggacaaggcatttttgcttgttgatgccattacctttatcactgatctccagatgaagatcaaggtgttggaagctgagaagaacatgatccacaatcaggaccaaaaattgtcattgccagatatggattttcaggaaagagaggatgagacagttgtgacagtgagatgccccttagatattcaccctgtttctaatgttgttaaaacgttcaaggagcatcaaattgtggctcaagactccagtgtttcgactacagatgataaaattattcacacattctccataagaactgagggaggggagactgctgctatacagttgaaagaaaagctggaagcatccctatccaaaaatcgatagtcagatcataatcatatttatgtttagcatctcaaggatattgtaaaccatattagaaatactctgtttgtcttgtaggctaagtagctgacataatattgttattaatgtacttagtttttttttacagtagtgtactttgttagttgtaatctgttttaaaatatgtttaggtcatcataagtgaccttaattatgtact

SEQ ID NO: 230127 - DNA, 606 bp, Glycine max
aaccactcttaatttctctctgccttgtttatttacacacctctccaacctttcactttcagctttatttgaatccctctctctcctttccaaatggccagcgttgaggttgcacatcaaacaccaacaacagttccagaaaatgaaacaaccgaggtaatcaagacccaggaaacaaccccggaaccagtaccagccactgaggctcctgcaacagaacaagcagcagctgaggttcctgctcaagaagaacaacaagcaactgaggttcctgccccagaatcaaccaccgaagcaccaaaggaagaaaccaccgaagcaccaacaacagaaacagtagaaacaacaactacagaagaagccaagccagaggagcctaaagaagttgcagttgagaccgaggaggtggtgacaaaggagacagaggaagagaagccagcagcagaagagaaatcagaggagaaaactgaagaagtgaaagaagaagcagaagagcctaaagaaactactgaaacagaaacagaatcagcaccagcagcaaccacagaggaagagaacaaaccagctgagacagtggaagccccagtagagggttcctgtgagaaa

SEQ ID NO: 230128 - DNA, 482 bp, Glycine max
attcaaacctaaagaaacacaataacacatcatcacaaactcatgtaaccctgccaataaaataaaccctcatccctaaactccagcaccagcagcagcttgctcacttcaatacacaactcctagaatttctcatgtcaccacgtggtaagcacgctgatgtggagccaagtgttgtgctcacacgtaggtataccctccataatacaaccaaagacttaaccatcatataataataatatattaataataaagtaaactaaagaaataaataaaaaaaaaagcttttcaacatgacatgcaaaatggtagacctaatgatccccacaactaggaccatttttaaacttgtttttctcactcacactgtccataagtctaagcttcagttttctcaacaggaacctctactggggcttccactgtctcagctggtttgttctcttcctctgtggttgctgctggtgctgattctgtttctg

SEQ ID NO: 230129 - DNA, 559 bp, Glycine max
gtttttgtagaaatttcacagcttgtacttagtgctcttgatggttacaaggtttgcatctttgcctatggtcagacagggtcagggaaaacctatacaatgatgggaaggcctggacatccagaggagaagggcttgatacctcgttcattagagcaaatatttcaaacaaagcagtctcagcaacctcaaggctggaaatatgaaatgcaggtgtcaatgttggaaatatacaatgaaacgatccgtgatctgatatctacaacaacacgcatggaaaatggtactcctggaaaacaatatacaatcaaacatgacgcaaatggaaatacacaagtttctgatctcacagtagtggatgttcatagtgctaaagaggttgcatttcttttaaatcaagctgcaaatagcaggtaactaatttctagtgtatattctattgtcttgtaaggtgtaacaaactattgattattactacctcaaacatcgcaagtgagcttaccattttttactaacattatatacttatacatcttgacgcatttagaaactatcatat

SEQ ID NO: 230130 - DNA, 579 bp, Glycine max
ttttggctaagcctcgaaatccaaaaattcttaagcgatgatgatgcacatgaccttctactggagcagaaaggtgaatctcctaatcgattcatggaagaccaacgattggacggactatctcctcactctgctcgcgtgcctcgtcgtcgccgccttctaccagttcctcgagaatcgccgcatccgcctcaagctcatcggctccggaaagcccttcccggcggagatcgaggcccctcttctgcggcggaagctcgccggaaaccgcgtcaaggtgggcgtgaaggtcgccggagcgtttctcttcgggctgagctccgcggtcgggtacttgttgatgttgtcggtgatgtccttcaacggaggggtgtttgtggccatcgtcgtgggtctcgctgttggttacttcttcttcaggaacgagggcgaagattcccttgttgttgatacttcttgtgcctgtgcttaaatcctaattacttttaaatctcccaatttcctgtaataataatataataggagtagcagtgctgggtaattattttcctttttttaaattagcaaacttgtttcaag

SEQ ID NO: 230131 - DNA, 475 bp, Glycine max
gaattaaacatttataattggtgaaatttgcaatttaggtacacaattgttcaagtatccatcagacaagaggaggctgaaccagccacattattctatgagtcctattaaaattaagcacttgactaagataatgacaaaagaagcacagtgcatacaaaaaccaaggggtgaaatattgatcatgaaactaagcagtatgagaaggttggtgctcttcctggactacttcatgttgctcttgctcttgctgtggtttttctccttgccaggtccaaacaatgtccttaagcgctggtcttatatcctgtttaaaaagcttctggtactccatggtgtcaccattggactttctaagttccaccatatggaagtgtggggtaatctcaaaaatctcagcatcaacacccagagttcctttcctgccttccttggaaccttccaatttgagcaagcctccatctttcttctttac

SEQ ID NO: 230132 - DNA, 484 bp, Glycine max
  unsure (1)..(484): unsure at all n locations
aaagaatctctgtgttgttatcacactttgctagatccagccccatcatggcttcagagaagcaagcggctcttgccgtcactccctctgatgctgatgctcctaccatatttgacaagatcatcaataaggagattccttctactgtggtttatgaggatgacaaggtgcttgccttcagggacataactcctcaagctcctacacatattcttatcattcctaaattcaaagacgggttaagtggtctatccaaggctgaggagaggcactttgagattcttggccgccttctgtacactgccaagctggttgcgaagcaagaaggactcgacgacggcttcaggattgtaattaacgatgggccgaaaggatgccaatcagtttaccacattcatgtgcacctcctcgggggaagacagatgaactggcctncaggctaaagtgtatgagagtcataatctgcttgtgctatcttttaata

SEQ ID NO: 230133 - DNA, 546 bp, Glycine max
aaggagtgcattcgtgctttagacaatgtccagatccatattccatttcggggaagcaaacttacagaagtgcttcgtgactcctttgtgggtaattcgaagactgttatgatctcttgtatatctccaggtgctgggtcatgtgaacacacacttaataccttgagatacgcagatcgggttaaaagtctatccaaaagtgggaatcctaggaaagaccaggtccctaatgctgtaccacaaactaataataaggacgtttcatccacatcatcctttccagccagttctggggcagaggattttaatgatcaacgtcaagagaaaacaatggatatgggcaggaaatttgtcgaaaaggaaaattctttgcacagctctgcagctgcttctgttgacaaacagccagtaagttattcttcgaattacctatcaaatgggcgagatgaaaaaggctttccttcagcttcagtggacagggagaggtttgaagtgaagaactcacatggtgactctaccagtcaaaagatgaactcttatcacaaa

SEQ ID NO: 230134 - DNA, 558 bp, Glycine max
gtcaagtgtttctgtttttgttttaatgtagataaccaaacttggcaagagatttcaaggtaaggtagctattgtgacagcttccacccttggaattggctttagcatagcagagaggcttggcttggagggtgcatctgttgtcatctcttctcgcaaacagcaaaatgttgatgaggctgctggtaaactgagagctaaaggaatcgaagtattggcggttgtttgccacgtttcaaatgcccaacaaaggaaaaatttgatagacaaaactttacagaagtatggaaagatagatgttgttgtgtccaatgctgccgtacatccttctgtagatcccattttgcaaacacaagaatcgatccttgacaagttgtgggagataaatgtcaaatccactatacttcttctcaaggatgcagctcctcacttgaagaagggttcttctgttgttctcattgcctcacttgttgcttataatccaccacctactatggctatgtatggagtgaccaaaacagcagttcttggacttaccaaagctatggctagtgaaat

SEQ ID NO: 230135 - DNA, 500 bp, Glycine max
tttttttttaatttaaatttatttttatttgttaacccttaatttttattcggttttttggtattatttatatttcttaattcccattttcttctaactattttttttttttttttttatcttttttttttcaagaaaagaaaaaaaaaaaaaatttttcaaaccgcgcaaaaaaaaaaaaaaaaaaaactcctttttttccccaggggggaaaatattggggggaaccccccaaaaaaacccccaaaaaaaaaaaaaaaaaagaaacccccccctctgggggcggggaaaaaaatttgccccccaaaaaaaaaaaaaacactttcccaaaaaattttttctccacccctggcccctttttttccaaaaaaaaaaaaaaaaggggggggggaaaccccccaaaaaaaaaaaaaaaaaacttttttaaaggcccctccccccccaaaatcggcctaaaccccccccgggtggaaaagaaaaaattcttatataaggggacc

SEQ ID NO: 230136 - DNA, 539 bp, Glycine max
gcagctgcttctcctatggcaagccaatttaagtccaccttcactaaaactcttgtagctcccaagggcctctctgcctcttcaccactccacctcctgccttctaagaggcaatttagcttcactgttagggccatccaatcagaaaagccaacctatcaagtgattcaaccaatcaacggtgatcccttcattggaagccttgaaaccccagttacatccagccccttgattgcatggtacttatcgaacctccccgcatacaggaccgcagtgagcccactactaagagggatcgaggtgggcctggcccatggctaccttctggtgggcccattcgtgaaggccgggcctctgaggaacaccgagatcgccgggcaagcaggctctctcgccgctggtgggcttgtggtgatcctcagcctttgcctcacaatctatgggatttcatcttttaacgaaggagacccatccactgccccgtcactgaccttgacgggccgcaagaaggagcccgatcagctccaaactgctgatgg

SEQ ID NO: 230137 - DNA, 474 bp, Glycine max
atgattcttggattttataaagaccatcatagacatagattttattatttggattcacaccatctctcatgccccggatgactcttacttcattgtgttgtcgcgaactcctatccaaagcaagattacccctttgaagcttctggtcagttgtgtgcttatctttattcatgaagaagttcccaccctgaccagtataaattataacatcactatcctcagcatcatcgtcatattctcctgacgaaacaatgcacacagccagagtttcctcctcaaactcacccctgatatgcaaggcatcaattccacccatggagggagcatgcaagcccacaatacacaattccattcggaaataaaaaatgtcaccaatctcaatcccaggaactgctcctattctcttcctcatgtttggccgaattcctctggtcatcaaagtattgcaagctttcaaatctgcacgcttgatcg

SEQ ID NO: 230138 - DNA, 569 bp, Glycine max
  unsure (1)..(569): unsure at all n locations
gctgaagaagaaggaagtttagttaagttctatggaaaagaagctcaagaataacaaaggacgtgttgcaaatgagagtgctgcgcctccttctgctaaggcacatatgaagaagttaaaatccgaaatgcataagggaatggatgctgcaaacgctgctgttagcaagtctgaaggaggaacaggtggcaaatcagctggaagtgagggccatgcatatgaaatgttgaatgaagttgcacagctaaaggaaaggaacaagattatggaaagcgagctgaaagacatggaagaaagatattcagagattagtctgaaatctgcagaggtagagggagaaagacaacagcttgttatggctctacgcaatctcaagaatggtgaaaagaactagaatttgttgcggttgacgtgtctcagagaaaacatacatgagtggtgaaggaggcagactatcatcatcaccagaatggaggaaacanatataacacgtactttgcagattgcacttaagtggggacatatatcctgtgcatctactaacagatttacctaatgcaaattttttc

SEQ ID NO: 230139 - DNA, 543 bp, Glycine max
  unsure (1)..(543): unsure at all n locations
tgatgatcaccattctttttccaagactgctgttttgggaaacaaaagagggttctctgatgccatgaacggcttctcctcagaggggaaattcctagttgattcggaggccgccaatccgatactgtctcccaggcctgcttctaacttgggattaaaacctggttctacacttgagaaggttggagttcagcaaaccaaaatgaaagaagtagcaacaacaaaggccaatgaagctagacccactattgatggttctgcaaataataataacagtgcaccagctaccaaggctcaggttgtgggatggcctcctataagatcattccggaaaaattcattggctaccacttcaaagaacaatgaagaagttgatggaaaagtgggggttggtgcactgtttgtcaaggtcagtatggatggtgctccctatttaaggaaagtagacttgaagaattactctacatatccagaattatcttctgctctagaaaagatgttcagctgttttactatgagntagaaagaattagtttatgtgga

SEQ ID NO: 230140 - DNA, 495 bp, Glycine max
gaacaacaattttataattttccaagaacaaaaaaagtccataagttcaatatattttcttttacaagaatcatgaatatcaatgtctattgtatcggcaatcaacacttaattgcaagcaccaaagaaaaaggcaagatgatgggaagaaacttaaaccttcatcaattcaatcatctaatttgatagacaaactttctattttttctttctcactgggggtggttcgtacgaatgaagaaggaccagaattagaagaaagagggtaattgtgtgaactcactcaagagtcatgacaagttcagaacttgttcttcagtttacgccgtgcagtacttccctcttgtgaaagttcctgtggcagccgcaagccgcacacgtaagcgccgcatttgttccttcacaggcactggccatgaattccctgcagccatccacagcataacctcccgtattcgccgcatgattcttctggcactccccgtatcgaatatt

SEQ ID NO: 230141 - DNA, 588 bp, Glycine max
tatcttccttgtcactgcccgtgtgtcttcgccatggttaccgtcaccacccaagcctccgccgcaattttccggccatgtacctcgaaatcgaggtttttgaccggctcttccggtaaacttaaccgggaagtgactatgcggccaatggggtgccctccttctgcctctttcaaggttgaagccaagaagggagagtggttacctggcttggcctccccaacttacctcaatggcactcttcctggtgacaatggatttgaccctctggggctagctgaggacccagagaacttgaggtggtacgttcaagccgagcttgtgaatggacgttgggccatgttgggtgttgcaggaatgttgcttcctgaggttttcaccaagtttggaatcatcaatgcccctcaatggtatgatgctgggaaatcagagtactttgcatcttcctcaaccctcttcgtgatcgagttcatcttgttccactacgtcgagatccgaagatggcaggacatcaagaaccctggctgtgtcaaccaagaccccatcttcaagcaatacagcttgcccccacatgagtgtggataccct

SEQ ID NO: 230142 - DNA, 424 bp, Glycine max
agttaggatctagcttgattactgattgatggacagtctaaataacaatataaaaccatcgtagttcctctgtacatgaaaatagatggatcacaacaatcacgcccaaatcactctcaaaattcatccattcaggattacacgagaaggacacaggcttatccatgtcattggatacaaacttagtagccacgaattgtattgatgatggtgttgtgccacgggtcagagaggtgctgcaagaggttctcaaatggtcctttgcctgtcacgttgtgttgaactatgaatcccaagaatgccaacatagccaatctcccattggcaagttccttctccttggcctccaaagtaggtgcaaagttcaaggggttgaacacactaccagggtatccacactcatgtgggggcaagctgtattgct

SEQ ID NO: 230143 - DNA, 554 bp, Glycine max
attcagtgatggagttggctatagttgttttgatggccttaaggcccatgctgcaaaacatgtgactgaaaaaatgatgcttaatgctggtaacatttacccccacaacaccccaaaaaccaaggaagcatattactacagaatgatctttgagaggttcttccctcagaactcagctaggctcactgttcctggaggagcaagtgttgcatgtagcacagccaaagctgttgagtgggatgctgcttggtctaacaaccttgatccctctggtagagcagcacttggagtgcacatttcagcctatgaaaaccagaacaacaagggtgtagaaattgagaagataatacctatggatgctgctccccttggtgttgccatccaaggctaatacaaagatgtgacaaagaataatttgggcgacaatgaagataactaagctaaaggtgaatgaaaaatttgcctgcagtgtaatttcatctgggcaaagcttttatagtttatagttataaggctttctaaaaagtgttgcgtattgtattatcttgaatgct

SEQ ID NO: 230144 - DNA, 476 bp, Glycine max
ggaaacacttttattaagacttcaaatcacagcattcaagataatacaatacgcaacactttttagaaagccttataactataaactataaaagctttgcccagatgaaattacactgcaggcaaatttttcattcacctttagcttagttatcttcattgtcgcccaaattattctttgtcacatctttgtattagccctggatggcaacaccaaggggagcagcatccataggtattatcttctcaatttctacacccttgttgttctggttttcataggctgaaatgtgcactccaagtgctgctctaccagagggatcaaggttgttagaccaagcagcatcccactcaacagctttggctgtgctacatgcaacacttgctcctccaggaacagtgagcctagctgagttctgagggaagaacctctcaaagatcattctgtagtaatatgcttccttggtttttggggtg

SEQ ID NO: 230145 - DNA, 422 bp, Glycine max
ggaaacaacccaatatagagaaaatttttctttggggttttataatataaagcagaaccaaatgacttggaagattctactttcttataccattcacttggcaagttcgttgcggatgagttttgctgcggcaaccatgtttgggagggctggcttcacctcagggtacttacgggtcttgagcccacagtcagggttcacccacaagatgtttttttcgagcactgccagcattttgttgattctgtcagcaatttcttcagttgggggtattcttggggaggggatgttatagacaccagggccaattccagcaccatactttacaccttcggggaagactgacagaagcttcttgtcggagcgagagttctcaatggtgataacatcggcgtccatgtctatgatggagtggatgatgt

SEQ ID NO: 230146 - DNA, 553 bp, Glycine max
  unsure (1)..(553): unsure at all n locations
cttgctgtggtagcagagtattgcccacttagttaaaccggaagaaattgttggcatagctggcaaactttcggatgctgagtccatgattgcactaaaagatttcataaataggatggggtcaaatgatgtatggggtgaaggcattggtgtaaatactaatgctgatttcagatccggatatattatgaatactagcattgctggtcttgaaaaagcggatgccttcctgttggttggtacccagccacgggtggaagctgccatggttaatgccagaatacgcaagcctgtcagagcaaaccaagccaaagttgggtacattgggcctgctactgatttcaactatgaccacaaacatcttggtactggccctcaaacacttctcgaaattgctgagggtcgccacccatttttcaagacactctcgaatgccaaaaaccctgttatcattgttggtgctgnggtttttgagaggaaggaccaggatgcaatttttgccgctgttgaaaccattgcgcacaaagcacatgttgtcagacctgactggaat

SEQ ID NO: 230147 - DNA, 607 bp, Glycine max
ggcaagaatatcaaatttttctcttgttttcctcctcatctctacactactccacatagagcccagcctctcaagcccaagcccaagcccaagcccaagcccgttcataaaatcctactgcagcagcacccagtacccagccctctgcgtctcatccctctccgtctacgcctgcagcatccaacaggaccctcaccaactggttcagacagcactctccctgtccctgaaccgtacccaagccaccaaaacctttgtggctaactgcaacaaattcagaggcctgaaacccagagagcacgctgcactcaaggactgcgccgaggaaatcagcgacagcgttgaccgcctcagacggtcgctgaaggagctcaagctatgtaaggataagggtgaggacttcacgtggcacattagcaacgtggagacatgggtcaggtctgctttgaccgatgagagcacttgcggcgatggattctccggcaaggcgctgaatgggaagatcaaggactctattatggctaggatgctcaatgttgctcaggttactagcaatgctctctcgcttattaaccactatgctgcacaacactagttgggaacaatg

SEQ ID NO: 230148 - DNA, 589 bp, Glycine max
agcgtaagcagcggctaccctaaccttgtcttcctctctactaatttcagctatggccgacgaagctgtggttgttccagatcccacccagatcgatgtcaagctctttaaccgctggagcttcgaggatattgaggttactgacatttcactggctgattacattggagttgcggcatccaagcacgccacatatgttcctcacaccgccggaaggtactccgtgaagcggttcaggaaggcgcagtgccccattgttgagaggctcaccaactctctcatgatgcacggtagaaacaatggcaagaaactcttggctgttaggatcatcaagcatgctatggagattattcatttgttgactgaccagaaccccattcaggttattgttgatgctgtcatcaacagtggtcctcgtgaagatgcaacaagaattggttctgctggagttgtaaggaggcaggctgtggatatttcaccccttcggcgtgtgaatcaggctatatatcttctaacaactggtgcacgcgaagctgcttttagaaatattaagacattgctgaatgcttggctgatgaacttattaatg

SEQ ID NO: 230149 - DNA, 571 bp, Glycine max
  unsure (1)..(571): unsure at all n locations
tagaattacaaattaaatggctccaatttctttctctctgcctctgaacaaatttcatttttcatttctcttacttacactacacagagacagggatacgcaatgataggatcttttattaccagggcacttgtgatggtttttggttatgccttcccagcctatgaatgctataaagcagttgaaaagaataggccagaaattgaacaacttcgcttttggtgccagtactggattttggtagctgttttgtcagtatgtgagcggattgctgatgctttcatatcatgggtcccaatgtatagtgaagctaagttggcatttgtcatatacttgtggtacccaaaaacaaagggaacaacatatgtgtatgattccttctttagaccatatgttgcaaaacatgagacagaaattgatcgcaacttgttggaactaaggacaagagcaggagatattgcagttttgtattggcaaaaagctgctagttatggccagactagaatattnngaaatttgcagtacgttgctgcacaatcaacaccttcaccacgccctgctcagcaacaac

SEQ ID NO: 230150 - DNA, 522 bp, Glycine max
aaacacaaacagtcgaagcagggtgtttttgtctggcttatccaaatctggaactgaaatccccttctccattcattgagtgaagcttcagcttcgataacgaacacagtccttttccatggcaaatgcctggaaaagagataaggccaccagactcctctccccaaagctactgttcctactcttctcctccactctcatagtcttcttcttcttcgcattccttacctcacgcccctcaaaccccgccaccaccctcaccgccttcaacacccgcctctccttcaatgcaatctcccccttcgactgcaccgcctcccctcaggcccaccccgtcgtcgccaacaccgtcgagggcgtccgctaccccttcctcttctcgctcttccgatttggaaccttaccagacaagccccacaagaacatcgtgaggatgctcaagggcaaaccctttcggaaacccgacatctccgttacggttcaggaggttctcgagaaggccaggactgagggtaaggatgg

SEQ ID NO: 230151 - DNA, 562 bp, Glycine max
ataattggaatattgtggatttcattaaacaaatgcctacaaataaaggcatgtatacaagacctaaacccaaacagacctacccaagaatcataggtgatgcttgtccaataacacatgcatttcaaactacgtggacagatagagagatcacgaagcagcttgcagttagcgatgtagttgccacccgtcttaactcgtttccatcagcaatcaatccaccactcaagaattagctgacatagtcaactggcaataacttggttttccatctaggagcagcaaaaactaaaaaccaaaattatgatcaatccttcttgacgcagtgtgcatctgtgccatgttgggtgcaatcatgataacccacactacgtaggaagtctcgaatctcttttgcactgctattactggcccgtaacaagcgctcatcttcttcgtatatgagataaggggcttggcttcctttccttgagagcaactttgatgctcctttaagaacgtgatattcccagccctgaacatctattttaagcagaagcacacgctctgatttcggaatcac

SEQ ID NO: 230152 - DNA, 419 bp, Glycine max
aaaaaaaaaaaaaaaaaaaaaaaaaaattataaaaaattttgaaaaaaaaaaaaaaaaaaagaaaaaaaaggagaaaataagggcggccccggtctatgcaggaaatcaacccgggatttaattccggcccggtccctgtcggcgtaccaatggtccttttccggccttgtgtgaaagcttgccttgtttatgttcttggccggttcctgggggggatgcatattctctctctatggggcccgtcatccggggcggaagcattatgtcattagcgtggggggcctaattgttttctttcctcaaaccctacccggtccgctgcctgtccgctttccaggtaggccaccgggggccccgaatgcttcatggctccccctaaggcccggggcgacccgggcggctttttggggcccaaatg

SEQ ID NO: 230153 - DNA, 535 bp, Glycine max
gcgttaaaatatattaattttttttcccgacacggacaattggggaattcggtgattgatgattgcagaacaacacgccccaaaccaccaaagagaagcaaaatggtgatcactgcacagggtgaataatggagaactatataacacagcaggagcaaacacaaaaaagaacgaaccatagtggaacaccgaaggcacccacaacatataccccctaaactcggaaacacctaccttgataacaaaaaaaaagcctgggggcatcaacaggccccccctcactcatcatcttccgctccaatcagctccaacctcctcatagtccttctcaagagcagcaagggcctcacgagcctcaaaaaactccccttctttcataccctgaccaacacaccagggaacaaaagccctcttggcatacatcagatcaaactcgtgggcaaggcgagagaacacctcaacaactgcggggccgccgatgaggatgcatacagcacgctgaaccctagccaggccccccaccaggaacaacaaa

SEQ ID NO: 230154 - DNA, 542 bp, Glycine max
gggaaagagtggcgcctttttcttgatgtattataggctgtcacatccggaagttactgttctggatcctccagatgccatacaacatttacgcaaccggcagtatatgcttcaggctgttgcggatatgaacctttctgattcctatggcactgttggtgttcctcggcaattagttatcaagagagacgcattagccatcccagagttggtcaacaaagctggcttgactttaccccttgttgcaaagccactagttgccgatggaagtgcaaagtcccatgaattatcccttgcttatgagcatttttcccttcaaaatcttgaacctcctcttgtgctccaggagtttgtcaaccatggaggtgttctcttcaaggtttatatagttggtgatgctataaaggttgtaaggcgggtttcgttacctgatgttagcaactgggaactctccaaagatgctggtatatatcgctctccaagggtttcttgtgctgcagcttctgcggatgatgcagatctggatcctactgttgccgagc

SEQ ID NO: 230155 - DNA, 527 bp, Glycine max
catagggatctcaagccttagaatttcttgtttgatacccctggtgaagatgcacagatgaaggccaccgattttggcctctctgtcttccacaagccaggacaagcctttcatgatgtagtgggaagtccctactatgttgcccctgaggtgttgtgcaagcaatatggaccagaagtggatgtatggagtgctggtgttatcctatacatcttactgagcggggttccacctttctgggctgaaaccgaagcaggaattttcagacagattttaaatggagatcttgatttcgtttctgaaccgtggccacgtctctcagaacatgctaaagaattggtaaaaaagatgttggatagggaccctaagaaaagaatttctgctcatgaaggtggatgtgacccttggatctgtgatgatattgcgcccgacaaacctctggactctgctgttttgacacgcctaaagcttttctcagcaatgaataagcttatgatgatggcattacgggtcatagcacacagact

SEQ ID NO: 230156 - DNA, 493 bp, Glycine max
catagggatctcaagccttagaattttttgtttgatacccctggtgaagatgcacagatgaaggccaccgattttggcctctctgtcttccacaagccaggacaagcctttcatgatgtagtgggaagtccctactatgttgcccctgaggtgttgtgcaagcaatatggaccagaagtggatgtatggagtgctggtgttatcctatacatcttactgagcggggttccacctttctgggctgaaaccgaagcaggaattttcagacagattttaaatggagatcttgatttcgtttctgaaccgtggccaagtatctcagaaaatgctaaagaattggttaaaaagatgttggatagggaccctaagaaaagaatttctgctcatgaagttttatgtcaccctctgattgttgatgatattgcgcccgacaaacctctggactctgctgttatgacacgcctaaagcttttctcagcaatgaataagctta

SEQ ID NO: 230157 - DNA, 463 bp, Glycine max
gtcttacttcaactgaattagaacaacttgtttcccatagatctcaccaatgataacatcaaagcagtgctcttgaacttacttgtaggagctacaggtacaactgaagtcacaacaatctgggccatgactgaactaataaaaaatccaagcattatgaagaaagtgcaagaagaaattagaggcttaagtggtaagaaagatttcttggatgaagatgatattcaaaagttttcctacttaagggcagtgataaaagagacacttagattgcacttaccagcaccactacttataccaagagaaacaaataaaaaatgcatgttagatggctacgaaattccagccaagacattattatatgtgaatgcttgggcaattcatagagatcctaaggcttggaaagatccagaagagtttatacctgagagggttttaaattgcgacatagatctttatggac

SEQ ID NO: 230158 - DNA, 610 bp, Glycine max
gggtttttcagtaacagtaaaaagttctttccagatttttatgattggaacagaatcaaggttaggtattgtgatgggtcatcatttactggtgatgttgaagctgttgatccgaaaaccaatttgcacttcagaggagcaagggtttttgctgtggtcgttgaggatttattagcaaaaggaatgaaaaatgctcaaaatgcaattatctccggatgttcagctggaggattggcttctattctaaattgcgatcgattcaaatcactactacctgcaacaactaaagtgaaatgccttgcagatgctggtttttttatcaatgtaaaggatgtctctggagcacagcgcattgaagagttctacagtcaagttgttcaaacacatggctcagcaaagaatttgcctacatcctgcacttcaagactcagaccagggctgtgctttttccctcaaaatgtcgtgtcccaaatcagtaccccaatcttctttgtaaatgcagcctatgactcatggcagatcaaaaacattttggcaccaggtgctgctgatccccgtggccaatggcgtgaatgcaagcttgatatcaaaaactgctcacctaatcaac

SEQ ID NO: 230159 - DNA, 507 bp, Glycine max
agaatgacagtttttccctttattgataataaaaaggttatgtttacatggtagacaattatcatcctttatcaggttgcctacccttacactttggaaccttttaaatcatcaatcacagcttgttttttgttgatgcaacaatcgaacccatactttgatggtttgagatctcaaaccacaaagccatgagtgcaagtgacacatctcgttcaataaaaactagataactaataaagtatagtttgtagtaataaataaataagcatactcttttaaatgaatctatacgtctggacgctcattctgatcaaaaatacgattatggcaagtagggttgcaagggtaggcacaatctatctcacggaagggccttcgatcataaaaccaatcacccactgcctttgcaattgatgtcttggccaccactggggagtcatttctcagccatgtctcttgtattccagtttggcagtgtgcatagcaaccatctataaaatgcccttt

SEQ ID NO: 230160 - DNA, 514 bp, Glycine max
  unsure (1)..(514): unsure at all n locations
tttgttgacattcctccggagatgaaaaaacttggttccgtttagaaaaggctacaattgctttgtgatatcacaggagcctttaggccaggaattctcactgcactgatgggggtcagtggagcaggaaagacaactctgatggatgttctttcaggaagaaaaactggaggtatcattgaaggagatataagaatcggaggctaccccaaagtgcaaaagacatttgaaagagtttcaggttactgtgagcagaatgacatacattctccatatataaccgttgaagaatctgtcacatactcagcttggttgcggttgccaacagaaattgattctgtcacgaaagggaaatttgttgaagaagtccttgaaacaattgaacttgatggtataaaggattgtttagttggcatccctggccaaagtggcttgtctaccgaacaacgtataagactaaccattgcagnggagctggtttccaatccatcaataatattcatggatgaaccta

SEQ ID NO: 230161 - DNA, 508 bp, Glycine max
aaaatatattttttttcttatgaaatgagtctggtcacagaaccactgttatttttctgtagagagagagagagagagatcttgctaatctatgtagccacatatttctatatttctatacatgaacattgaagccagcatactgcagaagaaccaaactgtgtctttgtctgtgtctatcttatctcttttggtaattcattttctttatgaaataggcaaacagagaagcgtagacaattgggtacacaatgagcaccacagccacaaggcttaatctgtcatgccggaagccatagtaatctcttaaaaaggaaccaactgattttcgttccccaaatacgagtacctccttctctatgtctccatattgggaagttaggaggccattcaaggaccaagcagtaggacaaatccagtagcaccaaacccaccatttaggaattttcggtcctggcatgagaaatccagaaaagagattgaatatggtgtagactgcagtcgacaa

SEQ ID NO: 230162 - DNA, 491 bp, Glycine max
ctcatttgtccactccttttttctgtagtttttattttttgtttatttttaactaactatgaattgttgtgtacacgtcaatgttcaaaagctcaattctaattgtcacatgaataattgttttgggatttgtccaacctgctgaattatttaatgaatattatactttcagagtcaagaatgtctaaagaagttattgctactcaatcacctactccttttgagtatgagatcttggatagtgatgctgaagtccttagaactgttagagcctcatccaattgtgctaatccatggattgaacctgaaaggttgaaacttagacatagaattggccgaggcccctttggtgatgtctggctagcaactcatcatcagtcaactgaagattttgatgagtaccatgaagatgctgctaagatgttgcatccaatcagagaggatcatgtgaagattgtattagagaagttcaatgaattgtattttaagtg

SEQ ID NO: 230163 - DNA, 617 bp, Glycine max
caccagtttcaccgcacgtatatcttgttgtttggagcgatccgagaaaaactctgtaaacatgttggtttaccaggacctccttacaggtgatgagcttctctctgactccttccgttacaaggaaattgagaatggaatgctgtgggaagttgaggggaagtgggttgttaaaggagcagttgatgtagacattggtgcaaacccttctgctgagggtggaggagaagatgagggagttgatgatgcagctgttaaggttgttgacattgttgacacattcagacttcaggagcaacccgcattcgataagaagcagtttgttaccttcatgaagaggtttatcaagaatttgactcccaagctcgatgcagagcaacaggagttgtttaagaagcacatcgagggagcaactaaatacctgctctctaagattaaagatttccaattttttgttggtgagagcatgggtgatgatgcttgcttggtctttgcctactacaaggacggcgctgctgatccaacattcctgtactatgcatatgccttaaaggaggtcaagtgctaaatgacttaatgtaccgagctatctactcattttatctaggtttttttta

SEQ ID NO: 230164 - DNA, 516 bp, Glycine max
  unsure (1)..(516): unsure at all n locations
atttggagtttggagcgtttgaactaattattaatttgcactcgctgtttcagcttcatcacccttcttttgcatcatttatatctcttgagaaatggcacaagaaacctttctattcacatctgaatctgtaaacgagggtcaccccgacaagctgtgcgaccagatctctgatgcagtacttgatgcgtgccttgaacaggaccctgacagcaaggttgcctgtgagacatgcaccaagaccaacatggtcatggtcttcggagagatcacaaccaaggccaacgtagactatgaaaagattgtccgcgacacatgccgcgaaattggattcatctctgatgatgttggtcttgatgctgacaaatgcaaggtgttggtcaacattgagcaacagagcccggatatcgcccagggtgtgcacggccacttcaccaagcgcccaaggaggttggtgcttgtgaccagngtcacatgtttgggtatgccaccgatgaaacccccgagtacatgccc

SEQ ID NO: 230165 - DNA, 565 bp, Glycine max
agcgagcagcgtttgtttgttccttctttagtcgttgtgacagtgtgtgtgagtgagtgagtgagagcgacgatgggcgcgagcagcgaccccacccaagacggttccgacgagcagcagaagcgttcggagatctacacctacgaggccccctggcacatctacgccatgaactggagcgtccgccgcgacaagaagtatcgcctcgccatcgcctccctcttagagcagtaccctaaccgcgtggagattgtccagctcgacgactccaacggcgagatccgttccgacccctccctctccttcgagcacccttaccctcccaccaaggccatcttcatccccgacaaggactgccaccgccccgatctcctcgccacctgctctgacttccttcgcgtctggcacatctccgaatccgccgtcgaactcaagtccctcctcaacggcaacaagaacagcgagtactgtgggcccctcacctccttcgactggaacgaggccgagcccagacgcataggcaccttcagcatcgataccacctgcactatctgggatatcgaga

SEQ ID NO: 230166 - DNA, 496 bp, Glycine max
cacgaaggggtttgcattttttttaacaataaaaagaaacaacaatacaactgtgttttgttttcaaatctaaagtatccccaattttcgtttgcacatacagggaaacagaagtttcagagaaatcaaatttcaaaccctaagaatctgaagcttggtggagaaagcaatagcgacccaatcaggctgcgaagacgaccactgaagctgctcaatctccgctccggcagtgtacgcaagaatagggtcaagcccaccctccacgggttgacccatggaagaaaggtcccaaatcagcgcctgcgaatcatccccggccgtgcatatatggcacgagctatgtggggcccacgcaatcgcgttcacactcgcctggtgtcgctgcagctccaccacagggagcgtgggaaaacgaatatccaacaccaccacctttgcactgtccatgattatcgtcgccatgtagcgtgggtcctgcttgttccacccgagccgc

SEQ ID NO: 230167 - DNA, 600 bp, Glycine max
tgccctcgtctctttttgaaaacacttttttttcgcatagttgattctttctctctttatctttctttccccaatttgtgagtgttactgttgaatcgattggattggcattaggttgatctgaaatacgcaattgacatggcgagcgcgatggtagaggacgcgaacttcgaagatgaccaactagccaatatgaccaccgacgacatcgtcagagcttctcgtcttctcgacaacgagattcgcatcctcaaggaagagttgcagaggaccaatttggaattggaatcgtacaaggacaagatcaaggagaatcaggagaagattaagctcaataagcagttgccctacctcgttggcaacattgttgagatattggaaatgaacccggaagacgaagctgaagaagatggtgccaatattgatcttgactcacaaaggaagggaaagtgtgttgtgctaaagacttctactcgacagacaatctttctacctgttgttgggcttgttgaccctgacaagttaaaaccccgtgatctgggtggtgttaacaaggatagttacttaatcttggataccctgcctttcgagtatgattct

SEQ ID NO: 230168 - DNA, 337 bp, Glycine max
ttttttttaattttaaatgtaattacttgtttaccccccatatatttttttgggtttttgggatattttttaatcccttatccccccttaaccccccaataaaaacacatttctttaaaaaaaaatatatccccaccacccccaaaaagcaaaaacaaaaaaaccccccacccccgaagaccacaaaaaacacaaccccacccccacaaaaacaaccccaacaccaaaaaaaaaaaacaacccaaaaacaacccacaatacaaaaaaaaaaaccaccccaaaaaaacaggaaagaaacaaacaccccaacaacgacaaccatgaggccggggaaccc

SEQ ID NO: 230169 - DNA, 526 bp, Glycine max
  unsure (1)..(526): unsure at all n locations
attcagtgatggagttggctatagttgttttgatggccttaaggcccatgctgcaaaacatgtgactgaaaaaatgatgcttaatgctggtaacatttacccccacaacaccccaaaaaccaaggaagcatattactacagaatgatctttgagaggttcttccctcagaactcagctaggctcactgttcctggaggagcaagtgttgcatgtagcacagccaaagctgttgagtgggatgctgcttggtctaacaaccttgatccctctggtagagcagcacttggagtgcacatttcagcctatgaaaaccagaacaacaagggtgtagaaattgagaagataatacctatggatgctgctccccttggtgttgccatccagggctaatacaaagatgtgacaaagaataatttgggcgacaatgaagataactaagctaaaggtgaatgaaaaatttgcctgcagtgtaatttcatctgggcaaagctnttatagtttatagttataagggctttctaaaaa

SEQ ID NO: 230170 - DNA, 479 bp, Glycine max
ctcatctacttactgttttaggggcctattatgatgctccacataaaactcagatatcatgccgcactgaccgtgctggacttattgattctgctccttggataagaattccatatccatttcaatggggagcaccttcatttgatgcaggtgaagcctttgccatgatgatggcatcttttgttgctcttgtggagtccagtggagctttcattgctgtatataggtatgcaagtgcaacgccattgccaccatctattctcagtcggggtattggttggcagggagttggcattctgttatcaggattgtttggaacagtcaatggatcctctgtgtctgtagaaaatgcaggtcttttggctttgacacgtgttggaagtagaagagtggtgcaaatctctgccggatttatgattttcttttcaattctcggaaaatttggagcagttcttgcctctatcccaccctccattatt

SEQ ID NO: 230171 - DNA, 378 bp, Glycine max
  unsure (1)..(378): unsure at all n locations
gaaaagccatttccatagcagcctaagaaaatgaagagcactagcttgttcgctatctttctactttgcgccttcacctcatacctaccttccgccaccgcccaggacgtgctcgacgtggatggcgatccgattcggaacggtttcatatactacgttttgccggcaataagaggaaacggtggcggaatagaacgagccgcactcgggaaagacacttgccctatcactgtagtgcaatctcccaatccaaactctaaggggttagaaattaagtttgaatctgcataccccgcctattacataaacgaaaccctaattttgcaaataaagttcagttacccacagcagtgtgaaaganagaatccttggtgggcc

SEQ ID NO: 230172 - DNA, 403 bp, Glycine max
ctctccattgtctttgaacactcatcaccatggccaagcttgttctttccctttgtttccttcttttcagtggctgcttcgctctgagagagcaggcacagcaaaatgagtgccagatccaaaagctgaatgccctcaaaccggataaccgtatagagtcggaaggtgggttcattgagacctggaaccctaacaacaagccattccagtgtgccggtgttgccctctctcgctgcacccttaaccgcaatgcccttcgtagaccttcctacaccaacggtccccaggaaatctacatacaacaaggtaatggtatttttggcatgatattcccgggttgtcctagcacttatcaagagccgcaagaatctcagcaacgaggacgaagccagaggccccaaga

SEQ ID NO: 230173 - DNA, 397 bp, Glycine max
cttggcttgtgaatcagcaccacattcacctgagctttttgtgaggattccaaagcatggcttcccttgcagcatccactgctgctgcttcccttggcatgtcagaaatgcttggaaaccccatcaacctcagtggtgccacaaggccagctccatctgcctctagccctgcctccttcaagactgtggctcttttctccaaaaagaaggctgcacctccaaaaaaagctgcagctgctgctcctgccaatgatgagcttgccaagtggtatggtcctgacagaaggatcttcttgcctgagggtctcttggaccgatctgagatcccagagtacttgaccggagaagtccccggagactatggttatgacccatttggtcttagcaagaagccaga

SEQ ID NO: 230174 - DNA, 398 bp, Glycine max
ctgaactcggctcgagggggagtgaagaggctttgggcgattgtgaactttattctcgcgattgggttcggaatgacggtggtgatcaccaaggtggcggagcaccagcgccggatgaaccccgccgccgtgggccacccctccgagggggtggtggttgggtccatggttttctttggggttcttggagttccccttgcgattactttcagtgtcccttttgctctagcatcaatatactgcagcgcttcaggagcaggacaaggtttatctttgggagttctcaatcttgcaattgtggtaccacagatggtggtgtctgcattaagtggtccttgggattccttgtttggtggtggcaacttgccggctttcatggtgggtgctgcggcagccgc

SEQ ID NO: 230175 - DNA, 321 bp, Glycine max
  unsure (1)..(321): unsure at all n locations
cgtaagatcngaaggccgctttactgggatttttcaagatgctccgcactgctgactttaatcacacgaatggattctcaaatcagaggtggataaacacggtggactatcaagatagcaggcttttccccgtggaagttcgctagtgcgctcacgtggtcctagcttggtgcatagctgtcattggtgttcctgtctctcttcttgaaactaggtgcattctcacatttgatccagtatgaatctcatgtaggtgttcgtcattaggacaaagctgagctgtgtgaattaacactccgttcagtgtgatagcagagactt

SEQ ID NO: 230176 - DNA, 385 bp, Glycine max
aagatgagtttgaagaacaacatggtggtgctaaaggtgtgtttgttgcttcttttccttgtgggggttacagctgcacgcatggaactgagcttcttcaaaagtgatcagtcatcaagttatgatgatgatgagtattcaaaaccatgctgtgatctctgcatgtgcacacgctcaatgcctcctcaatgcagctgtgaagatattaggctgaattcatgccactcagattgtaagagctgtatgtgcacacgctcacagccaggacagtgtcgttgtcttgacaccaacgacttctgctacaaaccttgcaagtccagagatgactagaaaaactaatagctctctcaaatggacgaagcccctttaggctttgtttgttatg

SEQ ID NO: 230177 - DNA, 404 bp, Glycine max
gagattgtgaagtagaaatcggtgcaagaaattctccactttatctaaaaaaattcggtgagtttgtgaagacaaaaaatcactagctactcaaaaatggccacagtaggaaggaacgttgcagctcctttgctgtttcttaacttgatcatgtattttattgttcttggctttgctagttggtccctcaacaggttcatcaatggccaaacttaccaccctagttttggtggaaatggtgcaaccatgtttttcttaaccttctccatactagcagctgttctgggcatcgtgtccaaacttttgggtgggaatcacatgaggacatggaggagtgacagtttagcatctgcaggagccacatcaatggttgcttgggcagtcacagctctagcatttgggtt

SEQ ID NO: 230178 - DNA, 417 bp, Glycine max
taaactcggaaatcggctcgaggacaaggataagaaaaggcctgtctctcgttcatcccgtgctgggatccagtttcctgtgggtcgtatccataggcagttgaagcaaagggtgcaagcaaatggacgtgtgggggcgactgctgctgtgtacttggcctccattctggaatatctgactgctgaggtgctggagctggcggggaatgctagcaaagatctgaaggtgaagaggatcacaccaaggcacttgcaactcgctatcaggggagacgaagagcttgacaccctcatcaaagggaccattgctggtggtggtgttatccctcacattcacaagtccttgatcaacaaagctgccaaagaatgaaaatcaaatgcctctttgtttctcctattatgtgttcctttaagttt

SEQ ID NO: 230179 - DNA, 371 bp, Glycine max
gacaaggataagaaaaggcctgtctctcgttcatcccgtgctgggatccagtttcctgtgggtcgtatccataagcagttgaagcaaagggtgcaagcaaatggacgtgtgggggcgactgctgcggtgtacttggccaccattctggaatacccgactgctgacgtgcaggagctggcggggaatgctagcaaagatctgaaggtgaagaggatcacaccaaggcacttgcaactcgctatcaggggacacgaagagcttgacaccctcatcaaagggaccattgctggtggtggtgttatccctcacattcacaagtccttgatcaacaaagctgccaaagaatgaaaatcaaatgccctctttgtttc

SEQ ID NO: 230180 - DNA, 392 bp, Glycine max
gattaataacactcgccatacccgttaacaagcctggtagatttgagagtttcttcctatctagcactgaagctcaacaatcctacttgcaaggattcagcaggaacattttagaggcctcctacgataccaaattcgaggagataaacaaggttctgtttagtagagaggaagggcagcagcaaggggagcagaggctgcaagagagcgtgattgtggaaatctcgaaggaacagattcgggcactgagcaaacgtgccaaatctagttcaaggaaaaccatttcttctgaagataaaccttttaacttgagaagccgcgaccccatctactccaacaagcttggcaagttctttgagattcacccagagaaaaacccccagcttcgggac

SEQ ID NO: 230181 - DNA, 388 bp, Glycine max
aatggctgcaaaaagctgatgtgcctaccatagcacagattgaagagttccattcgatgcagaggatgatgaatgctcctgattcaaatgataatattgatctactgttgagcattgatttgttgggtttacaaggagcaggcaaagcttttccaaacaagattgtttttgatgataagcttgtgttggctaacacacaagaattctttgatggaaattttccagtggattcttggttaccaatttttgtgaattgtctttatcctgtaagtcaattaccttcagaagctgtcgttgtaaatgtcacatgtggtagtggacgtggtggtttacccaccactgcttggattagttctgcagttaacaatcgctcctcagatatcaacaa

SEQ ID NO: 230182 - DNA, 399 bp, Glycine max
attgttgtgactcgttcttcttcgtcgttatcttcttcttttgttgtttgtgtgtttgttttttctctcaactgaaaatgtcttgctgcggtggtaactgtggttgcggaagcgcctgcaaatgcggcaacggctgcagaggctgcaagatgtacccagacttgagctacaccgagtcaaccaccaccgagaccttggtcatgggagtggcaccagttaaggctcaattcgagagtgctgaaatgggtgttcccgctgagaacgatggctgcaaatgtggagctaactgcacctgcaacccctgcacttgcaagtgaggtgttggagagctaaagcttcaagcagaaatggcccttagaaataatgataaaaactatatgtagtttcaaaacttcaaaa

SEQ ID NO: 230183 - DNA, 201 bp, Glycine max
gcattttcagaggaaaatggcgggtacggtttcgacttgtttcttcttcgtgtttcttctttctctccttcttccttttcagatctccgctgaggaatcctcggagaagaattcgtactcaaaatgggttaatccaactttcaagaaacttgtcagcaagcacgatttcatcgtcgtcaagttcaacgccccatggtgtgc

SEQ ID NO: 230184 - DNA, 388 bp, Glycine max
aagaaagtcttccatagccccccaaaaatgaagagcaccatcttctttgctctctttctcttttgtgccttcaccacctcatacctaccttcagccatcgctgatttcgtgctcgataatgaaggtaaccctcttgaaaatggtggcacatattatatcttgtcagacataacagcatttggtggaataagagcagccccaacgggaaatgaaagatgccctctcactgtggtgcaatctcgcaatgagctcgacaaagggattggaacaatcatctcgtccccatatcgaatccgttttatcgccgaaggccatcctttgagccttaagttcgattcatttgcagttataatgctgtgtgttggaattcctaccgagtggtctgttg

SEQ ID NO: 230185 - DNA, 379 bp, Glycine max
ctggagattggatcacacttatacaaaattctccaattagtaacttgttgagagttgctgcttggaagaaaggctgtttaatggtcaagattgtgatgtctgggaatgcagcagtcaaaaggagtgattgggcctcattggtacaagtgtttttaacaaacagcaacagtacagagcattttgatgcatgtaagtggacaaaatcagaaccacattcctgggaattgatcttcccaatagaggtatgtggtcctaataatggttttgaaatgtggagttctgagtgggcaaatcaaacttcatggcatttgagtttccttattgacaatcccaaacagtctacagtttttgatattctcttgggaatctctcaagattt

SEQ ID NO: 230186 - DNA, 391 bp, Glycine max
gaattttcttcatccttctctgttctcctagaacttgattacttgaacattccctatgacagatgaggtggttcttctggatttctggccaagtccatttgggatgagggtcaggattgcacttgctgaaaagggtatcgaatatgagtacaaagaagaggacttgaggaacaagagtcctcttctcttacaaatgaacccggttcacaagaagattccggttctcatccacaatggcaaacccatttccgaatccctcattgctgttcagtacattgaggaggtttggaatgacagaaatcccttgttgccttcagacccttaccagagagctcaggctagattctgggctgattatgttgacattaagatacatgatcttggaaagaag

SEQ ID NO: 230187 - DNA, 378 bp, Glycine max
  unsure (1)..(378): unsure at all n locations
acacttccttagttcaatatggggaagcncttcactctctctcctttcttccctttgcttgcaacccttgtcaattgcatgcttggcaataactccaaccagcccaaccaattgcaaatcaacaacctccaagccttgggaacccaacaacggctttaattccaaaggtggttggatcaaacctgggactcccaacaacctgaactcaaatgcgccggtgtgacaggttccaaactcacactcacaagcgaaggggtctacatgtgataccacacacattatacccgggggatcttcacagcccacagggaaagggcacatggggttgcaaatcccggatgtcctgagacatttgtggagccacaagaacaatcaaac

SEQ ID NO: 230188 - DNA, 327 bp, Glycine max
ggggaagtgggttgttaaaggacaatttgatttaaacaatggggcaaaaccctccgctgaaggttgaggaaaagatgagggagttgatgatgcagctgttaaggttgttgacattgttgacacattcagacttcaggagcaacccgcattcgataagaagcagtttgttaccttcatgaagaggtttatcaagaatttgactcccaagctcgatgcagagcaacaggagttgtttaagaagcacatcgagggagcaactaaatacctgctctctaagattaaagatttccaattttttgttggtgagagcatgggtgatgatgcttg

SEQ ID NO: 230189 - DNA, 398 bp, Glycine max
ggaattcggctcaagggagctcttcttctaccacacttcaattcaaaggcgatagtgatactggtaattaatgaaggagatgcaaacattgaacttgttggcctaaaagaacaacaacaggagcagcaacaggaagagcaacctttggtagtgcggaaatatagagccgaattgtctgaacaagatatatttgtaatcccagcaggttatccacttgtggtcaacgctacctcaaatctgaatttctttgctactggtattaatgccgagaacaaccagaggaacttcctcgcacgttcgcagaacaatgtgataagccagatacctaatcaagtgcaggagcttgcattccctgagtctgcacaagctgttgagaagctattaaagaaccaaagaga

SEQ ID NO: 230190 - DNA, 383 bp, Glycine max
agaaaacctaaccttagaattagaaacacagaagagaagaaaggaaagaattgatcgttgaaaatgcacggaggaaagaaagcgggagagtccattaaggaaacagctacaaacattggtgcttctgccaaggctggcatggagaagaccaaggccactgtccaagagaaggcagaaagaatgacagcacgtgatccggtgcaaaaggagttggcaacccaaaagaaagaggcaaagatgaaccaagcggagctggacaagcaggcggcgcgtcagcataacacggcggccaaacagtccgccaccacggctgggcacatgggacatggccaccacaccaccggaaccgggactggaaccgccacgtattccaccaccgggga

SEQ ID NO: 230191 - DNA, 346 bp, Glycine max
ggtccactctaaaggatacctcggggaattccaattccacattttcaagaaataaggaggcaaaaatgttcatatatgaattggaattatttgttttcttattaggcctatcctgaagccaaaggaaatgagatcggaattcctcggggaattccaattccacattttcaagaaataaggaggcaaaaatgtccaagcataaattggaataattggtttcctaataaggccaacctcagacccaacggaattgatatgggaattccgcggagaattccatccccatatttacaagacataggggggcaaaggtgttcatatagcatttggatatatttgttttcat

SEQ ID NO: 230192 - DNA, 406 bp, Glycine max
agaaaacctaagcttagaattagaaacaaagaaaagaagaaaggaaagaattgatcgttgaaaatgcagggaggaaagaaagcgggagagtccattaaggaaacagctacaaacattggtgcttctgccaaggctggcatggagaagaccaaggccactgtccaagagaaggcagaaagaatgacagcacgtgatccggtgcaaaaggagttggcaacccaaaagaaagaggcaaagatgaaccaggcggagctggacaagcaggcggcgcgtcagcataacacggcggccaaacagtccgccaccacggctgggcacatgggacatggccaccacaccaccggaaccgggactggaaccgccacgtattccaccaccggggaatatggtcagcccatgggggccc

SEQ ID NO: 230193 - DNA, 351 bp, Glycine max
acgcgtacgtacaactcggaatccggtccaaaacaaaatgaacaagttcaaaatcctcctcatctctcctctcttctgcatcgcccaaaattgcaacgcctccaaatgggagcaccaacaagatagctgccgcaagcagctccaaggggtgaacctcacgccctgcgagaagcacatcatggagaagatccaaggccgcggcgatgacgatgatgatgatgacgacgacaatcacattcttaggagcattcggggaagaatcaactacatgacgaggaacgaaggacaagacgaacaccaagaacaagaaggacacatgcagaacatcttcacaaaaatgaactaactcac

SEQ ID NO: 230194 - DNA, 421 bp, Glycine max
tacgtaaactcggaattcggctcgattgattctcaggaaaactttgcaccactagacaagaagctgaaggaacatgagggtgggagaacttctaatcgcctgttttatctttcaattcctcctaatatattcatagatgctgttaaatgtgcaagcttgtcagcttcttctggtaatggttggaccagggttattgttgaaaagccttttggccgtgattcagaatcttcggctgcattaacaaaatcactcaagcagtatctgacagaggatcaaattttcaggattgaccactatcttgggaaagagcttgtggaaaatctttctgttctccgattctcaaatctcatcttttgaacattatggtcaaggcagtatataagaaatgtacagttgatattctcagaagattttggcactg

SEQ ID NO: 230195 - DNA, 354 bp, Glycine max
aaggctgcactctcttttatccctcaaaaaccaaaaccctaatggcagaacgcggacgtggcgaccgtggcagcgaccgtggcggtttcggacgcggctttggtgggcgatggcgcggaggtgacaggggccgaggccggcgccgaggtccccgccgcgaggaagaggagaaatgggtcccagtgaccaaactgggccgcctggtgaaggagggaagaatccgaagccttgaacagatctacctccactcgctcccgatcaaggagcaccagatcatcgacacgctcgtgggtcccaccctcaaggacgaggtgatgaagatcacgccggtccagaagcagacccgggccgggc

SEQ ID NO: 230196 - DNA, 366 bp, Glycine max
cgagaacaaaaaaaaaaaaaaaaaaaatccgcgattcgctcttctcttggaaaagtgaaaaccagaagtacgaacgaaagagaagagcgatttagaagtgagagaagatggggttgtcgttcacgaagctgttcagcaggttgtttgcgaagaaggaaatgaggattctgatggtaggtctcgatgctgctggtaagacaaccatcttgtacaagctcaagcttggagaaatcgtcaccactatccccaccatcggatttaatgttgagactgtggagtacaagaacatcagcttcactgtgtgggatgttggtggtcaggacaagatccgtccactgtggaggcattatttccagaacactcagg

SEQ ID NO: 230197 - DNA, 360 bp, Glycine max
gaaagtcttccatagccccccaaaaatgaagagcaccatcttctttgctctctttctcttttgtgccttcaccacctcatacctaccttcagccatcgctgatttcgtgctcgataatgaaggtaaccctcttgaaaatggtggcacatattatatcttgtcagacataacagcatttggtggaataagagcagccccaacgggaaatgaaagatgccctctcactgtggtgcaatctcgcaatgagctcgacaaagggattggaacaatcatctcgtccccatatcgaatccgttttatcgccgaaggccatcctttgagccttaagttcgattcatttgcagttataatgctgtgtgt

SEQ ID NO: 230198 - DNA, 384 bp, Glycine max
tgaaaaattactgcgccaggctagagctccaagtatgtttttacaatccttcaaaaattttgtttctttgtgtgtgtatggtgatgataacttaattagtgttcatgaatatgtcaagccttactttagtggttctaaattgaaaagctttctagctggtcataatatcaccattactgatggtattgacaaaactagtgcaactttgcaatttagaaagttagcagattgtgattttctcaagagaaactttaagcagatgtctaatgttttgtgggtggctcctgaggacaaggcgagtttatggtcacaacttcattatgtttcgtgtaataatctggaaatgcaagaagcttatcttgtcaatctcgtaaatgtgttacg

SEQ ID NO: 230199 - DNA, 359 bp, Glycine max
  unsure (1)..(359): unsure at all n locations
gaaagtcttccatagccccccaaaaatgaagagcaccatcttctttgctctctttctcttttgtgccttcaccacctcatacctaccttcagccatcgctgatttcgtgctcgataatgaaggtaaccctcttgaaaatggtggcacatattatatcttgtcagacataacagcatttggtggaataagagcagccccaacgggaaatgaaagatgccctctcactgtggtgcaatctcgcaatgagctcgacaaagggattggaacaatcatctcgtcnccatatcgaatccgttttatcgccgaaggccatcctttgagccttaagttcgattcatttgcagttataatgctgtgtg

SEQ ID NO: 230200 - DNA, 389 bp, Glycine max
taaaaatgttggaagtgaaacaaggtgagaagtatgcccctggaaatcaaatattggagaactcctctaacactgggcttgataaggaggagaatgtacaagatatattagaagaaagctccaatcattctacccgcaaagaacattttgatcatcatgaatttgaagatcgcactgattctcaagttagagcatctcatcaaaataccacaaccttcaaaaccattgaccaaaaccagatgatagatggaacaagcactcacaccaataacctcagcaagacttgtaaaccttcagaggaagatggtagcctgctaaaagctgataaacatagagttgatgatcaacttggtggcaattctcaaagaagaaaaaacacaactgttgat

SEQ ID NO: 230201 - DNA, 394 bp, Glycine max
gaggaaaatttgaagagtttgttaattgtgaaaaaaagaaaaatgcatgcagcatagatagccatatagacctttaaggaaaccgcagccaacattggcgcctctgccaagtctggcttggagaaaaccaaggccactatccaagagaagaatgagaagatgaatgcagaagatcaaactcaaatggatatggctaccaagaggaaagaagagaagatcaaccaggctgagatggagaagcagcaggcccgtaagtactacgccgctgcaaaacaatacgccatggctgagcacatggcaaagggcaaccacgacaccgccgggcctagaatcgagactgccacacacatcaccagtgggcccgggactgacaatgctatgtactctaacactg

SEQ ID NO: 230202 - DNA, 379 bp, Glycine max
ggggaattcaaattcaaaattttcaaaaattaaggaggcaaaaatgttcaaatatgaattggaattatttgttttcttattaggcctatcctgaagccaaaggaaatgagatcggaattcctcggggaattccaattccacattttcaagaaataaggaggcaaaaatgttcatatatgaattggaattatttgttttcttattaggcctatcctgaagctaaaggaaatgagatcggaattcctcggggaattccaattccacattttcaagaaataaggaggcaaaaatgttcatatatgaattggaattatttgttttcttattaggcctatcctgaagccaaaggaaatgagatcggcattcctcgggggtaccg

SEQ ID NO: 230203 - DNA, 327 bp, Glycine max
  unsure (1)..(327): unsure at all n locations
gagaaacaaagaaaggaaataattgatctttgaaaatgcatggaggaaagaaagctggagagtccatcaaggaaacagctgcaaacattggtgcttatatgcttttcatttgctgttactaattacagatatgcaatttggaatttactcaaaacattttgttttaggaatgtgtacgagctttcataacagaaagcacagatggagatattcttgaactacatattcaggatccttttcatagattgttactgcatggagtttgtgaggtaatataacatatgcttctccctgtgtnaatggtgaaaactcgatgtgctattaact

SEQ ID NO: 230204 - DNA, 388 bp, Glycine max
aagttattatcaaataattaattaaattcctcgtggaatcttgttgaagccatgtctacagctggtcaggtcatcaagtgcagagctgcggtggcatgggaagcagggaagccactatcgatagaaaccatagaagtggcaccaccccagaaaggtgaagtgcgtttgaagatcctcttcaactccctttgccgtacagatgtttactggtgggatgctaagggccagactccgctgtttcctcgtatcttaggccacgaagcttcggggattgtggagagcgtgggcaagggtgtgacacatctgaaaccaggtgaccatgctctcccaatattcactggggagtgtggtgaatgcacctattgcaagtctgaagagaacacctgtg

SEQ ID NO: 230205 - DNA, 333 bp, Glycine max
atgatgcctccaccagcctcttggttgcttctttggtctacccttcacagagaaccagcaatatcctctccgatgtggtcgatttgaagacttctcttcccgagtgggtgaggatagggttctctgctgccacgggactcgacatacctggggaatcgcatgacgtgctttcttggtcttttgcttccaatttgccacacgctatcagtaacattgatcctttggatcttacaagctttgtgttgcatgaggccatctatatgtgacagatcgaacgaagaacgtgtaatatgacgactctcatgactcgatagtgagtgattgcacatgata

SEQ ID NO: 230206 - DNA, 398 bp, Glycine max
ggcacgaggtaccatgttgacaattgcggcgtgtgcaaaaaagctgttataatggttaatgattgtgatgtctggaaatgcagcaatcaaagtgagtgattgcgccacactggtacaagtcattttaacatgcagcaacagtacagagcattttgatgcatgtaaatggacacaatcggtcccagattcctgggaattgatcgtcccacatagagggacgtggtcccaataatggttttgaaacgtggagttctgagtgggcagatcaaacttcatggcatttgagtttccttagtgacaatcccagacagtcgacagtttttgatatgctcatgggaatttctcaggattttgaaattgctggtaatactcttatgcgagctttttctgttccacaa

SEQ ID NO: 230207 - DNA, 390 bp, Glycine max
gatagcgatgatgttgtttgccatgaactgtaactgcactagtgttggccacatgccttcaaccaaagaggaaggtcacgattttcaggaggctaaagccaagacaacacaaactgcgaacaaggccatggaaactggtaaagatgggaaagaagccgcagagtcatggacagaatgggctaaagagaaactcactgaaggtcttggcttcaaacatgatcaagaatccaccactaagaaagtctctgactatgccggtgatgctgctcagaaatcaaaggactatgccggtgacactgctcagaaaaccaaggactatgccggtgacactgctcagaaaaccaaggactatgccggtgacactgcacagacatcaaaggactatgcccg

SEQ ID NO: 230208 - DNA, 357 bp, Glycine max
attttccttttggatttgataatattaagaggaaccaggatagataggtaggttctagcctttctgttatcattttcgaaacaaaccaaattgaaactgtttgagttttgtttagaaggctgttatgaatgaaactttgaagcttagaaaagcggttaggtagctaggtttcagtttcagatctggtagagagcttcatcatgaagccattaccggcggagcaaaccggtgaatcagcgccgacggagttgcagagatccattccgacgccttttctgaccaagacgtaccagctcgtcgatgatccctccgcggatgacctaatttcctggaacgaagatggcaccagcttcatcg

SEQ ID NO: 230209 - DNA, 336 bp, Glycine max
gccctctcatatgtagcaagaaaaggctgaaccatggtgtgttacttgtgggatatggtgcaaaaggcttctcaattcttaggcttggcaacaaaccatactggatcatcaagaattcgtggggggagaaatggggagaagatggctattacaagctctgcagagggcatggcatgtgtggaataaacactatggtttctgctgcaatggtgcctcaaccacaaacaacacctacaaagaattatgcttcttattagctatgcacttaaggaaatctaaataaatatttttcattctaagtgatgtatcatgtatgtaccaaaatattttggtacg

SEQ ID NO: 230210 - DNA, 380 bp, Glycine max
ctagctagctagcaagcaagcacagagatggaggcaaagcgaggccatgccctcatgtgcttggcacgtgtttcactcttcctctgcgctctaaccctatccgctgctcacggaagcaccacggttcaagacatcgcgagaaagttgaaactcggggacaacgagcttctgcgcacggagaagaagttcaaggttttcatggagaattacgggaggagctactccacagaggaggagtatttgcgccgtttggggattttcgcccagaacatggtcagagcggcggagcatcaggcgctggaccccaccgccgtccacggcgtcacgcagttctccgatctcaccgaggacgagtttgagaagctctacactggcgtcaa

SEQ ID NO: 230211 - DNA, 395 bp, Glycine max
  unsure (1)..(395): unsure at all n locations
ttttgatgcatgtaagtggacaaaatcggaaccacattcctgggaattgatcttcccaatagaggtatgcggtcctaataatggttttgaaatgtggagttctgagtgggcaaatcaaacttcatggcatttgagtttccttattgacaatcccaaacagtctacagtttttgacattctcttgggaatttctcaagattttgaaattgctggtaatactcttatgccagctttttctgttccacaggctactgccagatcttctgaaaatgcggaatcctctgcatgatctggaatttgtgttttctttcatttgtccgtttgtttaattcaataaaggaaattaggcatgaccctcttgttgagtatgctctgcctatttganaatttcacac

SEQ ID NO: 230212 - DNA, 393 bp, Glycine max
  unsure (1)..(393): unsure at all n locations
aacttaattagtgttcatgaatatgtcaagccttattttagtggttctaaattgaaaagctttctagctggtcataatatcaccattactgatggtattgacaaaactagtgcaactttgcaatttagaaagttagcagattgtgattttctcaagagaaactttaagcagatgtccaatgttttgtgggtggctcctgaggacaaggcgagtttatggtcacaacttcattatgtttcgtgtaataatctggaaatgcaagaagcttatcttgtcaatctcgtaaatgtgttacgagaattgtatttgcacagtccagaggaagctcgccaattgagaaggaaagctctctctcgtattgaatggctgcanaaagctgatgtgcctaacata

SEQ ID NO: 230213 - DNA, 400 bp, Glycine max
catcacacacaactactacaagtacttccttacaatcaaaaccaacaacaactatggcaagttatcaaaagcactacgatgatcagggtcgcaaggttgacgagtatggcaacgttgagaagcaaaccgacgaatacggcaaccctgttcatgctgctagtgtcacctatgtaaccaccagaactgctgctggtggttacagtgatgacattaataagcaacatgataccaccaatgcctacggcgtagacactggtagacagcattctagtggtggctacgatggtgacactaataaacatcatggaactactggtggctataatgatgacaccaatagacatcatggaactaccggtgtctatggtatagacaccgataggcaacaacatgggactac

SEQ ID NO: 230214 - DNA, 399 bp, Glycine max
gcctgataacccataaccgaccgcaccaccgttttcctttgctttgcgttctacaatgtcgaaaacctcagagattattacatgcaaagctgctatttgctggggaataggaaaacctgtgactgtggaagagatacaagtagaccctcccaaagccaccgaagttcgagttaagatgctttgtgccagtatatgctccacagacatctctagcacaaaaggattcccacataccaattttcctatagcacttggacacgaaggagttggtattatagagagtgtcggtgatcaagtaacgaatctgaaagaaggggatgtggtaattccaacatacataggcgagtgccaagaatgtgagaattgtgtttcagaaaaaaccaatttgtgtatgacata

SEQ ID NO: 230215 - DNA, 398 bp, Glycine max
gttcttcttcgtcgttatcttcttcttttgttgtttgtgtgtttgtttttttctctcacctgaaaatgtcttgctgcggtggtaactgtggttgcggaagcgcctgcaagtgcggcaacggctgcggaggctgcaagatgtacccagacttgagctacaccgagtcaaccaccaccgagaccttggtcatgggagtggcaccagttaaggctcaattcgagagtgctgaaatgggtgttcccgctgagaacgatggctgcaaatgtggagctaactgcacctgcaacccctgcacttgcaagtgaggtgttggagagctaaagcttcaagcagaaatggcccttagaaataatgataaaaactatatgtagtttcaaaacttcaaaattatgtagtat

SEQ ID NO: 230216 - DNA, 397 bp, Glycine max
gagctgaagaaaacctaagcttagaattagaaacaaagaaaagaagaaaggaaagaattgatcgttgaaaatgcagggaggaaagaaagcgggagagtccattaaggaaacagctacaaacattggtgcttctgccaaggctggcatggagaagaccaaggccactgtccaagagaaggcagaaagaatgacagcacgtgatccggtgcaaaaggagttggcaacccaaaagaaagaggcaaagatgaaccaggcggagctggacaagcaggcggcgcgtcagcataacacggcggccaaacagtccgccaccacggctgggcacatgggacatggccaacaacacaccgggaccgggactggaaccgcacgtatttcaccacgggggaatatggtc

SEQ ID NO: 230217 - DNA, 393 bp, Glycine max; identical to SEQ ID NO: 208347

SEQ ID NO: 230218 - DNA, 390 bp, Glycine max
ggaattttagtggacaaaactggagattggatcacacttatacaaaattctccaattagtaacttgttgagagttgctgcttggaagaaaggctgtttaatggttaagattgtgatgtctgggaatgcagcagtcaaaaggagtgattgggcctcattggtacaagtgtttttaacaaacagcaacagtacagagcattttgatgcatgtaagtggacaaaatcggaaccacattcctgggaattgatcttcccaatagaggtatgtggtcctaataatggttttgaaatgtggagttctgagtgggcaaatcaaacttcatggcatttgagtttccttattgacaatcccaaacagtctacagtttttgatattctcttgggaatttct

SEQ ID NO: 230219 - DNA, 437 bp, Glycine max
aggtccactctaaaggatcacctcggggaattccaattccacattttcaagaaataaggaggcaaaaatgttcatatatgaattggaattatttgttttcttattaggcctatcctgaagccaaaggaaatgagatcggaattcctcggggaattccaattccacattttcaagaaataaggaggcaaaaatgttcatatatgaattggaattatttgttttcttattaggcctatcctgaagccaaaggaaatgagatcggaattcctcggggaattccaattccacattttcaagaaataaggaggcaaaaatgttcatatatgaattggaattatttgttttcttattaggcctatcctgaagccaaaggaaatgagatcggaattcctcggggaattccaattccacattttcaagaaataaggaggcaaaaa

SEQ ID NO: 230220 - DNA, 56 bp, Glycine max
aaaaaaaaaaaaaaaaaaaaaaaaaaaaaaaaaaaaaaaaaaaaaaaaaaaaaaaa

SEQ ID NO: 230221 - DNA, 390 bp, Glycine max
cattaatgtgtgtttgtcacgagacccatagtgctgccaaattatagtaactctctttctctatctgaagaagaagaagttctgaagaagcatgtgtggaggtgctatcatctcagacttcattggtgtgaagcgtggccgcaacctcgccgcgcaggaactgtggtccgagcttgaccctttctctgacctccttggcttcgataccaccaccaccaccaccaaccaaccaccccttccagacaaaaaagtggtgtcatcatgtgagaagaagaagaagaaaagtgtgagtgcagaaaagaagagtggtgggcgagctcggaagaacgtgtacagaggaatcaggcaaaggccgtggggcaagtgggccgcggaaataagggaccacat

SEQ ID NO: 230222 - DNA, 407 bp, Glycine max
cagtctactctagacgatcccctcggggaattctagttccacattttcaagaaataaggaggcaatcatgttcatatatgaattggaatgatttgttttcatatcaggcctatcctgaaaccaaaggaaatgagatcggaattcctcggggaattccaattccacatttgcaagaaataaggaagcagaattgttcatagaggacttgcaattacttgttttcttataaggcctatcctgaagccaaaggaaatgagatcggaattcctcggggaattctaattccagattttcacgaaatatcgaagcaatcatgttcacatatcaacttggattagttgttttcttatgatgcctatcctgaagccatacgacatgagatccgaattcctcggggggtacaagct

SEQ ID NO: 230223 - DNA, 358 bp, Glycine max
cttgatccttctttttctccttgaactcaaacatggcagatgaggtggttctgctagatttctggccaagtccatttgggatgagggtcaggattgcacttgctgaaaagggtatcaaatatgagtacaaagaagaggacttgaggaacaagagtcctcttctcctccaaatgaacccggttcacaagaagattccggttctcatccacaatggcaaacccatttgtgaatccctcattgctgttcagtacattgaggaggtttggaatgacagaaatcccttgttgccttctgacccttaccagagagctcaggctagattctgggctgattatgttgataagaagatatatgatct

SEQ ID NO: 230224 - DNA, 150 bp, Glycine max
cttgaatataatactcagcatggctaagcttgttctttccctttgttttctgcttttcagtggctgctgcttcgctttcagtttcagagagcagccacagcaaaacgagtgccagttccaaggcctcatggccctcaaacgggataaccg

SEQ ID NO: 230225 - DNA, 398 bp, Glycine max
  unsure (1)..(398): unsure at all n locations
gaaaaaagagaagaagatgggtttgaagaacaacatggtggtgctaaaggtgtgtttggtgctacttttccttgtggggggtactactagtgccagcttgaggctgagtgagcttggcctgctcatgaaaagtgatcatcatcaacactcaaatgatgatgactcttcaaaaccatgctgtgatcaatgcgcatgcacaaagtcaaaccctcctcaatgccgctgttcagatatgaggctgaattcgtgccattcagcttgcaaatcttgtatttgcgcattatcgtatcctgcacagtgtttttgtgttgacataacggatttctgctatgaaccttgcaagcccagtgaggatgacaaggaanactactaatgaacaagtgttatgcatgtaagct

SEQ ID NO: 230226 - DNA, 373 bp, Glycine max
ggagatgcaaacattgaacttgttggcctaaaagaacaacaacaggagcagcaacaggaagagcaacctttggaagtgcggaaatatagagccgaattgtctgaacaagatatatttgtaatcccagcaggttatccagttgtggtcaacgctacctcaaatctgaatttctttgctattggtattaatgccgagaacaaccagaggaacttcctcccaaggtcgcaagacaatgtgataagccagatacctagtcaagtgcaagagcttgcattccctgggtctgcacaagctgttgagaagctagtaaagaaccaaagagaatcctactttgtggatgctcaacctaagaagaaagaagaagggaataagg

SEQ ID NO: 230227 - DNA, 381 bp, Glycine max
  unsure (1)..(381): unsure at all n locations
gccagttctgatatttacaccatctgctctcaagactgtgaattgtggaatcctgcttgcacaaaagcaatgactatgtcatttaatccaaacccgtgttctgatgcatggagtttggaatttctgaagcgtactggatttcattgcgatatcatttgtgtcactggatggactgccaccccaatgcaggatgttcaggttacaattgattggtttatttcctctcaggaatgtgttcccaggacctattgtgttttaaatccacaaaatccttttgtgttaaataggtggatgggaaaattgactttcccccagggcacttcccgaagtgttaagagaatgcctctttctatanggggaagagctggtgcaaagaatgct

SEQ ID NO: 230228 - DNA, 404 bp, Glycine max
cggatgtgtgagtttgcatggttggatagcaatggcagcaaagaaggtgtgtgtaacaggtgctggaggattcgtagcgtcttggcttgttaagcttcttctttccaaaggctacattgtccatggaactgtgagagaccctgaacctgctactcagaaatatgaacacttgctcaaactccacggagcttctgaaaacctcactctcttcaaggcagatctcttgaactacgaatctcttcgctcagcaatttctggatgcactgcagttttccatcttgcttgccctgtaccctcaatcagtgttcccaaccctcaagttgaaatgattgagcctgctgtgaaaggaacaactaatgtacttgaagctagccttgaagctaaagtgcaacgacttgtctttg

SEQ ID NO: 230229 - DNA, 282 bp, Glycine max
aacaaaaagattcgcacagcacttgggaaaggtaagaaaattgtttttcttactagagttgatccttttccagtagctctactggctgttctttttggcgttaagaatgaaattctgagttccaacgccactaaccctatgctgacgcgacttcttgagaactgtaagagtctcaaatatctggttgatgagtgtccttttgcatttgtgaactagtatgtaatattttattcacttaaataaagcgcattactatgtgcaatgagtgtgtttaaatataaa

SEQ ID NO: 230230 - DNA, 470 bp, Glycine max
  unsure (1)..(470): unsure at all n locations
ttcctttgcccgntccagggaaagaacagcttgcatggccgcaggtcgactctagaggatcccctcggggaattccaattccacattttcaagaaataaggaggcaaaaatgttcatatatgaattggaattatttgttttcttattaggcctatcctgaagccaaaggaaatgagatcggaattcctcggggaattccaattccacattttcaagaaataaggaggcaaaaatgttcatatatgaattggaattatttgttttcttattaggcctatcctgaagccaaaggaaatgagatcggaattcctcggggaattccaattccacattttcaagaaataaggaggcaaaaatgttcatatatgaattggaagtatttgttttcttattaggcctatcctgaagccaaaggaaatgagatcggaattcctcgggggtaccgagctcgaattccctataatgagtcg

SEQ ID NO: 230231 - DNA, 391 bp, Glycine max
  unsure (1)..(391): unsure at all n locations
acgtattcttctctctccgtctctctctctctctctctctcttcacagtgccaatggcggatccaatcgcgaaggttctgatcgcgtttgcgctcttagcttccctcttgctgtgttcgcacgcttcctccgacgttcccttcatcgttgctcacaagaaggcctccctcaacagactcaagtccggcgccgaaagggtctccgtcaccatcgacatcttcaaccaaggaacctcgacggcctatgatgtaagcttatcagacgatagctggccaagtgatgcttttgatgtaatcagcggtagcacttcaaagtcatgggaaaggcttgatgctggtggcatcctttctcacacatttgagctggaggcanaatcaaagggagtatttgc

SEQ ID NO: 230232 - DNA, 331 bp, Glycine max
ggaggcgagctggaggcatcggcggcgcgtgagggaccaggtgaaggtggtgtggttgtagactagggaagggacgtgggcgtagacggtggctgctctgtccaagaaggcgagtggagtgagaggggatgagttaggagcgcttggcttcagctgttccattaggagaaagattctctgaagcaaaacacacacccacgctgcttctgaatgaatgaacagaacgtatatacacagcgtcttgctcgtgtagtgatgagggagaaatatatgttaaatcattcatttcctctaatatttaagaatgatttagttagatcttttcgtccat

SEQ ID NO: 230233 - DNA, 404 bp, Glycine max
aattaagctttcaagagacaaactgctttgaaaaatgggatccaaggttgttgcatccgttgcccttctcctctccatcaacattcttttcatttccatggttagctccagcagccactacgatccacagccccaaccttctcacgtcactgctcttattacacgacctagttgtccggatctgagtatttgcctcaatattttaggcgggtctctaggaaccgtggatgattgttgtgccctcatcggtggtcttggtgacattgaagccattgtgtgcctttgcatccaactcagggccctcggaatattaaaccttaaccgtaatttgcagttaatattaaactcctgtggacgaagctacccgtcaaacgccacttgcccccgaacctaagaacaggata

SEQ ID NO: 230234 - DNA, 121 bp, Glycine max; identical to SEQ ID NO: 144922

SEQ ID NO: 230235 - DNA, 407 bp, Glycine max
  unsure (1)..(407): unsure at all n locations
ctgattttgtgaacccgaaagatcacaacaaaccagttcaagaggtcattgctgaaatgactaatggaggagtagatcgtgctattgaatgcacaggaagcatccaagcatcaatctcggcatttgaatgcactcatgatggttggggtactgctgtccttgttagtgtgccaaagaaggatgcagaattcaaaactcatcctatgaagttcatggaagggagaactcttaagggtaccttctatggtcactatagaccccgcactgacattcctggtgttgtggagaagtacctcaacaaggagctggagctggacaaatttatcactcactctgtcncattctcagagattaacactgcatttgatcttatgctgaaaggcgaaggaataaggtgcctcatctgc

SEQ ID NO: 230236 - DNA, 395 bp, Glycine max
gttctttgagatcaccccagagaaaaacccccagcttcgggacttggatatcttcctcagtattgtggatatgaacgagggagctcttcttctaccacacttcaattcaaaggcgatagtgatactggtaattaatgaaggagatgcaaacattgaacttgttggcctaaaagaacaacaacaggagcagcaacaggaagagcaacctttggaagtgcggaaatatagagccgaattgtctgaacaagatatatttgtaatcccagcaggttatccagttgtggtcaacgctacctcaaatctgaatttctttgctattggtattaatgccgagaacaaccagaggaacttcctcgcaggttcgcaagacaatgtgataagccagatacctagtc

SEQ ID NO: 230237 - DNA, 365 bp, Glycine max
aaaaccccccttttccaacccaatttttctccataaaccctagattcaacgaacccgccgaccaagctcgaacctcacgtcgcaaaaaaacacttcttttcccctctccgaggttgtcgtgtcggagcatagccatgttgttccctcgaggaaattgatgatttttcataacattggggtctcgttttgcttgtggggtcaccttgaaggagggaaaagtaacgagctttggggctgaatcgtggtgggtctgttgagtatgcatagatctggagctacgatggcgtggaacgtgttcaagttctgcactgctctgcgtggattgggctcgatcatgatcctgttggttcttggcgttgttggtg

SEQ ID NO: 230238 - DNA, 390 bp, Glycine max
aaaatggctgatacaagtggaggagatgcagtgagaccggtggtaatatgtgataacaagtgtggctgcacagttccatgcactggtggttccacttgcaggtgcacaagtgtcggcatgacaactggaggcggtgatcacgtgacatgctcgtgcggagagtactgtgggtgcaatccatgctcatgtcccaagactgcggcttctggaactggttgcagatgtggcacagattgctcatgtgcctcttgccgcacttaacatcataccttaattaagtctcaaacttcacaaatcttgaatgtgctttaaatctagctatgtactagatagtctcgttcaatgttagtgttcaaattgtggatgtgatttctaatattagtctactac

SEQ ID NO: 230239 - DNA, 104 bp, Glycine max
atatgtactgtacgtagtgtgaagatatagtattgtatgctgcagaatatgattgtctaataaggtggactagctgtaataaaagatatttccaggttgaaaac

SEQ ID NO: 230240 - DNA, 161 bp, Glycine max
tcggggaattccaattccacattttcaagatataaggaggcaaaaatgttcatatatgaattggcattatttgttttcttactacgcctatcctgaagccaaaggaaatgagatcgggactcctcggggaattctaagtccacattttcaacacctaaaga

SEQ ID NO: 230241 - DNA, 398 bp, Glycine max
tgttgttgtaacacgttcttcatcttttgttgttctgtgtttgtgtttgttttttctctcacctgaaaatgtcttgctgcggtggtaactgtggatgcggaagctcctgcaagtgcggcaacggctgcggatgctgcaagatgtacccagacttgagctacactgagtcaaccaccaccgagaccttggtcatgggagtggcacctgttaaggctcaatttgagggtgctgaaatgggtgtgcccgctgagaacgatggctgcaaatgtggaccaaactgctcctgcaacccttgcacttgcaagtgaggtgttgggagagcaagcttcaagcagagatagcccttaattaagaataatgataaactattaatgtgtagctaaaaacttatgtattat

SEQ ID NO: 230242 - DNA, 404 bp, Glycine max
gttgcaacctccttaaggtggagaaagaagaatgtgagaaggtgaaattccacgaccacgaccacgaccacaacacccggagagggaacctcagcaacccggtgagaaggaggaagacgacgatgagcaaccacgtccaatcccattcccacgcccacaacctcgtcaagaagaagagcacgagcagagagaggaacaggaatggcctcgcaaggaggaaaaacgcggagaaaagggaagtgaagaggaagatgaggatgaggatgaggaacaagatgaacgtcaattcccattcccacgcccacctcatcagaaggaagagcgaaagcaagaggaagatgaggatgaggagcagcagcgagagagcgaagaaagtgaagattctgagttacgaagacataaga

SEQ ID NO: 230243 - DNA, 340 bp, Glycine max
atttgcctggctttggtcctgttgttcctcaagaatgcagtgattgtgggaaaaaattcaacatgggtgcgcctatatggtctgctcctatccatgaccaagaatgggtggctgctattctggctgatgtaaaatatatgaaagacagatatccagcttatgatcgcatttcagctgtgttgactacaatatcagaggaattgcctgatgttcccctctttttgagtctgcacaacctctgtgcaaccctcaaatgcacttctccgtcagcaattattttccgttctgcggtgatcaatgcatgctatcgtatatctggaactcatgttaatccagtggg

SEQ ID NO: 230244 - DNA, 371 bp, Glycine max
atggcttccttaagctccttagtgctgctccttgcagctctaattctatcccctcaagttcttgcaaactatgagaatcccccagtgtacaagcctcccactgagaaaccaccagtttataagcccccagttgagaagcctcctgtttacaaacctccagttgaaaaccccccaatttataagcctccagtagagaagccaccagtgtacaagcccccagttgagaaacccccagtgtacaagcccccagttgaaagaccaccagtgtacaagcccccagttgagaaaccaccagtgtacaagcccccagttgagaaacccccagtttacaagcgcccagttggaaaaaccccaggtgtacaaggccccag

SEQ ID NO: 230245 - DNA, 406 bp, Glycine max
  unsure (1)..(406): unsure at all n locations
cgaggacacagctgagaaacttcggtctccagatgacgaaaggaagcagatcgtgacagtggagggaggcctcagcgttatcagccccaagtggcaagaacaagaagacgaagacgaagatgaagacgaagaatatgaacaaactccctcttatcctccacgacgaccaagccatggaaagcatgaagatgacgaggacgaggacgaagaagaagatcaacctcgtcctgatcaccctccacagcgaccaagcaggcccgaacaacaagaaccacgtggaagaggatgtcagactagaaatggggttgaggaaaatatttgcaccatgaagcttcacgagaacattgctcgcccttcacgtgctgacttctacaacccanaagctggtcgcattagcaccctcaac

SEQ ID NO: 230246 - DNA, 376 bp, Glycine max
  unsure (1)..(376): unsure at all n locations
tcttaattcatagtctcttggtccttccttccttcttctgctcaataagtgtgtgccactctaattaattaccacccccttctagacatagttcttctccctctgttctctattctctacactgtgaaaccaagatgaaggtagcatttgcagctgttctacttatatgccttgtcctcagctcctccttgttcgaggtgtcaatggctggttctgctttctgttcctccaagtgctcgaagaggtgttctanagctgggatgaaggacaggtgcatgaagttctgcgggatttgctgcagcaagtgcaactgtgtgccatctgggacttatgggaacaagcatgagtgcccttgctacagagacatgaagaactc

SEQ ID NO: 230247 - DNA, 352 bp, Glycine max
cagggtcatgagtcctcgctccatggccaaggatctcagtggaaccattaaggagattctcgggacttgcgtttcggttgggtgcaccgttgatgggaaggaccccaaggatctgcagcaggagatttctgatggagatgttgaggttcctcttgaatgaagttgctgaaatttcagtggttttttgttgtttcgtttatgttgttttttttgggcaattttggtttttttttctttttataaaggaatttgagtcataggaatggtatgatagttaagactttggtaaatgatatcacattgttgggtttttgagtaattttgtaatggagttgtgatttgtattgttgcc

SEQ ID NO: 230248 - DNA, 411 bp, Glycine max
ggtcgactctaaaggatcccctcggggaattccaattccacattttcaagaaataaggaggcaaaaatgttcatatatgaattggaattatttgttttcttattaggcctatcctgaagccaaaggaaatgagatcggaattcctcggggaattccaattccacattttcaagaaataaggaggcaaaaatgttcatatatgaattggaattatttgttttcttattaggcctatcctgaagccaaaggaaatgagatcggaattcctcggggaattccaattccacattttcaagaaataaggaggcaaaaatgttcatatatgaattggaattatttgttttcttattaggcctatcctgaagccaaaggaaatgagatcggaattcctcggggggtacgagctcgaat

SEQ ID NO: 230249 - DNA, 347 bp, Glycine max
cggctcgagggacaggaaacgaagatcacaagaagggtttggtaatttgtttgattagctacgggttgttatgatttccaaccatgtaattccccacaaccaggctcaccgaagttgcaatttcaatccattttcatttgccggtacacaataagtcatgattccctcccgcatttacccttgtttgtgtaaagtactaccagaatgagactaggtatcatcgatgggagggtacatgggcgatgacgagtaagattacctcctcatgctggatctcatcggagattccggtgtcggtaagtcgaacctgctttcgcgcttcacgagggaggagttccacttggggt

SEQ ID NO: 230250 - DNA, 326 bp, Glycine max
ctcacttttgatggcaaggaatagaagatggtcaaacattgcttgaaaacattattcatagtgaagttacctttcatggtgtcaataaaattcatcttgcggggttctcgaaatcccttttacaatttgttctcagttaccttaaccaaatgtacattgttcaacttaatccttcttctttaaggatctgagcaaactgaatccggtgagtaaattctacacttgcatcccgaattcattcaatacatggggatctatctggaaagactggaagggctttcaaggatgagattcacaaataaattgcgaaatggcacgagacccct

SEQ ID NO: 230251 - DNA, 412 bp, Glycine max
ggtcgactctaaaggatcccctcggggaattccaattccacattttcaagaaataaggaggcaaaaatgttcatatatgaattggaattatttgttttcttattaggcctatcctgaagccaaaggaaatgagatcggaattcctcggggaattccaattccacattttcaagaaataaggaggcaaaaatgttcatatatgaattggaattatttgttttcttattaggcctatcctgaagccaaaggaaatgagatcggaattcctcggggaattccaattccacattttcaagaaataaggaggcaaaaatgttcatatatgaattggaattatttgttttcttattaggcctatcctgaagccaaaggaaatgagatcggaattcctcgggggtaccgagctcgaatt

SEQ ID NO: 230252 - DNA, 349 bp, Glycine max
gtcagggaaggacaacacccaagggttcctgcagcagacaggggagaaggtgaagggcgcagcccaaggtgctacagaggctgtgaagcaaacccttggcttgggcgagcatgatcaagacaaccgcagaaattactaatactataatttgaagtgctttcttgtagtagtggtttacgcagcatggctttttaaataagctgctattccctacactcctacctaaggagtgtactattatccgcagtttctattctctctagctactttcatgtatgttcaatgctatatatagccttgaattaatgtcaactatgttctaattaatgctatagcttcggtttgtgtt

SEQ ID NO: 230253 - DNA, 395 bp, Glycine max
gcaaaatgaccaagttcacaatcctcctcatctctcttctcttctgcatcgcccacacttgcagcgcctccaaatggcagcaccagcaagatagctgccgcaagcagctccagggggtgaacctcacgccctgcgagaagcacatcatggagaagatccaaggccgcggcgatgacgatgatgatgatgacgacgacaatcacattctcaggaccatgcggggaagaatcaactacataaggaggaacgaaggaaaagacgaagacgacgaagaagaaggacacatgcagaagtgctgcacagaaatgagcgagctgagaagccccaaatgccagtgcaaagcgctgcagaagataatggaggaacagagcgatgaactggaggagaagcagaag

SEQ ID NO: 230254 - DNA, 180 bp, Glycine max
cggtattcggctcgaggcataatgaccaagttcacaatcctcctcatctctcttctcttctgcatcccccacacttgcagcgcctccaaatggcactatcatcattatatctgccgtacgcatgtccaagggttcaatctcacgccttgtcatatgtctatcatgttgcatatccaaggc

SEQ ID NO: 230255 - DNA, 258 bp, Glycine max
ctctaaccctatccgctgctcacggaagcaccacggttcaagacatcgcgagaaagttgaaactcggggacaacgagcttctgcgcacggagaagaagttcaaggttttcatggagaattacgggaggagctactccacagaggaggagtatttgcgccgtttggggattttcgcccagaacatggtcagagcggcggagcatcaggcgctggaccccaccgccgtccacggcgtcacgcagttctccgatctcaccg

SEQ ID NO: 230256 - DNA, 390 bp, Glycine max
gtcaactctaaaggatcccctcggggaattccaattccacattttcaagaaataaggaggcaaaaatgttcatatatgaattggaattatttgttttcttattaggcctatcctgaagccaaaggaaatgagatcggaattcctcggggaattccaattccacattttcaagaaataaggaggcaaaaatgttcatatatgaattggcattatttgttttcttattaggcctatcctgaagccaaaggaaatgacatctgaattcctcggggaattccaattccagattttcacgaagtaaggacgcaaaaatgttcatatacgaattggcattaattgttttcttaggaggccgatcctgaatccagcggacatgacatgggaattcct

SEQ ID NO: 230257 - DNA, 406 bp, Glycine max
ggggaaaagaaaggccaagagagtcgagaaacggcactctcaccggcgcgcgcaccctctactctgatccagcgactcctaattaagttggtaataatcagccacacttcaagcaggaacataaaagacttcaaatttccaagatggctgcaatctttgcttccagatgctctcgtgtgggccgttctctgttcggtggattaagcaacagttcccctggtttatttaccacattacatgagatgacatgcaaaaatatgttttctcagcaacaacgtaccttcatacagatgaggactgttctcaaggttgtggataactcgggggctaaaaaggtgatgtgcatacaggcattgaaagggaagaaaggggcaagattaggtgacacaataatagcatctgtgaa

SEQ ID NO: 230258 - DNA, 225 bp, Glycine max
agagaatcctactttgtggatgctcagcctaagaagaaagaggaggggaataagggaagaaagggtcctttgtcttcaattttgagggctttttactgaataagtatgtactaaaatgtatgctgtaatagctcatagtgagcgaggaaagtatcgggctatgtaactatgactagagcttcaactatgaataaataaatcgacagcatatgatgcttttgttta

SEQ ID NO: 230259 - DNA, 347 bp, Glycine max
gggactgaagggcgataacaagaactctaagattttgaagaatgctcaacctttcattgattggcttcagagtgcagaatcagaaaccgaggaagaataatttttcctacattctccgttacttatgtttacttgattgtgtcatgttctttatttccaataaaggttattgtaggccccatgtgttgttgaactactatactgtgcgaatggtgcatgcttgctggaccagtatgtatgcctcagtgcgttttgtgatgtgcggttctaatgtaattttgtttttggttgttgatgattaaaaaaaaaaagaaaaaaaaaaaaaaaaaaaaaaagaagagaagagg

SEQ ID NO: 230260 - DNA, 396 bp, Glycine max
ctcgagccgcttctttctctgcgattttttcttcaatttccagatcacgaaactaaagaagatggagaaagcgatcagcagacagaagattttgcttcatcatctcaacccttcatcgtctacccacgtcaacgaatcatcctccctctatgcttcagcatgtgtggcgggggacagcgctgcttatcaaaggacatcgacattcagggatgatgttgtgatcgtggctgcttatcggactgctcattgcaaaggtaaacgtggtggtttcaaagatactcttcctgatgatctactggctcctgttttgaaggctgtaattgagagaaccaatgtgaaccccagcgaagttggggatattgtcgtagggagtgtattggctcctggagctcaaag

SEQ ID NO: 230261 - DNA, 443 bp, Glycine max
  unsure (1)..(443): unsure at all n locations
cgtaaaactcggaatantcggctcgagctgcgcacctcanttgcaaacaacaacagcctgccacaaaaaatcttcaacggcaaaaacaaatctctcgcgatggacgattcattgaccgctgccttcagtacccgcggcgaaagcaacgctttcgcctcgcaccaacaagtggaggataatgaaaatgctaacaacattagcagcagcagcggcaacaaatacaataccggttctgggtttctgcccgcgtctttggacactgacaacattgcggagacaatcaagactttctttcctgtggaagcgacctcgacgtcgtttcagagttacccgccggcgccaccggatttagggcaccaagatctgcggctctcgttgcagtcctttcacgaccctattatgcttcagcaccagcctcatagccaccaccaaccggttctctt

SEQ ID NO: 230262 - DNA, 457 bp, Glycine max
acgcgtacgtaaactcggaattcggtcgaggcatttcaattccaatttgcaaactgtaaagtttaaaccaaaccccacataagaaaatagaaaaaaagacattacttttttaatttctccttcttttaagcaaccataaataagtgtagtgtgttggtgtgtgactaggtttctgccagcttaggggctaatgggtaactgcctagattcttcagccaaagtagaagctgctcacagttccagaaccccttctggaatttcaaaaactagtccttcatctgttccttccaacttatctattctgtcatatagtgaagcaagtgatttctcaaatcttccaacaccaaggtctgagggcgaaatcttgtcttccccaaatcttaaggcctttaccttcaatgagctaaagaatgccaccaggaactttcgcccggacagtcttcttggtgaaggggga

SEQ ID NO: 230263 - DNA, 415 bp, Glycine max
tctccattggtccttaaacactcatcagtcatcaccatggccaagctagttttttccctttgttttctgcttttcagtggctgctgcttcgctttcagttccagagagcagcctcagcaaaacgagtgccagatccaaaaactcaatgccctcaaaccggataaccgtatagagtcagaaggagggctcattgagacatggaaccctaacaacaagccattccagtgtgccggtgttgccctctctcgctgcaccctcaaccgcaacgcccttcgtagaccttcctacaccaacggtccccaggaaatctacatccaacaaggtaagggtatttttggcatgatatacccgggttgtcctagcacatttgaagagcctcaacaacctcaacaaagaggacaaagcagcagaccac

SEQ ID NO: 230264 - DNA, 421 bp, Glycine max
aaaagttcatgaatcctctgccgcgacacgatcgagtaaggcgcaaccgtgaaatcgattcaacgagctcactcagccgccactgtcagtgttttcaacgcccgtgttttgttccctctgtgctatgccccaaacccctaatctatctatctatctatccatcttttcttcattccccttcttctcttctgaattcgaatttcgaaaatgttgggtggtctatacggagaccttcctccaccttcttccgccgaggaagacaacaagcccacccccaacgtctggtcctccagcaccaagatggctcccgccacgctccgcaagcccgcctccctcttcgcgcccccccaaaccctcctacgggcccaccccaagcccaagcccaccgccaagcccgtcctctccttcacaaccccgccct

SEQ ID NO: 230265 - DNA, 384 bp, Glycine max
atcaattcctttctcagatgatgagctcgactatatatatcatctagacccatttcgtgattcagaaatgcttagaatggagcttcccatgattcgagaagcatgcttgcgggttttggttctctgcactatcttcctcaaggaatccgcagcttttggtctttgcctagcagagattggtgacatgatgagtagggaatttcagggtctcgatgaagagccaagtgagcttgagcttatctgtattgaagcaaagaaactgttagatcaggaagaattattttcctttgaagctgaggtaggagacaaagatgtgactcagtttcagttagattgtgaggatcaggatttggatttcactacaaacatagaagagaaactgac

SEQ ID NO: 230266 - DNA, 93 bp, Glycine max
aaaaaaaaaaaaaaaaaaaaaaaaaaaaaaaaaaaaaaaaaaaaaaaaaaaaaaaaaaaaaaaaaaaaaaaaaaaaaaaaaaaaaaaaaaaaa

SEQ ID NO: 230267 - DNA, 396 bp, Glycine max
cacacaactactacaagtacttccttacaatcaaaaccaacaacaactatggcaagttatcaaaagcactacgatgatcagggtcgcaaggttgacgagtatggcaacgttgagaagcaaaccgacgaatacggcaaccctgttcatgctgctagtgtcacctatgtagccaccagaactgctgctggtggttacagtgatgacattaataagcaacatgataccaccaatgcctacggcgtagacactggtagacagcattctagtggtggctacgatggtgacactaataaacatcatggaactactggtggctataatgatgacaccaatagacatcatggaactaccggtgtctatggtatagacaccgataggcaacaacatgggactact

SEQ ID NO: 230268 - DNA, 395 bp, Glycine max
gcccttcactctctctctttcttccctttgcttgctactcttgtcgagtgcatgctttgctattagctccagcaagctcaacgagtgccaactcaacaacctcaacgcgttggaacccgaccaccgcgttgagtccgaaggtggtttgattcaaacatggaactctcaacaccctgagctgaaatgcgccggtgtcactgtttccaaactcaccctcaaccgcaatggcctccacttgccatcttactcaccttatccccggatgatcatcatcgcccaagggaaaggagcacttggagttgcaattccaggatgtcctgagacgtttgaggagccacaagaacaatcaaacagaagaggctcaaggtcgcagaagcagcagctacaggacagtc

SEQ ID NO: 230269 - DNA, 358 bp, Glycine max
  unsure (1)..(358): unsure at all n locations
ggagttctgagtgggcaaatcaaacttcatggcatttgagtttccttattgataatcccaaacagtctacagtttttgatattctcttgggaatttctcaagattttgaaattgctggtaacactcttatgccagctttttctgttccacaggctactgccagatcttctgaaaatgcggaatcctctgcatgatctggaatttgtgttttcttttgcttgttcgtttgtttaattcaataaaggaaattaggcatgaccctcttgttgagtatgctctgcctatttgaaaatttccacacctcttttaattgtcgtaatgatgtgtgaagtgtgtgttantttaaaaaaaacaaaaa

SEQ ID NO: 230270 - DNA, 398 bp, Glycine max
gtgattttctcaagagaaactttaagcagatgtctaatgttttgtgggtagctcctgaggacaaggcgagtttatggtcacaacttcattatgtttcgtgtaataatctggaaatgcaagaagcttatcttgtcaatctcgtaaatgtgttacgagaattgtatttgcacagtccagaggaagctcgccaattgagaaggaaagctctctctcgtattgaatggctgcaaaaagctgatgtgcctaccatagcacagattgaagagttccattcgatgcagaggatgatgaatgctcctgattcaaatgataatattgatctactgttgagcattgatttgttgggtttacaaggagcaggtaaagcttttccaaacaagattgtttttgatgataaa

SEQ ID NO: 230271 - DNA, 416 bp, Glycine max
  unsure (1)..(416): unsure at all n locations
ccttgctctatactacacagtacacacacttagaagaataatggcttcgatcctcgactactttttagccctctctctttcttgctcatttcttttcttcttaaccgactcagtcatccctacacaactaataaaccttgttgttctacccgttcaaaatgatggttccacagggctccattgggccaacctccaaaaaagaacccctctaatgcaagtaccagtcctggtggacctcaatggaaatcacttgtgggttaactgtgagcagcagtactcatccaaaacgtaccaagcacccttctgccactccacccaatgctctagagccaacacccaccaatgcctcagttgccccgcggcatcaaggccaatgtgccacanaaacacgtgtggcctcatgttcactaatccca

SEQ ID NO: 230272 - DNA, 289 bp, Glycine max
cccaaacagtctacagtttttgacattctcttgggaatttctcaagattttgaaattgctggtaatactcttatgccagctttttctgttccacaggctactgccagatcttctgaaaatgcggaatcctctgcatgatctggaatttgtgttttctttcatttgtccgtttgtttaattcaataaaggaaattaggcatgaccctcttgttgagtatgctctgcctatttgaaaatttccacacctcttttaattgtcgtaatgatgtgtgaagtgtgtgttatttta

SEQ ID NO: 230273 - DNA, 396 bp, Glycine max
agagcactgaagtcggatccacgcgtacgtaaactcggaattcggctcgatgttgcattgcagaagcgtctccattttctttcgcgatggacgcgcgagccctgttgaccagaaaaaccctagccaccgttctccgcaacgacgcgaagcccataatcggagctggcatagctgcagctactcattctcgtgggttgcacgtgtacacgctccccgatctggattacgactatggcgctctggagccagccatcagcggcgaaatcatgcagctgcaccaccagaagcaccaccagacttacatcaccaacttcaacaaggccctcgagcagctccaagacgccgtcgccaagaaagattcctccgccgtcgttaagctccagggcgccatcaagt

SEQ ID NO: 230274 - DNA, 342 bp, Glycine max
cagctatgcccggtcatggaaccggacagcccacgggccatgtcaccgagggagtggtgggctcacaccctattggaaccaacagaggcccgggtgggactgctacggcccataatacccgtgcggggggaaacccaaatgattatgggtatggaactgggggtacttacaattaaataatgatgatttagaaaaggaaagctacgacccataagaaggtttagttaagagtatgacttttgttgtggttatcttcttgtttggttatctttttgtttgtgtctccttttctctccatttttgttgtggagaattgggtgtggttacacgacagtgttttca

SEQ ID NO: 230275 - DNA, 382 bp, Glycine max
atctaacccaggcgttttctgggttgcaaaggattaccaatttcatacagcatatcattcaattgggttggaaattcaataagagagggaagccaataatcatagatccggggctttatagccttaatagatcagcaatttggtgggttattaagcaaaggagtcttccaacatcttttaagctctacacaggttcagcttggacaatactatcaagatcttttgcagaatattgcatagtggggtgggaaaatttgccaatgaccctcctcctctactacaccaactttgtgtcatccccagaaggatatttccaaacagttatatgcaactctgaagactacaatgacacaactgttaaacatgatcttcactacattac

SEQ ID NO: 230276 - DNA, 285 bp, Glycine max
ctttccttagttcaatatggggaagcccttcttcactctctctctttcttccctttgcttgctactcctgtcgagtgcatgctttgctaatacctccaaccaggttcaacgattgccaattcaacaacctcaacgcgttggaacccgacaaccgcgttgagtccgaaggtggccttattgaaacatggaactctcaacaccctgagctgcaatgcgccggtgtcactgtttccaaacgcaccctcaaccgcaacggcctccacttgccattacacaccttttccc

SEQ ID NO: 230277 - DNA, 334 bp, Glycine max
atttttccacctcactctctcgctccactcctcaacatcaaatcttcactctcatgaattctcatggttcgctctctgcatgccatgtcaaattctctcttttgctcaaaacccattgtttcaagtctcacaaagaattagacttcatctcccaaatcttcatcgggcacaagctggttggctcatgctcaacagggcctaacagctttggatatctccttggcactcaactttagcccagttttgtttagtggcaatgcaatggcatctgaatttgatgtgcttaatgatggtccatgcaaagattcgtatgtgattgatgatgcatgaatgc

SEQ ID NO: 230278 - DNA, 360 bp, Glycine max
ctcgagccgctcgaaccgctccaaccggtccaaggaactgttaaggatccaaactaaatttcttaacatcaccaccagaaaatccccctgtggtgaaggcaccaacacatgggacagatttgagctgcgtgtacacaaaagagtcattgacctctacagttcccctgatgtggttaagcagataacctcgatcacaattgaacctggtgtcgaggttgaggtgaccattgcagatgcttgattttggcatgctagttgattttgtaatttagccccttggctaggaatatgttgagtcaaatacaccagggttaatgcatttccttttgccttttcaatttttgaagttgattattgtgg

SEQ ID NO: 230279 - DNA, 354 bp, Glycine max
gccactattggcatcacactcttgctcctgtctgggttgaccctcacaggcactgtcataggtttgatcattgcaacccctcttcttgttatcttcagccccatccttgtccctgctgcgtttgtgctgttcctagttgcttctggctttttgttctctgggggctgtggtgtggctgccattgctgctttgtcttggatttacaactatgtgtctgggaaccagcctgcgggttatgacacccttgactatgcaaaagggtaccttgccgataaggcaagggatgtaaaggagagggcaaaggattatggaagttatgctcaaggtagaattaatgaggccacacaaggagct

SEQ ID NO: 230280 - DNA, 361 bp, Glycine max
  unsure (1)..(361): unsure at all n locations
gggtttctctcttcaaactagggttttacagaatataagctctctctatctttggttttcgtcattcaaatccaatccaatatcaaatatgagtcgtcatcccgaggttaagtgggctcagagacttgacaaggtctatatcacggtgcaattggctgattcaaaaaatgccaaggtggatcttacaccagatggtatttttaccttctctggtagtgctggtgctgaagaccatcagtatgagctaaaactggagctctttgacaaggttaatgtanaggagagcaaaattaatgtaggagtgcgaagcatattctgtgtagtgcagaaggcanaggatggatggtggaaaaaggtactg

SEQ ID NO: 230281 - DNA, 382 bp, Glycine max
ggctctcaaaatatcttaccatacattgaatctttctttgtggtttgtgagaaattgcatcctgctcagccaggtgatagtcatgactcaagtatccctgttatttctgatgttgagtatgccaccacatctgcaactccccataaagcatctggaactgctgtgaaagtagatgagaaacatatgccttttgtccggttctcagagaagcataggaagctactaaatgcattcttaaggcacaaccctggtttgcttgagaaatctttctcactcatgctaaaggttccaagatttattgattttgataacaagcgtgcccacttccgatcaaaaattaagcatcagcatgaccatcaccatggcccattgagaatatcag

SEQ ID NO: 230282 - DNA, 333 bp, Glycine max
gcatttcgttactttcatttgttgtgcaatcttacaagttccaaacttctctattttgttattatttgttctcacttctcacacatacagatttgagccttttatattatcatggcttctaaggtggtttcggttttggttatagcgatgatgttgtttgccatgaactgtaactgcactagtgttggccacatgccttcaaccaaagaggaaggtcacgattttcaggagtctaaagccaagaccacacaaactgcgaacaaggccatggaaactggtaaagagggacaagaagccgcagagtcatggacagaatgggctaaagagaaactc

SEQ ID NO: 230283 - DNA, 357 bp, Glycine max
tagcaagcagagcttttgtcagttttctattgaccttctcggtggaggaatcttagtggacaaaactggagattggatcacacttatacaaaattctccaattagtaacttgttgagagttgctgcttggcagaaaggctgtttaatggtcaagattgtgatgtctgggaatgcagcagtcaaaaggagtgattgggcctcattggtacaagtgtttttaacaaacagcaacagtacagagcattttgatgcatgtaagtggacaaaatcagaaccacattcctgggaattgatcttcccaatagaggtatgtggtcctaataatggttttgaaatgtggagttctgagtgggcaaa

SEQ ID NO: 230284 - DNA, 358 bp, Glycine max
cttaattattaacacttccttagttcaatatggggaagcccttcactctctctctttcttccctttgcttgctactcttgtcgagtgcatgctttgctattagctccagcaagctcaacgagtgccaactcaacaacctcaacgcgttggaacccgaccaccgcgttgagtccgaaggtggtttgattcaaacatggaactctcaacaccctgagctgaaatgcgccggtgtcactgtttccaaactcaccctcaaccgcaatggcctccacttgccatcttactcaccttatccccggatgatcatcatcgcccaagggaaaggagcacttggagttgcaattccaggatgtcctga

SEQ ID NO: 230285 - DNA, 373 bp, Glycine max
gggagctctttttctgccacacttcaattcaaaggccataatggtactaatgattaatgaaagagaagcaaacattgaacttgttggcaataaagaacaataacaaaaggaacaacaagaagagcaacctttggaagtgccgaaatatagagctgaattgtctgaacaagatatatttgtaatcccagcaggttatccagttgtggtcaacgctacctcagatctgaatttctttgcttttggtatcaatgccgagaacaaccagaggaacttccttgcaggttcgaaagacaatttgataagccagatacctagtcaagtgcaagagcttgcgttccctgggtctgcaaaagatattgagaacctaataaag

SEQ ID NO: 230286 - DNA, 358 bp, Glycine max
tcggggaattccaattccacattttcaagaaataaggaggcaaaaatgttcatatatgaattggaattatttgttttcttattaggcctatcctgaagccaaaggaaatgagatcggaattcctcggggaattccaattccacattttcaagaaataaggaggcaaaaatgttcatatatgaattggaattatttgttttcttattaggcctatcctgaagccaaaggaaatgagatcggaattcctcggggaattccaattccacattttcaagaaataaggaggcaaaaatgttcatatatgaattggaattatttgttttcttattaggcctatcctgaagccaaaggaaatgag

SEQ ID NO: 230287 - DNA, 405 bp, Glycine max
tgcgtccaggtcgactctagatgatccctcggggaattccaattccacattttcaagaaataaggatgcaaaaatgttcatatatgaattggaattatttgttttcttattaggcctatcctgaagccaaaggaaatgagatcggaattcctcggggaattccaattccacattttcaagatataaggaggcaaaaatgttcatatatgaattggaattatttgttttcttattaggcctatcctgaagccaaaggaaatgagatcggaattcctcggggaattccaattccacattttcaagaaataaggaggcaaaaatgttcatatatgaattggaattatttgttttcttattaggcctatcctgaagccaaaggaaatgagatcggaattcctcgggggt

SEQ ID NO: 230288 - DNA, 296 bp, Glycine max
cagtgaaatccaagtgcacattttcaagatttaaggatgaccttaatgttcatattacactatgggattatttgttttcgtattaggcgtatcctgaatccattggaaatgaaatcagaattcctcggggaaatccagttcctcattttcaagatttaacgacgcaacaatgttcatatatgaattggaattaattgttttcgtagtaggcctatcctgaagccacaggaaatgagataggtattcctcggggaagtcgaattcgacattttcaagaaatatcgaggcaaaaatgt

SEQ ID NO: 230289 - DNA, 391 bp, Glycine max
  unsure (1)..(391): unsure at all n locations
ctccattggtccttaaacactcaacaatcaacaacaagggcaaaccaattttttccccttggtttccggctttcaattggcggcggctccccttcaattccaaagagcaacctcaacaaaacgaagtgcagattcaaaaactcaatggcctcaaaccggataaccgtatagagtcagaaagagggctcattgagacatggaaccctaacaacaagccattccagtgtgccggtgttgccctctctcgctgcaccctcaaccgcaacgcccttcgtagaccttcctacaccaacggtccccaggaaatctacatccaacaaggtaangggtattttggcatgatatacccggggttgtcctagcacatttgaagagcctcaaacaactcaac

SEQ ID NO: 230290 - DNA, 365 bp, Glycine max
gagctgcaagagggaggggtgctgatcgttccacaaaactttgcggtggctgcaaaatcccagagcgataactttgagtatgtgtcattcaagaccaatgatagaccctcgatcggaaaccttgcaggggcaaactcattgttgaacgcattgccagaggaagtgattcagcacacttttaacctaaagagccagcaggccaggcaggtgaagaacaacaaccctttcagcttcctggttccacctcaggagtctcagaggagagctgtggcttagagagccctttttgcatgtgctaccacacttttgtccttttgggctctagctagtgctggtagcagtaaataagaatgaataaaagaaac

SEQ ID NO: 230291 - DNA, 346 bp, Glycine max
caagagatcaaggactgtttgagttatgtttacagatattggactgaaaagggtatttgttgggcaagaaattcaaatgttcaagacattgatgacacggcaatgggtttcagactattaagattacacggttaccaagtttcagccgatgtgttcaagaactttgagagaaatggtgaatttttctgctttacggggcagaccacacaagcagtgacaggaatgtttaatctgtatagggccacacaaatcatgttcccgggagagagaattcttgagcacgggaagcacttctctgccaaatttttgaaggagaagagagcagcaaatgagcttgtaaataaat

SEQ ID NO: 230292 - DNA, 407 bp, Glycine max
ctatcttgctgggaaccaagagcaagagtttctaaaatatcagcagcagcagcaaggaggttcccaaagccagaaaggaaagcaacaagaagaagaaaacgaaggaagcaacatattgagtggcttcgcccctgaattcttgaaagaagcgttcggcgtgaacatgcagatagtgagaaacctacaaggtgagaacgaagaggaggatagtggagccattgtgacagtgaaaggaggtctaagagtcacagctccagccatgaggaagccacagcaagaagaagatgatgatgatgaggaagagcagccacagtgcgtggagacagacaaaggttgccaacgccaaagcaaaaggagcagaaatggcattgatgagaacatttgcacaatgagacttcgccaaaaca

SEQ ID NO: 230293 - DNA, 342 bp, Glycine max
  unsure (1)..(342): unsure at all n locations
ctagtataccttaataaataatttaagatactatgatgagagcacggttcccattactgttgctgggacttgttttcctggcttcagtttctgtctcatttggcattgcttactgggaaaaagagaaccccaaacacaacaagtgtctccagagttgcaatagcgagagagactcgtacaggaaccaagcatgccacgctcgttgcaacctccttaaggtggagaaagaagaatgtgaagaaggtgaaattccacgaccacgaccacgaccacaacacccggagagggaacctcagcaacccggtgagaaggangaagacgaagatgagcaaccacgtccaa

SEQ ID NO: 230294 - DNA, 399 bp, Glycine max
  unsure (1)..(399): unsure at all n locations
aaaagaggcaactcttgctgaagccaagggtatcaatggtttgcgagctgtttttggggaaatgtaggtctatcctgatcctgttagagttgtgtcaattggacanaaagttgaggatctccttgctgacccaaagaatgaaaaatggttatctttttcgtcagagttatgtggaggtacccatatttcaaacacacgagaggcaaaagcttttgcacttttatctgaggagggaattgcaaaaggaatacgcagaataacagctgttacaactgatcgtgcttatgatgcaatgaaagtggcagatgaatttgatcagcaagtagacgatgcggctaagttagaaggaagtttgctagaagagaaagtttcatcattgaaaagcaatattgaaacttt

SEQ ID NO: 230295 - DNA, 326 bp, Glycine max
gaaacagagcagagcgaccttgaagagctatggctgtcggaaagaataagaggatttccaagggaaagaagggtggcaagaagaaagccgctgatccctttgccaagaaagactggtacgatatcaaggccccttccctcttccaggtcaagaatattggcaaaaccctcgtctctcgtacccagggaaccaagattgcatccgaaggactcaaacatcgggtttttgaggtctcattggctgatctccaaggggatgaagaccactccttcaagaagattcgtttgagagctgaggacgttcaagggaagaatgttctgacaaac

SEQ ID NO: 230296 - DNA, 395 bp, Glycine max
tcggggaattccaattccacattttcaagaaataaggaggcaaaaatgttcatatatgaattggaattatttgttttcttattaggcctatcctgaagccaaaggaaatgagatcggaattcctcggggaattccaattccacattttcaagaaataaggaggcaaaaatgttcatatatgaattggaattatttgttttcttattaggcctatcctgaagccaaaggaaatgagatcggaattcctcggggaattccaattccacattttcaagaaataaggaggcaaaaatgttcatatatgaattggaattatttgttttcttagtaagcctatcctgaagccaaaggaaatgagatcggaattcctcgggggtaccgagctcgaattccct

SEQ ID NO: 230297 - DNA, 378 bp, Glycine max
agaccagcttgaatgcgtccaggcctactctagatgatccctcggggaattccaattccacattttcaagaaataatgaggcacaaatgttcatatatgaattggaattatttgttttcttaataagcctatcctgaagccaaaggaaatgagatcggcattcctcggggaattccaattccacattttcaagaaataaggaggcaaaaatgttcatatatgaattggcattatttgttttcctattacgcctatcctgaagccaaaggaaatgagatcggcattcctcggggaattccaattccacattttcaagaaataacgacgcaaaaatgttcatatatgaactcggattacttgttttcttattaggcctat

SEQ ID NO: 230298 - DNA, 369 bp, Glycine max
ggatgaggagcagcagcgagagagcgaagaaagtgaagattctgagttacgaagacataagaataagaacccttttctcttcggctctaacaggttcgaaactctcttcaaaaaccaatatggtcgcattcgcgtcctccagaggttcaaccaacgctccccacaacttcagaatctccgagactaccgcattttggagttcaactccaaacccaacaccctccttctccccaaccatgctgacgctgattacctcatcgttatccttaacgggactgccattctttccttggtgaacaacgacgacagagactcctacagacttcaatctggtgatgccctgagagtcccctcaggaaccacatacta

SEQ ID NO: 230299 - DNA, 358 bp, Glycine max
gtgagatttgcgaatctgacaaatggcggattcttctcgggaggagaacgtttacatggcgaaattggcggagcaggccgagcgttacgaggagatggttgagttcatggagaaggttgcaaagactgtggaggttgacgagttgacggtggaggagaggaatctcctctctgtggcttacaagaacgtgattggtgcgaggagggcttcgtggaggatcatatcctccattgagcagaaggaggagagcaggggcaatgaggaccacgtggccattataaaggagtacaggggcaaaattgaagctgaactcagcaagatctgtgatgggaatttgaaccctccttgagttcaacct

SEQ ID NO: 230300 - DNA, 364 bp, Glycine max
gcgaaagcaagaggaagatgaggatgaggagcagcagcgagagagcgaagaaagtgaagattctgagttacgaagacataagaataagaacccttttctcttcggctctaacaggttcgaaactctcttcaaaaaccaatatggtcgcattcgcgtcctccagaggttcaaccaacgctccccacaacttcagaatctccgagactaccgcattttggagttcaactccaaacccaacaccctccttctccccaaccatgctgacgctgattacctcatcgttatccttaacgggactgccattctttccttggtgaacaacgacgacagagactcctacagacttcaatctggtgatgccctg

SEQ ID NO: 230301 - DNA, 330 bp, Glycine max
gcaaatcaaacttcatggcatttgagtttccttattgacaatcccaaacagtctacagtttttgatattctcttgggaatttctcaagattttgaaattgctggtaatactcttatgccagctttttctgttccacaggctactgccagatcttctgaaaatgcggaatcctctgcatgatctggaatttgtgttttctttcgcttgttcgtatgtttaattcaataaaggaaattacgcatgaccctcttgttgagtatgctctgcctatttgaaaatttccacacctcttttaagtgtcgtaatgatgtgtgaactgtgtgataattt

SEQ ID NO: 230302 - DNA, 444 bp, Glycine max
  unsure (1)..(444): unsure at all n locations
ggnnnnnnngantgatcnanttgnnctgccgaagannnatgaaatcgcntccangcgtacgtaanatcggaaattcggctcgagctatgcctgagcggggcgaanccagaggaaactctggtggaggcccgcagcgatactgacgtgcaaatcgttcgtctgacttgggtataggggcgaaagactaatcgaaccgtctagtagctggttccctccgaagtttccctcaggatanctggagcccgcgggcgagttctatcgggtaaagccaatgattagaggcatcgggggcgcaacgccctcgacctattctcaaactttaaataggtaggacggtgcggctgctctgttgagccgcgccatggaatcgagagctccaagtgggccatttttggtaagcagaactggcgatgcgggatgaaccggaagctgggttacngtgcc

SEQ ID NO: 230303 - DNA, 354 bp, Glycine max
aagatcatacatagtagtgttggtgggttgcaaagatgcttgggggtcttctccataggggtcataagataaaagggacagtggtgttgatgcgcaagaatgtgttggacgtgaatagcgtaaccagcgttgggggaattattggtcaaggtctcgacttagttggctcaacactcgatactcttactgccttcttgggccgatccgtgtctctccagcttattagtgctaccaaagctgatgccaacggaaaagggaaacttggaaaggctacctttttggaaggtatcattacttcattgccaactttgggagcaagccaatctgcattcaaaattaatttttgaatgggat

SEQ ID NO: 230304 - DNA, 349 bp, Glycine max
agaaagagagagaagaagaaaagaagaacaaagatgcaatcctcaaaggagaagatgaaaaacatggcaagtgctgccaaggaacaagtcgacatctataaagccaaaatagacgagaaggcagagaaagcaacggcaagaacagaagaggagagggtgatagcccatgagcacgcaaaggcaaaggaagctggagcaaagatggagctgcatgaagctaaagcaaggcatgcagcagagaagctaagcgccaaccaatcacattatggtctccaccatggccacaacaaccctcccttagtaggaacaactcagactcactaccagcaagggcaccagcaccagccac

SEQ ID NO: 230305 - DNA, 394 bp, Glycine max
ctaacactagggtttacagagaagcgaagaggcgcagccgtagcagtaactcgtggaattgctagcaatggcgaggatcaaggtttacgagctgaggcagaagacgaaggctgatctgttgaatcagctgaaggacctcaaggccgagcttgccttgcttcgtgttgctaaggtcaccggcggtgcacctaacaagctctctaagatcaaggtggtgaggttgaacattgcccaggttttgacggtgatttctcagaagcagaaggccgcgttgagggatgcctacaagaacaagaagtacttgcctctcgatctccgccctaagaagaccagggccattcgcaagaggcttactaagcaccaggcatcaattaagacagagagggagaagaag

SEQ ID NO: 230306 - DNA, 372 bp, Glycine max
tctaaatgatcccctcggggaattccaattccacattttcaagaaataaggaggcaaaaatgttcatatatgaattggaattatttgttttcttattaggcctatcctgaagccaaaggaaatgagatcggaattcctcggggaattccaattccacattttcaagaaataaggaggcaaaaatgttcatatatgaattggaattatttgttttcttattaggcctatcctgaagccaaaggaaatgagatcggaattcctcggggaattccaattccacattttcaagaaataaggaggcaaaaatgttcatatatgaattggaattatttgttttcttattaggcctatcctgaagccaaaggaaatgag

SEQ ID NO: 230307 - DNA, 227 bp, Glycine max
gaaccaaagagaatcctactttgtggatgctcagcctaagaagaaagaggaggggaataagggaagaaagggtcctttgtcttcaattttgagggctttttactgaataagtatgtactaaaatgtatgctgtaatagctcatagtgagcaaggaaagtatcgggctatgtaactatgactagagcttcaactatgaataaataaatcgacagcatatgatgctaaa

SEQ ID NO: 230308 - DNA, 307 bp, Glycine max
  unsure (1)..(307): unsure at all n locations
tctctngccgccnccccagatatctcncancntccaggcccnacgtaacaaactcnaaattccattgtcagaggtgaaattcttggatttctggaagacgaactactgcgaaagcatttaccaaggatgttttcattaatcaagaacgaaagttaggggatcgaagatgattagntaccatcgtagtcttaaccataaactatgccgacaagggattggcggggtttcgttacntctccgtcancaccttatgagaaatcacaagtctttgggttccggggggagtatggtcgcaaggctgaaactt

SEQ ID NO: 230309 - DNA, 347 bp, Glycine max
  unsure (1)..(347): unsure at all n locations
aggaaccacatactatgtggtcaaccctgacaacaacgaaaatctcagattaataacactcgccatacccgttaacaagcctggtagatttgagagtttcttcctatctagcactgaagctcaacaatcctacttgcaaggattcagcaggaacattttagaggcctcctacgataccaaattcgaggagataaacaaggttctgtttagtagagaggaagggcagcagcaaggggagcagaggctgcaagagagcgtgattgtggaaatctcgaaggaacagattcgggcactgagcanacgtgccaaatctagttcaaggaaaaccatttcttctgaagataaac

SEQ ID NO: 230310 - DNA, 359 bp, Glycine max
tcgacgagtgattgggcctcattggtacaagtgtttttaacaaacagcaacagtacagagcattttgatgcatgtaagtggacaaaatcggaaccacattcctgcgaattgatcttcccaatagaggtatgtggtcctaataatggttttgaaatgtggagttctgagtgggcaaatcaaacttcatggcagttgagtttccttattgacaatcccaaagagtctacagtttttgatattctcttgggaaattctcaagattttgagattgctggtaatactcttatgccagctttttctgttccacaggctactgccagatcttctgaaaatgccgaatcctctgcatgatctggaat

SEQ ID NO: 230311 - DNA, 396 bp, Glycine max
  unsure (1)..(396): unsure at all n locations
tctgtataccttgttgaatcaaaatctcccatccttcccaatgctgaaaattaatcataaccgaatttggagtaagatccaaatttccggctaattttcaacggcagattccaattctggactaaacaccagaaaaaatcttgccttgacaaaagaggaaaagatggaagtgattagaactagaggcattcctgctgatgttcttgcaaagcgagctcatgaatttgataaacatgttgctcatgatagcctcaaggatcaaattcctgctgttgacaagttgtattccactaacgttaataagtgtgcaaaaattatgaaccttagacaaagtgttgttggtgatcntaaacttcttactgatgggaagttgtatgagggtaagcatattcctgt

SEQ ID NO: 230312 - DNA, 370 bp, Glycine max
atcaagtccaagaaccaacctaccttttgcaatctcaattcaatggcgtcctctctcattgcgaagcgcttcctctcctcttccctcctctccaggtccctccttcgccccgccgcttccgcttcccaccgctctttcaacaccaacgccatgcgccagtatgacaaccgcgccgacgaccacagcaccgacatcgatcgtcactccgaacgctctttccctagcactgcgcgccgcgacgatatcttctcagatgtgttggatccattttttccgactcggagtttgagccaggttctgaacatgatggaccaggtcatggacaatccgttcctctccgcgtcgcgcgggattcgagctggcgctggag

SEQ ID NO: 230313 - DNA, 359 bp, Glycine max
caaaacagtaaagctaacttcaacacctttaattttctaaaagtaattcagcggctgaataccaagcggagaagatgagtcaggagcagccacggcgtcccaaaggccaaaaccccatcaaatacggcgacgtttttgtcgtctccggcgaccttgcacagaagcccgtcgcaccggaagatgctgccatgatgcaaagcgcggaaactcgagtgctcggacaaacccaacccggcggagcagcttccgtcatgcaatctgccgccaccaggaatgaacaggctggccttgtcggtcaccgggacgtcaccgacgttaccggcgaccgtggcgtcacagtcacagaaactaaagtccct

SEQ ID NO: 230314 - DNA, 404 bp, Glycine max
tcaaaaccctaaccctaaccccaatccccagagtctggaagcctctccaatggcgtaccagacccccgatcaagattcaggttccgatccgaagaccccaacgcgcctctacaacccctacaaggatctcgaagtccccattcgcaacctctaccagctcccaacctccccggagtacctcttcgtcgaggaggcccgccgcaagcgccgatcctggggcgagaacctcaccttctacaccggctgcggctacctctccggcgctgtcggtggcgccgcctccggcctcgtcggcggcgttaaatccttcgagtccggcgacaccgccaaagctccgcgtcaaccggcgtcctcaactcctccgggcacgcccgccgcgcctggggcaaccgcctcggcgtcat

SEQ ID NO: 230315 - DNA, 409 bp, Glycine max
ctccattggtccttaaacactcatcagtcatcaccatggccaagctagttttttccctttgttttctgcttttcagtggctgctgcttcgctttcagttccagagagcagcctcagcaaaacgagtgccagatccaaaaactcaatgccctcaaaccggataaccgtatagagtcagaaggagggctcattgagacatggaaccctaacaacaagccattccagtgtgccggtgttgccctctctcgctgcaccctcaaccgcaacgcccttcgtagaccttcctacaccaacggtccccaggaaatctacatccaacaaggtaagggtatttttggcatgatatacccgggttgtcctagcacatttgaagagcctcaacaacctcaacaaagaagacaaagcaacag

SEQ ID NO: 230316 - DNA, 340 bp, Glycine max
gagcggttcgctgcccgcgacgttgtgagaagccccaaatgccagtgcaaagcgctgcagaagataatggagaaccagagcgaggaactggaggagaagcagaagaagaaaatggagaaggagctcattaacttggctactatgtgcaggtttggacccatgatccagtgcgacttgtcctccgatgactaagaagttaaaagcaatgttgtcacttgtacgtactaacacatgatgtgatagtttatgctagctagctataacataagctgtctctgagtgtgttgtatattaataaagatcatcactggtgaatggtgatcgtgtacgtaccctactt

SEQ ID NO: 230317 - DNA, 425 bp, Glycine max
aggtcgactctaaaggatcccctcggggaattccaattccacattttcaagaaataaggaggcaaaaatgttcatatatgaattggaattatttgttttcttattaggcctatcctgaagccaaaggaaatgagatcggaattcctcggggaattccaattccacattttcaagaaataaggaggcaaaaatgttcatatatgaattggaattatttgttttcttattaggcctatcctgaagccaaaggaaatgagatcggaattcctcggggaattccaattccacattttcaagaaataaggaggcaaaaatgttcatatatgaattggaattatttgttttcttattaggcctatcctgaagccaaaggaaatgagatcgggattcctcgggggtaccgagctcgaattccctaaaatgag

SEQ ID NO: 230318 - DNA, 393 bp, Glycine max
cgaagggtgaatatgatgagtctggtccatccattgtccacaggaagtgcttctaagtccaaaagaaatgctttaatggtgagttatgtttttgctatggcttttttggtgtctgtgtcatgtcgtgcgaactatgttgtcatggataagaggtgggataggattggagggtatattcggagagcttgatgtatcatatattgtgtggcatccctctggatgtggcgggcacagaattgttgagaagcatttttcatcttggaattcatctgtcttcgtaagtaggtttgtctgtagcaaaggagtggtgatgcttattttctttttgtaccctttttcagagttcacatttttttggcctttggaacattaatgtgaatgtctaaagctaca

SEQ ID NO: 230319 - DNA, 364 bp, Glycine max
gcgtaaaaacaaaaggcttgactagagaaagagagagagagagcttcgaatcgaaactcagaagtagaaagaaacacaaatcacaatcgctatggctaggtacgaccgagcaatcaccgtgttctcccctgacggccatctcttccaggtcgagtacgccctcgaagccgtccgcaagggcaacgccgccgtcggcgtccgcggcaccgacaatgttgtcctcggcgtcgagaagaaatccaccgccaaactccaagactccaggtcggtgaggaagatagtgaatctggacgaccacattgcgctggcctgcgcggggctgaaggccgacgcacgcgtgctcataaacagggcacgtgtggag

SEQ ID NO: 230320 - DNA, 379 bp, Glycine max
ggctttttcgccaattagtttcatttttaaaattggagcttataagtccttttctgagatatcacctgttcttcagtttgccaattttacttgcaaccaagccctcattgaagctgtggaaaggtctgacagaattcatgttatcgatttcgatattgggtttggagtgcagtggtcatcttttatgcaagagattgccttgagaagtagtggtgcaccttcactcaaagtcactgccattgtgtcaccctccacttgtgatgaggttgagctcaatttcactagagagaatttgattcaatacgcgaaagacatcaatgtgtcatttgaattcaatgttttgagcattgaatccttgaactctccttcctgtccactg

SEQ ID NO: 230321 - DNA, 407 bp, Glycine max
gatggcacaagttgaacttcgtgacgagcatgggaacccagttgaactaacagatgcatatgggaatccggtttggttaacggacgagaaaggcaacccggtgcacctcacggctgtggcaaccaatgcacacaaatctatgcttcagaatgacaccccacaagagcttcctcactccaagagttcaagctcgtctgaggatgaagggcatggagagaggatcaggaagggactgaaggataacatagaagaaaagttaccagctggagaaggagtagtgaaggagaataaacacaccacaattgctgcttctacttctacaacagatactagtgatgctaatcaccacccaaccactgagcatgacaagaagagtatcatacacaagattaaagaaaaattccaat

SEQ ID NO: 230322 - DNA, 360 bp, Glycine max
aagaactaagatggattggatcggagcgtaccgcggaggccagagaagcagggactggtgcgacccttcatcaccattcactgatttgtgggaccctcgtcgtgtcggtgacgctgatgatatcacctcctctctcgcccatgctcacgttgactggcgtgagactgataaagctcatatcttccgtgctgatcttccaggggtgaagaaagaggatctgaaggtgcaggtggaggagaataagatcgtgcagataagcggggagagggtgaacgagaaggaggaccagatcgacaagtggcatcgcgtccagatgcagtgcggaagcttcctccgccgcttccggctgccggaggatgc

SEQ ID NO: 230323 - DNA, 356 bp, Glycine max
cgacgaagccaccgggaacagctcaactccttacgatttcggtgctggccatcttaacctaggacgagccatggatcctggcttggtgtacgatatcaccaacaatgattatgttaatttcctttgcggtattggttacgggcctaaggtgattcaggtgatcactcgcgcgccggcgagttgtccggtgaggaggccggcgccggagaatctgaattacccttcctttgttgctatgtttcctgcttcgtccaagggggtggcttccaagacgttcatacggactgtgaccaacgtggggcccgcgaactcagtttaccgcgtgagcgtggaggcgcccgcgagtggtgtcagcg

SEQ ID NO: 230324 - DNA, 423 bp, Glycine max
  unsure (1)..(423): unsure at all n locations
cccgtacgtaaactcagaattcggctcgaagaagaaaataacaaaggtccgtttaataaaaaaggaaggcaacaacaaagggaacaaaaggttccaaaaaaccttaattttggaaaccccaaaggaacaaatccgggcactgagcaaacgtgcaaaatccaatttcaaggaaaaccattcctctgaagatanacctttaacttgagaagccgcgaccccatctactccaacaagcttggcaagttctttgagatcaccccagagaaaaacccccagcttcgggacttggatatcttcctcagtattgtggatatgaacgagggagctcttcttctaccacacttcaattcaaaggcgatagtgatactggtaattaatgaaggagatgcaaacattgaacttgttggcctaaaagaacaacaa

SEQ ID NO: 230325 - DNA, 367 bp, Glycine max
aaaagcaatgactatgtcatttaatccaaacccgtgttctgatgcatggagtttggaatttctgaagcgtactggatttcattgcgatatcatttgtgtcactggatggactgccaccccaatgcaggatgttcaggttacaattgattggtttatttcctctcaggaatgtgttcccaggacctattgtgttttaaatccacaaaatccttttgtgttaaataggtggatgggaaaattgactttcccccagggcacttcccgaagtgttaagagaatgcctctttctatagggggaggagctggtgcaaagaatgctattctcatgaatatgccaaatgctgttctttcaatgtggaaatatttg

SEQ ID NO: 230326 - DNA, 391 bp, Glycine max
tgcatggatccaggtcgactctaacggatcccctcggggaattcgcaattccacattttcaagaaataaggaggcaaaaatgttcatatatgaattggaattaattgttttcttattaggcctatcctgaagccaaaggaaatgagatcggaattcctcggggaattccaattccacattttcaagaaataaggacgcaaaagtgttcatatatgaattggcattagttgttttcataataagcctatcctgaagccaaagggaatgagatcggaattcctcggggaattccacatccacattttcaagatataaggaggcacaaatgttcatatatgaaatgggaatatttgttttcgcattaaggctatcctgaagcccaaggaaatga

SEQ ID NO: 230327 - DNA, 375 bp, Glycine max
cggctcgaggctgatacaggtggaggagatgcagtgagaccagtggtaatatgtgataacaagtgtggctgcacacttccatgcactggtggttccacttgcaggtgcacaagtgctggcactgccacaggagggggtgatcacgtgacatgctcgtgcggagagcactgtggttgcaatccatgctcatgtcccaagattgcggctgctggaagtggttgcagatgtggcacagattgtgcatgtgcctcctgccgcacttagtatcacaccttaaggcttaaacttcacgttttattttatgtcttcaaatcttgaatacgttttctatatattagtcttgtttaaagttcaaagtgttgacgtggtttccac

SEQ ID NO: 230328 - DNA, 351 bp, Glycine max
attagattcagattgtggccgtggcagccagcagcaatatctctaaactcgaaaaatggatcagcgaaagctacgagactcgtccaattcgaaacccgcttcagatgcagcaccccaacacgtcactctcacctctaaccgcttccgcaactctcaagctgctgtgagggagagagagaaagagaagggtgaaggggaaaacgaggatccaagtgcggcacgaaaggttctaaaggcagaccgcgagaagctcagaagggatcgactcaacgaacacttccaagagttgggaaacgcgttagatcctgatagaccaaagaatgacaaggcaactatcctcactgagaacgt

SEQ ID NO: 230329 - DNA, 415 bp, Glycine max
  unsure (1)..(415): unsure at all n locations
gtccttaaaaaacccaccatccacaacaatggccaacctagttttttccctttgtttcctgctttccagtggctgctgcttcgctttcagttccagagagcagcctcagcaaaacgagtgccagatccaaaaactcaatgccctcaaaccggataaccgtatagagtcagaaggagggctcattgagacatggaaccctaacaacaagccattccagtgtgccggtgttgccctctctcgctgcaccctcaaccgcaacgcccttcgtagaccttcctacaccaacggtccccaggaaatctacatccaacaaggtaagggtatttttggcatgatatacccgggttgtcctagcacatttgaagagcctcaacaacctcaacanagaggacaaagcagcagaccacaagaccgt

SEQ ID NO: 230330 - DNA, 403 bp, Glycine max
ctcgagccgcttaattattaacacttccttagttcaatatggggaagcccttcactctctctctttcttccctttgcttgctactcttgtcgagtgcatgctttgctattagctccagcaagctcaacgagtgccaactcaacaacctcaacgcgttggaacccgaccaccgcgttgagtccgaaggtggtttgattcaaacatggaactctcaacaccctgagctgaaatgcgccggtgtcactgtttccaaactcaccctcaaccgcaatggcctccacttgccatcttactcaccttatccccggatgatcatcatcgcccaagggaaaggagcacttggagttgcaattccaggatgtcctgagacgtttgaggagccacaagaacaatcaaacagaag

SEQ ID NO: 230331 - DNA, 396 bp, Glycine max
agcaaaatgaccaagttcacaatcctcctcatctctcttctcttctgcatcgcccacacttgcagcgcctccaaatggcagcaccagcaagatagctgccgcaagcagctccagggggtgaacctcacgccctgcgagaagcacatcatggagaagatccaaggccgcggcgatgacgatgatgatgatgacgacgacaatcacattctcaggaccatgcggggaagaatcaactacataaggaggaacgaaggaaaagacgaagacgaagaagaagaaggacacatgcagaagtgctgcacagaaatgagcgagctgagaagccccaaatgccagtgcaaagcgctgcagaagataatggagaaccagagcgaggaactggaggagaagcagaag

SEQ ID NO: 230332 - DNA, 355 bp, Glycine max
ccaacctcatcaagaggaagagcacgagcagaaggaggaacacgaatggcatcgcaaggaggaaaaacacggaggaaagggaagtgaagaggaacaagatgaacgtgaacacccacgcccacaccaacctcatcaaaaggaagaggaaaagcacgaatggcaacacaagcaggaaaagcaccaaggaaaggaaagtgaagaagaagaagaagaccaagacgaggatgaggagcaagacaaagagagccaagaaagtgaaggttctgagtctcaaagagaaccacgaagacataagaataagaacccttttcacttcaactctaaaaggttccaaactctcttcaaaaaccaatat

SEQ ID NO: 230333 - DNA, 484 bp, Glycine max
  unsure (1)..(484): unsure at all n locations
gggnnnnnntngngttcgctcnnctcgntcaggganaagactngcttgcntgnggcccaggtcgactctaaaggatcccctcggggaattccaattccacattttcaagaaataaggaggcaaaaatgttcatatatgaattggaattatttgttttcttattaggcctatcctgaagccaaaggaaatgagatcggaattcctcggggaattccaattccacattttcaagaaataaggaggcaaaaatgttcatatatgaattggaattatttgttttcttattaggcctatcctgaagccaaaggaaatgagatcggaattcctcggggaattccaattccacattttcaagaaataaggaggcaaaaatgttcatatatgaattggaattatttgttttcttattaggcctatcctgaagccaaaggaaatgagatcggaattcctcgggggtaccgagctcgaattcccnaaagtgagt

SEQ ID NO: 230334 - DNA, 373 bp, Glycine max
ctcaaaagcttcatcttcgcagtcaaccttcaagtccctggaaaagaacatcacagcgcggtcttctacttctcaaccgacgaaccgataacctccggttcgctcctctcccggttcatcgagggcgacgacgcgttccgaaaccagcggttcaagctcgtgaaccggatcgtgaagggtccatggatcgtgaaaaaggctgtggggaattacagcgcttgcttattgggaaaggcgctgacgtgcaactatcacagaggaccaaactacttcgagattgacgtggacattgggagcagcgccatcgccaacgctatcctgcgcctcgcgctggggtatgttaccagcgtcaccatcgatatggggtttgttg

SEQ ID NO: 230335 - DNA, 361 bp, Glycine max
  unsure (1)..(361): unsure at all n locations
agaaagaccaaaaaagggtaggaaagactagtgagtctctgaagagagtgagagctgtctctattgttgaaacctctccatgcaccttggatatggactacaatgaagctgcagccaaacttgaaaatatatataaactcagccctgtatctgatacctgtaatatggaagatattgatagtaaagtcgagagagtcttgtggaggaggaggaaggttggtaatgaacatgatgatgaaaattgtgatattgtggttagaaaccagaataagaaggccaaacgattgagtcttgataagaggattacattgaaaaataatgcanaggaggaagtgattgaccaaactcagaagataagaaa

SEQ ID NO: 230336 - DNA, 373 bp, Glycine max
gagagagattgtgaagtaagtagaaatcggtgcaagaaattctccgctttatctacaaaatttaagtgagtttgtgaagacaaaaaatcactagctactaaaaaatggccacagttggaaggaacgcagcagctccattgctgtttcttaacttgatcatgtattttattgttcttggctttgctagttggtgcctcaacaagttcatcaatggccaaacttaccaccctagctttggtggaaatggtgcaactatgtttttcttaatcttctccatactagcagccgttttgggcatagtgtccaaacttttgggtgcgaatcacattaggacatggacgagtgacagtttagcatctgcaggagccacatc

SEQ ID NO: 230337 - DNA, 384 bp, Glycine max
ctaagaaggagaagcaaatggcttcctcaatgatctcttccccagctgttaccactgtcaaccgtgccggtgccggcatggttgctccattcactggcctcaagtccatggctggcttccccaccagaaagaccaacaatgacattacctccattgctagcaacggtggaagagtgcaatgcatgcaggtgtggccaccagttggcaagaagaagtttgagactctttcctacctgccagaccttgatgatgcacaattggcaaaggaagtagaataccttcttaggaagggatggattccttgcttggaattcgagttggagcacggtttcgtgtaccgtgagcacaacaggtcaccaggatactacgatggacgctactgga

SEQ ID NO: 230338 - DNA, 390 bp, Glycine max
aacaattccttcacttgcagcactgttgcatcatcatcttcattgcaaaaccctaaacttcaccttcaaccatgaccacacaagtaccaccacacagtgtccaagtccacacaacaacacaccgctacgaagctggcgtcgtcccccccggagcccgtttcgaaccgccgcgttatgaagccggcgtcaaagcgccctccaattaccaatccgagagaggtgcaacgacttctcaagtcctcgccgtcctcgccggcctcccggtcggtggcatcctgcgcctcctggcgggattgaccctggcaagagccctcaccggactggcagttgccacgccgctcttcgtcctcttcagaccggtgctggttcagccacagtcgccatcggcct

SEQ ID NO: 230339 - DNA, 391 bp, Glycine max
atcctggtatttcaggttctcgtcttttgggcaccattcctcagtccatttcacagcaaactgtttggaatcaaatggcaacagtgagaacaccattgaattttgattctagcaagcagagcttttgtcaattttctattgaccttctcggtggaggaattttagtggacaaaactggagattggatcacacttatacaaaattctccaattagtaacttgttgagagttgctgcttggaagaaaggctgtttaatggttaagattgtgatgtctgggaatgcagcagtcaaaaggagtgattgggcctcattggtacaagtgtttttaacaaacagcaacagtacagagcattttgatgcatgtaagtggacaaaatcggaaccacattc

SEQ ID NO: 230340 - DNA, 413 bp, Glycine max
ttgcaatttagaaagttaccaaattgtgatttccccaagagaaactttaggcaaatgtcaaaggttttgtgggtggctcctgaggacaaggcgagtttatggtcacaacttcattatgtttcatgtaataatctggaaatgcaagaagcttatcttgtcaatctcgtaaatgtgttacgagaattgtatttgcacagtccagaggaagctcgccaattgagaaggaaagctctctctcgtattgaatggctgcaaaaagctgatgtgcctaccatagcacagattgaagagttccattcgatgcagaggatgatgaatgctcctgattcaaatgataatatcgatctactgttgagcaatgatttgttgggtttacaaggagcaggtaaagcttttcaaacaagattgttttt

SEQ ID NO: 230341 - DNA, 411 bp, Glycine max
ctcctgttgttgccgtttctattattgacaccaacagcttggagaaccagctcgaccagatgcctaggagattctatcttgctgggaaccaagagcaagagtttctaaaatatcagcaagagcaaggaggtcatcaaagccagaaaggaaagcatcagcaagaagaagaaaacgaaggaggcagcatattgagtggcttcaccctggaattcttggaacatgcattcagcgtggacaagcagatagcgaaaaacctacaaggagagaacgaaggggaagacaagggagccattgtgacagtgaaaggaggtctgagcgtgataaaaccacccacggacgagcagcaacaaagaccccaggaagaggaagaagaagaagaggatgagaagccacagtgcaaggggtaaagac

SEQ ID NO: 230342 - DNA, 396 bp, Glycine max
  unsure (1)..(396): unsure at all n locations
gcatggagtcctcaaagatctatgcttacctcttcctctgcatgatctttctctcttccgccactcccattctcggttgtggctactgtggcaaaccccccaaaaagcacaagcctggtaaaacaccaaagacacccaaaacacccgttgttaagccaccagtcaccatccctcccattaatgttcctcccgttgttcttccaccaatagtgaagcccccaggtattctccctccaattccaattattaacccaccaaccacaccagggaagggagggaacactccatgcccaccaccaaagtctcctgcgcaggctacgtgccccattgacacgctcaaacttggtgcctgtgtggatcntcttggagggttggttcacattggtttgggtgacc

SEQ ID NO: 230343 - DNA, 412 bp, Glycine max
aatggcttcaaccgacaagtcaccggacccaacgccggcgaagggtccggatccaactccggggaagccgatgagtgttggtcagcacgtgatcgacaagagtgcaatgatggtgcagtcgctggaccccattaagcagatgagtcagcacgtgtgctccttcgctatctacagccatgacatgtctcgccagatagagacacatcactactgctccagactccaccagaacttcatacaatgtgctgtctatgattccgatgaatccaaagctcgtctcctcggggtggagtacatcgttcctgctgatgtctttgaagcctttcctccggaggagcagaaactttggcattctcatgcttatgagattaaatcaggcctgttggtgaatcctacagttcctgaggttgtt

SEQ ID NO: 230344 - DNA, 313 bp, Glycine max
tgaacgcattgccagaggaagtgattcagcacacttttaacctaaagagccagcaggccaggcaggtgaagaacaacaaccctttcagcttcctggttccacctcaggagtctcagaggagagctgtggcttagagagccctttttgcatgtgctaccacacttttgtccttttgggctctagctagtgctggtagcagtaaataagaatgaataaaagaaacaaaggcttagatgccctttgttaagtgtagaataacgggtatagtaactatgtacccttgtgtaatgagtcactcaagtacctatgcggg

SEQ ID NO: 230345 - DNA, 371 bp, Glycine max
ctcaagtagaggaactggttgtggatgaagaaagtttagctttccttggggagattggacaacaaacatctttaaggcatgcagttcaactgttatcacctgccagcattgttgcaaaaatgaatggccgagacaacatctgcaaggcggatcttgaggaagtttgtacgctatatttggatgccaaatcatcggccaggttacttcaagagcagcaggagaaatacatttcataatattgttttccaactgttgcgatgactgttggttgggtttgaattacaaccagtttttgctttcgcttctatactgtctcttgcatgattgagataatcggttcaagggctgtaattttgttactgaattcattt

SEQ ID NO: 230346 - DNA, 364 bp, Glycine max
agaacacacagtttgatcgatgatggaaacgttggccacatcttcttctgcaactcttccatcttcttcttctcccttttccattttcccttcaagaagaacttccctttatcctcccaagactctccaatttcgtttaccctcctccaagcgtgatgatgctttcgattcagactccaaagaaaaaaacaagcttccaattcttagtgatcgctgcctctctctttcccctctttccaaagatgctgcgatggggctggtgctgagtgctgcgacgggcagaggatggaccacgggttcagggatggaaggcccctctgttcctgcagttggtagggatagcgaatcggggacggggaacatc

SEQ ID NO: 230347 - DNA, 483 bp, Glycine max
  unsure (1)..(483): unsure at all n locations
tnnttgntcggctcncgacataacagatgangtcggacccangcntaaatgatcccctcggggaattccaattccaacattttnnaanaaattanggaggcaaaaanntnnananannaatnggantnattngtttncttattaggcctaccctgaanccaaaggaaatgagatcggaattcctcggggaattccaattccacattttcaagaaataaggaggcaaaaatgttcatatatgaattggaattatttgttttcttattaggcctatcctgaagccaaaggaaatgagatcggaattcctcggggaattccaattccacattttcaagaaataaggaggcaaaaatgttcatatatgaattggaattatttgttttcttattaggcctatcctgaagccaaaggaaatgagatcggaattcctcgggggtaccgaagctcgaattcctatagtgagtcgtataaattcgtaatcat

SEQ ID NO: 230348 - DNA, 404 bp, Glycine max
  unsure (1)..(404): unsure at all n locations
agaagaagaaaacgaaggaagcaacatattgagtggcttcgcccctgaattcttgaaagaagcgttcggcgtgaacatgcagatagtgagaaacctacaaggtgagaacgaagaggaggatagtggagccattgtgacagtgaaaggaggtctaagagtcacagctccagccatgaggaagccacagcaagaagaagatgatgatgatgaggaagagcagccacagtgcgtggagacagacaaaggttgccaacgccaaagcaaaaggagcagaaatggcattgatgagaccatttgcacaatgagacttcgccaaaacattggtcagaattcatcacctgacatctacaaccctcaagctggtagcatcacaaccgccaccagccttgacttcncagccctct

SEQ ID NO: 230349 - DNA, 168 bp, Glycine max
gcggaatcctctgcatgatctggaatttgtgttttctttcgcttgttcgtttgtttaattcaataaaggaaattaggcatgaccctcttgttgagtatgctctgcctatttgaaaatttccacacctcttttaattgtcgtaatgatgtgtgaagtgtgtgttatttt

SEQ ID NO: 230350 - DNA, 161 bp, Glycine max
gcggaatcctctgcatgatctggaatttgtgttttctttcgcttgttcgtttgtttaattcaataaaggaaattaggcatgaccctcttggtgagtatgctctgcctatttgcaaagttcgacatctcttttaattgtcgtaatgatttgtcaagtgtgtg

SEQ ID NO: 230351 - DNA, 133 bp, Glycine max
gtttgtttaattcaataaaggaaattaggcatgaccctcttgttgagtatgctctgcggatttgaaaatttccacacctcttgtaattgtcgtaaggatgtgtggagtgtgtgttatgttaaaaaaaagaccc

SEQ ID NO: 230352 - DNA, 228 bp, Glycine max
ctcaaatctgaactcggcactcgtgagcttgctactgagtttccacactgcataccttatgtcttccgaattcgaagttaacttgcaagatggctaaggaaaaggctcagatcaacattgtggtggggggtcatgtggaccctgatgacgcaaccaccattaacgagctgaagaagcctgttgtggagaaagaagctccacggcatgccatatgacggcatgcacgta

SEQ ID NO: 230353 - DNA, 248 bp, Glycine max
cgcaaggaggccgccgagagcacgctctccgcctacaaagccgctcaggacattgctaataccgagttgcctccaactcaccctatcaggctgggtcttgctctgaacttctccgtgttttactatgagattcttaactctcctgatcgggcttgcagccttgcaaaacaggcttttgatgaggctattgctgaattggatacattgggagaggagtcatacaaggatagcactttgatcatgcaact

SEQ ID NO: 230354 - DNA, 343 bp, Glycine max
aaggggtgtttcagaatccttcctagttgagaacaacaatggttcctccattgctggaaggagacttgagatcacagcacgaactgctggggcttcaaagacaattgaggtggaggttgacaagccacttggcctctccttaggccaaaagtctggtggtggtgttgtcatcactgtgagtatctagcacccgtctattcaattgaatgatttcctatttgtgaatgaggattgtttatgcaatgcgtgttgtcttctataggctgttgatggtggtgggaatgcagcaggagcagggttaaagggacgggaccaagtccgttacacgagcagtttctttggg

SEQ ID NO: 230355 - DNA, 324 bp, Glycine max
ctccttcaaaactcatctcgaaaccctaagcactcgctcgggttcgtgtagtgccaaaccctagggctcattttccagatgtattcagtttttctctcctctcttttccgatccaccgttggagatcgaagatggtgtccgacgccagcaataagaaggccgcacagaagaacgccgccgccgccgccaagagaggtggcaaatctgccgccgctgccgttatggccgccacctcttccaaagccgccgacaaggtcgccaacggaatcgccgatattcagatttcggatcggacctgcatcggcgtcctctgttcgcatcctc

SEQ ID NO: 230356 - DNA, 324 bp, Glycine max
gaggcttcaatttccaattagggtttcgcttagagtaaccaattaccatgggagtcttcacctttgtcgttcgcaaatccggcgccgaatggagcgccaagcaacattccggcgacatcgaggcctccgccgactccacctacgatctccaaaggaagctcgtgcaagccgctctcgccgttgattcctccggtggagtccagtcctccttctctcccgtgtctcctacctccgctgtgttccaggtgatagtgggtggtgctgtattcgttggaggtggcggtggtgctgttgcagctgcacctgcaggtggtgctgctgcag

SEQ ID NO: 230357 - DNA, 247 bp, Glycine max
gttggcctaaaagaacaacaacaggagcagcaacaggaagaccaacctttggaagtgcggaaatatagagccgaattgtctgaacaagatatatttgtagtcccagcaggttatccagttgtggtcaacgctacctcaaatctgaatttctttgctattggtattaatgccgagaacaaccagaggaacttcctcgcaagttcgcaagacaatgtgataagccagatacctagtccagtgcaggagc

SEQ ID NO: 230358 - DNA, 179 bp, Glycine max
ttgcatgcgtccaggtcgactctaaaggatcccctcggggaattccaattccacattttcaagaaataaggaggcaaaaatgttcatatatgaattggaattatttgttttcttattaggcctatcctgaagccaaaggaaatgagatcggaattcctcgggggtaccgagctcgaatt

SEQ ID NO: 230359 - DNA, 244 bp, Glycine max
cctgacaacaacgaaaatctcagattaataacactcgccatacccgttaacaagcctggtagatttgagagtttcttcctatctagcactgaagctcagcagtcctacttgcaaggattcagcaggaacattttagaggcctcctacgataccaaattcgaggagataaacaaggttctgtttagtagagaggaagggcagcagcaaggggagcagaggctgcaagagagcgtgattgtggaaa

SEQ ID NO: 230360 - DNA, 262 bp, Glycine max
aatacgtagtgttcaagacacaccacaacgccgtgagcagctacattaaggaagtgtttagggcaatcccttcggaggttctttccaattcttacaaccttggccagagtcaagtgcgtcagctcaagtatcaaggacactccggccctttggtcaagccataaataacagcaagcatatatgaaggtgtggtgaggcaaactcagaagaaaaaatatcagtacatagtttgtgtaacaataaaactatggcctacgtattt

SEQ ID NO: 230361 - DNA, 306 bp, Glycine max
cggctcgagaattcatcattttctctcttctctgcttcttcttgttcaaatcttaggagctgaggagaatcaatcgagagaaatatgtctggtatcgctcgtggacgccttgctgaggaacgaaagtcatggcgcaaaaaccatccacacggtttcgttgccaagcccgagactctacctgatggcaccgtaaatttgatggtctggcattgcactattcctggcaagaccgggactgattgggagggtggatatttcccactgacaatgcacttcagtgaagattaccctagcaagcctcccaag

SEQ ID NO: 230362 - DNA, 323 bp, Glycine max
caacttagaagggctcactgtagatgaggcaattcaaaacaagagattgttcctactagatcatcatgacccaatcatgccatatttgaggcgaataaatgcaacctccacaaaggcttatgctaccagaaccatccttttcctgaaaaatgacggaactttaaggccacttgccatagagttgagtttgccacatcctcagggagatcaatctggtgcttttagtcaagtttttctgcctgcagatgaaggtgttgaaagttctatttggctgctagcaaaggcttatgtagttgtgaatgactcgtgctatcatcaacttg

SEQ ID NO: 230363 - DNA, 263 bp, Glycine max
tccactctaaaggatcacctcggggaattccaattccacattttcaagaaataaggaggcaaaaatgttcatatatgaattggaagtatttgttttcttattaggcctatcctgaagccaaaggaaatgagatcggaattcctcggggaattccaattccacattttcaagaaataaggatgcaaaaatgttcatatatgaattggaattatttgttttcttattaggcctatcttgaagccaaaagaaatgagatctgaatt

SEQ ID NO: 230364 - DNA, 227 bp, Glycine max
aaataatttaagatactatgatgagagcacggttcccattactgttgctgggacttgttttcctggcttcagtttctgtctcatttggcattgcttacggggaaagagagaaccccaaacacaacaagtgtctccagagttgcaatagcgagagagactcgtacaggaaccaagcatgccacgctcgttgcaacctccttaaggtggagaaagaagaatgtgaagaa

SEQ ID NO: 230365 - DNA, 245 bp, Glycine max
gcaccagtttcaccgcacgactatcttgttgtttggagcgatgcgagaaaaactctgtaaacatgttggtttaccaggacctccttacaggtgatgagcttctctctgactccttccgttataaggaaattgagaatggaatgctgtgggaagttgaggggaagtgggttgttaaaggagcagttgatgtagacattggtgcagacccttctgctgagggtggaggagaagatgagggagttgat

SEQ ID NO: 230366 - DNA, 265 bp, Glycine max
ctgcaattcactctgtacaattcttcgttcgttctctgcagttatatcctttttgagcttcaatggcggacgctgaaaccttcgctttccaggctgagatcaaccagcttctaagtctcatcatcaacacattctacagcaacaaggagattttcttgcgtgaactcatcagcaatgcttctgatgctttggataagattcgattcgagagcttaaccgacaagagcaagctcgatgctcagccagagctcgtcagtcgtcgggt

SEQ ID NO: 230367 - DNA, 309 bp, Glycine max
cgggaatgccaattccacattttcaacacataacgaggcaaaaatgttcagatatgaattggaattaattgttttcctaataggcctatcctgaagccacgtgaaatgatatcggaaatcctcgtggaattcccattccacattttcaacaaataaggaggcataaatgttcatatataatttgggacttacttgctttcgtattaggcctatcctgaagccaaaggaaatgagattggaattcctcggggaattccacttccacattttcacgacataaggaggcaaacttgttcatatatcaattgg

SEQ ID NO: 230368 - DNA, 233 bp, Glycine max
acaaaatcattccaatacacatggcttccgaaaggcaagcgttaatgcttattctcttaacaacattcttcttcaccataaagccttcacatgccagtactacgtcgtggcataacaatctactggggccaaaacatttaccactgcaccttgacttccacatgctacattggaaacttcgagattgtcaacctagctttcctcaatacgtttggttgcggcataactccatc

SEQ ID NO: 230369 - DNA, 231 bp, Glycine max
aacaattcaattcaatctgcctcgatcatggagaggaaaacatttgggtttttgttcgtgctcctccttgtcttagcttctgatgtgacggtgaagagagcagaggcgaaagattgcttgacaaggaggcacgggttccagggtagatgcttattcgacaggcaatgtgcacatgtgtgcaggagcgatggtttcatcggtggtcagtgccgaggccctcttcgcaaatgc

SEQ ID NO: 230370 - DNA, 417 bp, Glycine max
ctagtcaccaaccaaacctctgcattattctcttctctcactctctctaagctctcttttagtcttactcacaaacacttttttcactgcttccattacgaacatatatttattatatggctcctgaacttgtccccaccgttgtgaaatccagtgctgcgttcacgaaacccgcgacccttccaaggcgtgcctacgtgacattcctcgccggaaacggtgactacgtgaaaggggtggttggcctcgccaaagggttgcgagaggtgaggagcgcgtacccgttggtggtggctgtccgcgccgatgtgccggaggaggagcgtgagattctggagtcgcagggctgcatcgttcgcgagatcaacccgtttaccacccgaaaacaaacccagtttgccatggcttaatacgtca

SEQ ID NO: 230371 - DNA, 327 bp, Glycine max
ctgtggagcgccaggctcaagacagaattcaccgaatagggcaatataagcctataaggttttagttcttgttctctagcactttcaaattagaacaattaggaaatgaaaaagtagagttaaaaatacaggttggtcctttcttcatgatctgacacttcttatatgcacagaattgtgaggtttgtcatcgagaagacaatcgaggagagaattctgaaactgcaagagaagaaggaactagtgtttgaagggactataggtggctcttctgatgctctggggaaattgacagaggcagacttgagatttttatttgttacctaa

SEQ ID NO: 230372 - DNA, 222 bp, Glycine max
taaaattcttccaccaagttatgggtttccttgtgttccttcttttctccctcttaggtctctcttctatttccagcatatcaactcatcgttccatagtggaggtgcacctaacgaagtttaccacacagaaacaggtgtcttcactgttccaactatggaacagtgagcatggacgtgtctaccataaccacgaagaagaggcacggagacttgagattt

SEQ ID NO: 230373 - DNA, 244 bp, Glycine max
ggaaataattgatctttgaaaatgcagggaggaaagaaagctggagagtccatcaaggaaacagctgcaaacattggtgcttctgccaaggctggcatggagaaaaccaaggccactgtccaggagaaggcagaaagaatgacggcacgtgatccgatgcaaaaggagttggcaacccaggcggcgcgtcagcataacacggcggcgaagcaggctgccacggcaaggcacatgggacaaccca

SEQ ID NO: 230374 - DNA, 199 bp, Glycine max
ggaaataattgatctttgaaaatgcacggatgaaagaaagctggagagtccatcaaggaaacagctgcaaacattggtgcttctgccaaggctggcaggggtaaaaccaacgccactgtccagtagaaggcagaaagaatgacggcacgtgatccgatccaaaatgagttggcaacccaggcggcgcgtcagcataaca

SEQ ID NO: 230375 - DNA, 322 bp, Glycine max
cttattaacactttccttagttcaatatggggaagcccttcttcactctctctctttcttccctttgcttgctactcttgtcgagtgcatgctttgctattacctccagcaagttcaacgagtgccaactcaacaacctcaacgcgttggaacccgaccaccgcgttgagtccgaaggtggtcttattgaaacatggaactctcaacaccctgagctgcaatgcgccggtgtcactgtttccaaacgcaccctcaaccgcaacggcctccacttgccatcttactcaccttatccccaaatgatcattgtcgttcaagggaa

SEQ ID NO: 230376 - DNA, 311 bp, Glycine max
cttattaacactttccttagttcaatatggggaagcccttcttcattctcgctctttcttccctttgcttgctactcgtgtcgagtgcatgcgttgctatgacctgcatgacgttcaacgagtgccaactcttgcacctcaacgcgttggaaaccgagcagcgcgttgagtccgagggtggtcttattgattcatggaactctcaagaccttgagctgcagtgcgccggtgtcactgtttccagactcaccgtcatgggaatcgggcctaagttgccagctttatgatcttagctcgatatggatcattgt

SEQ ID NO: 230377 - DNA, 324 bp, Glycine max
ggagctcttcttctaccacacttcaattcaaaggcgatagtgatactggtaattaatgaaggagatgcaaacattgaacttgttggcctaaaagaacaacaacaggagcagcaacaggaagagcaacctttggaagtgcggaaatatagagccgaattgtctgaacaagatatatttgtaatcccagcaggttatccagttgtggtcaacgctacctcaaatctgaatttctttgctattggtattaatgccgagaacaaccagaggaacttcctcgcaggttcgcaagacaatgtgataagccagatacctagtcaagtgcag

SEQ ID NO: 230378 - DNA, 251 bp, Glycine max
gggaaacaaaactacccttttgcttttgctctttgttctttgccatggagtggccacaacaacaatggccttccatgatgatgagggtggtgataaaaagtcaccagaaagtttgtttttgatgagcaactccacgagggttttcaagactgatgcaggggaaatgcgtgtgctgaaaagccatggtggtaggatattttataggcacatgcacattggcttcatctctatggaaccaaaatccttgtttg

SEQ ID NO: 230379 - DNA, 389 bp, Glycine max
cgtcgctccgcaccagtttcaccgcacgaatatcttgttgtttggagcgatccgagaaaaactctgtaaacatgttggtttaccaggacctccttacaggtgatgagcttctctctgactccttccgttacaaggaaattgagaatggaatgctgtgggaagttgaggggaagtgggttgttaaaggagcagttgatgtagacattggtgcaaacccttctgctgagggtggaggagaagatgaggggagttgatgatgcagctgggagggttggtgacagtgttgagacagtcagacgtcaggagcagggcggagtcgagaagaggcagtttgttaccttcatgaggaggtttatcaagaatttgactcgcaagctcgatgcagagca

SEQ ID NO: 230380 - DNA, 249 bp, Glycine max
atcaaatcagcgtcattcacctaaaccctatggccgacgaagccaaagccataaggcaacgcatccttctcctccggcgactaccccgccgcaattcaccacttctccgacgccatcgccttggtccccaccaaccacgtcctctattccaatcgatccgccgcatacgcgtctctccataactacaccgatgccttagccgatgctaagaagaccgttgaactcaagcccgactggtccaagggctga

SEQ ID NO: 230381 - DNA, 327 bp, Glycine max
cacaaagagaagcattagcactaggagcagcaacaactagtctcagctgaaatggcctcttcagtgatggcatctgtggccctcaaacctgcccctttcactgttgagaagtcctcagtgagaggccttccctctctctcaaggaactcttcttcattcagagttgtggccagtggcaagaagatcaagactgacaaaccttatggaattaatggtggcatggctttgagggatggaactgatgcatctggcaggaaaggaaagggaaagggtgtttaccagtttgtagacaaatacggtgctaatgtcgatggttacagtcctatc

SEQ ID NO: 230382 - DNA, 224 bp, Glycine max
caaagccagaaaggaaagcatcagcaagaagaagaaaacgaaggaggcagcatattgagtggcttcaccctggaattcttggaacatgcattcagcgtggacaggcacatagcgaaaaacctacaaggagagaacgaaggggaagacaagggagccattgtgacagtgaaaggaggtctgagcgtgataaaaccacccacggacgagcagcaacaaaggaccca

SEQ ID NO: 230383 - DNA, 269 bp, Glycine max
tctagatgatcaactcggggaattccaattcgacattttcaggaaattaaggaggcaaaatgttcaaaatataaattggaataattggtttcctaataaggcctacccgaaacccaacggaagtaagatccgaatccctcggggaattccaattcaacattttcattaaattccgacgcacaaatgttcatgacatgaattcgaattatttgtcttcttaataagcctatcctgaaaccatatgaaatgagatcggaattcctcggggg

SEQ ID NO: 230384 - DNA, 409 bp, Glycine max
  unsure (1)..(409): unsure at all n locations
gacaaccataaacaatatgtgtacatatgggctcaatcctggtatttcaggttctcgtcttttgggcaccattcctcagtctatttcacagcaaactgtttggaatcaagtggcaccagtgagaacaccattgaattttgattctagcaagcagagcttttgtcaattttccattgaccttctcggtggaggaattttagtggacataactggagattggatcacacttatacaaaattctccaggttagtaacgtgttgagagttgctgcttgggagaaaaggtgtttaatgggtaggattgtggtgtctgggaagtgagcagtcaaaaggagtgattggggctcattggtacaagtgtttttagcaaacagcancagtacagagcattttgatgcatgtaagtggac

SEQ ID NO: 230385 - DNA, 227 bp, Glycine max
tcatctcggggaattccaggtctaaatttttacaaactgaagttggacagctcggttcgcaatactgttgctgggacttgttttcctggcttcagtttctgtctcatttggcattgcttactgggaaaaagagaagcccattccagattttcaagaactgccgaggcacgagtatacagagtttgcgtggtgtgagctcttctcctatcacgctcatcgtgacgctg

SEQ ID NO: 230386 - DNA, 337 bp, Glycine max
ctggcgcatcttgttccacattttcaagatcattaggatgcaaaaatgttcatatatgaattggaattagttgttttctctatcaggcctatcctgaagccaaaggaaatgagatcggaattcctcggggaattccaattccacattttcaagaaataaggaggcaaaaatgttcatatatgaattggaattatttgttttcttattaggcctatcctgaagccaaaggaaatgagatcggaattcctcggggaattccaattccacattttcaagaaataaggaggcaaaaatgttcatatatgaattggaattatttgttttcttattaggccta

SEQ ID NO: 230387 - DNA, 284 bp, Glycine max
tgtcaatcctttaagtggacacatggattactcatttgcatctgcgtggcatcctgatggacgtatttttgctactgggaactaatacaaaacatggcatgcttgggatgttaagaacgtgtcaaaatctaatgcagtgcttaatggcaaccttggggctataccttccataccgtttacatcagatggactgttcatggcaatggctgagccatctgacgatgtgcatgtctatgatgcacatagtgggtttgagacagagcaggaaatcaattttcttgggg

SEQ ID NO: 230388 - DNA, 294 bp, Glycine max
ctcacacaacagacatatctcttcctcttctgtccctcaatggaaggatcaggatccggtgtggttacagtctacggcaacggcgccatcaccgagacgaagaagtcccccttctccgtcaaagtcggcctagcccagatgctccgcggcggcgtcatcatggacgtcgtcgacgccgagcacgcccgcatcgcggaggaggccggtgcctgcgcggtgatggccctggagcgtgtccccgccgacatccgggcccagggcggcgtggcccgcatgagcgatccgcagctcatc

SEQ ID NO: 230389 - DNA, 377 bp, Glycine max
  unsure (1)..(377): unsure at all n locations
cctaatcaaacttcactctcaaaatgagtgatcccacactagcacaacagcatctagtcaaagtccacacaacaacacacgaaacagttgttaccacacacaatcataaccaaacaccctcaataaatgcctcaggtgaaaagaagaagattgtgggggtgttctacaaagggaatgaatatgctaaattgaatccaaattttgttggatgtgttgaaggtgcattgggaatacgtgagtggctggaatcacagggtcatcagtacattgtcactgatgacaaagaaggacctgattctgaacttgagaaacacattccagatgcacatgtcatcatatctactccattccancccgccctatgtcaccgcagaaag

SEQ ID NO: 230390 - DNA, 319 bp, Glycine max
tgttttcaagctatttgctgccaaccaacataagccagctgatatcgtcagtatatttgttgcgaacaaaagtaagatgctgagactattggaagacttcaaaattgataaagaggatgaacaatttgaagccgacaaagctcaagtgatgagggaaattgaagctctttaaacaagggaacaacgacgcacctgaactgcaaattgtgttaagtggcaagttgcaatgtggcatttcactttagcgaattgtgtattgtaatagttctgttagtctttatcacgatatgagaccatccgtttcatacagacttcaatg

SEQ ID NO: 230391 - DNA, 341 bp, Glycine max
tctgctctcaagactgtgaattatggaatcctgcttgcacaaaagcaatgactatgtcatttaatccaaacccgtgttctgatgcatggagtttggaatttctgaagcgtaccggatttcattgtgatatcatttgtgtcactggatggactgccaccccaatgcaggatgttcaggttacaattgattggtttatttcctctcaggaatgtgttcccaggacctattgtgttttaaatccacaaaatccttttgtgttaaataggtggatgggaaaaactgactttccctcagggcacttcccgaagttgtaaagagaatgcctctttctaaagggggag

SEQ ID NO: 230392 - DNA, 345 bp, Glycine max
gctcgagtcggctctcaagactgtgaattatggaatcctgcttgcacaaaagcaatgactatgtcatttaatccaaacccgtgttctgatgcatggagtttggaatttctgaagcgtaccggatttcattgtgatatcatttgtgtcactggatggactgccaccccaatgcaggatgttcaggttacaattgattggtttatttcctctcaggaatgtgttcccaggacctattgtgttttaaatccacagaatccttttgtgttaaatatgtggatgggaaaactgactttccctcagggcacatcccgaagtgttaagagaatgcctctttcgataggggga

SEQ ID NO: 230393 - DNA, 382 bp, Glycine max
gtaaactcggaaatcggctcgagcatagctggagagtttcgacatggcactctgcctggactactatccatttcatcaaagtttcttcccacatttatgaaccttatcaaacgtcttgctgaagaagctcaggggaatcaaacccctcaagaatcacaagggtcagcttctcagacacagatcttcagaaatcaagtgcacaaaccagattcagtatcaacctcaatttccaatgtatcgagtgttggcttgtctgttgatgataacgaatactcaaccacaaacttgtctcagaggcgaagaacaaacgctcccgaagctgaattttcatgacaaaattcatgacaatttgatttgaagacggttggcatcagatttggca

SEQ ID NO: 230394 - DNA, 384 bp, Glycine max
gattagtaccacaaaaatggagaaatagaataactgaatatcgtatagctcaaaataaagatttaaccaaatgcaattcatatgaaaaaagccaattaattctttacaaagaacaacaagtaaacgcattaaaaaaaaaaattagaaaacaatatagatacgatcttttatcctataattttatcaattatgcagataagaaagactcatatatttatggatatagatccctatttcaagtaaaaaaaaaccaagtgatttcttctaattacaacacgtataaaaaagaattattggatatcatagataatctctttatcaagaattatatattggaagatgcgattctagatatgggaaaaaatatgtatagaaagtattttg

SEQ ID NO: 230395 - DNA, 364 bp, Glycine max
acgcgtacgtaaactcggagatcaattggagcttgtgagattttcttccaagaagatcacagacttgggattcaaatttaaatacagcttagaggacatgtacactggagcaattgacacatgcagagacaaagggcttcttccgaaacctgcagaaaaagggctttttactaaacctgcagaaactccagtgaatgccatcatgcataaataggcattcatatctttgtatctgtgtgatggctgtgcaacttgcttttcttattccgtttcttgattaacgtttctgttttatgaaaaattagaaatgtgagtggcttgttaggccaagttatcttcaataagttaataaaaaccatcttct

SEQ ID NO: 230396 - DNA, 320 bp, Glycine max
gcaccatttcgagtccaaggcagacgccggtgcctccaaaacctaccctcagcaagccggtaccattcgcaagaacggctacatcgtcatcaaaggacgcccctgcaaggttgtggaagtttcgacttccaaaactggaaagcacggtcacgccaagtgccactttgttggaattgatattttcactgccaagaaacttgaggatattgtgccctcttctcacaactgttatgttcctcatgttaatcgtactgattaccagctcaatgatattgctgaggatggatttttgagtctgcttaatgaaaatgggaacacca

SEQ ID NO: 230397 - DNA, 391 bp, Glycine max
acgggtacgtaaactcggaaatcggctcgaggattatgctagttttgatggtttgattaccaagcaagttatgagcaagatggcagaaatgataaacagtctttgtggtggtgatgaaaaattgatgcgtgaaaggacgcacctgctgttggcttgttgttcaaggatggcaatttgtaagaaagatgtttggagagttgaatgtggaatcccttctggatttccgctcacagttatttgcaatagcatttttaatgagatgctcattagatatagctatgaaaaattactgcgccaggctaaagctccaagtatgtttttacaatccttcacaaattttgtttctttgtgtgtgtatggtgatgataacttaattagtgttcaagaatat

SEQ ID NO: 230398 - DNA, 394 bp, Glycine max
cttgcatgcgtccaggtcgaatctaaaggatcccctcggggaattccaattccacattttcaagaaataaggaggcaaaaatgttcatatatgaattggaattatttgttttcttattaggcctatcctgaagccaaaggaaatgagatcggaattcctcggggaattccaattccacattttcaagaaataaggaggcaaaaatgttcatatatgaattggaattatttgttttcttattaggcctatcctgaagccaaaggaaatgagatcggaattcctcggggaattccaattccacattttcaagaaataaggaggcaaaaatgttcatatatgaattggaattatttgttttcttattaggcctatcctgaagccaaaggaaatgaga

SEQ ID NO: 230399 - DNA, 312 bp, Glycine max
  unsure (1)..(312): unsure at all n locations
tganaatgcagttcgtagtatttttgtcgcgcctttcagaggcggaaggcctattcgggtggttacatttccgaataccattgtgcagattgaaccagacatgaattcaaggtttcagcttttgagtaccactaccaatggtgattttgttcaaggaaaagatctcgcaatggttaaagttaatgtancatgtgctgctgttggcttgacatcaagttacactccaactccattgttggaatctggtttgcaaaaagacagagggttaattgtggaatattttggaaggatgtcttacgttgctcataacgt

SEQ ID NO: 230400 - DNA, 347 bp, Glycine max
aaaagagagaataggaaagacactgagtaagcaatgaaatttccaaattctcaattgtttcttccattcttgttgttgttgttcttcgcgataactccctttcgcggttcagggcaacaaacggattggcacagcgaagagactcaacatggaaatggggttcgccgcagagttcttctgagtttcaaagagaagccctcatgaagtaacgttacctttgaatgtactccttcgggtccttgtgtgccctgtctctactctgagaatggtgatgagaaatatcgatgcagtgagactggctaccgaattccattcaaatgtttagagattaaagattcaacgaagga

SEQ ID NO: 230401 - DNA, 221 bp, Glycine max
ctgtggcttagagagccctttttgcatgtgctaccacacttttgtccttttgggcgctacctaatgctggcagcactaaatactactgcagaacacaaacaaaggcttaaatgccctttgttaagtgtagaataacgggtatactaactatgtatccttgtgtaatgagtcactcaaatacctatgccggaaaagcatcaataaaataagaaattccaata

SEQ ID NO: 230402 - DNA, 344 bp, Glycine max
gcaagagagcgtgattgtggaaatctcgaaggaacagattcgggcactgagcaaacgtgccaaatctagttcaaggaaaaccatttcttctgaagataaaccttttaacttgagaagccgcgaccccatctactccaacaagcttggcaagttctttgagatcaccccagagaaaaacccccagcttcgggacttggatattttcctcagtattgtggatatgaacgagggagctcttcttctaccacacttcaattcaaaggcgatagtgatactggtaattaatgaaggagatgcaaacattgaacttgttggcctaaaagaacaacaacaggagcagcaac

SEQ ID NO: 230403 - DNA, 381 bp, Glycine max
aacaaacagcaacagtacagagcattttgatgcatgtaagtggacaaaatcagaaccacattcctgggaattaatcttcccaatagaggtatgtggtcctaataatggttttgaaatgtggagttctgagtgggcaaatcaaacttcatggcatttgagtttccttattgacaatcccaaacagtctacagtttttgatattctcttgggaatctctcaagattttgaaattgctggtaatactcttatgccagctttttctgttccacaggctactgccagatcttctgaaaatgcggaatcctctgcatgatctggaattcgtgttttctttcgcttgtttgtttgtttaattcaataaaggaaatttggcatgaacct

SEQ ID NO: 230404 - DNA, 390 bp, Glycine max
ttgcacgcgtccaggtcgaatctaaaggatcccctcggggaattccaattccacattttcaagaaataaggaggcaaaaatgttcatatatgaattggaattatttgttttcttattaggcctatcctgaagccaaaggaaatgagatcggaattcctcggggaattccaattccacattttcaagaaataaggaggcaaaaatgttcatatatgaattggaattatttgttttcttattaggcctatcctgaagccaaaggaaatgagatcggaattcctcggggaattccaattccacattttcaagaaataaggaggcaaaaatgttcatatatgaattggaattatttgttttcttattaggcctatcctgaagccaaaggaaatg

SEQ ID NO: 230405 - DNA, 481 bp, Glycine max
  unsure (1)..(481): unsure at all n locations
ttnnttgccagcccagggaaagacaacttgcangcntncaggtcgantctaaaggatcccctcggggaattccaattccacattttcaagaaataaggaggcaaaaatgttcatatatgaattggaattatttgttttcttattaggcctatcctgaagccaaaggaaatgagatcggaattcctcggggaattccaattccacattttcaagaaataaggaggcaaaaatgttcatatatgaattggaattatttgttttcttattaggcctatcctgaagccaaaggaaatgagatcggaattcctcggggaattccaattccacattttcaagaaataaggaggcaaaaatgttcatatatgaattggaattatttgttttcttattaggcctatcctgaagccaaaggaaatgagatcggaattcctcggggggtaccgagctcgaattccctaaaagtgagtccnattaaaatccc

SEQ ID NO: 230406 - DNA, 309 bp, Glycine max
atgtcactgaaaaagggaagttcttcttgacctggtattctaacaaattgctgaatcatggtgatcaaatactagatgaagccaacaaagctttcctgggctgtaaagtcaaattagcaatcaaagtatctggaattcactggtggtacaaagttgaaaatcatgctgcagagcttactgctggatattacaaccttaatgatagagacggataccgccccattgcaaggatgctgtctcgccatcatgccattttgaactttacatgtcttgagatgagggactcagagcaaccctcagatgccaaaa

SEQ ID NO: 230407 - DNA, 374 bp, Glycine max
gctagaatggaatttcgatgctcagtcatctcttttaccattctcttctctcttgctcttgcaggagagagccatgtccatgcatcgctacctgaggaagattattgggaagctgtttggccaaacactcccattcccactgcactgcgagagcttctaaagcctctccctgcaggtgttgaaatcgatgaactccctaagcaaattgatgatacacagtacccaaaaacattcttctataaagaagaccttcatccaggcaaaacaatgaaagtacaattcaccaagcgtccctatgcacaaccttatggtgtatatacatggttaacggatattaaagacacctctaaagaaggatatagtttttaagagat

SEQ ID NO: 230408 - DNA, 360 bp, Glycine max
gtgagatacaggtttgttgtggatgtcaaaggcagcaaacttgtcgatcagtaaaagaaagaaagtatactactagcacgacacacgcaacatccatccttccatcatgaagagtctggaaaagttattaattaattgagaactaaagctgtatttgttgttcactctaaaaaagaagctgtgttttgtttattaaaaagagtgctctgttttctctgttttggttacacgacgttcattaaaatatagtatttgatatcaaaaaaaaaaaaaaaaaatttttttttaattaaaaatttataatatatataataatttttttatattaatttataatatttataaaaaaaaaaagggggg

SEQ ID NO: 230409 - DNA, 354 bp, Glycine max
aagcaaagcaatggctacttcaaagttgaaaacccagaatgtggttgtatctctctccctaaccttaaccttggtactggtgctactgaccagcaaggcaaactcagcggaaactgtttctttcagctggaacaagttcgtgccgaagcaaccaaacatgatcctccaaggagacgctattgtgacctcctcgggaaagttacaactcaataaggttgacgaaaacggcaccccaaaaccctcgtctcttggtcgcgccctctactccacccccatccacatttgggacaaagaaaccggtaacgttgccagcttcgccgcttccttcaacttcaccttctatgcccctgacac

SEQ ID NO: 230410 - DNA, 380 bp, Glycine max
aggtccactctaaaggatcacctcggggaattccaattccacattttcaagaaataatgaggcaaaaatgttcatatatgaattggaattaattgttttcttagtaagcctatcctgaagccaaaggaaatgagatcggaattcctcggggaattccaattccacattttcaagaaataaggaggcaaaaatgttcatatatgaattggaattatttgttttcttaataggcctatcctgaagccaaaggaaatgagatcggaattcctcggggaattccaattccacattttcaagaaataaggaggcaaaaatgttcatatatgaattggaattatttgttttcctagtaggcctatcctgaagccaaaggaaatgag

SEQ ID NO: 230411 - DNA, 349 bp, Glycine max
tgaatcgtaagcagcggctaccctaatcctctcctcttcctctctactaatttcagctatggccgacgaagctgtggttgttccagatcccacccagatcgatgtcaagctctttaaccgctggagcttcgacgatattgagattactgacatttctctggctgattatatcggagtggcgacatccaagcacgccacgtatgtgcctcacaccgccggcaggtactcggtgaagcggttcaggaaggcgcaatgccccattgttgagaggctgaccaactctctcatgatgcacggtagaaacaatggcaagaaactcttggctgttaggatcatcaaacatgctatg

SEQ ID NO: 230412 - DNA, 323 bp, Glycine max
gtcggtgaacgagggacaccctgacaagctctgcgaccaaatctccgatgctgtcctcgacgcttgcctcgagcaggacccagacagcaaagttgcctgcgaaacatgcaccaaaaccaacttggtcatggtcttcggagaaatcacgaccaaggccaacgttgactacgagaagatagtgcgtgacacctgcaggaacatcggcttcgtctcaaatgatgtgggactggatgccgacaactgcaaggtcctcgtcaacattgagcagcagagccctgatattgctcaaggtgtacacggccaccttaccaaaaaacctgaag

SEQ ID NO: 230413 - DNA, 368 bp, Glycine max
aaaacaaagaaaaaaaaaacccttagccaacacaaccatcatggccacctctgctattcagcaatcagcattcactggtcaaactgctctgaagcagctcaatgagttcgtccgcaagaccggtggcgccggcaaaggtcgcactaacatgcgccgcaccgtcaagagtgctcctcagagcatttggtatggccctgaccgtcccaagtacttgggtccattctcggagcagattccatcatacctgaccggagaattccctggtgactacggatgggacactgctggattatcagctgacccggaaaccttcgccaggaaccgggagctggaggtgattcacagcagatgggcaatgcttggtgccc

SEQ ID NO: 230414 - DNA, 210 bp, Glycine max
gaggtcgttgaaccaggcattcactcaggagctctgcgagcaagtctaccatcttgtcctagagtcattcctctaacaggctggagtgatcatggttacatgtgatacatgtgtaaaattgttatcggcacagacttccacacaactatagaagacggtcacatatgatgtcgagactgaggtgcctaacaactgcacgaacacagattt

SEQ ID NO: 230415 - DNA, 360 bp, Glycine max
cttcgggaagtgccctggggaggagctggtgcaaagaatgctattctcatgaatatgccaaatgctgttctttcaatgtggagatattttgttggagatctcgtctttgaagtttctaagatgacttctccctacattaaatgtacagtctctttcttcatagcatttggaaatttggctgatgacaccatcaattttgaggcttttccccacaagctggtgcaatttggagagattcaggaaaaagttgtattgaaattttcacaagaggaatttcttacagcttggtcaactcaggtgcgtcctacaacaactctgttggctgatgggtggtcatatttgtatgctatggtgcatgat

SEQ ID NO: 230416 - DNA, 363 bp, Glycine max
gtcacagtttccacatttctcctacgccaacgaccttacattccgaaaagtcaaaactacccatccacccaggcaacgatggacgtaggaaccgccgacgatcattccccggaagccgccatatcgcggtggaaattcgcggtgtcgcggcagtaccagcacatgctggacaaaacgacgccgcacgtgctccgacggtggatcgggtgcctggtggttgccgccgtgtacgtgctccgcgtgtacttggtccaaggcttctacatcgtctcctacgccctcggcatttacatcctcaacctcctcatcggcttcctctcccctcaggtcgatcccgagattagcgaccgccccaccctcccc

SEQ ID NO: 230417 - DNA, 285 bp, Glycine max
cttaaacgtaccaagagcacgaaaaattgagcgtttcatatcacaaccttttttcgtaacacaagtttttaccggttcgccggggaaatatgttagtctagcagaaacaattagacggtttaaattgattcgttctggagaattagatggtcttcctgaacaagcccttttatttggtaggtaatatcgatgaacctactgctgaagctacgaacttagaaatggagagcattttgaaaaaatgactttaaatctgtgtgtactgacccccattcgaattgtttg

SEQ ID NO: 230418 - DNA, 394 bp, Glycine max
ggggaattagggtgaatggtgtggcacctggcccagtttggacgccaatacaaccagcttcaaagcctgctgagatgattcagaacttggggtgtgaggtgccaatgaaccgcgtggctcagccttgtgagattgcaccatgttatttgttcttggcaacttgtcaggactcttcctactttactggccaagtcctccatccaaatggtgggatggtcgtcaacgcttaagctatagtgtgccttcacctatttcctattgaactggtttttctagctttaccctcctgaataagcagtgttaccttcggatgcatattttacgttgaaatacattgtgtttggaacatataagccttgagattgaataacctttacgtgagttaattaacctc

SEQ ID NO: 230419 - DNA, 381 bp, Glycine max
  unsure (1)..(381): unsure at all n locations
aaaccctacaagtcacgaatttgagattctaagaccctcctctctctcgtacttcatcggaaccgaaacccttcgccgcaaaaaatgcctcccaaatctgccaaatccaaggaagctccagctgagcgacccatcctcggtcgattctcttctcacctcaaaattggcattgttggcttgccaaatgttggaaaatctactctctttaatactctcaccaagttggcaatacctgctgagaacttccccttttgcaccattgagcctaatgaggcgcgggtcaatgtacccgatgaacggtttgagtggctttgccaattattcaagccaaaaagtgaggtctcggctttcttagaaatccatgacatanctggattggtc

SEQ ID NO: 230420 - DNA, 343 bp, Glycine max
gaattctccagagagaagaagaaacttaatcgatcatcacttcacttcactaatacatcatggcagacgagacccagaacaagtatgagagctctgaggttgaggtccaggatcgtggtgtttttgactttctcggtaagaaaaaggatgaagaagacaagcctcatcctcaggaggaggtcatcgccaccgagtttcaaaaagtcactgtctcagaccaaggagagaacaagcacagcctcttagaaaagcttcaccgatctgacagcagctctagctcttcaagtgaggaggaaggagaagatggagagaaaggaagaagaagaagaaggaaaagaaaggg

SEQ ID NO: 230421 - DNA, 344 bp, Glycine max
caatttctcttccaaaccaactcgcttcccactttggcctacaacgccaattcaccacttgcctttctcgctaccctacttcaaagggtgctataatattcggggatgcacctaacaacatgcgacagtttcaaaaccaagatattttccacgatttggccttcaccccattaaccatcaccctgcagggagagtacaacgtgagagtcaactcaataagaatcaaccagcacagtgtgttcccactgaacaagatatcatccaccatcgtagggtcgacctctggaggaaccatgattagcacctcaactcctcacatggttctccagcaatccgtgtaccag

SEQ ID NO: 230422 - DNA, 340 bp, Glycine max
cattttctttgccaaccagacatatcttccaagtgagacaccagctccactagtcaaatatagagaagaagagttgcataatttaacacgagatggaactggagaacgcaaagagtgggaaaggatctatgattatgatgtctagaatgatttaggtgatccggagaaaggtgaaaatcatgcccgtcctgttcttggaggaaatgacacctttccttatcctcgtaaggggagaactggtagaaaaccaacaaggaaagatcctaatagtgagagtatgagcaatgatgtttatcttccaagagatgaagcttttggacacttgaagtcatctgacttt

SEQ ID NO: 230423 - DNA, 346 bp, Glycine max
gtaggatacaaccctgacaagattccttttgttcctatctctggttttgagggagacaacatgattgagaggtccacaaaccttgactggtacaagggtccaactctgcttgatgcacttgaccagattagtgagcccaagaggccctctgacaagcccctcaggcttccccttcaggatgtgtacaagattggaggtattggaactgtgccagtgggacgtgttgagaccggtgtcttgaagcctggaatggtggtgacttttgcaccaactggactgacaactgaagtcaagtctgtggagatgcaccatgaatctcttacagaggcacatcctggtgacaatg

SEQ ID NO: 230424 - DNA, 336 bp, Glycine max
gggtttttgaaattctgtaatgctaagaagccaagttgcttttaccccattcctcaagctgcagattgcatcttgagggtggttgagatggccgatgcacctatcatttatctttctacagatgcagcagaaagtgaaactggtctgcttcagtcactagttgtgctgaatggcaggcctgttcctcttgtaatacgtccagctcgaaattcagcagaaaaatgggatgctctgttgtacaggcataatatggatggagattcacaggtggaagctatgttggacaagactatatgtgccatgtctagcgtgttcattggagcccctggttccact

SEQ ID NO: 230425 - DNA, 336 bp, Glycine max
ggtccgacgacctctcaggttctcgcagttgtcgccggccttccggtcggcggcatcctcctgctcctggcaggactgaccctggctggaactctcaccgggctggtggtggcaacaccgctcttcatcatcttcagcccggtgctgattccggccacggtcgcaattggcctggccgtggccgggttcctgacgtcgggagtctttgggctcacggcgctgtcgtccttctcctggatcctgaactacatccgggagacccagccggcgtcggagaatctggccgctgcggcgaagcaccatctggcggaggcggcggagtacgtggggcagaag

SEQ ID NO: 230426 - DNA, 401 bp, Glycine max
atgccatatgtgaggcagataaatcagctgaattctgccaagacttatgcgacaaggactatcctttttttgagagaagatggaactttaaagccagtggccatcgaattaagtttgccacattctgctggggatctgtcagctgccgtcagtcaagtcgtcttacctgctaaggaaggtgttgagagcacaatttggctactagccaaagcttatgtcatcgtaaatgactcttgctaccatcaactcatgagccattggttaaatactcatgcggcgatggagccattcgtcatagcaacacaccgacatcttagcgtgcttcacccaatttacaagcttctgactcctcactatcgtaacaacatgaacatcaacgcacttgccaggcaatctctaat

SEQ ID NO: 230427 - DNA, 348 bp, Glycine max
tcggggaattccaattccacattttcaagaaataaggaggcaaaaatgttcatatatgaattggaattatttgttttcttattaggcctatcctgaagccaaaggaaatgagatcggaattcctcggggaattccaattccacattttcaagaaataaggaggcaaaaatgttcatatatgaattggaattatttgttttcttattaggcctatcctgaagccaaaggaaatgagatcgggattcctccgggaattccaattccacattttcaagaaataaggaggcaaaaatgttcataaatgaattggaattagttgttttcttattacgcctatcctgaagccaa

SEQ ID NO: 230428 - DNA, 342 bp, Glycine max
cacacacaactactacaagtacttccttacaatcaaaaccaacaacaactatggcaagttatcaaaagcactacgatgatcagggtcgcaaggttgacgagtatggcaacgttgagaagcaaaccgacgaatacggcaaccctgttcatgctgctagtgtcacctatgtagccaccagaactgctgctggtggttacagtgatgacattaataagcaacatgataccaccaatgcctacggcgtagacactggtagacagcattctagtggtggctacgatggtgacactaataaacatcatggaactactggtggctataatgatgacaccaatagacatc

SEQ ID NO: 230429 - DNA, 82 bp, Glycine max
atggccgatactactggaaggattcctctttggataataggtactgtaactggtattactgtgatcggtttaattggtattt

SEQ ID NO: 230430 - DNA, 360 bp, Glycine max
agagaactgacgtcggacgcacgcgtacgtaaactcggccctttttttttttttttaatggaatttcgtttgttgattcgagctaagttccataaaaacaccagccctttttaaaatgtcctgaacagttcctgtaggttgagcgcctcgttcaaggaaatatagaataacaggaatatttaaataggtttgattctttattggatcataaaaacccactttccgaagatctcttccctctcttcgagatcgaacatcgattgcaacgattcgataaacggctcattgggatagagatagataaataatgcaccccccccctagaaacgtataagaagttttatcctcgtacggctcgag

SEQ ID NO: 230431 - DNA, 344 bp, Glycine max
aacttattaacactttccttagttcaatatggggaagcccttcttcactctctctctttcttccctttgcttgctactcttgtcgagtgcatgctttgctattacctccagcaagttcaacgagtgccaactcaacaacctcaacgcgttggaacccgaccaccgcgttgagtccgaaggtggtcttattgaaacatggaactctcaacaccctgagctgcaatgcgccggtgtcactgtttccaaacgcaccctcaaccgcaacggcctccacttgccatcttactcaccttatccccaaatgatcattgtcgttcaagggaagggagcaattggatttgcat

SEQ ID NO: 230432 - DNA, 342 bp, Glycine max
acggcttacccgccggtcttctccccgccaccaccgtcttgggctacgccgtgaaccgtacctccggtgactttaccgtcaagctcggcggcgcgtgcaagatcacgctcccgccggacaactacgtcgccacctattccgacaccatcacagggaagatcgtgaaggggaaaatcgctgaactcgaggggattagggttcgcgcgttcttcaagtggtggtccatcaccggaatccgctcctccggcgatgatatcgtcttcgaggtcggtatggtcacggcgaagtatccatcgaagaatttcgacgatagccccgcgtgcgagggccagcactcttctt

SEQ ID NO: 230433 - DNA, 339 bp, Glycine max
ggtccttaaacactcatcagtcatcaccatggccaagctagttttttccctttgttttctgcttttcagtggctgctgcttcgctttcagttccagagagcagcctcagcaaaacgagtgccagatccaaaaactcaatgccctcaaaccggataaccgtatagagtcagaaggagggctcattgagacatggaaccctaacaacaagccattccagtgtgccggtgttgccctctctcgctgcaccctcaaccgcaacgcccttcgtagaccttcctacaccaacggtccccaggaaatctacatccaacaaggtaagggtatttttggcatgatata

SEQ ID NO: 230434 - DNA, 400 bp, Glycine max
aaaacaaaaagtttacgttacaaatcgcataataaccgtcctaagtttattgagagaattttgcaagtgtgagaaacatggcatctcgtcaaaacaacaagcaagagcttgatgaaagagcaaggcaaggagagactgttgtcccgggtggaactggtggcaagagcctggaggctcagcaacaccttgctgaaggaaggagcaagggagggcaaacaaggaaggaacagctgggtacagaagggtaccaggaaatgggacgcaaaggagggttgagcactgtggacaaatcaggagaagaacgtgctcaagaggaaggcattggcatcgatgagtccaagttcaggactggtaataacaagaaccagaatcagaacgaagaccaggataagtgataatg

SEQ ID NO: 230435 - DNA, 401 bp, Glycine max
agcaaagcaatggctacttcaaagttgaaaacccataatgtggttgtatctctctccctaaccttaaccttggtactggtgctactgaccagcatggcagactcagcggaaactgtttctttcagctggaacaagttcgtgcctaagcaaccaatcatgatcctccacggagacgctattgtgacctccacgggaaagttacaactcactaaggttgacgaaaactgcaccccaaaaccctcgtctcttggtcgcgccctctactccacccccatccacatttgggacaattaaaccggtagcgttgccagcttcgccgcttccttcaacttcaccttctatgcccctgacacaaaaaggcttgcagatgggcttgccttctttctcgcatcaattgacac

SEQ ID NO: 230436 - DNA, 403 bp, Glycine max
ctcgagccgctcttttcgtttctgccacccccttcttcaccgcctcacccaagcgcggctttcgtggtgggattgtggccatggccgccgctggctcgctccgcaaatcagaggaagagtggcgcgcagttctctcccctgaacagtttcgtattctcaggcaaaagggcaccgagttccctggaacaggagagtatgacaagttctttgatgagggagtttacaactgtgctggttgtgggacacctctctacaggtccttaacaaaattcaattctggttgtggctggccagccttctatgaggggattcctggagccataaatcgcaatccggaccctgatgggatgaggacagaaataacgtgtgctgcttgtgggggacatctaggtcacgtctttaa

SEQ ID NO: 230437 - DNA, 345 bp, Glycine max
tgcccatctttcccctaatgctggtggtgggttcagttttttggtgaggaaggataataaagaaggaagctttttttgtgtgagagaaggaagaggagaaaagaaggcatggggagagggaagattgagattaagaagattgagaatttgaacagcagacaagttaccttctccaagaggagaaatgggttgttgaagaaggccaaagagttgtctgttctctgtgatgcagaggttgctgtcatcatattctccagcactggcaagctttatgagttctcaaacacaagcatggagcataccctttcgaggtacagtaaaggcgcagaatcagattctgcagag

SEQ ID NO: 230438 - DNA, 326 bp, Glycine max
agtactctctataatgagtcacgaaacttttgcgggaataaaaggagaaattccaatgaaaaaaaaaaaaaaaaaaaaaaaaaaaaaaaaaaaaaaaaaaaaaaaaaaaaaaaaaaaaaaaaaaaaaaaaaaaaaaaaaaaaaaaaaaaaaaaaaaaaaaaaaaaaaaaaaaaaaaagggggggcccccaaaaaggaaccccgtcaaccgggaaataaattcgggacgggaaccggaaggggaaaaagtttcccaaaaagggagccaaaaaaaacctgggggaaacaagggcaaaaagggttcccgggggaaaatggtaaccggcc

SEQ ID NO: 230439 - DNA, 344 bp, Glycine max
aaataattgatctttgaaaatgcagggaggaaagaaagctggagagtccatcaaggaaacagctgcaaacattggtgcttctgccaaggctggcatggagaaaaccaaggccactgtccaggagaaggcagaaagaatgacggcacgtgatccgatgcaaaaggagttggcaacccagaagaaagaggcaaagatgagccaggcagagctggacaagcaggcggcgcgtcagcataacacggcggcgaagcaggctgccacggcagggcacatgggacaacccatggggacccatcagacgtcagctatgcccggtcatggaaccggacagcccacgggccatg

SEQ ID NO: 230440 - DNA, 341 bp, Glycine max
caggaccaaaccttgtgggagttaaggaatgatggaagaaaagaaataaaaaaaagtaaataaaaatgcagtagaagagtcctgattccaaacgaaaaaattcaaacttgattgaaaaggatctttctgattattgaagaatgggacaaaaggattgatcgcgaaaaagatttcttgttcttattagaagatcgtgattggatccacatatgtttggtaaaaagaaagaaaaatattcttctttgagaataataaaaaaggaaagtgttcaattggaacatgaaaacgtgacagaattggtcctagttactcttcggaacggaatagaagaaggggagaga

SEQ ID NO: 230441 - DNA, 358 bp, Glycine max
aacctcggggaattccaattccacattttcaagaaataaggaggcaaaaatgttcatatatgaattggaattatttgttttcttattaggcctatcctgaagccaaaggaaatgagatcggaattcctcggggaattccaattccacattttcaagaaataaggaggcaaaaatgttcatatatgaattggaattatttgttttcttattaggcctatcctgaagccaaaggaaatgagatcggaattcctcggggaattccaattccacattttcaagaaataaggaggcaaaaatgttcatatatgaattggaattatttgttttcttattaggcctatcctgaagccaaaggaaa

SEQ ID NO: 230442 - DNA, 345 bp, Glycine max
gttaaataggtggatggggaaactgactttcccccagggcacttcccgaagtgttaaaagaatgcctctttcaatagggggaggagctggtgcaaagaatgctattctcataaatatgccaaatgctgttctttcaatgtggagatattttgttggagacctcgtctttgaagtttctaagatgacttctccctacattaaatgtacagtctctttcttcatagcatttggaaatttggctgatgacaccattaattttgaggcttttccccacaagctggtgcagtttggagagattcaggaaaaagttgtattgaaattttcacaagaggaatttcttacagc

SEQ ID NO: 230443 - DNA, 346 bp, Glycine max
ccccaactaacaataattccttcacttgcagaacttagttctctgttgcatcatcatcatcttcattagtgttagccctaaacttcaccttcaaccatgaccacagtgccaccacacagtgtccaagtgcacacaacaacacaccgctacgaagccggcgtcgtcccgccggctcgttttgaggcgccgcgttacgaagccggcatcaaggcgccctcttccatttaccattccgagagaggtccgacgacctctcaggttctcgcagttgtcgccggccttccggtcggcggcatcctcctgctcctggcaagactgaccctggctggaactctcaccgggctgg

SEQ ID NO: 230444 - DNA, 344 bp, Glycine max
cagcgttatcagccccaagtggcaagaacaacaagatgaagatgaagatgaagacgaagatgatgaagatgaacaaattccctctcaccctcctcgccgaccaagccatggaaagcgtgaacaagacgaggacgaggacgaagatgaagataaacctcgtcctagtcgaccaagccaaggaaagcgtgaacaagaccaggaccaggacgaggacgaagatgaagatgaagatcaacctcgcaagagccgcgaatggagatcgaaaaagacacaacccagaagacctagacaagaagaaccacgtgaaagaggatgcgagacaagaaacggggttgaggaaaata

SEQ ID NO: 230445 - DNA, 343 bp, Glycine max
ccgagaacaaaaaaaaaaaaaaaaaaaatccgcgattcgctcttctcttggaaaagtgaaaaccagaagtacgaacgaaagagaagagcgatttagaagtgagagaagatggggttgtcgttcacgaagctgttcagcaggttgtttgcgaagaaggaaatgaggattctgatggtaggtctcgatgctgctggtaagacaaccatcttgtacaagctcaagcttggagaaatcgtcaccactatccccaccatcggatttaatgttgagactgtggagtacaagaacatcagcttcactgtgtgggatgttggtggtcaggacaagatccgtccactgtgga

SEQ ID NO: 230446 - DNA, 340 bp, Glycine max
gaagaagatgggtttgaagaacaacatggtggtgctaaaggtgtgtttggtgctacttttccttgtggggggtactactagtgccagcttgaggctgagtgagcttggcctgctcatgaaaagtgatcatcatcaacactcaaatgatgatgactcttcaaaaccatgctgtgatcaatgcgcatgcacaaagtcaaaccctcctcaatgccgctgttcagatatgaggctgaattcgtgccattcagcttgcaaatcttgtatttgcgcattatcgtatcctgcacagtgtttttgtgttgacataacggatttctgctatgaaccttgcaagcccagt

SEQ ID NO: 230447 - DNA, 318 bp, Glycine max
ctttaggtttggaattgggaattagggttgttcgcgtcacgaagatgatcgaggtggtgttgaacgatcgattggggaagaaggtgcgcgtgaagtgcaacgacgatgacaccatcggcgacctgaagaagctggtggcggctcagacgggcacaagagccgacaagatccgcatccagaagtggtacaccatatacaaggatcacatcactctcaaggattacgagatccacgacggcatgggtctcgaactctactacaactaaacacaaggtggtgtttatgcatgatatattactatgatctgggaatgggatg

SEQ ID NO: 230448 - DNA, 62 bp, Glycine max
aaaataaaaaaaaaaaaaaaaaaaaaaaaaaaaaaaaaaaaaaaaaaaaaaaaaaaaaaaaa

SEQ ID NO: 230449 - DNA, 403 bp, Glycine max
ttctctccattggtccttaaacactcatcagtcatcaccatggccaagctagttttttccctttgttttctgcttttcagtggctgctgcttcgctttcagttccagagagcagcctcagcaaaacgagtgccagatccaaaaactcaatgccctcaaaccggataaccgtatagagtcagaaggagggctcattgagacatggaaccctaacaacaagccattccagtgtgccggtgttgccctctctcgctgcaccctcaaccgcaacgcccttcgtagaccttcctacaccaacggtccccaggaaatctacatccaacaaggtaagggtatttttggcatgatatacccgggttgtcctagcacatttgaagagcctcaacaacctcaacaaagaggac

SEQ ID NO: 230450 - DNA, 401 bp, Glycine max
actttattgaagtcttgaagaagaaacatgcatctggaggttacaagaagatggtcatatacgtggaagcttgtgaaagtgggagcatgtttgagggtataatgcctaaggatctgcagatttatgtcacaactgcatccaatgcacaagagaatagttggggaacttattgtcctggaatggatccttctccacctccagagtacatcacttgcctaggggatttgtacagtgttgcttggatggaagatagtgagactcataatctaaaaagggagtccgtgaaacaacaatacaaatcggtaaagcaacggacttcaaatttcaacaactatgcgatgggttctcatgtgatgcaatacggtgacacaaacatcacagctgaaaagctttatttatac

SEQ ID NO: 230451 - DNA, 342 bp, Glycine max
tgaccaagttcacaatcctcctcatctctcttctcttctgcatcgcccacacttgcagcgcctccaaatggcagcaccagcaagatagctgccgcaagcagctccagggggtgaacctcacgccctgcgagaagcacatcatggagaagatccaaggccgcggcgatgacgatgatgatgatgacgacgacaatcacattctcaggaccatgcggggaagaatcaactacataaggaggaacgaaggaaaagacgaagacgaagaagaagaaggacacatgcagaagtgctgcacagaaatgagcgaactgagaagccccaaatgccagtgcaaagcgctgc

SEQ ID NO: 230452 - DNA, 339 bp, Glycine max
gatgagagtgcggtttcctttgttggtgttgctgggaactgttttcctggcatcagtttgtgtctcattaaaggtgagagaggatgagaataaccctttctacttgagaagctctaacagcttccaaactctctttgagaaccaaaacggtcgcattcgtctcctccagagattcaacaaacgctccccacaacttgagaaccttcgagactaccggattgtccagtttcagtcaaaacccaacacaatccttctcccccaccatgctgacgccgatttcctcctctttgtccttagcgggagagccatacttaccttggtgaacaacgacgacagaga

SEQ ID NO: 230453 - DNA, 342 bp, Glycine max
gggattttggatgctctcgtacgatgcctcatctgtatcatgatgcacctgtccatggaggacaacataagaaactatgttcacatataacgtcgagactttagaacagacgctgggaataccatgagcatcgctctaaagattcaatcactagtcactccgttgacactctagacgaatacagcatagattgccgacattcacactacaattgccatggcactttcacaaacatcacactatcagtaactcatctcttctatatgtaatgagcacagagatggcctgtgtgaaagcttggcgaatccaacatgaaaactctccagtactgcgaaaccaact

SEQ ID NO: 230454 - DNA, 345 bp, Glycine max
  unsure (1)..(345): unsure at all n locations
cctaagtgagaaacaaagaaaggaaataattgatctttgaaaatgcagggaggaaagaaagctggagagtccatcaaggaaacagctgcaaacattggtgcttctgccaaggctggcatggagaaaaccaaggccactgtccaggagaaggcagaaagaatgacggcacgtgatccgatgcaaaaggagttggcaacccagaagaaagaggcaaagatgagccaggcagagctggacaagcaggcggcgcgtcagcataacacggcggcgaancaggctgccacggcagggcacatgggacaaaccatggggaaccatcagacgtcagctatgcccggtcatgga

SEQ ID NO: 230455 - DNA, 412 bp, Glycine max
aggtccactctaaaggatccactcggggaattccaattccacattttcaagaaataaggaggcaaaaatgttcatatatgaattggaattatttgttttcttattaggcctatcctgaagccaaaggaaatgagatcggaattcctcggggaattccaattccacattttcaagaaataaggaggcaaaaatgttcatatatgaattggaattatttgttttcttattaggcctatcctgaagccaaaggaaatgagatcggaattcctcggggaattccaattccacattttcaagaaataaggaggcaaaaatgttcatatatgaattggaattatttgttttcttattaggcctatcctgaagccaaaggaaatgagatcggaattcctcgggggtaccgagctcgaat

SEQ ID NO: 230456 - DNA, 399 bp, Glycine max
aattaagaaattttcatggtaaccattcgtgcagatgaaattagtaaaattatccgtgaacgcattgagcaatataatacggaagtaaaaattgtaaatacgggtaccgtacttcaagtaggcgacggtattgctcgtatttatggtcttgatgaagtaatggcgggtgaattagtggaatttgaagagggtactataggcattgctttgaatttggaatccaaaaatgttggtgttgtattaatgggtgatggtttgatgatacaagagggaagttcagtaaaagcaacaggaagaattgctcagatacctgtaagtgaggcttatttgggtcgtgttataaatgccctggctaaaccaattgatggtcgaggagaaatttcagcttcggaatctcga

SEQ ID NO: 230457 - DNA, 255 bp, Glycine max
cttcctggttccacctcaggagtctcagaggagagctgtggcttagagagccctttttgcatgtgctaccacacttttgtccttttgggctctagctagtgctggtagcagtaaataagaatgaataaaagaaacaaaggcttagatgccctttgttaagtgtagaataacgggtatagtaactatgtacccttgtgtaatgagtcactcaagtacctatgcgggaaaagcataaataaaagaagaaattccaat

SEQ ID NO: 230458 - DNA, 405 bp, Glycine max
gttctgagtctcaaagagaaccacgaagacataagaataagaacccttttcacttcaactctaaaaggttccaaactctcttcaaaaaccaatatggccacgttcgcgtcctccagaggttcaacaaacgctcccaacagcttcagaatctccgagactaccgcattttggagttcaactccaaacccaacacccttcttctcccccaccatgctgacgctgattacctcatcgttatccttaacgggactgccattcttaccttggtgaacaacgacgaccgagactcttacaaccttcaatctggcgatgccctaagagtccctgcaggaaccacatactatgtggttaaccctgacaacgacgagaatctcagaatgataacactcgccaatacccgttaac

SEQ ID NO: 230459 - DNA, 397 bp, Glycine max
atcccctcggggaattccaattccacattttcaagaaataaggaggcaaaaatgttcatatatgaattggaattatttgttttcttattaggcctatcctgaagccaaaggaaatgagatcggaattcctcggggaattccaattccacattttcaagaaataaggaggcaaaaatgttcatatatgaattggaattatttgttttcttattaggcctatcctgaagccaaaggaaatgagatcggaattcctcggggaattccaattccacattttcaagaaataaggaggcaaaaatgttcatatatgaattggaattatttgttttcttagtaggcctatcctgaagccaaaggaaatgagatcggaattcctcgggggtaccgagctcgaatt

SEQ ID NO: 230460 - DNA, 287 bp, Glycine max
tcggctcaagtcaaatatctacattttcacaccatgatggttggggagacgcaccgcccagatctagccgtacacgtgccaccgtgggcgccggcgatcttctcaccgtacaccggtagtgccgcttaggcgccgtactccacgcaagatgcacttagtgcacgttcggcactacgactccatcgatgctgagtcagactcggatcgttccgtcgcgggacccggaagtcccggtggtcgcatacgcctgccaccatttccgcatgttccagttctacgttcggtga

SEQ ID NO: 230461 - DNA, 323 bp, Glycine max
agtgtttttaacaaacagcaacagtacagagcattttgatgcatgtaagtggacaaaatcggaaccacattcctgggaattgatcttcccaatagaggtatgcggtcctaataatggttttgaaatgtggagttctgagtgggcaaatcaaacttcatggcatttgagtttccttattgacaatcccaaacagtctacagtttttgacattctcttgggaatttctcaagattttgaaattgctggtaatactcttatgccagcttttttctgttccacaagctactgccagatcttctgaaaatgcggaatcctctgcatga

SEQ ID NO: 230462 - DNA, 330 bp, Glycine max
  unsure (1)..(330): unsure at all n locations
gataaacaagttctgtttagtanagagggaagggcagcagcaagggagcagaggctgcaagagagcgtgattgtggaaatctcgaaggaacagattcgggcactgagcaaacgtgccaaatctagttcaaggaaaaccatttcttctgaagataaaccttttaacttgagaagccgcgaccccatctactccaacaagcttggcaagttctttgagatcaccccagagaaaaacccccagcttcgggacttggatatcttcctcagtattgtggatatgaacgagggagctcttcttctaccacacttcaattcaaaggcgatagtgata

SEQ ID NO: 230463 - DNA, 119 bp, Glycine max
  unsure (1)..(119): unsure at all n locations
ccaaaaccctcgtctccttggtcgcgccctctactccacccccatccacatttgggacanagaaaccggtancgttgccagcttcgccgcttccttcaacttcaccttctatgcccctg

SEQ ID NO: 230464 - DNA, 313 bp, Glycine max
ctaaataagaaatgaagagtactatcttctttgctctctttctagtttgtgccttcaccatctcatacctgccttcagccaccgctcagttcgtgctcgacactgatgatgatcctcttcaaaacggtggcacatactatatgttgccagttatgagaggaaagggcggtggaatagaagtagattcaactggaaaagaaatatgccctctcactgttgtgcaatcacccaatgagctcgataaggggattggactagtctttacatctccattacatgccctttttatcgccgaaggctatcctttgagcat

SEQ ID NO: 230465 - DNA, 379 bp, Glycine max
  unsure (1)..(379): unsure at all n locations
gtcacctttccgttcatttcctctgttttttcttcaaatccattgtttcgtggaaatcccgaaatttaaccatgcttctccgaaccgccgcctccgccgcttctgcttcgtcnctctccctcttcagccctacctccgaacctctccgttcggttcccgctcgtggattggtggttcgcgccgcgaaaggatccacgaaccaccgcgccctaaccggcgtgatctttgaaccgttcgaagaggtgaagaaggagctcgatctcgttcccaccgttccacaagcttctctcgcccgccaaaaatacgttgacgaatccgaagccgccgttaacgaacaaatcaatgtggagtataacgtttcctacgtttaacatgctat

SEQ ID NO: 230466 - DNA, 383 bp, Glycine max
attttccttttggatttgataatattaagaggaaccaggatagataggtaggttctagcctttctgttatcattttcgaaacaaaccaaattgaaactgtttgagttttgtttagaaggctgttatgaatgaaactttgaagcttagaaaagcggttaggtagctaggtttcagtttcagatctggtagagagcttcatcatgaagccattaccggcggagcaaaccggtgaatcagcgccgacggagttgcagagatccattccgacgccttttctgaccaagacgtaccagctcgtcgatgatccctccgcggatgacctaatttcctggaacgaagatggcaccagcttcatcgtttggcgacccgcggaattcgctaag

SEQ ID NO: 230467 - DNA, 365 bp, Glycine max
gcaaagtataattgcaaaaagatggttttctcatcatctgcaaccgtttatggccaacctgaaaagataccgtgtgaggaggatttcaagttacaagctatgaatccctatggacggaccaagcttttcctggaagaaattgcccgagatattcagaaagctgaaccagaatggaagatcatattactgagatacttcaatccagttggggctcatgaaagtggcaaactcggtgaagatcccaagggcatcccaaataagctcatgccttacattcagcacgtagctgttgggagattgactgaactcaatgtataccgtcatgactatccaacgacggatggctctgcgatccgggactatat

SEQ ID NO: 230468 - DNA, 215 bp, Glycine max
ccaactaccgtaatatcggcacgttgctgcagttttgccacaggcacggcgcgcattgcgagcatcgcaatctgctagttgcaaatcagcagtggagtgggaccaaaggactcaatcaatattatgcattgtctgtttggaagctcgcatgtgagcccactcgtgttgacgttgcggcataccctgtatttgtctgccattctcactatctaaac

SEQ ID NO: 230469 - DNA, 420 bp, Glycine max
ggcagcatattgagtggcttcaccctggaattcttggaacatgcattcagcgtggacaagcagatagcgaaaaacctacaaggagagaacgaaggggaagacaagggagccattgtgacagtgaaaggaggtctgagcgtgataaaaccacccacggacgagcagcaacaaagaccccaggaggaggaagaagaagaagaggatgagaagccacagtgcaagggtaaagacaaacactgccaacgcccccgaggaagccaaagcaaaagcagaagagatggcattgacgagaccatatgcaccatgagacttcgccacaacattggccagacttcatcacctgacatctacaaccctcaagccggtagcgtcacaaccgccatcagccttgacttcacagccctctcgtggctcagactc

SEQ ID NO: 230470 - DNA, 312 bp, Glycine max
  unsure (1)..(312): unsure at all n locations
ctttgaacaagatctcacaattcattcaccttttaattcatctcattcacacatcacaatgctcttcctttcttccttaataataataccataataatctgttacgttacggggcccaaatgtctgttacggagctcaaggagcgtcactctgctgccaacgacaccgtcaacaatctcagacaccgtttaaagcagaagcgcctttcgttgctcgacacagatatttctgggtatgcaaggtctcacggtanaacgcctgtgacctttggacctacggatctggtttgctgtataacctttcaaggtcaca

SEQ ID NO: 230471 - DNA, 322 bp, Glycine max
ggggaattccaattccacattttcaaaaattactgatgcataaatgtttcagatatgaattggaattatttgttttcttattaggctcatcctgaagccaaaggaaatgagatcggaattcctcggggaattcaaattccacattttcaagaaataaggaggcaaaattgttcatatatgaattggaattatctgttttcttattaggcctatcctgaacccaaaggaaatgagatcggaattcctcggggaattccaattcaacattttcaagaaataaggaggcaaaaatgttcatatatgaattggaattatttgtttt

SEQ ID NO: 230472 - DNA, 140 bp, Glycine max
tactcttatgccagctttttctgttccacaagctactgccagatcttctgaaaatgcggaatcctctgcatgatctggaattcgtgttttctttcgcttgttcgtttgtttaattcaataaaggtcagcatgaatgaatc

SEQ ID NO: 230473 - DNA, 447 bp, Glycine max
acgcctacgtaaactcggaaatgattctgaactccaacattggtggaaagaagctgtagagaaaggccatggtgatttgaaagacaagccatggtggcctaagttgcagacacttgaagaccttgttgaagtttgcctcattatcatatggattgcttcagctctccatgcagccgttaattttggtcagtatccttatggaggtttgataatgaaccgcccaactgcttctagaacgttgcttcctgagaaaggcaccccagaatatgaagaaatgattaataaccatgaaaaggcttatttgagaacaattacatcaaagttgccgactctcattagcctttcagtgatagagatcttgtcgacacatgcttctgatgaggtctacctttggcagaaggacaacccacatttggcctctgattcaaaagcattacaagcctttca

SEQ ID NO: 230474 - DNA, 395 bp, Glycine max
  unsure (1)..(395): unsure at all n locations
cttcgtcactgcctcccctgttccagcattcgggctttccgctggagtcggagttggcaacgctttggtgttggagatcgtgatgaccttcggtttggtgtacacagtctacgccactgccgttgaccccaagaagggcaatttgggaattattgctcccatcgccattggtttcattgttggcgctaacattttgttgggtggggccttctccggagcagccatgaaccctgctgtgacatttgggcctgctgtcgtgagctggacctggaccaaccactggatctactgngccggccctctcatcggaagtggaattgctgggcttatctaccaggttgtcntcatcagccacacccacgagcagctttccagcactgactactagaggggga

SEQ ID NO: 230475 - DNA, 68 bp, Glycine max
aaaaaaaaaaaaaaaaaaaaaaaaaaaaaaaaaaaaaaaaaaaaaaaaaaaaaaaaaaaaaaaaaaac

SEQ ID NO: 230476 - DNA, 384 bp, Glycine max
cacgcgtacgtaaactcggatctgcctcgaccccgcttactgccacgatgcacacgagtcattcggctaccagtatctgtgcaccacattcaatcgccgtaatacttgtgtaacagcacgtcaagggataacgcatgagtggaaatgtcaatcaacagccagcgtatggccaccaattgttgtaccgccccgttgctaacgtttttcaacacgctcagcgccccttacaagtattccagcgttctacgctcaacttagatgtgccgaatcacgacacgacgaaacggacagcaagcatattcccctatacgctgccacattcgctcacctgttccgattcagctgcatcaccgagaactgtccccctttctcgcttcaggaagc

SEQ ID NO: 230477 - DNA, 357 bp, Glycine max
tccgtaaactcggaaatcggctcgagctttctccgagaacaaaaaaaaaaacgtgattcgctcttctcttcgaataaaccacaaaaccaacaaacgagaagaggagtgagagaagatggggttgtcgttcacgaagctgttcagcaggttgtttgcgaagaaggaaatgaggattctgatggtaggtctcgatgctgctggtaagacaaccatcttgtacaagctcaagcttggagaaatcgtcaccaccatccccaccatcggatttaatgttgagactgtggagtacaagaacatcagcttcactgtgtgggatgttggtggtcaggacaagatccgtcctctgtggaggcatta

SEQ ID NO: 230478 - DNA, 352 bp, Glycine max
  unsure (1)..(352): unsure at all n locations
gtaaaatcggaaatcggctcgagtcttcttctcttacagctanggttttagcgcagcttcttctatatttaaggaagatgggtaaggaaaaggttcacatcagtattgtggtcattggccatgtcgactctgggaaatccactaccactggtcacctgatttacaagcttggaggcattgacaagcgtgttattgagaggtttgagaatgaagctgctgagatgaacaagaggtctttcaagtatgcctgggtgctggacaaacttaaggctgagcgtgaaataggaatcaccattgatattgctttgtggaagtttgaaacaacacagtattattgcacagttattgatgc

SEQ ID NO: 230479 - DNA, 326 bp, Glycine max
cgttaaaccatggaaccgccatcgcagcaacagcctccgcaaccgccatcgcgcactgccaccatcctcggaaagtaccagctgacgcgcttcctcggccgtggcagcttcgccaaggtctaccaggggcgatccctcgtcgacggtgccgccgtggccgtgaaaatcatcgacaaatcgaaaaccgttgacgccggcatggagccacgcataatccgcgagatcgacgccatgcgccgcctccaccaccaccctaacatcctcaaaatccacgaggtgctcgccaccaaaaccaagatccacctcgtcgtggagctcgccgccgg

SEQ ID NO: 230480 - DNA, 425 bp, Glycine max
ttgcatgcgtccaggtcgactctaaaggatcccctcggggaattccaattccacattttcaagaaataatgaggcaaaaatgttcatatatgaattggaattatttgttttcttattaggcctatcctgaagccaaaggaaatgagatcggaattcctcggggaattccaattccacattttcaagaaataacgaggcaaaaatgttcatatatgaattggaattagttgttttcttattaggcctatcctgaagccaaaggaaatgagatcggaattcctcggggaagtccaattccacattttcaagagataaggaggcacaaatgttcatatatgaattggaattatttgttttcttattaggcctatcctgaagccaaaggaaatgagattggaattcctcgggggtaacgacctcgaatt

SEQ ID NO: 230481 - DNA, 389 bp, Glycine max
  unsure (1)..(389): unsure at all n locations
tgatctctcctttattgaagaaattagttatggaatctggttttgggaagctccctatttttgaagttgaagctacaattgatattgccttggactgcatggcatctttattgaagaaagttgaggctaatcaagcttcattctgctcagctagttgggtgactatgatattcccttttctggtgtctgatgtacatcattaagtgttcctcaggatcttgtcatgtcttataattgaagatacctcacaggctcatcctgaagaattaggcatgttggttgaagttttgaaaagtggaatggttaccagtgcttcaggatcccaatatcgactttcncttgatgcanaatgtgattatgggaatattggtggatcctgggagttaata

SEQ ID NO: 230482 - DNA, 210 bp, Glycine max
tgatctctcctttattgaagaaattagttatggaatctggatttgggaagctccctatttttgaagttgaagctacaattgatattgccttggactgcatggcatctttattgaagaaagttgaggctaatcaagcttcattctgctcagctagttgggtgactatcatattcccttttctggtgtccgatgtacatcagtaagtgttcc

SEQ ID NO: 230483 - DNA, 337 bp, Glycine max
ctccaaggaaaaaacaaagaaaaggagataattgatctttgaaaatgcagggaggaaagaaagctggacagtccatcaaggaaacagctgcaaacattggtgcttctgccaaagctggcatggataaaaccaacgccactgtccacgataacgcagaaagaatgacggcacgtgatccgatgcaaaaggagttggcaacccagaagaaagaggcaaagatgagccaggcagagctggacaagcatgcggcgcgtcagcataacacggcggcgaagcaggctgccacggcagggcacatgggacaacccatggggacccatcagacgtcagctatgcc

SEQ ID NO: 230484 - DNA, 317 bp, Glycine max
ggaattttagtggacaaaactggagattggatcacacttatacaaaattctccaattagtaacttgttgagagttgctgcttggaataaaggctgtttaatggttaagattgtgatgtctgggaatgcagcagtcaaaaggagtgattgggcctcattggtacaagtgtttttaacaaacagcaacagtacagagcattttgatgcatgtaagtggacaaaattcgaaccacattcctgggaattgatcttcccaatagaggtatgtggtcccaataatggttttgaaatgtggatttctgagtgggcaaatcaaac

SEQ ID NO: 230485 - DNA, 372 bp, Glycine max
gttttgtgtttgttgatgtcacagattgaagcaccgtggtcctgactggagtgggctccaccaatatggtgataactatttggctcatcaacggttagccatagttgatccagcttctggtgatcaacccctcttcaatgaagacaaaactgttgttgttacggtgaatggagagatctacaatcatgaagaactcaggaaacaattgcctaatcacaccttccgtacaggaagtgattgtgatgttattgctcacctgtatgaggagcacggagaaaactttatggacatgcttgatggtaaattttcatttgttctgctggatactcgtgacaacagttttatagtggcacgggatgcaattggggtcac

SEQ ID NO: 230486 - DNA, 393 bp, Glycine max
  unsure (1)..(393): unsure at all n locations
caattttcttgccaccggaaagctcgtcagtcttagtgaacaacagctccttgactgtgacaacaagtgtgacataacagaaaagacttcatgtgacaatgggtgtaatggaggtcttatgacaaatgcctacaattatttgctcgagtctggtgggttggaggaggagtcttcatatccctacactggggagagaggtgaatgcaagtttgatccagagaaaatagcagttaagatcacaaatttcaccaatatccctgctgatgagaaccaaattgccgcatatttagtaaaaaatggtccacttgctatgggcgtgaatgcaattttcatgcaaacatacattggtggtgtctcatgcnctctcatatgtagcaagaaaaggctgaacca

SEQ ID NO: 230487 - DNA, 230 bp, Glycine max
gtaatactcttatgccagctttttctgttccacaggctactgccagatcttctgaaaatgcggaatcctctgcatgatctggaatttgtgttttctttcatttgtccgtttgtttaattcaataaaggaaattaggcatgaccctcttgttgagtatgctctgcctatttgaaaatttccacacctcttttaattgtcgtaatgatgtgtgaagtgtgtgttattttaaa

SEQ ID NO: 230488 - DNA, 322 bp, Glycine max
cggggaattccaattccacattttcaagaaataaggaggcaaaaatgttcatatatgaattggaattatttgttttcttattaggcctatcctgaagccaaaggaaatgagatcggaattcctcggggaattccaattccacattttcaagaaataaggaggcaaaaatgttcatatatgaattggaattatttgttttcttattaggcctatcctgaagccaaaggaaatgagatcggaattcctcggggaattccaattccacattttcaagaaataaggaggcaaaaatgttcatatatgaattggaattatttgtttt

SEQ ID NO: 230489 - DNA, 386 bp, Glycine max
gtctgaacataactgaagaacgagtaaagaatttgcagaaagaccacctccatggtaataagtcttctatggtagtttcagtccttgttgatcccaaagaggctggcgatggtgatgttgatgttgacggcatgatgagaccaaagtcactctctcggatttttgtggttgtgctaattgatagtgtcaagtatgtcacttactcttgtggtctgcctcgtgcttctccccatttggtgactggttacgtatgacaatccttcggaaaaaagttttgatgcagccgaagcatctaacctgagttctagtttctgtaacaaaggatgtgggggactgggaaggaaagaaactcatctccagttttgtacatattaacatatttaaag

SEQ ID NO: 230490 - DNA, 416 bp, Glycine max
  unsure (1)..(416): unsure at all n locations
attaagccatgcatgtgtaagtatgaactaattcagactgtgaaactgcgaatggctcattaaatcagttatagtttgtttgatggtatcttctactcggataaccgtagtaattctagagctaatacgtgcaacaaaccccgacttctggaagggatgcatttattagataaaaggtcaacacaggctctgcctgttgctttgatgattcatgataactcgtcggatcgcacggcctttgtgccggcgacgcatcattcaaatttctgccctatcaactttcgatggtaggatagtggcctaccatggtggtgacgggtgacggagaattagggttcgattccggananggagcctgagaaacggctaccacatccaaaggaanggaacangcccncaaattanccaatcctgaa

SEQ ID NO: 230491 - DNA, 513 bp, Glycine max
  unsure (1)..(513): unsure at all n locations
gggntngngctagtttgatcccgtggactatanaagatcatggnctcgggcccacgcgtangtaaaatcggaattcggctcgagctcaaagattaagccatgcatgtgtaagtatgaactaattcagactgtgaaactgcgaatggctcattanatcagttatagtttgtttgatggtatcttctactcggataaccgtagtaattctgagagctaatacgtgcaanataccccgacttctggaagggatgcatttantanataaaaggtcnacacangctctgcctgttgctttgatgattcatgataactcgtcggatcgcacggcctttgtgccggcgacgcatcattcaaatttctgccctatcaactttctatggtatgataattggccnaccttggtngngacnggttganggcganntacgggttcnattccggganaggggttcctgannatcnggggttannananccaaggaanggcatcanggntcgccanntttanctnnt

SEQ ID NO: 230492 - DNA, 378 bp, Glycine max
  unsure (1)..(378): unsure at all n locations
aaagaaattaagagagttttttttgttcctcactgaccaagccatggcgatgagaaccaaactttctttagctatctttttcttttttcttttagccttattttcaaacctagcctttggcaaatgtaaagaaaccgaggtagaagaagaagaccctgagctcgtaacatgcaaacaccaatgccaacagccacagcaatacactgagggtgacaagcgggtatgcttgcanagatgtgacaggtatcatcgtatgaagcaagagcgagagaaacanatccaagaggaaactcgtgagaagaaagaggaggaaagccgtgaaagggaagaagaacaacaagagcagcatgaggaacangatgaaaatccctacatttt

SEQ ID NO: 230493 - DNA, 372 bp, Glycine max
acgtcacgcgcacgcgtacgttagatccgaaatccggtccagccaaaatgccaagtcctaacaaccgggaaactaatcctgatcttcaagtttaaactaaacaaaggaaaatcaagcctcaacaattctgttgcgatgggtggaccatccttttctcccaccaggtgatttcaccccgggtttgtaccactgagcttggtaagatgggctcagtatgctaaggagttttatcaacgaggagtgaagctcttaggtttatcttgtgatgatgtgcaatcccacaatgagtggatcaaagacattgaagcctacactccaggtgcgaaagtgaattatccaataattgctgatccgaagagagaaatcatcaag

SEQ ID NO: 230494 - DNA, 221 bp, Glycine max
gcttcaaaaaaaaaaaaaaaataaaaaaaaataaaataaaaaaaaaaaaaaaaaaaaataaaaaaaaaaaaattaaaaaaaaaattaaaaaaaaaaaaaaaaaaataaaaaaaaaagggggggctcccaataattaacttctttaacccggaatttatttctgaactgttacttaaatgtttacaatttttccctatattaattcatattaaatcttggtt

SEQ ID NO: 230495 - DNA, 363 bp, Glycine max
  unsure (1)..(363): unsure at all n locations
tttctttctctttccttttcttcttatccgactccgtcaccattcgccaacaccacactaaccctacaaaacctataaaccttctggttctacacgttcaaaatgatgcttccacagggctccattgggccaacctccataaaaggacccctctaatgcaagtaccagtcctggtggacctcaatggaaaccacttgtgggttaactgtgagcagcactactcatccaacacataccaagcatccttctgccactccacccaatgctccagagccaacactcaccaatgcctcagttgcccatcggcatcaatgccanggtgccacgaatacacgtgtggcctcatgttccacaaccccatca

SEQ ID NO: 230496 - DNA, 414 bp, Glycine max
cacacacacagctagcagatattacatacacgtgaatcactaattaagccatggagaagaaatcaatagctgggttgtgcttcctcttccttgttctctttgttgctcaagaagttgtggtgcaaactgaggcaaagacttgcgagaacctggctgatacatacaggggtccatgcttcaccactggcagctgcgatgatcactgcaagaacaaagagcacttgctcagaggcagatgcagggacgattttcgctgttggtgcaccaaaaactgttaaatggattcattcactccaacgtgaagaagatgcatgcagcgctattttataaaaaataaaactactatatactatatataataagactggcgctgcatcaatgacctatgtattatagtatatattattaccgatg

SEQ ID NO: 230497 - DNA, 271 bp, Glycine max
agcatttggaaatttggctgatgataccatcaattttgaggcttttccccacaagctggtgcagtttggagagattcaggaaaaagttgtattgaaattttcacaagaggaatttcttacagcttggtcaactcaggtgcgtcctgcaacaactctgttggctgatgggtgtccatatttgtatgcaatggtgcatgataattcagtgtctacaataccaggtgattttgtcattggtgtcaagttgacaaccataaacaatatgtgtgca

SEQ ID NO: 230498 - DNA, 277 bp, Glycine max
tcctattataccttaataaataatttaagatactatgatgatgagcacggttcccattactgttgctgggacttgttttcctggcttcagtttctgtctcatttggcattgcttactgggaaaaagagaagcccacacacaacatgtgtctccagacttgcaataacgagagagactcgtacaggaaccaagcatgccacgctcgttgcaacctccttaaggtggataaagaagaatgtgaagaaggtgaaattccacgaccacgaccacgaccaca

SEQ ID NO: 230499 - DNA, 326 bp, Glycine max
tggctttctatccctccactacttttttacccctctctccttccttctcatcccgtttcctcgtatccgactccgtcgccattctccaacaccacactaaccctacaaaacctataaaccttctggttctacccgttcaaaatgatgcttccacagggctccattgggccaacctccaaaaaaggacccctctaatgcaagtaccagtcctggtggacctcaatggaaaccacttgtgggttaactgtgagcaacactactcatccaaaacataccaagcacccttctgccactccacccaatgctccagagccaacactcaccaa

SEQ ID NO: 230500 - DNA, 334 bp, Glycine max
atccgttcaagctacatcccaccttaaacgggctcactagtcatgaagcaattcaatacacgagattgttcctactagatcatcattacccaagcatgctataggtgaggctagtagttgcaacctccataaacgcttatgctatgagaaccatccgtttcctgaaacatgtcggaacgttaatgacacctgccatagacttgactatgccatatcctcatggagatcaatctggtgcgttcagtcacattattctgcctgcagacgaatgtgttgcacgttcaaattcggtgatatcataggcttatgtaggtgtcaatgactcatgctagca

SEQ ID NO: 230501 - DNA, 246 bp, Glycine max
  unsure (1)..(246): unsure at all n locations
gaataatgtctccaatggagtttcatagcattaccaagtttcacaatatcncacttgtgtcntcntctcctgtgattttatgtattgctaccactatactgaataaccctgcaatggccacaaagcaatattattgtgatttccctgccatctttaactttggtgcctcaaacgctgacactggtggcttggctgcttcattttttgttgctgcaccaaaatcaccaaatggagaaacctattttc

SEQ ID NO: 230502 - DNA, 372 bp, Glycine max
ctcagctttaagatcaccccagagaaaaacccccagcttcgggacttggatatcttcctcagtattgtggatatgaacgagggagctcttcttctaccacacttcaattcaaaggcgatagtgatactggtaattaatgaaggagatgcaaacattgaacttgttggcctaaaagaacaacaacaggagcagcaacaggaagagcaacctttggaagtgcggaaatatagagccgaattgtctgaacaagatatatttgtaatcccagcaggttatccagttgtggtcaacgctacctcaaatctgaatttctttgctattggtattaatgccgagaacaaccagaggaacttcctcgcaggttcgcaagac

SEQ ID NO: 230503 - DNA, 405 bp, Glycine max
tcgggattcggctcgaggaacaattggctcgcagagagaacaccaccaccgagaaggagattcacgttgagaaacacagggttcccaagatggccacccacttcgagcaccttgcggagcaagctaaagaatctgacatcaccgctgggaaggatactccgcagggtagcatagaagccttgcaagctggagagagggtcaaagatcatgcaggaaaagccatgggagatattggtggacgtgggaaagccagagagactcacgagctgggtgcacactttgaatccctggctgacaaagtaactgaccatgcagcagccaatgtagttggaaacaaagagagtcaaagagaagctcgtggtggtgttcgtgatgttgggaagttcgaaatgagaactgaaaggg

SEQ ID NO: 230504 - DNA, 199 bp, Glycine max
gttcggctcgtggaacacttggctcgcatttagaacaccatcatcgataaggagattcacgttttgtaaatacatggttcctatgatggtcactcatttcgagcagcttgtggtggttgctatgtattctgtcattaccgctgggaaggttactccgtagggtagcatataatctttgcatgctggatagatggtctta

SEQ ID NO: 230505 - DNA, 354 bp, Glycine max
gttcctcactgaccaagccatggcgatgagaaccaaactttctttagctatctttttcttttttcttttagccttattttcaaacctagcctttggcaaatgtaaagaaaccgaggtagaagaagaagaccctgagctcgtaacatgcaaacaccaatgccaacagccacagcaatacactgagggtgacaagcgggtatgcttgcaaagatgtgacaggtatcatcgtatgaagcaagagcgagagaaacaaatccaagaggaaactcgtgagaagaaagaggaggaaagccgtgaaagggaagaagaacaacaagagcagcatgagggacaagatgaaaatccctacatttt

SEQ ID NO: 230506 - DNA, 359 bp, Glycine max
  unsure (1)..(359): unsure at all n locations
tgaggataatgagaattttgttgatgatgggattcaaattgagcctttcaacctagagaaagaaagggaagaaggttattttgatgctgcaggaaattttgttgaatatataagagagaacgagattaaggagccttacaggatgcatggcttgataatgttgaagttgatccaaaatatgctgcattaagctctgtagcaacagatgacgaagatgaggggcccccagacctttcctctaaagatattggaatcatgaagaggcgcattgcaaatgttcttgaacctgnggaaacagtcttgcaagccttgagaaggttaaaaggtaacagtgacagaaaagcaaaaatgtctgctga

SEQ ID NO: 230507 - DNA, 345 bp, Glycine max
aaaaaaaaaaaaaaaaaaaaaaaaaaaaaaaaaaaaaaaaaaaaaaaaaaaaaaaaaaaaaaaaaaaaaaaaaaaaagttatggtggaggccgaaaattattttacttgaccctggaagttagtccgggatcccgtgccccttggcggtatacatttagggggggggccccccttttttgcctttccccccggggtattctttccggtcccgtttctcgagggtttccccttttccccatcggcgttctatttaaagctggggctttcccgggcacaacgtttttccccttgtaatttttttacccctcaaaatttccctggccctgtcggcccggttccctatt

SEQ ID NO: 230508 - DNA, 311 bp, Glycine max
gagagatgtaaagagaacaacagtgacagcaacaaccgcaaccgcatgaacgtgatgagtattaatgtgttgttatgaacttatgatgttggtttatgtggggaaataaatgatgtatgtacctcttcttgcctatgtagtaggtttgggtgttttgttgtctagctttgcttatttagtaattagtagaagggacgttcgttcgtgtctcataaaaaggggtactaccactctggcaatgtgatttgtatttgatgaattcaatgtgaaatgtgttttgccttggtgtacgtaagaactcgtcaagaaaa

SEQ ID NO: 230509 - DNA, 360 bp, Glycine max
cacaactacaagaaagaacttccttataaccaaaaccaacaacaactatggcaagttatcagaagcactacgatgatcagggtcgcaaggtcgacgagtatggcaatgttgagaggcaaactgacgaatatggcaacccggttcatgccactagtgtcacttatgtagccaccaaaagtgttggtggctacaatgatgacgctaataagcaacatgatattactggtgtctatcccgagaaagacaccggtagacatcattttggtcgtggttacgacggtgacactaacaagcaacatgatgctactggtgtttatcccggaatagacattggtagagatcatgggactaccggtgttt

SEQ ID NO: 230510 - DNA, 357 bp, Glycine max
ctcgagccgaatcggctcgaggcttataagcaaaaccaacatcaactatggcaagttatcacaagcactatcatgatcagggtcacaaggtcgacgagtatggcaatgttgagaggcaaactgacgaatatggcaacccggttcatgccactagtgtcacttatgtagccaccaaaagtgttggtggctacaatgatgacgctaataagcaacatgatattactggtgtctatcccgagaaagacaccggtagacatcattttggtcgtggttacgacggtgacactaacaagcagcatgatgctactggtgtttatcccggaatacacattggtagagatcaggggactaccggtg

SEQ ID NO: 230511 - DNA, 369 bp, Glycine max
gatgagcttattgcgaatgctgcttacattggcactcctggaaagggtattcttgctgctgatgagtcaacagggacaattggcaagcgtttggccagcatcagtgtagagaatgttgaatccaacaggcgtgctcttagggagctgcttttcaccgctcccggtgctcttaaatatctcagtggtgtcatcctctttgaggaaactctctaccagagcacagctgcaggcaagccctttgtggaagtcttgaaggaggctggtgtgcttcctggcatcaaggttgacaagggcacagttgagcttgctggcactaatggagaaaccaccactcagggtctagatggccttggtcagcgttgcgccaag

SEQ ID NO: 230512 - DNA, 390 bp, Glycine max
gtttccttgacaatctaattctgcaaaaatggcaagcaataaggagtctaagttcccagcacagagccagaaaactcagccaggaaaagaacatgtaatgaatccactcccacaagccacaaatcctgatcacaaggccgccaataaactccagggaaaggtggcgttggtgacaggaggtgactcaggaattggcagagcggtttgcctgtgtttcgcaaaagagggtgcaaccgtggcctttacatacgtaaagggccatgaggacagggataaagatgatactctgaagatgctgcttgaagctaagacaagtggtgcagacaatccattggcaatagcagcggatattggctttgatgagaactgcaaacaggtcattgaccttgt

SEQ ID NO: 230513 - DNA, 339 bp, Glycine max
agcagatgatctgctgctgtaacaagatggatgccactaccccgaagtactctaaggctaggtatgatgaaattgtgaaggaagtctcttcctacttgaagaaggttggttacaacccagacaagattccatttgtgcccatctctggtttcgagggtgacaacatgattgagaggtccaccaaccttgactggtacaagggaccaactctccttgaggctcttgaccaaatcaatgagcccaagaggccctcagacaagccactcaggcttccattgcaggatgtctacaaaattggtggtattggtaccgtgccagtgggacgtgttgagactggtg

SEQ ID NO: 230514 - DNA, 344 bp, Glycine max
aaatttcagaactgcagtattttactgccataaagtccgtgaaacaacagctttcatggttccattggtggctggtgatggaaccaaaactcaggcacttgctgtttgccactcagatacttctggaatgaatcatcacatgcttcatgaactcatgggagttgatcctggaactaaccctgtttgccatttccttggaagcaaggccattttatgggtacccaatttatctatggacactgcctatcagactaacgttgttgtttaattagtccatgcatctgcatcttgggcaccataagattgtatataaaataaattatggtgtgttgtgtatgttgtgc

SEQ ID NO: 230515 - DNA, 332 bp, Glycine max
ggaaaaagttgtattgaaattttcacaagaggaatttcttacagcttggtcaactcaggtgcgtcctgcaacaactctgttggctgatgggtgcccatatttgtatgctatggtgcatgatagttcagtgtctacaataccaagtgattttgtcattggtgttaagttgacaaccataaacaatatgtgtgcatatgggctcaatcctggtatttcaggttctcgtcttttgggcaccattcctcagtccatttcacagcaaactgtttggaatcaaatggcaacagtgagaacaccattgaattttgattctagcaagcagagcttttgtc

SEQ ID NO: 230516 - DNA, 332 bp, Glycine max
agaatccacacaaactcagggtatggcagagagagagagagagagagagagagagagagagaatgggagggtgggctatcgcggtgcatggtggcgctggtgtcgaccctaatctcccactcgagcgccaagaagaagcgaaacaacttctcacgcgctgtctcaatcttggaatctctgctctaaattctaatcttcccgccatagatgtcgtcgaacttgtggtgagggaattggaaacggatccgctgttcaattcgggccgtggatctgccctgacagaaaaaggaacggtggagatggaggctagcatcatggatggtccaaaacga

SEQ ID NO: 230517 - DNA, 345 bp, Glycine max
cacttcccgaagtgttaaaagaatgcctctttctatagggggaggagctggtgcaaagaatgctattctcatgaatatgccaaatgctgttctttcaatgtggagatattttgttggagatctcgtctttgaagtttctaagatgacttctccttacattaaatgtacagtctctttcttcatagcatttggaaatttggctgatgacaccatcaattttgaggcttttcctcacaagctggtgcagtttggagagattcaggaaaaagttgtattgaaattttcacaagaggaatttcttacagcttggtcaactcaggtgcgtcctacaacaactctgttggc

SEQ ID NO: 230518 - DNA, 137 bp, Glycine max
ttttctttcgcttgttcgtttgtttaattcaataaaggaaattaggcatgaccctcttgttgagtatgctctgcctatttgaaaatttccacacctcttttaattgtcgtaatgatgtgtgaagtgtgtgttatttt

SEQ ID NO: 230519 - DNA, 160 bp, Glycine max
ttttctttcgcttgttcgtttgtttaattcactaaaggaaattaggcatgaccctcttgttgagtatgctctgcctatttgaaaatttccacacctcttttaattgtcgtaatgatgtgtgcactgtgtgttattttagcagccggggcggcggagaaat

SEQ ID NO: 230520 - DNA, 376 bp, Glycine max
attcatcactagaagtgttggatgcatttctatttctaactaattattgtgcttattattattgttgagaaagaaaagaatggcaaagttaataaaattctttgagttgaacacaggggccaagattccttctgttggattaggcacttggcaagctgagcctggtgttgtagccaaagctgtcaccacagccattctggttggatacaggcatattgattgtgctcaagcgtataacaatcaagcagagattggttctgctcttaagaagctttttgatgatggtgtggtgaagcgtgaggacttatggatcacctccaaactctggtgttcagatcatgcttcagaagatgtgcccaaagcattggataaaaca

SEQ ID NO: 230521 - DNA, 351 bp, Glycine max
cattcctgatatccctgggaaggaatatgcaatagattcagatgctgcccttgatttaccaacaaaacctgtgaaaatagccattgttggtggtggttacattgccttggagtttgctggtatctttaatggtttgaaaagtgaggttcatgtatttatacggcaaaagaaggttttgcggggatttgatgaagagattagagattttgttgaagaacaaatgtctgtaagaggtattgaattccataccgaggagtctcctcaagctatcacgaagtcagcggatggctcattctctttaaagaccaacaaaggtacagtggacggtttctcacatattatgtttgctac

SEQ ID NO: 230522 - DNA, 354 bp, Glycine max
tttctctgcagtctcttcacctttatgttaatgatattatgtgtttagagagaaagagaacaagcatagttgagcttgattgtgttcttcaacattagaacaagaaaagaaagacaacaacatggaaggaggaggagtagaagttgatgcctctgctttcagagaatgcttgtctctgtcatggaaaaatccttacgttcttcgccttgctttttctgctggaattggtggccttctctttggctatgacactggagtcatatctggggctattttatatatcagagatgatttcaaagcagtggataggaagacttggcttcaggaagccatactgagtatggctcttgctgg

SEQ ID NO: 230523 - DNA, 366 bp, Glycine max
ttcaagagttgaaggaaatggctgaagcacaactacgagaccagcatggcaaccctgtcccactcaccgatcaatacggtaatccggttatcttaactgacgagcgcggtaatcccgtccaactcactggtgtcgctaccaccgctaccggcacagcaggttctgggtttgggtcctatggtaccggtgcttacggtggtggtgcaagtgcaaccaccgttgcagatcttttggcaacccaaccaaggagtggcagggaggctagagagcttcgtcgttcctccagttcaagctctagctcgtctgaggatgatgggcaaggtgggaggaggaagaacggagtgaacgagtaaataaaagagaaac

SEQ ID NO: 230524 - DNA, 352 bp, Glycine max
tttggttaagagtcttgaaaaagcaagagaaaaaaaaataccaaccatggcaaccatttctgatcaacctagagggtcctactcctatggaacctcatatggagcaccctatggaaccacgtatgagaccaacaccagcattaacaacccaccttcacgccaaacagtgaagttcataactgctgccactattggcatcacactcttgctcctgtctgggttgaccctcacaggcactgtcatacgtttgatcattgcaacccctcttcttgttatcttcagccccatccttgtccctgctgcgtatgtgctgttcctagttgcttctggctttttggtccctggggggctg

SEQ ID NO: 230525 - DNA, 364 bp, Glycine max
agcaaaatgaccaagttcacaatcctcctcatctctcttctcttctgcatcgcccacacttgcagcgcctccaaatggcagcaccagcaagatagctgccgcaagcagctccagggggtgaacctcacgccctgcgagaagcacatcatggagaagatccaaggccgcggcgatgacgatgatgatgatgacgacgacaatcacattctcaggaccatgcggggaagaatcaactacataaggaggaacgaaggaaaagacgaagacgaggaagaagaatgacacatgcagaagtgctgcacagaaatgagcgagctgagaagccccaaatgccagtgcaaagcgctgcagaagataatggaga

SEQ ID NO: 230526 - DNA, 380 bp, Glycine max
aggcagttggctaagttgtcctctgagataaatgcacacaacaccaatttgcttgctgttggaggaggtcctgagggtcctgatccacgggaggttgagttgtatttggaagagattctcaaccttatgcagcttggtgaggattacactgagttcatgatttccaagatcaaagcacttacttctgttgaccccgaattgctccctcgcgccaccaaggctttccggagtggcagtttcagcaaggtggcgcaggatttaacaggcttttatgtcattttggagggatttttcatggtggagaatgttaggaaggcgataaagatcgatgaacaggtgcctgacagccttaccacttctatggtggatgatgtttttta

SEQ ID NO: 230527 - DNA, 397 bp, Glycine max
aggtcaactctaaaggatcccctcggggaattccaattccacattttcaagaaataaggaggcaaaaatgttcatatatgaattggaattatttgttttcttattaggcctatcctgaagccaaaggaaatgagatcggaattcctcggggaattccaattccacattttcaagaaataaggaggcaaaaatgttcatatatgaattggaattatttgttttcttattaggcctatcctgaagccaaaggaaatgagatcggaattcctcggggaattccaattccacattttcaagaaataaggaggcaaaaatgttcatatatgaattggaattatttgttttcttattaggcctatcctgaagccaaaggaaatgagattgggattcctccggg

SEQ ID NO: 230528 - DNA, 343 bp, Glycine max
gccaggcaagccccactcaaccaccacacctctcctcgttcacgctacccctttctgctcttcttctacctttcaagttttaaaagtataaagatggcagagacattcctatttacctcagagtcggtgaacgagggacaccctgacaagctctgcgaccaaatctccgatgctgtcctcgacgcttgcctcgagcaggacccagacagcaaagttgcctgcgaaacatgcaccaaaaccaacttggtcatggtcttcggagaaatcacgaccaaggccaacgttgactacgagaagatagtgcgtgacacctgcaggaacatccggttcgtctcaaatgatg

SEQ ID NO: 230529 - DNA, 325 bp, Glycine max
gagaaatgcttgcaggtgtaaatccacacttgattcgttgtcttaaggatttccctccacgaaacaggctagatagccaagtctatggtgatcatactagtcatcatgaccatagaacacctagagcccaacttagaacggctcactgtagatgaggcaattcacaacacgagattgttcctactagatcatcatgacccaatcatgccatatttgaggcgaataaatgcaacctccacaaacgcgtaagctaccagaaccatccctttcctgaaaaatgaccgaattttaaggccacttgccatacgagttgagtttgccacat

SEQ ID NO: 230530 - DNA, 340 bp, Glycine max
cgaatggagatcgaaaaagacacaacccagaagacctagacaagaagaaccacgtgaaagaggatgcgagacaagaaacggggttgaggaaaatatctgcaccttgaagcttcacgagaacattgctcgcccttcacgcgctgacttctacaaccctaaagctggtcgcattagtaccctcaacagcctcaccctcccagccctccgccaattccaactcagtgcccaatatgttgtcctctacaagaatggaatttactctccacattggaatctgaatgcacacagtgtgatctatgtgactcgaggacaaggaaaggttagagttgtgaactgccaa

SEQ ID NO: 230531 - DNA, 359 bp, Glycine max
ggagtagttatgaaccccgtagaccatccgcatgggggtggtgaagggagggccccaattggtagaaaaaaacccgcaactccttggggttttcctgcacttggaagaagaagtagaaaaaggaagaaatatagtgataatttgattcttcgtcgtcgtactaaatagtagagaaaatagaaattgtttcttcgtctttacaagaaaaaggagtaattaactgtgacacgttcactaaaaaaaaatccttttgtagcgaatcatttattaagaaaaataaataaacttaacacaaaagcggaaaaagatataataataacttggtccagaacatctaccattatacctacaatgagtgg

SEQ ID NO: 230532 - DNA, 360 bp, Glycine max
cggctcgagcacagcaaactgtttggtatttcaggttctcgtcttttgggcaccattcctcagtccatttcacagcaaactgtttggaatcaaatggcaacagtgagaacaccattgaattttgattctagcaagcagagcttttgtcaattctctattgatcttcttggtggaggaattttagtggacaaaactggagattggatcacacttatacaaaattctccaattagtaacttgttgagagttgctgcttggaagaaaggctgtttaatggttaagattgtgatgtctgggaatgcagcagtcaaaaggagtgattgggcctcattggtacaagtgtttttaacaaacagcaac

SEQ ID NO: 230533 - DNA, 100 bp, Glycine max
aaattaggcatgaccctcttgttgagtatgctctgcctatttgaaaatttccacacctcttttaattgtcgtaatgatgtgtgaagtgtgtgttatttta

SEQ ID NO: 230534 - DNA, 323 bp, Glycine max
gtggaacactaccattggtcaaggtagaggaaatatctcagactattgacacgctgaattttaccgtccaaaactctgttcagttcgctggtcctttggccaccacctcaattagtactaatgccaaattcgatgttcgaagtccaaaacgtgtgcagataaaatttgaggaaggcataattggcactccacagcttacggactcactagagataccagaaaatgtggaacttctgggtcaaaagattgaccttacacctttcaaaggaatccttacctctgtccaagacacagcctcatcggtggtgaaaacaatttcaagt

SEQ ID NO: 230535 - DNA, 312 bp, Glycine max
agacagcattctagtggtggctacgatggtgacactaataaacatcatggaactactggtggctataatgatgacaccaatagacatcatggaactaccggtgtctatggtatagacaccgataggcaacaacatgggactactggtggctatgccggtgacactggtaggcaacatgggaacatcggtggcccttactatggaaccaacaccgcagacaccggtactggtcccagaagtggaaccacgggcggcaccggttatggacgcactggtggcactgattatggaacaactggtggcactggttat

SEQ ID NO: 230536 - DNA, 339 bp, Glycine max
gaaaatcaccccattctcatcgtttaggattgaacaagtttgctgacatcactcctcaagagttcagcaaaaagtacttgcaagctcccaaggatgtgtcgcagcaaatcaaaatggccaacaagaaaatgaagaaggaacaatattcttgtgaccatccacctgcatcatgggattggaggaaaaaaggtgtcatcacccaagtaaagtaccaagggggctgtggaagcggttgggcgttttctgccacgggagccatagaagcagcacatgcaatagcaacaggagaccttgttagcctttctgaacaagaactcgtaaactgtgtggaagaaagcg

SEQ ID NO: 230537 - DNA, 376 bp, Glycine max
aaaattagaaaaaataccacatgaatattctaccataataggtattgaagaatcagtacatgaaattttaatgaatttgaaagaaattgtattgagaagtaatctgtatggaactcgggacgcgtctatttgtttcaaaggtcctggatatgtaaccgctcaagacatcattttaccaccctctgtggaaatcgttgataatacacaacatatagccaacgtaacagaacccgttaatttgtgtattgaattaaaaattgagaggaatcgtgggtatcgtataaaaacactaaaaaactttcaagatggaagttatcctatagatgccacatttatgcctgttcgaaatgttaatcataatattcattcctaagtg

SEQ ID NO: 230538 - DNA, 275 bp, Glycine max
aaaattagaaaaaataccacatgaatattctaccataataggtattgaagaatcagtacatgaaattttaatgaatttgaaagaaattgtattgagaagtaatctgtatggaactcgggacgcgtctatttgtttcaaaggtcctggatatgtaaccgctcaagacatcattttaccaccctctgtggaaatcgttgataatacacaacatatagccaacgtaacagaacccgttaaattgtgtattgaattaagaattgagaggaatcgtgggt

SEQ ID NO: 230539 - DNA, 402 bp, Glycine max
  unsure (1)..(402): unsure at all n locations
aaaaatggagccattattttcttcagcagcagcaatatgtgtggtgactgtgttggtagctgtgattcccatatgggcactgaagatgctgaactcgctgtggcttaggccaaagaggtttgaaaggcttcttagagcgcaaggttttcatggtgacccatactcactttctcatcacaactccaaccaaacccttttgcaacaacaccagctcaattcccaaccttttcctctatccgatgatgttgctcctcgtgtatcctccttgttacatcacactatcgacaaatatggcaagaaatccttcttttgggaaggtagaacaccaaaggtgatcattacggacccaaatcaactcanagaagtcttcaacaacattcatgaccttcaaaaacccaaagt

SEQ ID NO: 230540 - DNA, 377 bp, Glycine max
gctcgttgtcagtcctgaattcaactgttcaaatgagattctgtccgtttctgccatgctttcagtacccaattgctttgtccggcctagggaggcacaaaaagctgcggatgaagctaaagctaggttcgggcacattgatggagatcatctcacactgttgaatgtctatcatgcgtacaagcagaataatgaggatccctcttggtgctacgataactttgttaatcatagggcattgaaatcagctgataatgttagacaacacttagtgcgtatcatgtcccggtttaatctgaagctatgcagcactgactttaatagccgcgactactatgtcaacataagaaaagctatgctagctgggtatttcatgc

SEQ ID NO: 230541 - DNA, 364 bp, Glycine max
ctcgagccgctcgagccgcaaatctgaatgatgttaactggaatttgtatctgaatactctattttggaatctcaactattgggactccataagtactcttgctggagaagtagaaaatccgaagaaaactcttccgaaggctttgttttatgctgtgatcctagtagttctagggtacttctttcctcttctaattggtactggtgctgttcctgtcaaccgtgagttgtggacagatggctacttctcagatattgctttgattataggaggagcatggttgagatggtggcttcaggctgctgctgcgatgtcaaacatgggaatgtttgttgctgaaatgagcagttacgccttccaact

SEQ ID NO: 230542 - DNA, 328 bp, Glycine max
caacatgagcagtttgaggtagagcaacctttggaagtgcggaaatatagagccgaattgtctgaacaagatatatttgtaatcccagcaggttatccagttgtggtcaacgctacctcaaatctgaatttctttgctattggtattaatgccgagaacaaccagaggaacttcctcgcaggttcgcaagacaatgtgataagccagatacctagtcaagtgcaggagcttgcattccctgggtctgcacaagctgttgagaagctattaaagaaccaaagagaatcctactttgtggatgctcagcctaagaagaaagaagaaggga

SEQ ID NO: 230543 - DNA, 220 bp, Glycine max
cagagcttttgtcaattctctattgatcttcttggtggaggaattttagtggacaaaactggagattggatcacacttatacaaaattctccaattagtaacttgttgagagttgctgcttggaagaaaggctgtttaatggttaagattgtgatgtctgggaatgcagcagtcaaaaggagtgattgggcctcattggtacaagtgtttttaacaaaca

SEQ ID NO: 230544 - DNA, 278 bp, Glycine max
  unsure (1)..(278): unsure at all n locations
gaaaaatggtttcgctgaaactgcagaagccgctcgccgccaacctgctcaagtgttgcaaaagaaaaggttggcttgaacccaatgaaatccaacgaaatctccaatggcaaatctcgccaaaaaataaggaagctgtttaaggatgggtttatcatcangaagcccacaagaatcactctcgctcacgtgctcgtcgaatgaaggaagccaagaggaaaggacgtcactctggatacggtaagcgtaagggtacaagggaagcaaggcttcccact

SEQ ID NO: 230545 - DNA, 332 bp, Glycine max
tgagaaacttcggtctccagatgacgaaaggaagcagatcgtgacagtggagggaggcctcagcgttatcagccccaagtggcaagaacaagaagacgaagacgaagatgaagacgaagaatatgaacaaactccctcttatcctccacgacgaccaagccatggaaagcatgaagatgacgaggacgaggacgaagaagaagatcaacctcgtcctgatcaccctccacagcgaccaagcaggcccgaacaacaagaaccacgtggaagaggatgtcagactagaaatggggttgaggaaaatatttgcaccatgaagcttcacgagaaca

SEQ ID NO: 230546 - DNA, 303 bp, Glycine max
aaaaaaatatcagacacaaaaagaatctatagaaatatataaataatatatataaggtacaaatagtaaatcgaggtacccattttatgataaactttccttccatttttgttcctctagtaggcctagtatttccggcaattgcaatggcttctttatttctttatgttcacaagaacaagattttttagatacagaaaacaatgtacaattctggggttttttattccccaattatactagtaaattcaacaaaaggagagtaatgaatataatctttcgctcagacgagttactgatata

SEQ ID NO: 230547 - DNA, 351 bp, Glycine max
cactgacctcaccatggcgaccagagccaagctttctttagctatcttccttttctttcttttagccttgatttcaaacctagccttgggcaaacttaaagaaaccgaggtcgaagaagatcccgagctcgtaacatgcaaacaccagtgccaacagcaacggcaatacactgagagtgacaagcgaacatgcttgcaacaatgtgacagtatgaagcaagagcgagagaaacaagtcgaagaggaaactcgcgagaaggaagaagaacatcaagagcagcatgaggaggaggaagaccaaaatccctacgtttttgaagaagataaggatttttcgaccagagtcgaaac

SEQ ID NO: 230548 - DNA, 288 bp, Glycine max
cactgacctcaccatggcgaccagagccaagctttctttagctatcttccatgtctttcttttagccttgatttcaaacctagccttgggcaaacttaaagaaaccgacgtcgaagaagatgtcgagctcgtaacatgcaaacaccagtggcaacagcaacggcaatacactgagagtgacaagcgaacatgcttgcaacaatgtgacagtatgaagcatgagcgagagaaacaagtcgaagaggaaactcgcgagaaggaagaagaacatcaagagcagcatgagga

SEQ ID NO: 230549 - DNA, 340 bp, Glycine max
  unsure (1)..(340): unsure at all n locations
tacgtaaactcaaaattcggctgagcttaattattaacacttccttagttcaatatggggaagcncttcactctctctctttcttcnctttgcttgctactcttgtcgagtgcatgctttgctattagctccagcaagctcaacgagtgccaactcaacaacctcaacgcgttggaacccgaccaccgcgttgagtccgaaggtggtttgattcaaacatggaactctcaacaccctgagctgaaatgcgccggtgtcactgtttctaaactcaccctcaaccgcaatggcctccacttgccatcttactcaccttatccccggatgatcatcatcgccc

SEQ ID NO: 230550 - DNA, 275 bp, Glycine max
gatccttaataacgcatcagtcatcgacaaggacaatcgaacttgttcgcattaagttccacctttcaatggctgaacacgaacatcaacctttacaaatgcggacttagcataccgaattgtacatacagcagataattggcatctgaccaggtataccagttgatggccgacgctggctcatatacgcatttcaccgcaattggaatccattccaatatcaacgagtggaacttccttgcaggttccacatccactgtgaccttcgagaaacc

SEQ ID NO: 230551 - DNA, 277 bp, Glycine max
cactgactttatcggcgatagcagatcaagtatttttgatgcaaaggctggaattgcattgaataagaactttgtgaagcttgtttcttggtacgacaacgagtggggatacagctcacgtgtcattgatcttcttgtattcgttgccaagaagtctctttaaggtgttacttcaaagtagcttgtcttcacattattaccgtatgtttatgtttagctgcgatttagtgtcttgctcgagcaaaaaatgagaggtctgaataaatcggtttctgaa

SEQ ID NO: 230552 - DNA, 318 bp, Glycine max
gaccgtcaccagaagatctataacttcagagagggtgatttgatcgcagtgcctactggtgttgcatggtggatgtacaacaatgaagacactcctgttgttgccgtttctattattgacaccaacagcttggagaaccagctcgaccagatgcctaggagattctatcttgctgggaaccaagagcaagagtttctaaaatatcagcaagagcaaggaggtcatcaaagccagaaaggaaagcatcagcaagaagaagaaaacgaatgaggcagcatattgagtggcttcaccctggaattcttggaacatgcattc

SEQ ID NO: 230553 - DNA, 302 bp, Glycine max
gtggacaccggttccaatcttttcacaactatcactgtcaatgagcctgctcctggtctcaagactatttttagctttagagttcctgatcaaaggtctggaaaggtggaagtccagtacttgcatgactatgctggaataagcaccagtgtgggtttaacagcaaacccaattgtcaacttctccggcgttgtaggaactaatgtacttgcccttggtactgatgtttcttttgacaccaagattggggagttaactaaattcaatgctggattgaacttcaccaaagaatgatttgggtg

SEQ ID NO: 230554 - DNA, 333 bp, Glycine max
caaacattgaacttgttggcctaaaagaacaacaacaggagcagcaacaggaagagcaacctttggaagtgcggaaatatagagccgaattgtctgaacaagatatatttgtaatcccagcaggttatccagttgtggtcaacgctacctcaaatctgaatttctttgctattggtattaatgccgagaacaaccagaggaacttcctcgcaggttcgcaagacaatgtgataagccagatacctagtcaagtgcaagagcttgcattccctgggtctgcacaagctgttgagaagctattaaagaaccaaagagaatcctactttgtggatg

SEQ ID NO: 230555 - DNA, 369 bp, Glycine max
ctaaatggtattcctgtagctattggaattatggattttcagtttatggggggcagtatgggatccgcagtaggtgagaaaatcacccgtttggtagaatatgctactaatcaacttttacctcttattctggtatgtgcgtccggaggagcgcgtatgcaagaaggaagtttgagcttgatccaaatggctaaaatctcttctgctttatatgattatcaaaaaaataaaaagttattctatgtatccatacttacatctcccactactgggggggtaactgctagttttggcatgttgggggaaatcattattgccgaaccaaatgcctaaattgcatttgctggtaaaaaagtaattgaacaaaca

SEQ ID NO: 230556 - DNA, 302 bp, Glycine max
ttgcatgcgtgcaggtcgactctaaaggatcccctcggggaattccaattccacattttcaagaaataaggaggcaaaaatgttcatatatgaattggaattatttgttttcttattaggcctatcctgaagccaaaggaaatgagatcggaattcctcggggaattccaattccacattttcaagaaataacgaggcaaaaatgttcatatatgaattggaattatttgttttcttattaggcctatcctgaagccaaaggaaatgagatcggaattcctcgggggtaccgagctcgaatt

SEQ ID NO: 230557 - DNA, 358 bp, Glycine max
  unsure (1)..(358): unsure at all n locations
gattgggcctcattggtacaagtgtttttaacaaacagcaacagtacagagcattttgatgcatgtaagtggacaaaatcagaaccacattcctgggaattgatcttcccaatagaggtatgtggtcctaataatggttttgaaatgtggagttctgagtgggcaaatcaaacttcatggcatttgagtttccttattgacaatcccaaacagtctacagtttttgatattctcttgggaatctctcaagattttgaaattgctggtaatactcttatgccagctttttctgttccacaggctactgccaaatcntctgaaaatgcggaatcctctgcatgatctggaatttgtgttt

SEQ ID NO: 230558 - DNA, 316 bp, Glycine max
ctcatcgttatccttaacgggactgccattctttccttggtgaacaacgacgacagagactcctacagacttcaatctggtgatgccctgagagtcccctcaggaaccacatactatgtggtcaaccctgacaacaacgaaaatctcagattaataacactcgccatacccgttaacaagcctggtagatttgagagtttcttcctatctagcactgaagctcaacaatcctacttgcaaggattcagcaggaacattttagaggcctcctacgataccaaattcgaggagataaacaaggttctgtttagtagag

SEQ ID NO: 230559 - DNA, 312 bp, Glycine max
ctcgagccgagaaaggaaataattgatctttgaaaatgcatggaggaaagaaagctggagagtccatcaaggaaacagctgcaaacattggtgcttctgccaaggctggcatggagaaaaccaaggccactgtccacgagaaggcagaaagaatgacggcacgtgatccgatgcaaaaggagttggcaacccagaagaaagaggcaaagatgagccaggcagagctggacaagcatgcggcgcgtcagcataacacggcggcgaagcatgctgccacggcagggcacatgggacaacccatggggaaccatc

SEQ ID NO: 230560 - DNA, 260 bp, Glycine max
cataattcaatgtgtcgtctacaaatgtcacagttgctggataaagccaagaacctcgtgtctgacaacgtcaatgataaggcaaagccggaggcgactgtcaccgaagtggacttcaagcacgtgagcaaatatcatgtcgagtacttggccaaggtcactgttcgtaacccttattcaacttctatacacatttgtgagatcaaccaccctttcaaaagcggatccagggagatatcatcatggaaaattccagaccc

SEQ ID NO: 230561 - DNA, 334 bp, Glycine max
aattaccttcagaagctgtcgttgtaaatgttacatgtggtagtggacgtggtggtttacctaccactgcttggattagttctgcagttaacaatcgctcctcagatatcaacaaaaagattcgcacagcacttgggaaaggtaagaaaattgtttttcttactagagttgatccttttccagtagctctactggctgttctttttggcgttaagaatgaaattctgagttccaacgccactaaccctatgctgacgcgacttcttgagaactgtaagagtctcaaatatctggttgatgagtgtccttttgcatttgtgaactagtatgtaat

SEQ ID NO: 230562 - DNA, 256 bp, Glycine max
agttgatcctggaactaaccctgtttgccatttccttggaagcaaggccattttatgggtacccaatttatctatggacactgcctatcagactaacgttgttgtttaattagtccatgcatctgcatcttgggcaccataagattgtatataaaataaattatggtgtgttgtgtatgttgtgcaagacctggaacttcacctttctacgtacgtgtgctgttaggatgcagtgtgctttgatgatgctttgatg

SEQ ID NO: 230563 - DNA, 359 bp, Glycine max
aacttattaacactttccttagttcaatatggggaagcccttcttcactctctctctttcttccctttgcttgctactcttgtcgagtgcatgctttgctattacctccagcaagttcaacgagtgccaactcaacaacctcaacgcgttggaacccgaccaccgcgttgagtccgaaggtggtcttattgaaacatggaactctcaacaccctgagctgcaatgcgccggtgtcactgtttccaaacgcaccctcaaccgcaacggcctccacttgccatcttactcaccttatccccaaatgatcattgtcgttcaagggaagggagcaattggatttgcatttccgggatgtcctg

SEQ ID NO: 230564 - DNA, 57 bp, Glycine max
aaaaaaaaaaaaaaaaaaaaaaaaaaaaaaaaaaaaaaaaaaaaaaaaaaaaaaaaa

SEQ ID NO: 230565 - DNA, 344 bp, Glycine max
  unsure (1)..(344): unsure at all n locations
cggctcgagatcaattttgaggcttttccccacaagctggtgcagtttggagagattcaggaaaaagttgtattgaaattttcacaagaggaatttcttacagcttggtcaactcaggtgcgtcctgcaacaactctgttggctgatgggtgtccatatttgtatgcaatggtgcatgatagttcagtgtctacaataccaggtgattttgtcattggtgtcaagttgacaaccataaacaatatgtgtgcatatgggctcaatcctggtatttcaggttctcgtcttttgggcaccattcctcagtccatttcacagcanactgtttggaatcaaatggcaac

SEQ ID NO: 230566 - DNA, 234 bp, Glycine max
cggctcgagatcaattttgaggcttttccccacaagctggtgcagtttggagagattcaggaaaaagttgtggtgaaattttcacaagaggaagttcgtacagcttggtcaactcacgtgcgtcctgcaggaactctgttggctgatgggtgtccagatttgtatgcaatggctcatgagagttcagtgtctacaatagcagatgattttggcactggtgtcaagttgacaacc

SEQ ID NO: 230567 - DNA, 397 bp, Glycine max
tccaccactaagaaagtctctgactatgccggtgatgctgctcagaaatcaaaggactatgccggtgacactgctcagaaaaccaaggactatgccggtgacactgctcagaaaaccaaggactatgccggtgacactgcacagacatcaaaggactatgccggtgatgctgctcagaaatcaaagggctatgtcggtgatgctgcacaaaagaccaaagaatatgttggtgatgctgctcagaagaccatggattatgccactgatgcagcacagaagaccaaagattatgctactcagaagactaaggactatgcaagtgatgcaactgatgctgcaaaaaagactaaagattatgctgctcagaagaccaaggattatgcaagtgatgcaactg

SEQ ID NO: 230568 - DNA, 330 bp, Glycine max
gggtatcccaccagatcaacagaggctcatctttgctggaaagcaacttgaggatggccgtacccttgctgattacaacatccagaaagagtccactcttcacttggtactccgtctacgtggtggaatgcaaatctttgttaagactctgaccggaaagacaatcacccttgaggtggagagctctgacaccattgacaatgttaaggctaagattcaagacaaagagggtatcccaccagaccaacataggctcatctttgctggaaagcagctagaagatggccgaaccttggctgattacaacatccaaaaagaatctaccctcca

SEQ ID NO: 230569 - DNA, 258 bp, Glycine max
ggctcgagctttgagatcaccccagagaaaaacccccagcttcgggacttggatatcttcctcagtattgtggatatgaacgatggagctcttcttctaccacacttcaattcaaaggcgatagtgatactggtaattaatgaaggagatgcaaacattgaacttgttggcctaaaagaacaacaacaggagcagcaacaggaagagcaacctttggaagtgcggaaatatagagcccaattgtctgaacaagatata

SEQ ID NO: 230570 - DNA, 366 bp, Glycine max
ggaggacaagacttacggtgtcccccgccgccgcctcaccggccattctcattttgtccaggacgtcgtcctctcttctgacggccagtttgccctatccggctcctgggacggcgagctccgcctctgggaccttgctgctggcacctccgctcgccgctttgtgggccacaccaaggacgtgctctccgtggccttttccattgacaaccgtcagatcgtgtctgcctctcgtgaccgcacgatcaagctgtggaacaccctgggagagtgtaagtacacaatccaagacggcgatgcgcattctgattgggtaagctgcgtccgtttcagccctagcaccctttagcccactattgtttctgc

SEQ ID NO: 230571 - DNA, 385 bp, Glycine max
gtgactacggctgggacactgctgggctttcggccgacccagaaaccttcgccagaaaccgtgagctcgaagtgatccactccaggtgggccatgctcggggccttgggctgcgtcttccccgaactgttgtcccgcaacggggtcaagtttggagaagctgtgtggttcaaggccgggtcccagatcttcagcgagggtgggctggactacttgggcaacccaagccttgtccacgcccagagcatcctcgccatctgggctacccaagttatcctaatgggtgctgttgagggttatcgtattgctggtgggcccctcggtgaggtcactgacccaatctaccctggtggcagctttgacccattgggcctttgctgatgacc

SEQ ID NO: 230572 - DNA, 386 bp, Glycine max
gattgatggccttaaagctcatgctgagaaacatgtgactgatagaatgatgctcaatgctgctaacattttccccttcaacacaccaaccaccaaagaagcatactactatagaatgatatttgagaggttcttccctcagaactcagccaggctgagtgttcctggaggaccaagtgttgcatgtagcacagccaaagctgttgagtgggatgctgcttggtctaacaaccttgatccatctggtagagcagcacttggagtgcatgcatcagcttatggaaatcaggtcaaagctgtagaaccagagaagatcataccaaagatggaagtttctccactaggagttgccatatagagctagtatgagccatagcaaaaactag

SEQ ID NO: 230573 - DNA, 415 bp, Glycine max
cttcagtgatttttgcttaattactaaaccaaaccatttcttattccctcatcgaaaccttttctttctatatatttcccttttcaatatcatggcacctaacatcaccaccgttgttgccaatgccaccactgagcaattacccaaagctcatggaggaagtagtgggcgtgcctttgtgacttttcttgctggaaacggtgattatgtaaagggtgttgtgggtttggccaaaggactgagaaaggccaaaagcatgtaccctttggtggttgctgtgttaccagatgttcctgaagaacatcgtgcgattctcaaatcccaaggttgcattgtcagggagattgaacctgtgtaccctcctaagaaccagacccagttcgccatggcctattatgtcatcaattactccaag

SEQ ID NO: 230574 - DNA, 347 bp, Glycine max
ggccaatgcaagcgtggttgatgtgggggccatagccacagtttgagtctcaggctctcagcatgtggaagcaacatgggaacggttatgtgtgttttctgttaataataaacaaaggctactcagaacatattagtgtttggtgtccttggataattggcatggaagcttgagcttgtgcagtatattaaaaccttaaagtttaaaataaaagtattaattaggttgatcttaatttgtgcgtatgatccgtgatatatatgatatgttgtcgcctgtgatatgatgattaagttagtgtgatatgtagtgatacactgtttaagaaagtaacttgtccattttac

SEQ ID NO: 230575 - DNA, 402 bp, Glycine max
cttctccttattcctcttctccttcttcttcttcctctccttcttcttcttcttcttcttcttcttcttcttcttcttgttgtaattcttcaacttcaatcctgtcttgtctctttctctctcgctcttttttttttttttgcttacctgcaaccggcttaagctgtggtaactccttcttttaattaatcactcttttgtttcggttattactcttattcttaatggccttaccagtgtgttgctcactgagaaaccaccaattttcagcatgacaaagataagtcctgaagttgaaatcaggatgccaatggaggcatttccaccaatttcagctgatgtgagctttatttctaatagttttccgaaatacaaactggatgttgataatcaagttctgga

SEQ ID NO: 230576 - DNA, 394 bp, Glycine max
aaaaaaggcaaagcttattcccccaagacttagctagcactagcaaacacctctatatctaaaatggtttcaatttctgatcatgaactggttttgatctttggtctcctaggtaacattgtgtcattcatggtgttcttagcacccttgccaaccttctatacaatttacaagaagaaatcatcagaaggatttcaatcaattccatatgcggttgcacttcttagcgcactgttgcttctatattatggcttcataaagaccaatgctactttgattatcaccatcaactgtattggatgtgttatagaagtttcatacctaacaatgtacattatatatgctcccaggaaacagaagatatccactttggtaatgatactcattgccgaca

SEQ ID NO: 230577 - DNA, 407 bp, Glycine max
gcgtacgtatactcgggctacagaacgagcactctgatcctgaccctaatcctcccctttccttccttccttcggcaacaaaaatcatgtcggggtccttgggattcttctttgtgggtcttacgttgttgttgttggtctgggtggctaatgctgtggccaacacttccaacaaatttgatcaactcttccaaccaagctgggcttttgagcacttcattcatgaaggggatctcctcaaactcaaactagacaatttttccggcgctggttttacttccaagagcaagtatatgtttgggaaagtcaccatccagcttaagcttgtggaacgtgactctgctggaacagtcactgctttctatatgtcatcggacggtccaaaccacaacgagtttgattttgag

SEQ ID NO: 230578 - DNA, 400 bp, Glycine max
  unsure (1)..(400): unsure at all n locations
aaaaaaaccttgggggacctgagcgcggcggacctgaaggggaagaaggtcttcgtcagggccgacctcaacgtcccgctcgacgacaaccagaacatcaccgacgacaccagaatccgcgccgccattcccaccatcaaacatctcatccaaaacggcgccaaagtcattctctccagccacttggggcggccgaagggtgtcactcccaaatacagcttggcgcctcttgtaccccggctttctgagctcattggtatccagattgtcaaggccgaggacagtattggtccagaagtagaaaagttggtggcttctcttccagatggaggtgttctccttctagaaaatgtgaggttttacaangaggaagaaaagaatgaccccgagcatgcaaaaa

SEQ ID NO: 230579 - DNA, 384 bp, Glycine max
gctagaagcaataagatgaaaatgaaagtgcttgttttgtttgttgctacagttttggtagcatatgaatgccatggctcagactaccagaagttccctctccaaatgaaaactgggtttggtgggcaatacagcaatgaggtggcatgtgccagttggaggcttggcgtggaagcaaacaacgtagtcaagtggcaaactgttcctgcagcttgcggagagtacatagctgactacgttctaggagaccaatatagatcagattccaaaacagttaaccaacaagcttatttctatgctaaatccctcaaactcaccaacaaagatgtctttgtcttggacgttgacgacactactctctctaatctccagtattttgctaac

SEQ ID NO: 230580 - DNA, 409 bp, Glycine max
agcattagtactactgttaatgcaactagggttagtgatcttgagtccccaacatctaccttgtctgagaataatgcaccaccaattaatattactagtgttattgagtttgtgggttcttcagagagagggacggtgaaggaagagggagagcaagagtggaacaaattaggttatcatgaaagcttcacccatttgggagaatacaaagatggcaaggagaattcaatgcctttcacgtctagtctgcatgagttgacaatgaccatggcaaccacgtggggttctagcactagtggtgcacatgcacatgcacatgttgctgaggagggttgtttcaccaatcttttgctgaatgctaactccggtgcccggagtttgtcgccacaagacggtggagaatccaata

SEQ ID NO: 230581 - DNA, 310 bp, Glycine max
cgcaaaaccaaatttgattctcctgccaacttaaacctaaaaatggaaaatcctttctgatttccggccgaatcctagactctcggcctcatcggcgccggaaaaatggccgagtccattgcccgatgcgccgtccgcgccggcgtcctgccgccttctcgcattcggaccgccgtccacttcaacctcgcccgccgtggcgccatcgagtccttccgcgtcaccgttctcccttcaaacgatgacgtcgttcacgaaagcgacatcgtcgttttgtcggtcacacctcaattagtgaaagacgtgctgt

SEQ ID NO: 230582 - DNA, 400 bp, Glycine max
gattgttgtgactcgttcttcttcgtcgttatcttcttcttttgttgtttgtgtgtttgttttttctctcacctgaaaatgtcttgctgcggtggtaactgtggttgcggaagcgcctgcaagtgcggcaacggctgcggaggctgcaagatgtacccagacttgagctacaccgagtcaaccaccaccgagaccttggtcatgggagtggcaccagttaaggctcaattcgagagtgctgaaatgggtgttcccgctgagaacgatggctgcaaatgtggagctaactgcacctgcaacccctgcacttgcaagtgaggtgttggagagctaaagcttcaagcagaaatggcccttagaaataatgataaaaactatatgtagtttcaaaacttcaaaa

SEQ ID NO: 230583 - DNA, 386 bp, Glycine max
agaatgagtacggtgggagaagggaaggtgagtagtaatggtcatggatgttgcaaatcagggccaggctatgcttccccactggaagccatttctggtcccagacagtcgctcatttatgtaacctctgtctacacagggaccggaatagagaagccagactatttggcgacagtggatgtggatccaaactctccaacttattccaaagtcatccataagcttcctgttccttatttaggtgacgaattgcatcacacaggctggaattcatgcagctcttgccatggagacccctcagcagaccgacgatttctcatcgtacctgcactcgtatcaggtcgagtatatgtggttgatgtgaaaagaaatccaaaggctccatc

SEQ ID NO: 230584 - DNA, 396 bp, Glycine max
  unsure (1)..(396): unsure at all n locations
gctcgagctcaccctcctcttcacacattttctgtgcgctctaacanacattctcgttcacactttcagattgtgtgaagatgggggcgggtggccgaactgatgttcctcctgccaacaggaagtcagaggttgaccctttgaagcgggtgccatttgaaaaacctccatttagtctcagccaaatcaagaaggtcattccacctcactgtttccagcgttctgttttccgctcattctcctatgttgtttacgacctcaccatagccttctgcctctattatgttgccacccattacttccacctccttcccagccctctctctttcttggcatggccaatctactgggctgtccaaggttgcatccttactggagtttgggtcattgcccatg

SEQ ID NO: 230585 - DNA, 427 bp, Glycine max
  unsure (1)..(427): unsure at all n locations
gacgtatcgtccacgcgtacgtaagatcggaaatcggctcgagctggaaatgccatttatgatcncataggttctattgtagttggcaacttacttggaatggtagccatatttcttatccagagaaaccggcatgctttgattggtagagccatggatgaccatgatatggagaaagtacttcagtttttgaaaaaagacccggttgtagattccctctatgattgcaaaagtgaagttattgggcctggattcttcagatttaaggcagaaatagattttaatggagaaatggtggtgcaaaattatcttaaaaggactggtcgtgaagagtgggcaagacagtttcgtgaagctgctaagcagaaggatgatactgccatgatgaagattatgtcaaattacggtgaggaagtagttacagctt

SEQ ID NO: 230586 - DNA, 393 bp, Glycine max
aaaaaaggcaaagcttattcccccaagacttagctagcactagcaaacacctctatatctaaaatggtttcaatttctgatcatgaactggttttgatctttggtctcctaggtaacattgtgtcattcatggtgttcttagcacccttgccaaccttctatacaatttacaagaagaaatcatcagaaggatttcaatcaattccatatgcggttgcacttcttagcgcactgttgcttctatattatggcttcataaagaccaatgctactttgattatcaccatcaactgtattggatgtgttatagaagtttcatacctaacaatgtacattatatatgctcccacgaaacagaagatatccacttttggtaatgatactcattgccga

SEQ ID NO: 230587 - DNA, 460 bp, Glycine max
  unsure (1)..(460): unsure at all n locations
gcaggcccgcctacgtaagcacngaattcggctcaagctcaaagggcaaaggactccaaaacgggaattcaaatggggttgcctcacaaggactacacgaaccaacccccaaccccattctacgaccccgccgagctccgaaagtggtccttcttccgagccctcatcgccgagttcgtcgccaccctcctcttcctctacgtcaccatcctcaccgtcatcggctacaaccaccagacagccaccgccgccgagccctgcagcggcgtcggcgtcctcggcatcgcttgggcctttggaggcatgatttttgtcctcgtctattgcaccgccggcatatcagggggacacataaacccggcggtgacgttcgggttgtttttggcgaggaaggtgtcgctgacaagagctgttgggtacatggtggctcaggtgttggggggcataagtggggtggggc

SEQ ID NO: 230588 - DNA, 378 bp, Glycine max
cttcagtgatttttgcttaattactaaaccaaaccatttcttattccctcatcgaaaccttttctttctatatatttcccttttcaatatcatggcacctaacatcaccaccgttgttgccaatgccaccactgagcaattacccaaagctcatggaggaagtagtgggcgtgcctttgtgacttttcttgctggaaacggtgattatgtaaagggtgttgtgggtttggccaaaggactgagaaaggccaaaagcatgtaccctttggtggttgctgtgttaccagatgttcctgaagaacatcgtgcgattctcaaatcccaaggttgcattgtcagggagaatgaacctgtgtaccctcctaagaaccagaccca

SEQ ID NO: 230589 - DNA, 407 bp, Glycine max
cacacactctcatagctgtagcggcgacactaagatcggagaaagaatggcgaaaacgacgtcgttgctgctctttacactgctcctcttcggaaccctagctctcatccaggcgaagaaatcgaaggaggatttgaaggaggtgacccacaaggtttactttgatgttgagattaatggaaaagaagcaggtcgtattgtaatgggtctttatgggaaggctgttccaaacactgcagaagacttccgagcactttgcacaggggaaaagggaactggtaaaagtggaaagcctctccattacaaaggtagctcattccatagaattattcctagctttatgcttcaaggaggtgattttacacaaggaaatggaatgggtggagaatcaatttacggagagaagt

SEQ ID NO: 230590 - DNA, 498 bp, Glycine max
  unsure (1)..(498): unsure at all n locations
atctattgcaagccaggagaaccgattgcatgcctgccggtctactctagaagatcccctcggggaattccaattccacattttcaagaaataaggaggcaaaaatgttcatatatgaattggaattatttgttttcttattaggcctatcctgaagccaaaggaaatgagatcggaattcctcggggaattccaattccacattttcaagaaataaggaggcaaaaatgttcatatatgaattggaattatttgttttcttattaggcctatcctgaagccaaaggaaatgagatcggaattcctcggggaattccaattccacattttcaagaaataaggaggcaaaaatgttcatatatgaattggaattatttgttttcttattaggcctatcctgaagccaaaggaaatgagatcggaattcctcgggggtaccgagctcgaattccctatagtgagtcgtattaaattcctaatcaagtcacaactggttcn

SEQ ID NO: 230591 - DNA, 421 bp, Glycine max
acgcgtccgtaagctcggaaatcggctcgagtggcatcttcttctggtagtttagacacctctgcaagtgcaaactccttcaccaacttcaccttctccacacaccctttcatgaccacttctttctctgaccttcttgcttctcccacagacaacaacaaaccaccacatggtggtggtggtggtttgtctgagagaactggctctggtgtccccaaattcaagtccacaccaccaccttctctgcctctctctccccctcccatttctccttcttcctacttttctattcctcctggtttgagccctgctgagcttcttgactcacctgttctccttaactcttccaacattctgccatctccaacaactggagcatttgttgctcggagcttcaattggaagagcagttccgggggga

SEQ ID NO: 230592 - DNA, 429 bp, Glycine max
gacgtagcatccacgggtccgtaaactcggaaatcggctcgagatcgttttctacataatacaaacctctctaatttttgaagcttattatacccaatctcgatatgcagatcttcgtgaaaaccctaactggcaagacgatcaccttggaggtggagtcctctgacaccatcgacaacgtgaaggccaaaatccaagacaaggagggcattcctccggatcaacagcgtttaatcttcgccggaaaacagctcgaagacggcagaaccctcgccgactacaacatccaaaaggagtccacgctccacctcgtcctccgcctccgcggcggcatgcaaatcttcgtcaaaacccttactggcaaaacaatcacgctagaggtggagtcctccgacacaatcgataacgtgaaagccaagattcaagata

SEQ ID NO: 230593 - DNA, 411 bp, Glycine max
ctcgagccgattcggctcgagtgctattgggtgtcaaagctgtgatagctaaaagttttgagagaattcatcgtagcaatttggtaggaatgggtattgttcctctttgctttaaatctggtgaggatgctgacacattgggattgactggtcacgaacgttatactattgacctcccaagtaacatcagcgagataaggcctggccaagatgtcaccgtaacaactactaccggaaaatctttcacctgcacagttcgcttcgacaccgaggtggaacttgcttactttaaccatgggggcattcttccatatgtcatcaggaacctcattaagcagtgaagtcatggctgatgggaaatgttaaacaatgttgccactgcgtgtacacgttttgagtggtaatataatg

SEQ ID NO: 230594 - DNA, 390 bp, Glycine max
tgattacacaaggtcaattcatttgggcactgtctctgttccaaaaccctaatccttcgtcttccagaaaatggctgattctccccttgcaaggaattcaaggtccccttccccgtggaaagctcagtcgagatctaggtctaggtcaagatctaggtcgaggtctaggcctagacaaaggccaagatcccgttctagaagtcatggcaggtcaagatcaccaattcatggaaggtcaaggtcacccattcatggaaggtccgagccttcaaatcctggtgacacactttatgtaaccggtctatcttcaagggtcactgaaagagacctagaggagcatttctccaaggaaggaaaggtttcttcatgttttcttgtggtggagccccg

SEQ ID NO: 230595 - DNA, 421 bp, Glycine max
gattgttgtgactcgttcttcttcgtcgttatcttcttcttttgttgtttgtgtgtttgttttttctctcacctgaaaatgtcttgctgcggtggtaactgtggttgcggaagcgcctgcaagtgcggcaacggctgcggaggctgcaagatgtacccagacttgagctacaccgagtcaaccaccaccgagaccttggtcatgggagtggcaccagttaaggctcaattcgagagtgctgaaatgggtgttcccgctgagaacgatggctgcaaatgtggagctaactgcacctgcaacccctgcacttgcaagtgaggtgttggagagctaaagcttcaagcagaaatggcccttagaaataatgataaaaactatatgtagtttcaaaacttcaaaattatgtagtatgtattatgtt

SEQ ID NO: 230596 - DNA, 419 bp, Glycine max
ccttcttcttcttcttctctcgcgccgcaataataatactaaaacatgtccaactctgatggagccattaacgccgtccctcccaacgacgccaacaacaacacaatcgttgagtaccagcagcgaaccaccaccaccaccaccgccgccgccgccgccctcgccgtcaagaaaccgccttccaaggaccgccacagcaaggtcgacggccgcgggcgccgcattcgcatgccgatcatctgcgccgcccgcgtcttccagctcacgcgcgagctcggccacaagtccgacggccagaccatcgagtggctcctccgccaggcggaaccctccatcatcgccgctaccggctccggcaccactccggcgagcttctccactgtctccgaccacaagcccctcctccctccccctaaccc

SEQ ID NO: 230597 - DNA, 516 bp, Glycine max
ggcgctgtgcaactattcgctagccccgacagaacgattgcatgcctgccggtcgactctagagagatcacctcggggaattccaattccacattttcaagaaataaggaggcaaaaatgttcatatatgaattggaattatttgttttcttattaggcctatcctgaagccaaaggaaatgagatcggaattcctcggggaattccaattccacattttcaagaaataaggaggcaaaaatgttcatatatgaattggaattatttgttttcttattaggcctatcctgaagccaaaggaaatgagatcggaattcctcggggaattccaattccacattttcaagaaataaggaggcaaaaatgttcatatatgaattggaattatttgttttcttattaggcctatcctgaagccaaaggaaatgagatcggaattcctcgggggtaccgagctcgaattccctatagtgagtcgtaataaattccgtatcaaggtaaaaccggtttccggtg

SEQ ID NO: 230598 - DNA, 378 bp, Glycine max
cactcataacacaaagcacaaagcaaagctcatccttgagttaaaaaatggcagcagcttcttccatggctctctcatccccatccttggctggcaaggccgtgaagctgggcccatcagccccagaagtgggaagggtgagcatgaggaagaccgtcaccaagcaggtctcctcaggaagcccatggtacggcccagaccgagtcaagtacttgggcccattctctggcgagcccccgtcctacctaaccggtgagttcccaggcgactacggctgggacactgctgggctttccgcagacccagaaaccttcgccaagaaccgtgaactcgaagtgatccactccaggtgggccatgctcggagccttgggctgcg

SEQ ID NO: 230599 - DNA, 407 bp, Glycine max
aagaaatttaagtgaggagctagagaatgatgatgaagtctgctatgtgtgcagtggtggttgtagcacttcttcttctggcggaggtggggcccatggctgaggctgtgacatgcaccccaacagagttgagtccgtgtcttccagcaatcacttccggtgctaaaccttccaatgcttgttgcacgaagctgaagcagcaaaaaccatgcttatgtggctacctcaaaaacgctagcttgaagcagtatgttaactctcctaatgcccgaaaaaccgttgcttcttgtgggattccctttccaacttgttaattaattaagccttcttataattaaagtgtgggatatatatatatatatagataaacagtttaatttatacacactttgatcctacaaagcatc

SEQ ID NO: 230600 - DNA, 409 bp, Glycine max
cagtggctcactgagacttgggcctgtggcccagcccatgaggatcaagtttacccctcgtcgaaaaaatcctacaagatcatcactgtattatgtgaacttggtggctattagagttggccggagaattgtggatatcccaccggaggctctagcgttcaatgctaacaccggcgccggcaccgtttttgattcgggtacggtattcacccgactggttgaaccggcctacaacgccgtccgaaatgagttccggcgacgaattgccgttcacaagaaacgcactgtgacaagcctaggagggtttgacacatgctacacagccccaatagttgcaccatcaataacattcatgttctccggcatgaatgtgacactcccaccggacaacatcttcatacacagcacg

SEQ ID NO: 230601 - DNA, 408 bp, Glycine max
aaaatattaaataaaaccgccacaaatttctccatagttatgggcacttccattctcgacgccctgaacgttcgcgtggaaggttccggcgacaagtaccttgtcctggcccacggcttcggcacggaccaatccgcgtggcagcgcgtgctcccttacttcacccgcaactacagcgtcattctctacgacctcgtctgcgccggcagcgtcaaccccgaccacttcgactaccgccgttataccaccctcgacgcctacgtcgacgacctcctcaacatcctcgacgccctccgcgtcccccgctgcgcctacgtcggccactccatctccgccatgatcggcatgctcgcctccatccgccgcccggacctcttctccaaactcatcctcatcggcgcctcccct

SEQ ID NO: 230602 - DNA, 420 bp, Glycine max
gacgtagcatccacgcgtacgtaaactcggaaatcggctcgagtgatgagtcaaatgttcatcataagtatttcaaggacaacccggattacaaatgccctgcttatagcactaaaaatgggatctacacagaagggtgtggattagacaacatagtgatgtcatggggacatgatgattacatgtatatggttgccaaggcaaatggcaccactttgccatctgcaggattgttcattatcagatatcattctttctatccattacacaaggaaggtgcatatactcacttcatgaatgaagaagacgttgagaatttgaagtggctcaaaatttttaacaaatatgatctctacagcaagagcaaagttctagttgatgtggagaaagttaagccatactatgtgtcactcattgaga

SEQ ID NO: 230603 - DNA, 442 bp, Glycine max
gacgtagcatgcacgcgtccgtaagatcggaaatcggctcgaggcaaccggaatttcatgcaaggatggaccacttttcgaactgccacacttgctgtatccggaaagggtttcattgcaaaggacatgtcattccggaacacggcagggccagtgaaccatcaagccgtggcactgcgtgtggattcagaccaatcagccttctacaggtgcagtgtggaagggcaccaagacaccctctacgcccactccctgcgacagttctaccgagaatgcgaaatctacggcaccatagacttcatctttggcaacggtgccgcagtgttgcaaaattgcaaaatatacaccagggtcccacttcccttacagaaggttaccatcacggcccaaggaagaaaaagcccacaccagagcactggcttttacatccaagatagctata

SEQ ID NO: 230604 - DNA, 407 bp, Glycine max
gtctctcacacactcctttcaatctccaattaattacttttcttcaatttgaagcgtgtctgaagttggttgaagcattgtgttattgttctggttttggtctccgaggtttgtgtcggattccgatgtattatgtaaaagaagctgcgcatgtcgaccccatgttcgtagctgataacaccaaccccaaggattattacaaagtgctggaggttgaatatgatgcaaccgatgaaaatatcaaattaaattaccgaagactcgcgctgaaatggcatcctgacaagcacggaggagatagtgctgttactgcaaaatttcaagagataaatgaagcttacaatgtattaagtgattctaccaagcgtttggactatgatttaactgggataagcaagattaaaaat

SEQ ID NO: 230605 - DNA, 397 bp, Glycine max
gtttgataattttgctgaagtgcacaaactctatgaaggtggagttacactacctacaaactttcttagcaagatcgcccctataccagtgatcaaggaaatttttcgaactgatggcgaacagttcctcaagtatccaccacctaaagtgatgcaggtggataagtctgcatggatgactgatgaagaatttgcaagagaaacgattgctggtttaaatccagatgtcattaagattatagaggagttcccactaagtagcaagctagatactcaagcctatggtgatcatacctgtataatagcaaaagaacatttggagcctaacttatgtgggctcactgttgagcaggctatccaaaacaagaagttgttcatcttagatcaccatgactat

SEQ ID NO: 230606 - DNA, 390 bp, Glycine max
  unsure (1)..(390): unsure at all n locations
cataacacaaagcacaaagcaaagctcatccttgagttaaaaaatggcagcagcttcttccatggctctctcatccccatccttggctggcaaggccgtgaagctgggcccatcagccccagaagtgggaagggtgagcatgaggaagaccgtcaccaagcaggtctcctcaggaagcccatggtacggcccagaccgagtcaagtacttgggcccattctctggcgagcccccgtcctacctaaccggtgagttcccaggcgactacggctgggacactgctgggctttccgcagacccagaaaccttcgccaagaaccgtgaactcgaagtgatccactccaggtgggccatgctcggagccttgggctgcgtcttcncggagttgct

SEQ ID NO: 230607 - DNA, 403 bp, Glycine max
ctctgcacaacaattcgagattccaaccatcgatctcaattttcaaccttaacctctaagaatgtcttacgcttatctcttcaaatacatcatcatcggtgacaccggagttggaaagtcttgtcttctacttcaattcacggacaagcgctttcagcccgtccatgacttgaccatcggtgttgaatttggtgccaggatgatcacaattgataacaagccaatcaagttgcaaatatgggatacggctggtcaagaatcattcagatctattacaaggtcttattacagaggggctgcaggtgcattgcttgtttatgatataaccaggagggagacatttaatcatttggctagctggttggaagatgcaagacagcatgcaaatgcaaatatgactaat

SEQ ID NO: 230608 - DNA, 416 bp, Glycine max
atctggtgcttcatggttaccctgatttgttgtttgagcagaaatcttggattgcggtgaatactgggagttttctgtttaggaactgtcagtggtctttggatttgcttgatgcttgggctcccatgggccccaaggggccggttcgcgaggaggccgggaagatcttgacggccaatctcaaggggaggccggcgtttgaggccgacgatcagtccgccttgatatacttgctgctgtccaagaaggagaagtggatggacaggacgtttcttgagaattcgttctacttgcacggttattgggccgggttggttgatcggtatgaggagatgattgagaagtatcacccagggttgggggatgagaggtggccgtttgtgacacattttgtccggtgttaaacgttttggaat

SEQ ID NO: 230609 - DNA, 433 bp, Glycine max
gacgtcaggaccacgcgtccgtaaactcggaaatcggctcgagcggctcgagcgtgcctctagggttatcatatctccatttccatttcctctctctcagtttccaagaatcttaagctatgggaaagtcttacccaaccgtgagcgctgattaccagaaggccgttgagaaggcgaagaagaagctcagaggcttcatcgctgagaagagatgcgctcctctaatgctccgtttggcatggcactctgctggaacttacgacgtgagctcgaagaccggtggtcccttcggaaccataaagcacccctccgaactcgctcacggcgctaacaacggtcttgacatcgctgttaggcttttggagccactcaaagcggagtttcctattttgagctacgccgatttctaccagttggctggcgttgttgccgt

SEQ ID NO: 230610 - DNA, 417 bp, Glycine max
  unsure (1)..(417): unsure at all n locations
gacgttacgaccacgcgtccgtaaaatcggaaatcggctcgaggcggtggctgcaaaatcccagaacgataactttgagtatgtgtcattcaagacaatgatagaccctcgatcggaaaccttgcangggcaaactcattgttgaacgcattgccagaggaagtgattcagcacacttttaacctaaagagccagcaggccaggcaggtgaagaacaacaaccctttcagcttcctggttccacctcaggagtctcagaggagagctgtggcttagagagccctttttgcatgtgctaccacacttttgtccttttgggctctagctagtgctggtagcagtaaataagaatgaataaaagaaacaaaggcttagatgccctttgttaagtgtagaataacgggtatagtaactatg

SEQ ID NO: 230611 - DNA, 361 bp, Glycine max
gtaactgcctagattcttcagccaaagtagaagctgctcacagttccagaaccccttctggaatttcaaaaactagtccttcatctgttccttccaacttatctattctgtcatatagtgaagcaagtgatttctcaaatcttccaacaccaaggtctgagggcgaaatcttgtcttccccaaatcttaaggcctttaccttcaatgagctaaagaatgccaccaggaactttcgcccggacagtcttcttggtgaagggggatttggttatgtttacaaggggtggattgatgaacacacatttacagcttcaaaacctggatcaggaatggttgttgctgttaagaaactcaaacctga

SEQ ID NO: 230612 - DNA, 217 bp, Glycine max
cggaagcaaagtttccgcgcattttgtcacataagaagaaagaagtgtccatccttttcttcttcgtttgtattgtttatgaatttttattattgtgtttttagacagttgtatggcactatatcacatgaatgcattttggtttgtaacctgctacgtttgcaaggggttgtgaagccaatttaataataaataaaaacaaatgctttctctcaaa

SEQ ID NO: 230613 - DNA, 387 bp, Glycine max
ccttgcccttggggcaccaccaccatcaccaaccggcggcggcgactatacacccgtcgcaaccgccgcagtgtcagccgcaacccgaagttcctcgccggagctccgatatggagaccgataaggatatgtcagctactgtcattgaggggaatgatgccgttactggccacataatctccaccacaattggaggcaaaaatggggaacctaaacagaccatcagttacatggcagaacgtgttgttggcactggatcatttggagttgttttccaggcaaagtgcttggagactggagaggcagtggctattaaaaaggtcttgcaagacaggcggtacaaaaatcgtgaattgcagttaatgcgcttaatggatcacccaaatg

SEQ ID NO: 230614 - DNA, 424 bp, Glycine max
cagaattctcaacctcaaggttcacagaatgagaatgatccaaataatacaactatttttgttggtaatttggatcctaatgtcactgatgatcatctgaggcaagttttcagccagtatggagaattagtgcatgtgaagattccagcaggcaagcgatgtgggtttgtccaattcgcagacaggagctgtgccgaagaggcacttcgggtgttgaatgggaccctgttgggtggtcaaaatgttcgtctttcatggggccgcagtccttcaaacaaacaggctcaggcagatccaaaccagtggaatggtggtgctggttctggtggtggatactatgggtatgctgcacaaggttatgaaaattatgggtatgctcctgctgctggacaggatccaacatgtatggcagttatccggggta

SEQ ID NO: 230615 - DNA, 378 bp, Glycine max
gtttagctttgatgatgatgttatggcaattggagatgtgttctatgctgaagtggaacgggaatgggtgatgcaaccgggtgggccaattgctcacaaatgcacgactctcattgaacctaatcggcttattttactcactgctcagcggtttattcagacattcctgggaaggaacttcgttgcattgcactttcggagacatgggtttttgaaattctgtaatgctaagaagccaagttgcttttactccattactcaagctgcagattgcatcttgagggtcgttgagagggccgatgcacctatcatctatctttctacggatgcagcagaaagtgaaaccggtctgcttcagtcactagttgtgttgaatgg

SEQ ID NO: 230616 - DNA, 428 bp, Glycine max
gacgtttgatgcacgcgtacgtaaactcggaaatcggctcgaggtgaggggtagtgatagaaggataaggtgaggtgacgataaaccgtggaaagtggaaacggtggtgtagtctgtgagtgtcattgtgaagttggagacaatgttagcttcttctctctccttcctccattcttgttcatcttcctctttcttattgtcaatttcacttcctaatcccaaaccctctcattccctacctttcgtgctcgaagccaaagacaggacccgtagggaagacaggtccgcgcgccacactcgcatcagaaagaatgtcgaatggacacccgagaggccgatgctgtccgtgttccggtcgaacaagcatctctctgtgcaggtgatagatgacaccaagatgcacacgctcgcttcgatttcgacaatgc

SEQ ID NO: 230617 - DNA, 420 bp, Glycine max
aacattacatccacgcgtccgtaaactcggaaatcggctcgagcgcgtcgctgctccgtaccagtttcactgcataaatttgagagaaaactctgcaaacatgttggtttatcaggacctccttacaggtgatgagcttctctcggactccttccgttacaatgaaattgagaatggaatgctgtgggaagttgaggggaagtgggttgttaagggagcagttgatgttgacattggtgcaaacccttctgctgagggtggagaagatgagggagtcgatgacgcagctgttaaggttgttgacattgttgatacattcagacttcaggagcaacccgcttttgataagaaacagtttgttaccttcatgaagaggtttatcaagaatttgactcccaagctcgatgcagagaaacaaga

SEQ ID NO: 230618 - DNA, 400 bp, Glycine max
cttctttctcacactcacagtgctcaaggtttcagcatcatcctcagtgattttctacaacaagtgccagcacccagtgtggcccgggatccagcccagcgcaggaaagcccgttctggcccgcggaggcttcaagctcgccccaaaccgggcctactccctccagctccccgctctatggtccgggcgcttctggggccgccacggctgttccttcgacgccggcggccgggggcgctgcgccaccggggactgcggcgggtccctgttctgcaacggcatcggcggaagcccaccggcgaccctggcggagttcaccctgggcaacgagcaggacttctacgacgtgagcctggtggacgggtacaacctacccatctccatcacccccttcaaggga

SEQ ID NO: 230619 - DNA, 379 bp, Glycine max
ctgcgatctgtttcgtgttgtagctagctcctcgaaaatgctggcacgcctcgccgcgagtcgcttcaacgagatccgtcagattttccgtcagccttctagggctttctcaaccgctctgaactaccaccttgacacaccggacaacaaccctaaacttccatgggaattcaccgaggccaatcaagcaaaggttaaggagattttgtctcactatccatccaactataagcaatctgctacaattcctcttttagatcttgcccagcagcagcatggaggttggctacctgtttctgcaatggatgcggtagctaagattgtagaggttcctcccatacgggtgtatgaggttgccacattttactccatgttcaat

SEQ ID NO: 230620 - DNA, 389 bp, Glycine max
tcggctcgagatcaatctcccagcaaattcctgttggggctttagcaacagctctggctaatgcttctccagagcagcagaggacgatgctgggtgagaatctctacccccttgtggaacagttagagcctgacaatgctgccaaagtgacaggcatgcttcttgagatggaccagactgaagttctgcatttgctcgagtcgccagaagccctgaaagcaaaggtggcggaggcaatggacgtcctaagaaatgttgctcagcaacaggctggcggtactgcggatcagctggcttcattatctcttaatgacaaccttgtttcttaaggtttatattttggatttatttagtgacgatgggttgttattttcggcactggctctgat

SEQ ID NO: 230621 - DNA, 405 bp, Glycine max
gttttctctctagattctgctcttaaacgccgtcgttttcaaactctttttttccccttcgcttctctgtctttgtaaccgaaaggggggaaaatataattaacaccgatttcgcgaccaattcttcttctgcgttgaattgggacaacgagaaattggatctcagtttttggcaggaaataaaaattgcatttgagtgtaaaataacagagtatagtgtagggccttgttcttgatactgtgctaaatttgttggatggcggagaaatcatgcatcaagcgccttcagaaggaatatagagccctttgtaaagagccagtttctcatgttgtggctcgtccttctccaagtgatattcttgagtggcattatgtgttggagggaagtgaaggaacaccttttgc

SEQ ID NO: 230622 - DNA, 406 bp, Glycine max
attcaacttaagaagatcaatatggccaccaccactacccagcctccctctaatatctgttttttccttctgttgttgcttctagcacactttcatttgggcataagccaacttgagctgaattactactctaaaagctgcccaaaagctgaagagatcatcaaggaacaagtcacacaactatataacaagcatggaaacactgccgtttcgtgggtcagaaatctcttccacgattgcgtggttaagtcatgcgatgcatcattactgttagcgacggtgagcgatgtagtgtcggagcagacatcggatagaagttttgggatgagaaacttcaagtacgtaaacactatcaaagcagcggttgagaaagaatgccccttcacagtgtcatgcgctgacattg

SEQ ID NO: 230623 - DNA, 383 bp, Glycine max
  unsure (1)..(383): unsure at all n locations
tttctacacatccctagctctgtcgttccgtcgttgacgatggcgtttcgggtgcgaagccctgacctccgctctctctttcttctctctctcttgtccatcgcttccgccaatgtcttcttcgaagagcgtttcgatgacgggtgggaaaatcgatgggttaaatcagattggaaaaaagatgagaacgtggctggggagtggaaccacacctctggtcaatggaatggagacgctaatgacaaaggtattcaaaccagtgaggattacagattctatgctatttcagctgagtaccctgaattcagcancaagggtaagacactagtctttcaattttctgttaagcacgaacagaagcttgactgttgtggtggctacat

SEQ ID NO: 230624 - DNA, 397 bp, Glycine max
agccattcaggttggatacaggcatattgactgtgctagtgcgtataagaatcaagcagagattggttctgctcttaagaagctttttgatgatggtgtggtgaagcgtgaggacttatggatcacttccaaactctggtgttcagatcatgcaccagaagatgtgccaaaagcattggataaaacattacaggaattgcaacttgactatcttgacctctatctgatgcactggccagtccgcatgaaaagtggaacatttggactcaataaagaatatcttgagcaaccagacattcccaatacatggagagcaatggaggcactctatgactcagacaaggctagagccataggagtgagcaatttctcttcaaagaagcttcaagatttgtta

SEQ ID NO: 230625 - DNA, 402 bp, Glycine max
gtaaatctttcagacagagtagttttgtccatggtcaactcacatggatggactctcgaggtgctaagccttgatggttgtaaaagagttggtgatgctagcttgatggcaattgcaggcagttgcccattgcttgctgatctcgatgtttccaggtgtgcaatcactgatacaggtatcgcagcccttgcacgcggaaagcagattaaccttgaggtactttctttggcaggttgtgcattggtttcagacaagagcgtgcctgccttgaaaaaaatgggctgttcccttgctggattaaatatcaagcgttgcaaaggaatcagcagccgctctgtcaacaagcttcaggaacatctctgcatgtgtgacatcctctactgaacaggaaatgcctcagca

SEQ ID NO: 230626 - DNA, 499 bp, Glycine max
gggccgcgctgccttaatgagtcaggttgcgtatagtagactcctgacgtcgcgaccacgcgtacgtaaactcggaattcggctcgagctcgagccgcactgttgtgccatgtacatggtcagcatcagaaactttgaagatgaagccagacggggttcttttcagcaatggccctggagatccgtctgctgttccttatgccgttgaaacagtgaagaatattatcggaaaggtgcctgtttttggaatttgcatgggccatcaattgctaggccaggctttaggaggtaaaaccttcaagatgaaatttggtcaccatggaggaaatcaccctgttcgtaaccttcgaagtggccatgttgaaattagtgcccagaagcacaactatgctgttgaccctgccacactgccggaaggagtggaggttacgcatatcaatctaagtgatggaagtcgtgccggtcttgccttcaccgctcaaccatcttagctctcttc

SEQ ID NO: 230627 - DNA, 406 bp, Glycine max
ttgatgagtctttttaaagacctattttatattaaagttttatataaatttagcttctctttatattggacattattgacttataaattttttagaaaaattttatataaattatagttttatttatataaaatcaaaattatgattattcaaagcatgaaataaagatgaaaataggtgaactaaattctataaaagtcaagtttagaggactccatcatctgccactatgatggcgttgattggctcagtgtgtgccttgatggtctctatgcacttcaggtctgagattctccacactttcaccgttttgtccagggaagctgtgtatagaatgtcctctgctgtgtttattgccattgccgtgattagccccttgtgcatctgttaagtcatcatgtcaaac

SEQ ID NO: 230628 - DNA, 399 bp, Glycine max
ttcagcgatttcgatctcgcatagcattctacaatggccactattccagttaaccccaagcctttcttgaacaatttgactgggaagcccgtaattgtgaaactcaagtggggaatggagtacaagggctatctcgtttccgttgattcctacatgaacttgcagctggccaacactgaagagtacattgagggacagtttactggaaatttgggagagattttaatcagatgtaacaatgttctctaccttcgaggagtaccggaggatgaggaaatcgaagatgttgcagaagactagatagtgataaaagctgctaatggctatgacataaaatgaactcgaattttctactgtttttgtatcttaacttaaatgtaggtttttttgtagttgtgt

SEQ ID NO: 230629 - DNA, 404 bp, Glycine max
gtcgtctcaagggccaactcatgatgagattgattttgaattcttgggaaacgtgagcggtgacccttacattctccacacaaacgtgtttaccaaaggccaagggaacagagagcaacagttctatctctggttcgaccccaccagaaacttccacacttactccatcatctggaagcctcaacacatcatattcttggtcgataacattcccataagggtgttcaagaatgctgagactattggcgttcctttcccgaagaaccaacccatgagaatctattctagcttgtggaacgctgatgactggccaccagaggtggtttggtgaaaactgattggtcaaaagcaacctttacagcatactaccgcaatttcaaagccacagagttctccacctcttc

SEQ ID NO: 230630 - DNA, 410 bp, Glycine max
gcctgaggacaatgtggcaacaaaggaagccttggtattggagttaagcagtcaacaagaatacttgaggctgaaagcacgttatgaagctctacaacgttctcaaaggaaccttatgggagaagatcttggccctctaagcagcaaagagcttgaatcacttgaaaggcagctagattcgtctttgaagcaaatcagatcaataaggacccaattcatgctggatcagctttctgatctacaacgtaaggaacactttctaggtgagtcaaacagagatctcagacaaaggttggaagagtttcaaataaatccactccaactgaatcccagtgctgaagatatggggtatggacgccatccaggtcagccccaaggccatgctctctttcaaccattggagtgtgagc

SEQ ID NO: 230631 - DNA, 381 bp, Glycine max
gagaaaagcaaaaacaacaatgaaaaggatatagaagctactgtagtgagtggtaatggaacagatacaggacaaataattacaactgccattggtggtcgagatggacaaccatatcagacaatctcttacatggctgaacatgtggttgggactggttcttttggtgttgtttttcacgccaagtgccttgaacctggtgaatctgttgccattcataatgtgttgcaatacaggagatataagaatagggaactccaagttatactcacagttgactatcctaatgttgtcaaactaatgcactacttcttttcaactaccgatcacgatgacttgtaccttaacctggttttggagtaagtacctgacactgtctac

SEQ ID NO: 230632 - DNA, 407 bp, Glycine max
ccctgttggatagaatggaggttgttgctattgctgggtatattactgatgagaagatgcatattgctagagattatctggagaagaccactcgtgaagcttgtggaataaagcctaaacaagtggaagtgactgatgctgctattcttgccctaatagaaaactactgccgagaagcaggggtcaggaatcttcaaaagcacatagaaaaaatttaccgaaagatagcgctacaactcgtgaggcaaggggaaatgattgatgcaaccgtggaaccaataaaagaaaatatagactctgatgaatttggtcaaaatacagttcaaaataagaactccgagttggtggagggtagtgatcctgaaaaagagggtgaaacctctgataaagttgacaaggtgcaaaca

SEQ ID NO: 230633 - DNA, 403 bp, Glycine max
tagagaatgatgatgaagtctgctatgtgtgcagtggtggttgtagcacttcttcttctggcggaggtggggcccatggctgaggctgtgacatgcaccccaacagagttgagtccgtgtcttccagcaatcacttccggtgctaaaccttccaatgcttgttgcacgaagctgaagcagcaaaaaccatgcttatgtggctacctcaaaaacgctagcttgaagcagtatgttaactctcctaatgcccgaaaaaccgttgcttcttgtgggattccctttccaacttgttaattaattaagccttcttataattaaagtgtgggatatatatatatatatagataaacagtttaatttatacacactttgatcctacaaagcatcttgacacaagcattca

SEQ ID NO: 230634 - DNA, 398 bp, Glycine max
ttcatatcccacggaaacacagccaggcttgccatggagcacggcgatatatagttggcccatatctgcggcatgattgcctcagatgagaaacgccatgagactgcatacacgaagatactggaaaagctatttgaggtcgatcctgacggtacagttatggcgtttgccgacatgatgaggaataagattgccatgccagcacacctcatgtatgacggccgtgatgacaacctgtttgatagctactcttctgtcgcgcatcgcattggggtctacaccgccaaggactatgctgacatacttgagtttctggtggggaggtggaaggtggagcagctaactggactttcaggcgagggaagaaaggctcacgaatacatttgcgggctgccgcc

SEQ ID NO: 230635 - DNA, 403 bp, Glycine max
gggcggtcaagaaatctcaaaaacaccgtcctcttctaagagaacactaagtcagggttcagttgatatatatgctgctcagtgcaaaaattgcttgaaatggagagagattgatacacaggaagagtttgaagagattagaagtaaagttgctgaggaaccttttctttgcagcagaaaggctaatagttcctgtgatgaacctggtgatattaaatatgattcctctcggacatgggtgattgacaagcctaacctcccaaagactccacaaggttttaagaggagcttggtgcttagaaaagattactccaaattggacgcttactacatcacacctgcaggcaaaaaactgagaacccgcaatgagattgctgcgtttctaaaagataatccagaattc

SEQ ID NO: 230636 - DNA, 389 bp, Glycine max
ctacgttctaggagaccaatatagatcagattccaaaacagttaaccaacaagcttatttctatgctaaatccctcaaactcaccaacaaagatgtctttgtcttggacgttgacgacactactctctctaatctccagtattttgctaaccatggatttggtgtggaaccacacaatacgacggcgtttaagaactgggttcttgatggcgaggcattcgcactgccagagactcttaaaatgtacaacaaactgttggctctcggcatcaagattgtattcttatcagaaagaccactgagtctaagggatgtaacagccaagaacttaaaggaggttggattcaacacatgggagaagttaattctcaaggattcatctgagtact

SEQ ID NO: 230637 - DNA, 402 bp, Glycine max
caaatgaaaactgggtttggtgggcaatacagcaatgaggtggcatgtgccagttggaggcttggcgtggaagcaaacaacgtagtcaagtggcaaactgttcctgcagcttgccgagagtacatagctgactacgttctaggagaccaatatagatcagattccaaaacagttaaccaacaagcttatttctatgctaaatccctcaaactcaccaacaaagatgtctttgtcctggacgttgacgacactactctctctaatctccagtattttgctaaccatggatttggtgtggaaccacacaatacgacggcgtttaagaactgggttcttgatggcgaagcattcgcactgccagagactcttaaaatgtacaacaaactgttggctctcggcatc

SEQ ID NO: 230638 - DNA, 391 bp, Glycine max
cattttggccgttcaattctgagtcttcgtcaagaacaggttcactccatttccatggaagggtcaagcttggaggctgagttggaatcctttcagcaacacgtcactgaccggttccttgaactcacttcggttgttcatgatgatttgctttcgctctcgtgggttgggaagctccttcattgcttcctgtgttgccaagaggaattcaaggccattctccacagccacagggctcaggtgttgagacccccattggatcgcatggtgtctgaatactttgagcgcagtgtgaaggctttagatgtttgcaatgccattcgtgacggtattgagcagattcgccaatggcagaagctgttggagattgtgctctatgcattggggcatc

SEQ ID NO: 230639 - DNA, 407 bp, Glycine max
  unsure (1)..(407): unsure at all n locations
ccatccgtcacgccgtgacccaacggggccccttgtggatcatcttccaacgcagcatgatgatcaaattgaatcaagagctgatgatttcctccgacaagaccatcgacggtcgcggcgccaacgtggtgtgtagggacggcgctggcctcaccattcagttcgtgaacaacgttatcatccacggagttcgcatcaagaacatcgtacctaaggagggtggcatgattagagactcttacaaccatgttggcctgagaacagagagtgatggtgatgccatctccattttcggagccagcaacgtttggatcgatcatgtttccctctctaactgtgctgatggtcttatcgacgtcatccatggctcnactgccatcaccatctcaaattgccacatgaccaaa

SEQ ID NO: 230640 - DNA, 405 bp, Glycine max
  unsure (1)..(405): unsure at all n locations
cgaagatgttactgttggtaacttttttgctgctttacttggaaacaagtcggcacttactggtggcagtgggaaggttgtggacagtggacctgatgatcatatatttgtatactatactgaccatggaggtccaggggtgctcgggatgcctgctggtccttacttatatgcggatgatctgattgaagtcttgaagaaaaaacatgcttctggaacgtataaaaacctagtattttatctggaggcatgtgaatctgggagtatctttgaaggtcttcttcccgaagatatcaatatttatgcaaccacagcttccaatgcagaagaaagtagttggggaacatattgccctgnggagtatcctagtcctcccccagaatattcaacctgcttgggtgatct

SEQ ID NO: 230641 - DNA, 409 bp, Glycine max
tagacacgtaatcaaaaccatgcagatacgaacctgccactccatcaccacccaaacccttccacaacttccgtgttcttctagaaaagcccaccaccgccaccttcttccgccgttaaacgctgcggtttccgcggcgccgttcaaagcccggaaggcccactcaatgcctccagaaaagaaagaaattttcaagtccttggagggatgggcctcggagtgggtcctaccgctgctgaagcccgtggagcaatgctggcagccacaaaacttcctccctgacccctcccttccgcatgaagagttcagccatcaggtgaaggagcttcgcgaacgcactaaagagttacctgatgagtactttgtggtgctggtgggtgatatggtcaccgaggacgcgcttcccact

SEQ ID NO: 230642 - DNA, 404 bp, Glycine max
ggagaggaagattctgaagatggtggaccatccgttcctccctacgctctacgcggagttcgaggcttcgaatttctcatgcattgtgatggagtattgctccggtggggacttgcactcccttcaacacaaccaccccaataaccgattctctctctcctctgccaggttttacgcggctgaagtactggttgcgttggagtatctccacatgctgggaatcatctacagggatctgaagcccgaaaacgtgttggtcagatcagacggtcacatcatgctttccgacttcgatctctctctatgctccgatgctatcccagccgttgaatcccctgactgttcactggaccccgcattcgcacccgcgttacgctacactcgccagtactccacccccttct

SEQ ID NO: 230643 - DNA, 400 bp, Glycine max
gcatgaatcttgccattggtgacattcgcgccgagcatgaggcgcattcgagggagcttgttgagaaaggcatgaagatggaggctgaccttagggcaaatgagcctttgaagaatgaggtcatgcaactgcgatctgaagttaagaaacttaacaatctcaaacaagaactgacagggaaggttcagacactcactcaagatgttgcaaggttacaagcagacaatcaacaaattcctatgatgagggctaagattgatggcctgcaccaagagctaatgcatgccagaaccatggtggattacgaaaagaaggcaaacatggagttcatggaacagaggcagtcaatggagaaaaatttggtttccatggcccgggaagttgagaaattacgtgctga

SEQ ID NO: 230644 - DNA, 358 bp, Glycine max
atttttcaagtgacttaaggtttcaaacctaggaagttggaagtcatggcagcaacattgatggcagcaacaagttctggcactcttaaagcaactcctttcctaggccaaggcaagggtgccaatgccaatgctcttagggatgttgtttccatgggaactgggaagtacaccatgggcaatgatttgtggtatcgaccagacagagtgaaatacttgggaaccttttcagctcagaccccttcatacttgaaaggagaattcccacgggattatggattggacactgctggcttatctgctgaaccggaagcaattccaagaacagggctcttgaggttatccatgggagatgggc

SEQ ID NO: 230645 - DNA, 403 bp, Glycine max
caaaaatattattaagatgatcaacattattggagcacttgttccactctttggaatttcccttccacagttgtgtgtaagcacaagacacataaacccttgtgcctgcaatcacaacttttggtgagtctgctgtggatgtatggaacaatgacaatcttcccacccttttcaaggctgattaacctccttatgggaaggacttttgtaaacaccaacccactgggacgttttgcaatggccaattagctactgatttcactgctgacacattgggtgtcaagacctatgctccagcatatcttatcccacatgcatcatggaaaaacctccttattggagcaaactttgcttcagctgcaactggttatgatgaaaatgctgctactttgaatcacgcgat

SEQ ID NO: 230646 - DNA, 390 bp, Glycine max
aaatggtgctgttgaaacttgtggtcaaagctttcaccgatttgacaagtaccttaacttttcaaatcctcacatcgcaagaaattttgatccaaatgcttgtggttgggcatacgggatgaacatgtttgatctgaaggtgtggaaaaagaaggatatcaccggcatatatcacaagtggcagaatatgaatgaagacagggtgctgtggaagctggggacgttacctccggggctaataacgttctatgggttgacacatccactagataaatcatggcatgtacttggtttgggttataatccaagtttggatcgatcagagattgagaatgcagcagttgtacactacaatggtaatatgaagccatggttagaaattgccatgac

SEQ ID NO: 230647 - DNA, 395 bp, Glycine max
agcatctttacctcttccattttatacaccagtatcgctctgtatttgtttcatcctcctaactgaaccctaatttcttctgggaaactctattttctctaatatggagcaatactggtctgggagtgccatcaatgaaaacaaaggaatggtagataatttgcatcgttatggagtaatcacatctagaaaggtagctgaagtaatggaaaccattgatagagctttgtttgtacccagcggcggcggactccaaccttatgtggacagtcctatgccgattggctacaatgccaccatctctgcgccgcatatgcatgccacctgccttcagttgcttgagaagaatttgcaacctggaatgcgtgttcttgacgttggctccggaacgggat

SEQ ID NO: 230648 - DNA, 409 bp, Glycine max
cgagaacaccgcaacgatgaaagagggtcgggccgaggcctccatggtaatgttcggagccctcgacgagctcttcgagaaaacccgcgtccgaccaaaggacgtgggtgtcctagtagtaaactgcagcatcttcaaccctacaccatcgctctcagcaatgatcataaaccactacaagatgagagggaacattctgagctacaacctcggaggaatgggttgcagcgccgggatcattggtgtggacctggccaaggacattcttcaggcgaacccaaataactacgcggtggtggtgagcacggagatggtggggtacaactggtaccaggggaaggataggtctatgcttatcccgaatagcttcttccgcatggggtgttccgcggttctgctttccaaccgt

SEQ ID NO: 230649 - DNA, 406 bp, Glycine max
gcatgtcttcctccggctatagttgttgcagatctcggatgttgtaaaattagtgtatgatgtgaagctatgggctggaaaatgtggatgtaggagatttcgggacgaaaggcctcaaaacgcttcgtcgtttgtggttactgagtcctgagtgatcttgtcatccgacctttgccatgacaggtgcgcttgcttggcaggtcaaaatatgttaataaaaaaagttttattggtttagggagagatcgcacgggagttgcccggggtctctctctcgtgtggtgtgtggtgtttgctgtgctctccttttcgttatgccttttattattacctatctgtcgctccactccgtattacgactctggatcagagggatacatcagaggattcgctccaactcctatcg

SEQ ID NO: 230650 - DNA, 398 bp, Glycine max
  unsure (1)..(398): unsure at all n locations
gtgttcatggacactggaagcatcacgatgtcaccgttaaggacgagaagacccttctcttcggtgacaagccagtcactatttttggacacagaaaccctgaagagatcccatgggggtcaactggagctgacatcattgttgagtccaccggagttttcaccgataaggacaaggccgccgcacatttgaagggtggtgcaaagaaggttattatttctgcccccagtaaggatgcccccatgtttgttgttggtgtcaacgagcacgagtacaagccagagcttgatattatttccaatgctagctgcacaaccaactgccttgccccacttgccaaggttatcaatgacaggtttggcattgttgangggtttgatgacactgttcattccatc

SEQ ID NO: 230651 - DNA, 318 bp, Glycine max
ctctacccgttcgtctccgtggtggcatgcatatcgtcgtcaataatcacactggtatcttcggtaccctacaggtctagagctctgaaaccattgacaacgtcgaggccacgatgcaggacaaggatggaatcccccctgagcagtaacgtcgcatcttccccggaaaggaacttgaggactgacgcacccatcggagactacaaaatgcgtaatgaatcaagccttcacctcgtcctccgtcacctttgtggcaggcagatccgcgttcgaatcctcaccggcaagacaaataccctacaagtccagagctccgac

SEQ ID NO: 230652 - DNA, 388 bp, Glycine max
ggattcaaagccattgcccttactgttgataccccaagactaggacgcagagaagctgatatcaagaacagattcacactgccaccatttttgacattgaagaactttgaaggattggaccttggaaagatggacaaagctgatgactctggacttgcttcatatgttgccggtcaaattgatcgtactcttagctggaaggatgtgaagtggcttcaaacaatcaccaaactgccaattctggtgaagggtgtgctgactgctgaggacacaaggatagctgtacaaagtggtgcagctggaattatagtgtccaatcacggagctagacaacttgattatgttccagccactatatcagccttagatgatgttgtcaaagctgctg

SEQ ID NO: 230653 - DNA, 399 bp, Glycine max
gggtgggcttgtgaaaacggattggagcaaggtcccattcacagcctcatacaaaaacttcacttcacaagattcttcctccaatggccaatcactggacgccacggggcaggcaaagatcagttgggtgcaaaagaattagatgaattagaattaatgcactgataacagacgtttccttcaaggccttcctccagaatgcgctattgcatgagaatatgaaattcaatgttgcatatcactagtaaatgatcctcatgaacgtgacacatatgtgttgcctattacgttaagtgactttcctagtgtaattagctcaattaaacctgttactattgttggtttgtgctttgttgatcactactccattgtttgttgcgatagatacttagaccgtgc

SEQ ID NO: 230654 - DNA, 398 bp, Glycine max
catttggaaagtgttgtttttctttttttcatttgcattgcaaagcaaaaaccttgcaaattgcaatggcttccaacaaggttattgccaccatcttggttctttctctccttgcctactcaacatcattcaccaatgcatgtggcacatgccacccaaaacctactccttctccccctcctccatcagggaagtgccccaaggacacattgaagctaggggtgtgtgctgatgttctaggacttgttaatgttgttgttggttcccctgtctctagcaagtgttgtgcattgcttgaaggtttggctgattcggaggctgcactttgcctttgcactgctattaaggccaatgttcttggaatcaacttgaatgtgcctatcacactcagtgtgcta

SEQ ID NO: 230655 - DNA, 415 bp, Glycine max
agagagaaagaactgacctcagcggcggcggcggcggcaacagaagaacaaccaccaccacacacaatgggtcgcgtgagaacaaaaacggtgaagaaatcctcccgccaggtgattgagcgttactactcgcgcatgaccctcgacttccacacaaacaaaaagcttctcgaagaagtggccatcatcccttccaagaggctgcggaacaagatcgcgggtttctccacgcatctcatgaagcgcatccagaagggtcccgttcgcggcatctccctcaagctccaggaggaggagcgcgagcgccgcatggacttcgtccccgacgtctccgccatcaacaccgaccacatcgaagtcgacaaagaaacccttgacatgcttcattccctcggaatcaacgacatccccggca

SEQ ID NO: 230656 - DNA, 359 bp, Glycine max
ccctaacccgcttcgaaacgtggcttcctcatgctcgcaaaagctctctcgaagaaaaccttcgtcttcttcgtctacgtcgtctcaacacacacccgggtctacacggatcgtttaccgagaatctcggatcccatcggaatccgatttcccgatctggcagcagaactggttcaacgcattgctcttcgtcatgggtctcggattcttcgccctcaccattttcctcttcctcactctcgactctgacatcgctccttcttccaccgtctccgcctctgccactgacgctttctccgaacgcgtcgatgtgcaggttacttaaggcacggttctgaagcttatgcacgagaagacca

SEQ ID NO: 230657 - DNA, 406 bp, Glycine max
  unsure (1)..(406): unsure at all n locations
cggttaaagtaattcgaaacaagcaaactagtcaatctgaaggttatgggtttattgagtttaatagtcgtgctggagctgagagaattcttcaaacatataatggggcaataatgccaaatggggggcagagtttcaggttgaattgggcaacttttagtgctggtgagaggtcgcgccacgacgattctccagattacaccatatttgttggtgacttggctgcagatgttactgattatcttcttcaggagacatttanggctcgttataactcggtgaagggtgcaaaagttgtcattgatangctaactggccggaccaagggatatggctttgtaaggttttcagatgagagtgagcaagtgagggctatgactgagatgcaaggggttctttgctcaac

SEQ ID NO: 230658 - DNA, 405 bp, Glycine max
gtcaataatgagtaatatgaagttattaaattctgtgctgcaagtgaatcaatttgcaatagatgttgaagttgtaggacaaggcaagccacaaaatggtcttaagggaggaaatgaagctctggattttctggatgttgaaaagctccattccctgtctcagaatgaactgttggaatgttttcattcattgggagatcaattgatctatttatggaaaatatttctaaagttccatagggataacaaatcaaggattttaggatttttacgtgatgcatgggtgaaggaccggaaagctgaatggtcaatatggatgctatattctaaggtagagatgcctcatcattacataaacagtaagagtgaagagtcttcccatcgtggtgtacacagacgagtttc

SEQ ID NO: 230659 - DNA, 404 bp, Glycine max
ggaagaagaacttacctacaagctaatgaaggatcagctagaattgctcaagcattggcatcaatgactagcttacgtggttcctctcaggctgtgttggaaggtagccatggctccacacgctctgaatgtggggagtggaagcacggtggcctcagtcacacgtgcagggttcacagttagagcacagcaacaacaagtgaatggtggtgaggtacaaacttgccgtaaggcagtgctttcacttgttgctgctggatttaccaatggctcttttgttcatgctgtgcttgctgatgcccaacctatcaaagttggaccatctcctccaccttctggctgattacctgtaacattgaactcagatgaaccaagagaccttatgctgccattgacagataagt

SEQ ID NO: 230660 - DNA, 400 bp, Glycine max
cgcaattcaaaactctcactccgttataagcaccaaatcctgatggcaccagcggcagagaagaagccagcggagaagaagcccgcagaggagaagaagtccacggtgggagacaaggctccggcggagaacaagccataggccggaaagaagcttccgaaggagggaggcgccggcggctaaaggaagaagaagaagagaaacatgaagagcgtggagacatacaagatctacatcttcaaggttctgaagcaggttcaccctgacattggtatctcaagcaatgccatgggaatcatgaacagcttcatcaacgatatcttctataagcttgcccaggaatcttctatacttgcccgctacaacaagaatcgcaacatcacttcaagggaaattcaga

SEQ ID NO: 230661 - DNA, 408 bp, Glycine max
  unsure (1)..(408): unsure at all n locations
caattgatgagggtttatggagccttaatgtggtcacttgggaaggtgctgaagacacctgaagtaatgcgagtgtatattggctccttcaatgacaagcctgtaaatgatgctgccactggtccacttgggaaggaactctttgaaaaggaacaggatgatctactctcggatctgaaagatgtaccaaaagcagcttgtgatcgaagaatcaatgagtttgtaaaacgggcccgagcagccaagatacatgcttacattatcagccatcttaaaaaggagatgcctgctatgataggcaaagctaaagctcaacaaaagctcatcgataatttggcagctgaatttggaaaggtacaaagggagttccatttacctcctgncgattttccaaatgtagagtttttc

SEQ ID NO: 230662 - DNA, 403 bp, Glycine max
gttccacggtggcgggtgggtgagcgggagcaacgattcggttgcgaacgacgtgttctgccggcgggtcgcgaggctctgcgaggcggtggtggtggcggtggggtaccggctggcgccggagaatcggtatccggccgcgttcgaggacgggctgaaggtgctgaattggctggcgaagcaggcaaatttggcggagtgcactaagtcaatgggggggaggaggaggttggagggtcagcacaagcatattgtggaaacctttggggcatcagtggttgagccttggttggctgctcatggaaatccatcaaggtgtgttcttcttggcgtgagttgcggtgcaaatattgcagactatgtggctcgaaaagctgtagaaacaggcacacttttggaccct

SEQ ID NO: 230663 - DNA, 408 bp, Glycine max
aaaagaccaggaaagatcccaacagtgagaaaccaggcgagatatatgttccaagagatgaaaacttcggtcacttgaagtcatctgatttccttacatatggaatcaaatccttatctcagaacgtgatacctttgttcaaatctataatatttgacttaagggtcacatcgagtgagttcgatagcttcgacgaagtgcgtggtctctttgaaggtggaatcaagctgccaacaaatatactgagccaaattagccccttatcagtcctcaaggaaatcttccgcactgatggtgaaaatacccttcaatttccagcacctcatgtaatcagagttagtaaatctggatggatgactgatgatgagtttgcaagagagatgattgctggtggtaatccaaatgtaa

SEQ ID NO: 230664 - DNA, 394 bp, Glycine max
cagaaatattattacgatgatcaacattattggagcacttgtgctactcgttgcatttctcttcctcagttgtgtgtacgcacaagacacaacaacccttgtgcctggaaacataacttttggtgagtcagctgtggatgtagggaacaatgactatcttcccacccgtttcaaggctgattaccctctctatgggatggacattgttatatagcaacctactgggaggttttgcaatggcaaattagctactgatttcactgctgacacattgggtttcacgagctatgctccagcatatcctagcccacatgcatcagggaaaaacatccttattggagcagactttgcatcagctgcatctggttatggataaaatgctgctactttgaat

SEQ ID NO: 230665 - DNA, 342 bp, Glycine max
ccctgttggatagaatggaggttgttgctattgccgggtatattactgatgagaagatgcatattgccagagaataactggaaaaaaacaactcgtgaagcttgtggaataaagcctaaacaagtggaagtgactgatgctgctattcttgccctaatagaaaactactgccgataagcacgggtcaggaatcttcaaaagcacatagaaaaaatttaccgaaagatagcgctacaactcgtgaggcaaggggaaatgattgatgcaaccgtggaaccaataaaagaatatatagactctgatgaatttggtcaaaatacagttcaaaataagaactccgag

SEQ ID NO: 230666 - DNA, 399 bp, Glycine max
tttcgttaacgcatccttcgacctcgctactatacccttcaacgacggctattctccgctcttcggagctagcaacgttgttcgctccgaggatggatacggcgtacaactccgcctcgatcgctacacaggttcgggtttcatttcctccagtatgtaccagtatggattcttcagcgcgagaatcaagttaccatcgaattatagtgctggtatttgcgtggccttttatacatcaaacggtgatgtgttcgagagtcccatgatgagttggactttgaattcctaggtaacgttgccggaaaaccatggcggtttcagacgaacttgtacggcaacggcagcacaaatcgtggccgtgaggagcggtaccgtctgtggttcgatccaaccaaagaa

SEQ ID NO: 230667 - DNA, 409 bp, Glycine max
cgttaaattcactgccatctgcatttacctccaatacgacgccctttccttcctctccgttaagtggaaaaccaagtctgctcaccagttaacggaatccgaccaattcttctcagatatcgttacaggtccattcgagaaatttatgcaggtgacaatgatcaaacccttgacggggcagcaatactcagagaaagtggcagaaaattgtgtggccatctggaggtctctcgggatttatacagattcagaagccgaagcaatagacaagtttctttctgttttcaaagacctaacattcccaccaggctcctctatccttttcactgtctcacccaatggatcattaacgataagtttctctagtgatgaaaccattccagaagttacgagtgctgttatagagaat

SEQ ID NO: 230668 - DNA, 393 bp, Glycine max
cggatatccacttcctcttcttctcttcccatttcccttccaatctcctaatttctcttcagcttctgggttctccattttccttcgtcttctgcatctgcattccgtagattcagttctcgtcggaaaatggacgttcgccgaagacccattcctccctccggcgatcgccgacaaacccagaagctgaagaacaccgccaccaccgattcgcagactcttctgcctctctacctcaccaacgccctcttcttcgcggtgttcttctccgtggcctacttcctcctccaccgctggcgcgagaagatccgcaccgccactcccctccacgccgtcacccccgccgagaccgccgccatcgtctccctcgtcgcctccgccgtctatctcctc

SEQ ID NO: 230669 - DNA, 408 bp, Glycine max
cttgcattgggtggagcatacttagaaacagcaactatgtctctcatgcagcttactagctcccctgttggctcactggtccgtttcattgtaatatttgctttatggtacagaaccatggctttggccaagttgccaccaaacgcttcatcagttccagcagttttagcgtttggagattccatcgtggacccaggcaacaacaacaacataaaaacattgatcaagtgcaacttcccaccttatggaaaggattttcagggaggaaacccaacgggtcgattttgcaatggaaaaattccttctgacttaatagttgaacaattgggtattaaggagtatttgcctgcatatttggattcgaatctcaaatctagtgatcttgttaccggcgtctgctttgcctcc

SEQ ID NO: 230670 - DNA, 381 bp, Glycine max
attctgatcgctccctgagagaacacgtcgtggccgttgcagaagaaaattgcaagatgaagttcaagatcgcgaagcccaccactggatggcagaggaaactcgagatagacgacgatctgagcctgcgagcattatgggacaagaggatcgcacaggacgtcatcggagatgcactcggtgaggaatttaagggctatgtcctcaaaattaccggatgttgtgacgtacacggatttccaatgaagcagggagtgctgactcctgatcgtgttacacttttgcttcagaggggaacgccttgcttccgtggatatggaacgcgtaatggagagcgtacgagatagtctgtacgtgggtgcaatgtcagcccagacctct

SEQ ID NO: 230671 - DNA, 404 bp, Glycine max
atcttcttccaaataaaaaaaaaaaaaagaaaaaggaaggagataggaaagggttaattgaatccaaaaaaaaagaagagaaaaacaaaatgggcagggtttggacttcgatgatagcattgttgctttgcctgatgacatcatcggttcggggcgaggacccttacatttactacacatggaacgtgacctacggcaccattgccccattgggtgtcccccaacagggtatcctcatcaatggtcagtttcccggccccgaaatcaactccaccagcaacaacaacgtggtcatcaatgtcttcaacaacctcgatgagcctctcttgttcacatggcatggtgtccaacagaggaagaactcttggcaagatggcacattgggtgcccagtgccctatcgcc

SEQ ID NO: 230672 - DNA, 282 bp, Glycine max
catcaattgaattgtgcatacagaaacagttctgcagattatggtggtggtcccaatttccatgctactgaggataagccagtcatattcccccagtcctttgttcaacccaacactacaacacagtcggcaagtttggttgcaccttcatgtgatctaactggtcttggagttccggaggatggacagaaaatgattagtgaccttatgacaatctatgatacgaatgttgtaggaaacaagaacttaagttcctccaactgtgtagctgtaaaaaatcat

SEQ ID NO: 230673 - DNA, 406 bp, Glycine max
gaagaagagagggaaaaaccgattaccgtgccaggattcggttgattaatcaggacaagaacaaatataacactccgaaataccgatttgttgttcgctttagcaacaaggacattgttgcacaaataatatctgctagcattgctggcgatattgttcttgctgcagcatatgcacatgagctgccacgatatggtcttgaagtagggcttacaaattatgctgcagcttattgcactggtctcctgttggcccgaagagtcctcaaaacacttgaaatggatgaggagtatgaaggaaatgttgaggctactggagaggattattccgtggaacctgctgagagcaggaggccattccgtgctctccttgatgttggtcttattaggactacaaccggtaaccg

SEQ ID NO: 230674 - DNA, 407 bp, Glycine max
agcagcctgagctaggtggagggaccgtagagcttggtcctcatactgctgtccaccgttggaccggtgatccaagacaacctaacaaagaggacatggggaggttctattctgctggaagagaccccgctttctattctcaccatgccaacgtggatcgtatgtggaatatatggaaaacaataccaagtggaaaaagaagggatttcaaaaaccgtgattggttggaaacctcctttttcttctacgatgagaacaagacccttgtccgtgtgaaggtgaaagacagccttgacacgaataagatgggttatgtttaccacagatgtcgcaattccaatggctccaaaaaaagcctaaacccaaaagaactagaaaggctaaaaaggtggcgttcgcacaacaat

SEQ ID NO: 230675 - DNA, 325 bp, Glycine max
attggttcattctcaagttttgttaaggacttgtatggattgggaggcaggagacttggactgacttcactcccaccattgggttgcctacctgctgcaaggactatatttggtttccatgagaatggttgtgtctcaagaatcaacactgatgctcaaggatttaacaagaagctcaactcagctgcaacgagtcttcaaaagcaacttcctggtcttaagattgcggttttcgacatttacaagcctctctatgaccttgttcaatccccttcaaaatctggttttgtggaggcaaacagaggatgctgtggtacccggactg

SEQ ID NO: 230676 - DNA, 354 bp, Glycine max
cttcgatcatacacttagttgcttccaattaagatggttctgctagagaagctctgggatgatgttgtggctggccctcaacctgagcgtggccttggcaagctcagaaaactcaccaccctcaaaactattgatgaaggagaaagtagcaagctgcagaagacgttgtcgatgccgtcgacaccaacaaccccgatgactccgacgactccaacgacaccgggatcggcccgtaaagctgacaacgtttggaggagcgtcttccatcctgggagcaactccgccacaaagaccatcggtgctcagatgtttgacaaaccacttcccaacactcccactgtctatgactggctg

SEQ ID NO: 230677 - DNA, 371 bp, Glycine max
ctttgacaagtaccaccctgggttcttcggcaaggtcggaatgcgctattttcacaagctccgcaacaaattctactctccgatcctcaacatcgacaagctctggtccctggttccgcaagaagtgaaggacaaggcctccaaggagaacaaggcgccgctgatcgacgtcacgcagttcgggtactttaaggttctcggaaagggtgttttgccgcagaaccagcccgttgttgtcaaagctaagcttatttccaagatcgctgagaagaagatcaaggaggctggcggtgctgttgttctcaccgcctgattttattgaccggatcgcctttttcaacgatttagggtttttttttggtttggttttg

SEQ ID NO: 230678 - DNA, 409 bp, Glycine max
  unsure (1)..(409): unsure at all n locations
ctttgttattacctctttccaaagtccaaattttctagttccaccaaaccaaaccaaaccaaaatggcagcagcctcagcctcatccatgatatcaacaccagccttatctccaaccatccaaaagcaccatcatttgaagccatccaacgtgtgcttccaaggtcttagacccctcgcaaggttcaccaaagcctcatcaaccaaagtgagcaccaccaccaaaagggttattccaaagggtggtgttagagctgaactcaactcagcccttgtgataagcctcagcactggcctctccctcttcttgggaaggtttgtgttcttcaacttccaaagggagaacgtggcanagcaagtgcctgagcagaacggcctcacacactttgaggctggtgatacacgtgcca

SEQ ID NO: 230679 - DNA, 410 bp, Glycine max
  unsure (1)..(410): unsure at all n locations
gtatttgagaaaaccactgtgaagacagctgggaatttgtcacagttgccaccattggaggtgcctcggattcccgatgcattgaggcctccatctaatacgggaagcggtgaatttgaagttacatatcttgactcggatactcgcatcacaagaggagacagaggcgagctaagggtctttgtgattgcttgagttcctggtgaatgcaactatgcactatgcattttctctgttggacttaaaaaaaaaaggtttcaacaccttgtgccatcattttgtttagttttttcctcctgatggtatttgttctaagttcttcaatattgtaaacatgatggaattaaactctactatatagttccaaggaagcanggtactttttgtttaagtgtaacatatttcttttt

SEQ ID NO: 230680 - DNA, 292 bp, Glycine max
ataataaccccctttttccctctccatacccttttgctttctttatccaataataagaacttcccacgagtggctttaactggtctggtctggtctggtcggacacacaaaaatattagtatggagaaggtgagttttgtgaagaatggagagcttagattgcctccggggtttcgtttccacccgactgatgaggagctggttttgcagtacttgaagcgcaaggtcttctcctgccctctgccagcctctatcattcctgaggttgatgtttgcaagtctgatccttggg

SEQ ID NO: 230681 - DNA, 323 bp, Glycine max
tcggggaattccaattccacattttcaagaaataaggaggcaaaaatgttcatatatgaattggaattatttgttttcttattaggcctatcctgaagccaaaggaaatgagatcggaattcctcggggaattccaattccacattttcaagaaataaggaggcaaaaatgttcatatatgaattggaattatttgttttcttattaggcctatcctgaagccaaaggaaatgagatcggaattcctcggggaattccaattccacattttcaagaaataaggaggcaaaaatgttcatatatgaattggaattatttgtttt

SEQ ID NO: 230682 - DNA, 398 bp, Glycine max
cggctcgagtaagattcatgctgctggaattgccaagcatggtgaaatagactatgaagctgttgtgaagcttgcagagggatttaatggggctgatcttcgaaatgtctgcacagaagctggaatggcagcaattcgggcagagcgtgattatgtgatccatgaagattttatgaaggctgttaggaaactgaacgaggcaaagaaacttgaatccagtgcacactacagtgctgattttggtaaagactagaatctattgcaaaattcttgcagagccatggatatctaggcagtgcatcttgagttggaaatacctcacgcaagttactcaattcgtacggctaagcgtgatgttccctttgggttgttctggcttgtgttttccgaattctaaa

SEQ ID NO: 230683 - DNA, 412 bp, Glycine max
gaaccttccggatttcgttttgctttgttcaggtagccagccagtcatggtgctcttcaatgtttcacgcgtagagaccactcccttcgatggccagaagcctggaacctctggtctccgcaagaaggtgaaagtgttcgtgcaacctcattacctccataactttgttcagtcaacattcaatgcattaactgtggaaaaagttagaggtgcaacgctagttgtatctggtgatggtcgttatttttcaaaggaagctattcagattataactaaaatgtcagcagcaaatggagtaagacgtgtttggattggtcaaaatggattgctttcaactcctgcagtatctgctgttatacgtgaaagagttggagctgatggattcagggcaacaggtgcatttatactgaca

SEQ ID NO: 230684 - DNA, 402 bp, Glycine max
gattatgcgcagtgcgatgtgttcacgggaacgtgggtggtggacgaatcgtacccgccctatgatcccgccacgtgtcccttcatcgagcgcgagttcaggtgcaaagggaatggacggcccgatctcctttacacccgctataggtggcacccacttgcctgtaatttactcagatttaacgggctagattttctggagaagatgagggggaagagcatcatgttcgtgggagattcactgagcaggaatcaatggcagtccttgacttgcttgcttcattcagcagtgcccaattcaccttatactttggatagagttggagatgtttctattttcacacttacggagtatagggttaaagtgatgcttgataggaacgtgtatctagttgacgttgtc

SEQ ID NO: 230685 - DNA, 402 bp, Glycine max
ctcaagcaaccatggcaatggcaacccaagcctctctcttaaccccacccctctccggtctcaaagccagcgaccgcgcctccgtgccatggaagcaaaactccagcctctccttctccagcccgaagcccctcaagttctccagaacaatcagagcagcagccgccgacgagaccacagaggcaccagcaaaagtagaggctgcaccggtcgggttcaccccaccagaacttgacccaaacaccccttccccgatcttcgggggcagcaccggcgggctcctgcgcaaggcacaggtggaggagttttatgtcattaagtgggactcacccaaaggaaaagatctttgaaatgcccactggcggcgccgctatcatgagggagggtcctaaccttctcaag

SEQ ID NO: 230686 - DNA, 324 bp, Glycine max
ggctcacacacgcacagatctgatctatctgaagctgaaaacgccgacgcccgacggtgatgatgaagatggggtcctcaccttcacgttgctccttcttcctattcctcctcctcctagtggcgctcttcccctcgtcgctctccgagatccggttctccgagatccgaaacgacgatcgctccatcgttcccttcgatcagtttggattcacccacaagggtcgccttgagctcagcgtttccaaaatatcactctccaattccaatttggacctctccaaggtgggattcttcctctgcaccctggattcctggcttcatg

SEQ ID NO: 230687 - DNA, 384 bp, Glycine max
atttggggattgccaaacgtggaaataatcgatattgagatgaatcagttatcaggttcgattagttcggatatcaaaaccgcgaaagcactcggttcaatattcgccaggcagaaccggttgtccggtgaaataccagaagaaatctcaatggcgacgtcgttagtgattgtggacctgagcgagaatcaaatctttgggaacattccagagggaatcggcgagcttaaacaactaggtagccttcatttacagagcaacaagttatcaggttcgataccggaatctctaggttcctgtaattccctcaacgacgttgacctatctcgaaattcattctccggagaaatccccttctccgtggggtcctttcccggctttaaa

SEQ ID NO: 230688 - DNA, 381 bp, Glycine max
cttctccaacatgccaaacgacagcgttctgagtcttttcttcttcgttaccctcttcacatgccttctctctgctaattcccacgatgaccatattttcctaccgagtcaactccatgacgatgactcagtgagttgcactgctaccgacccaaaccttaactacaagccggtgatcggaatcctgacccaccccggcgacggtgcctctggccggctcagcaacgccaccggggtttcttacatcgccgcctcctacgttaaattcgtggagtccggtggtgctagagttattccccttatctacaatgagtcacctgagaaccttaacaagaagctcgatttggtcaatggagtgctcttcactggtgggtgggctgt

SEQ ID NO: 230689 - DNA, 410 bp, Glycine max
ggtttctaccagagtattcggcctacacagatggggctatcactgaacattgatatgtcttccactgcatttattgagccattgccagtaattgatttcgtaactcaactgctgaacagagatgtatccgcccggccactttctgatgctgatcgtgtgaagatcaagaaagctctccggggtatcaaagttgaagtgacacatcgtggaaacatgagaagaaaatatcgtatctctggtctgacttcacaggcaaccagagaattgacattcccggtagatgaaaggggaaccatgaaatctgttgtggagtacttctatgagacatatgggtttgtcattcaacatactcagttgccttgtctgcaagttggcaatgcacagagaccaaactatttgccaatggaggt

SEQ ID NO: 230690 - DNA, 403 bp, Glycine max
gaaaaagttagggtttgtaactttgtcttttgcttgcgaatctgaatcgaataataatcaatcaatcatcatgtcgtcggcgaagaagatcacactgaagagttcggacggcgaggctttcgaggtggacgaggcggtggcgctggagtctcagacgataaagcacatgatcgaggacgactgcgccgacagcggcatccctctgccgaacgtgacgagcaagatcctggcgaaggtgatcgagtactgcaagaagcacgtcgaggccgcgaatcccgaagacaaaccctccgaggacgatctcaaagcctgggacgccgatttcgtcaaagtcgaacaagccacgcccttcgatctaacccgggctgcgaactacttgaccatcaagagcctgctggacctt

SEQ ID NO: 230691 - DNA, 401 bp, Glycine max
  unsure (1)..(401): unsure at all n locations
ggcttcaattccagaagagccattgttggcaccgaacccggaccggttctgcatgttcccaatccaatatcctcaaatctgggaaatgtacaagaaagccgaagcctcgttctggacggcggaggaggtggacctctcgcaggacctccgccactgggactccctgaccgacggcgagcgccacttcgtcagtcacgtcctcgccttcttcgccgcctccgacggcatcgtacttgagaacctcgctgggcgcttcacgaaggaaatccaaatccccgaggcccgcgccttctacggcttccagatcgccatcgagaacattcactccgagatgtacagcctcctcctcgaaacctacatcaaggactcctcncagaagagccacctcttccgcgccatcg

SEQ ID NO: 230692 - DNA, 403 bp, Glycine max
ctcaaacgaatacgttttctctttctcttcaatttcacccttattagcatagcatattcattccccatcttgaatcgttcttaactgcgagaggggatatcagagaagttgattggcctcccattaataacagatctgaatgatctgatggagtctaaaggtgggaagaagaagtcgtctagtagtaagtcctttttgtacgaagctcctctcgattacatcattgaagacgttcgaccacacggtggaatcaagaagttcagatctgctgcttactccaactgcatccgcaagccatcctgagattccctaggtcgtgtgaggacgtagcccccttagtcctgcatccgccaaaattttctcagtctcttcccttctcctttttcttgttttcttccttgcc

SEQ ID NO: 230693 - DNA, 395 bp, Glycine max
ccaaacaaaaccggaatcatatcccaaactccttcctccctctgggtcttgaggtacacaaccctaatcaccgcttcgagctctgtcattgtcgcaggttccaggtttcagcgatttcgatctcgcatagcattctacgatggatacgattccagttaaccgcaagcctttcttgaacaatttgactgggaagcccgtaattgtgaaactcaagtggggaacggagtacaagggctatctcgtttccgttgattcatacatgaatttgcagctggccaacactgaacagtacattgagggacagtttactggaaacttgggagagattttaatcagatgtcacaatgttctctaccttcgatgaataccggacgataaggaattcgaagatgttg

SEQ ID NO: 230694 - DNA, 410 bp, Glycine max
ggctaacaacaatggtggctggtgcaaccctcctttgcaacactttgatcttgctgagcctgctttcttgcaaattgctcaatacaaagctggaattgttccagtttccttcagaagagtctcctgtgtgaagaaaggagggatcaggttcaccatcaatggtcactcttacttcaacttggttctcatcacaaatgttggtggagctggagatgttcattctgtgtccatcaaagggtctagaactgggtggcaaaccatgtctagaaactgggggcagaattggtaaagcaactcctacctgaatggccaaagcctctcttttcaggtcactacaagtgatggcaggactctcactagcaacaacattgtgcctgctaactggcaatttggacaaacatttgaagggg

SEQ ID NO: 230695 - DNA, 410 bp, Glycine max
gcgactgggaaatggctagggaatgcttcacaacgaacgacgttgcagtttccgctcgccccaagcttctcgtcgctgagctcatgtgctacaacaacgccatgttgctcgtggcgccctacggtccctattggcgcgaactaaggaagatcattgtgacggagatcctctcctcgagccgtgtagagcaactacaagatgttcgtgtgtccgaagttcaaaattcgatcgtagaactctacgacgtttggcgtagccaaaagaacgagtctgactatgcatccgtggagttgaagcaatggtttgctcagcccatattcaacatggttctacgaatggtcgtcgggaagcggtttctgagtgccacggcgaccgacgagaaggcagaaaagtgtgtaaaggctgtggat

SEQ ID NO: 230696 - DNA, 393 bp, Glycine max
gtttcttacaaggctctactctactgcttcaccttctgctctagaaaattcagtggtgatacatggcttcggctactctctctgtagccaaaccagcccttcaggcaaatgggaaaggcttctctgaattctctggcctccgcagctcatcaggcttccttcccttttctagaaaatcttcagaggatttccattctgtcattgccttccagacctatgcagttggaagcagtggaggatacaagaagggtgtgacagaagcaaaactgaaggttgccataaacggatttggaaggattggaaggaacttcttgaggtgctggcacggtcgcaaagactcccctcttgatgtcattgccatcaacgacaccggtggcgtgaaaaaagcctctc

SEQ ID NO: 230697 - DNA, 402 bp, Glycine max
  unsure (1)..(402): unsure at all n locations
tccttttgttcctatctctggttttgagggagacaacatgattgagaggtccacaaaccttgactggtacaagggtccaactctgcttgatgcacttgaccagattagtgagcccaagaggccctctgacaagcccctcaggcttccccttcaggatgtgtacaagattggaggtattggaactgtgccagtgggacgtgttgagaccggtgtcttgaagcctggaatggtggtgacttttgcaccaactggactgacaactgaagtcaagtctgtggagatgcaccatgaatctcttacagaggcacatcctggtgacaatgtgggattcaatgttaagaatgttgctgttaaggatttgaagcgtggttatgttgcctcanactcaaaggatgaccctgc

SEQ ID NO: 230698 - DNA, 332 bp, Glycine max
gtgaaagccctctatagaagggcccaagcacatatgcagttgactaacttggatttggctgaacttgacattaagaaagctcttgacattgaccctaacaacagggatgtcaaattggagtacaggactttgaaggaaaaggtgaaagagaataatagaaaggaggcgcaattttatggaaatatgatcaacaagatgacaaagattggttcctgatagcaataaaccagctacgaagtaccaacggtattgaatccggggttgacaactaaatctagatgtcatccaatatggaacacgaatctgtttagtccccgtttttctggggtttg

SEQ ID NO: 230699 - DNA, 405 bp, Glycine max
cttagctgaaccctcacctcaatcttgcgtgctagctagctttattccaattcctacagaaccaaattattctgctagctagctagtacgtcaaataaaataaaataatcaaatatggcattcagcgggacccaacagaaatgcaaggcttgcgacaaaactgttcactttgtcgaaggtttatctgccgatggagctgcttatcacaagaactgcttcagatgcagccattgcaatggccttcttgcgataagcaattactcatccaccgaaggagttttgtactgcaaggtgcactttgagcagcttttcaaggaaactggaacctaacccaagaaatcccagttctcctggaaagcctcaactcgagctgaatagagcaccaagcaagctttctgccttctt

SEQ ID NO: 230700 - DNA, 404 bp, Glycine max
cttcacttttaagttaaatagtttttcattgtttcatttaatctacaatggctgcttcaacaatggctctctcttcatcatcattggctggccaagctatcaagcttgccccctccacccctcagcttggtgttggaagggttagcatgaggaaaacagcctccaagactgtttcttctggaagcccatggtacggcccagaccgtgtcaagtacttgggcccattctctggtgagcccccatcctacctcactggtgaattcccaggtgactatggttgggacactgctgggctttctgctgacccagagacctttgccaagaaccgtgaacttgaagttatccactccagatgggccatgttgggagccctgggctgtgttttccctgaactcttggcccgc

SEQ ID NO: 230701 - DNA, 392 bp, Glycine max
cctttctatgttgcttaagaagttacctacttatagcaagagaatctagctctattggttgtgtaaggtaaaaaaaaaaaacgcataaccatgtcaaccaaattgattgaaacaagccttagccttatggtatggcttgtaattgcaacatcagcaatagcacaatctgataaccccccagttcttgacacagaaggccaccctcttgagcctggcagagattactacatcacaccagcggtaacagacattggaggccgtgccactatagtagacaacggcacatgccctttatttgtaggtcaagagaacacttttgtagaagagagctttgccgttttcttcaccccttttgcaaaggaagatgatgttgtgaaggtgaatagggactt

SEQ ID NO: 230702 - DNA, 406 bp, Glycine max
tggttctggagtgctatctcttgcatgggcaattgcacagatgggttgggtagctggtcctgcagtgctctttgtcttctctttgataacatacttcacctccactcttctcgctgactgttaccgttcacctgaccctgtacatggcaagcgaaactacacatattctgaggttgtcaaagccaacctaggaggaagaaaatttcagctgtgtggattggctcagtatataaatcttgttggtgtaacaatcggctacactataactgcatcacttagtatgggggcggtgaagaagtcgaactgtttacacaaacatggccatcaagacgagtgcaaagttaaggacaacgcttttatgattgcttttgcctgcatccaaattcttccaaaccaaataccaaac

SEQ ID NO: 230703 - DNA, 402 bp, Glycine max
aatttacattactcattacactaactcaatcctcagtctatccaaattctccagccatggcagtttcttctgcatctgcttcctccaaacttatactattcccccatgcttcatcttcttcccttatctccacacccttccgttcctccaccaacacccacaaactatcccctctctcctcctccttcctccaccccaccaccgtcctccgccgcaccccctcctccaccactaccaccacctccccgcgccgccccctcaccgtccgcgccgcccgcggcaagttcgagcgcaagaagccccacgtgaacatcggcaccatcgggcacgttggacacggcaaagaccaccctggacgcggccctcaccatggcccttgccgccctcggcaacagcgccccg

SEQ ID NO: 230704 - DNA, 376 bp, Glycine max
ctcttggattctgggctggtcatcggaactctaaaatcagagttattcttgcacgtgtgtgggaaaatgacacagaacttgatatttcaaacaatagaattagtagggctactgggcatctagtgtaccagaaaagattttacaggagtaagttttgtatatgtcctggtggatcacaggttaatagtgctcggatagcagactctatccattatgggtgtattcctgtgatattgtcaaattactatgaccttcctttcaatgatattcttgactggaacaaatttgccgttgtactcaaggagagtgatgtttaccagcttaaacaaatcctcaaaaatatatcagatgctgagtttgttacacttcataataa

SEQ ID NO: 230705 - DNA, 328 bp, Glycine max
ggtttgggattggagggattgacgctgcgtctcttcctcttctctttcgatccatccctcattcctaatcctccaatccaaccacctcagcctcacactcacatatacacatatctgaacgcgtatcgtccctcctatggcttcaaagcgcatcctcaaggagctcaaggacttgcagaaagacccaccaacttcttgcagcgctggtccagtagctgaggacatgttccattggcaagcaacaataatgggtcctgctgatagtccttatgctggaggtgtattcctagtcactattcacttccctccggattatcctttcaagcct

SEQ ID NO: 230706 - DNA, 409 bp, Glycine max
ggaagtcagtgatgaactgaaaaatcttgtcaaggtaactgaagaatgcctggagaagggaatagctgcgtgcaaggacggtgctctctttaggaaaattggaaagagaatcagtgagcatgctgaaaagtatggctatggtgtagtggagcgttttgttgggcatggtgtgggaacagtgtttcattctgaaccaattattatacacaatcgcaatgagaaggcaggccgcatggttgaaggtcaaacatttacaattgagccgattctttcaatgggaagcattgattccattacatggccagacaactggacaacactaacagctgatggtagtccggctgcacagtttgagcataccattttgataactaagactggagccgaaattttgactacatgttgacat

SEQ ID NO: 230707 - DNA, 323 bp, Glycine max
  unsure (1)..(323): unsure at all n locations
ccataatgctgggcttcttggtcatggcagtgatgtcagtcattggataccaaagagaattgctggtccattagagggacttcaaattgcatttgttgcttgtggtccatggcacacagccttggtaacttcaacagggcagctgtttacatttggtgatggaacattcggtgtcttgggccatggagataggcaaaatgtttcatatcctagagaagtagaatccttattggggttgagaacaatagctgttgcttgtggagtgtggcatactgcagctgttgtanaggttatcgcaacacactccagtacaagcatatcat

SEQ ID NO: 230708 - DNA, 406 bp, Glycine max
ctaaaaattgccagttacattcccttcacaagattctcacaaacaactcttgagaaagaaagaatggctgccaacacattgatgagttctgccatctcagccttcccatctctcctttcctcctcaaaatccagatttgccgcagcagttcctctttccagctttgttgtcaccaatgcctcttcttctcgcttttccatgagtgctgactggatgcctggccagcctagacccccctaccttgatggttcagcacctggtgactttggattcgaccctcttcgtcttggtgaagtaccagagaatcttgagaggttcaaagagtcagaactcattcactgcagatgggccatgcttgctgttccagggattttggttccagaggcattgggcttaagcaactggg

SEQ ID NO: 230709 - DNA, 401 bp, Glycine max
agcaggtgttatccctgtggtcaagacatccattggcggtactcgtattattggtcgtctttgtgctggtaacaagaatgggcttctcttgccccataccaccacagaccaagaacttcaacatttgagaaacagtctacctgatcaagttgttgttcagcgaatagacgaaaggttatctgctctgggaaattgtatagcatgtaatgaccatgtggccctcacacacactgatcttgacagggagactgaagagatgattgcagatgttcttggagtagaagttttcaggcagaccattgctggcaatattcttgttggtagttactgtgccttctccaatagaggtggcttggttcaccctcatacttccatagaagacttggatgaactttctacac

SEQ ID NO: 230710 - DNA, 410 bp, Glycine max
caaaaacaaagaaaaaaaaaaacccttagccaacacaaccatcatggccacctctgctattcagcaatcagcattcactggtcaaactgctctgaagcagctcaatgagttcgtccgcaagaccggtggcgccggcaaaggtcgcactaacatgcgccgcaccgtcaagagtgctcctcagagcatttggtatggccctgaccgtcccaagtacttgggtccattctcggagcagattccatcatacctgaccggagaattccctggtgactacggatgggacactgctggattatcagctgacccggaaaccttcgccaggaaccgggagctggaggtgattcacagcagatgggcaatgcttggtgcccttggctgcaccttcccagagatccttgagaagaatggtg

SEQ ID NO: 230711 - DNA, 412 bp, Glycine max
taatcactcactcacacattcgccacttccacacagcatagatcacctttccttttttcccacagaaaaaaacaccacctttctttttccgactaaaggttcgccggaaaatgcctctatcctcctcttcctcctccgccgtagactccgccgtctccggcgagatcatgctctttggcgttagagtcgtggtggactccatgcggaagagtgtgagtatgaacaacctctcgcagtacgagcttcctcgcgacgctgccaacgccaaagacgacgccgcaggatacgcctccgccgatgatgcagctccgattaactccgacaagaaccgcgaacgcaagccaaggaatctcatggactgaaggaaaacacaagctattcttggtggggttgcagaaagtggggaaaggtg

SEQ ID NO: 230712 - DNA, 334 bp, Glycine max
caaagctacattaataacgtcgtttaatgttccaatattgtagtgtttttgtcctgttggggttggactgctgtgctgtattttggttttgtattctgccccttgatttgttctgttacttttagccgtgttcatgtctccaggaaatgtttatattttctttcaaaaatgtttttccattgtgtttatttgtcttttttgggcatggttcaggctccagtaggtcgcattttctttactggagaacacacgagtgaaagatttagtggctatgtgcatggtgcatacctcgcaggtatcaattctagcacagaactacttgaagaaatgagaa

SEQ ID NO: 230713 - DNA, 410 bp, Glycine max
ggttcatcatcataaccttcaatgaaaagaaatggctgaggcaagcattggcagcaaaagcagcagatggtctttacagggaatgacagctctcgtcaccggtggatccaaaggaatcggatatgctatcgtggaggagttggcacagcttggagccactgtgcacacttgcgctcggaacgaagctgaactcaatgaatccttaaatgaatggaacacaaaaggatacagagtaactggttccgtctgtgacgtggcgtctcgtgcagaaagacaagacctcatagctagagtctccaatgagtttaatggcaaactcaatatccttgtaaacaacgtgggaacaaacgtaccgaaacatacccttgatgttacggaggaagacttctcatttctgataaatacaaatc

SEQ ID NO: 230714 - DNA, 398 bp, Glycine max
tggaattccaaggtggccatcccgcaagattaataaagtcaatcgatcattgaagaagatacagactgtgcttgactctgtccagggcatggaaggagggttgaagtttgatccttctatgggggcgtttgtggcaggagggtcaatcatccaggaaattgatgcacctaaaagtactataaaagaccccgtgcctgttactcaagatgcattctcagtaccacccgcaccttgtagtgaaggtgagaatttttcaattaagttggagggaaaattgaagaaaaccaatgtttcttcagttgattacagtgaagattcaaaatctatggcaatcaatgatgggttcgtgccaaaatgcaagccctttgcaccaaggttcaggattgtcctgaacaagc

SEQ ID NO: 230715 - DNA, 404 bp, Glycine max
tttgcagccagagaatcttcttctggactcaaatgctattctgaaagttacagattttggattgagtacgtatgcgcaacaggaggatgaacttctccgcactgcttgtggaactccaaattatgttgctcctgaggtgcttaatgatagaggttatgttggttctacatctgatatctggtcctgtggagtcattctctttgtgcttatggctgggtacttgccctttgatgagccaaatcatgcgacactgtaccaaaaaattggcagggcccaattcacatgtccatcatggttttctcccgaggcaaagaaactattgaagcgtattcttgatccaaaccctctaacaaggataaaaattcctgaactcttagaagatgaatggttcaaaaaaggataca

SEQ ID NO: 230716 - DNA, 404 bp, Glycine max
  unsure (1)..(404): unsure at all n locations
ggtttctcttcctcccttggagaaaaagaagagccaccgctgcgacgccgttcgtgcatttttgaggtgccgctgtcatgtttgggcgtggtggaccaaggaggagtgataactccaaatattatgatattctcgggatttccaaaaatgccagtgaagatgaaatcaagaaggcctatagaaaggcggctatgaagaaccatccagataagggaggagatcctgaaaagtttaaggagttaggtcaagcatatgaagttttaagtgatcctgagaagaaagaactgtatgaccagtatggtgaagatgcccttaaagaagggatggggggaggaggctcgtttcataatccatttgatatatttgaatcattttttggangagcaagctttggtggtggtggt

SEQ ID NO: 230717 - DNA, 412 bp, Glycine max
cggctcgagcttgatcctgcccttatgcgttctggtcgattggatcgaaaaattgagttcccacacccaactgaagaagcaagagcccgaattctacagatccattctcggaaaatgaatgttcaccccgatgtcaactttgaagaattagctcggtccacagatgatttcaatgcagcacaacttaaagctgtctgtgttgaggctggcatgttggcccttcgccgtgatgcaactgaggtgaaccatgaggactttaatgaaggcatcatccaagtccaagcaaagaagaaagcaagcttgaattattatgcataggcactcaacgcaaggaaaaacgagcattgaagtttgacttgtttgctagattgatcttactcgaatcatatgtaacatacagcttgctaattta

SEQ ID NO: 230718 - DNA, 411 bp, Glycine max
aacagcacaaagcgggttactgtctgttcaagctaccatctctctctctctttcttagtgcctccttgccagaagttaaaatggcccaagaaactttcctattcacatctgaatcagtgaacgaggggcaccctgacaagctctgtgaccagatctccgatgctgtgctcgatgcatgcttggagcaggaccctgacagcaaggttgcctgtgaaacctgcaccaagaccaacatggtgatggttttcggagagatcacaaccaaggccaacgtggactatgagaagattgtgcgtgacacatgcaggaacattggttttgtctctgatgatgttggtcttgatgctgacaactgcaaggtcctcgtcaacattgagcaacagagtcctgatattgctcaaggtgtgcacg

SEQ ID NO: 230719 - DNA, 408 bp, Glycine max
gccaagtgaaagtgagaaaaaataaaaatcaaagagcataatgtcagggatcattcacaagattggggagacccttcatgtgggagggcacaagaaggaggaggagcataagggtgagcaccatgctggagaatacaaaggggagcaccatggtgaacacagtagtgagtacaaaggagagcatcatggtgaacacaaagctggagagtaccatggtgagcacaagccagagcacaaagaggggttcctagacaaagtcaaggacaagatccatggtgagggcggcgccgccgagggcgagaagaagaagaaggagaagaagaagaaggagcatggccatgagcatggccatgacagcagcagcagcagtgacagtgattaaactgctgcatcacctatatatttaaa

SEQ ID NO: 230720 - DNA, 409 bp, Glycine max
atctatggcaatgttttaccaatttaggaatgctggtgtcttttttttcctttgtgttcttctcttatctggtgtgtgtgttttgggtcgaccagccacttttctacaagactttcatgtcacgtggtctgactcccacatcaggcaatttgatcaaggcagggcaatccaactcagacttgaccaaagctctggatgtgggtttgcttccaaggtgaagtacatgtttgggcgtgttagcatgaagatcaaactcgtccctggagactctgctggcacagtcactgcattttatttgaactctgacacgaattatgttcgtgacgagcttgatttcgagttcttggggaaccgtactggggcaactttacacagttcaaaacaaacatctacgctcatggaaagggtg

SEQ ID NO: 230721 - DNA, 398 bp, Glycine max
cagctctcctctcactttcatttctacatccctggctctgttccgtcgatgacgatggcgtttagggtgcgaaaccctgacctccgctttctcattcttctctctctcttgtccatcacttccgccaaggtcttcttcgaggagcgtttcgatgacggatggggaaatcgttgggttaaatcagattggaaaaaagatgagaacctggctggggagtggaaccacacctctggccaatggaatggagacgctaacgacaaaggtattcaaaccagtgaggattacagattctacgctatttcagctcagtaccctgaattcagcaacaaggataagacactagtcttccaattttctgtcaagcatgaacagaagcttgactgcggtggtggctacat

SEQ ID NO: 230722 - DNA, 403 bp, Glycine max
  unsure (1)..(403): unsure at all n locations
ctaatccctatttttcttcctcagtagtgtcatttacgcttctcttctctgcagcaactatgcctaaccctaaggtcttcttcgacatgaccatcggcggtcaatctgctggccgcatcgtgatggagctctacgccgacgtcactccccgcaccgccgagaacttccgcgcgctttgcaccggcgagaagggcgtagggcggagcggcaagcccctccactacaagggctcgtccttccaccgcgtgatcccgagtttcatgtgtcagggtggcgacttcaccgccggaaacggaaccggcggcgagtcgatttatggcgccaagttcgccgacgagaactttcctgaagagcacacgggtccggcatcntctccatggcgaacgccggtcccggaaccaac

SEQ ID NO: 230723 - DNA, 405 bp, Glycine max
  unsure (1)..(405): unsure at all n locations
gtgccttggacgaagatcttcaaggatgtgctgctatggtcgctaacattctcagagaaaaagggcagattgttgagttggttttggaaagcaaaccacttaaatgggtttttaaacgtgcagcccgattaaatgctgagcggcttgtgttagtggggaattctgaatggcaaaggggtgtggttggtgtcaaaattctctctactgctgaacagtatgaggttaaactggatgatctgaagtaaatcagaatttgaattttttgtggttatgtattctgtctttactattggtattaatttcaccttgattttttttacatagtcctttgagactcaagtacttgttttgtatgtgtacatactcacctgtgtatgcatatgtgattatccatataccanaact

SEQ ID NO: 230724 - DNA, 352 bp, Glycine max
ctgcggaattcaaggccgcagctaagcgagcgtgtcaagtcaaatttgaggatgctcaatccacttatccacttatgatggaggatgcacttccatacatttgcatggatattacgtatcagtatacgttgctcgtcgatggatttggcctggatccttggaaagagattatagtagcaaatgaaattgaataccaaggtgctcttgtggaaggagcatggcctctaggcagtgccatagaagccatatcttcattgcccaaatttaataaattgatgtattttatataacacttaaagagaagtgggcttcctttaattactaaataaaatgaagctcgatgtatatccaa

SEQ ID NO: 230725 - DNA, 410 bp, Glycine max
ctcgagccgaatcggctcgagcagcgaacacatgactgatctcaaagaaaagttcaagcgcatgtgtgaaaagtccatgataaagaagcgatacatgcacctgacggaggagtttctgaaagagaacccgaacatgtgcgagtacatggcgccatcgctggacgtgagacaagacgtagtggtgatggaggtgccgaagctgggaaaacaagccgcaacgaaagcgattaaggagtggggtcaaccaaagtcaaagatcacacaccttgtgttctgcaccacttcaggcgtggacatgcccggagcagattaccagctcacgaagcttctcggcctgaggccctccgtgaagcgcctcatgatgtatcagcagggctgcttcgccggcggcaccgtactccgcctcgcga

SEQ ID NO: 230726 - DNA, 405 bp, Glycine max
tttatagtttactattgaaagatgggtttgaaaatggcaatactgatcctaggcctgctggccatgttccttttggtctcctcagaggtggcatccacgaattcaaaagaggtgacaaatggagttgaagatgccaaatatcctggtggaggctatggtgggggttacccaggcaatggcggtggtggctatcctggccgtggtggtggctaccctggtcgtggtggtggctatccaggtcgcggtggtggttaccctggtcgtggtggcggctatccaggccgtggaggagggtattgtcgctatggctgttgcggtggccggacatacaatggaggttgtagaaggtgctgctactacgccggtgaagctgttgctgcacaaactcaggataagactcacaat

SEQ ID NO: 230727 - DNA, 315 bp, Glycine max
agagataccacttcgcttgccaactcacagctgatctatttgccacgaaccatacagatttcactatcaccagtatcttccaggagattgctggaagcaaggacactgttggacagtatgagtctgagacagcctttaaccttcgtggacacaatcgtgttgtgcacggcaatgatgtctttgatccagaattcaacattgtcgcccctggagctgattaaaccatttacttccccgccatcgaaactagccatatgttgacctccgtccacctcgacatcgaaaaacttctttatagctctgtggagaatgatg

SEQ ID NO: 230728 - DNA, 412 bp, Glycine max
atgccatccattttgtcatgaaagaataccactgccagcattggaacaataggcactcccaaagcgcttatggcattagagaagagggaagaaacctcacgaataagccccaaacaaccaatggtgaagacttgccaaagtatggctgtgaaagtgaggttcagcaaatatgaagccttccccaactcatactccttcatttcattcttcaaaccactccactctccactagcaaaaagtcccactaaggtagcaagggtagccacaagggaagtgtataatatcatatccaagaccactttgaatgtttctctttttatgaccttcttgaacacaagctgtgtgagggaaagccatagtccataccctgcagatgcaccaactgtgcatatgaatccaatcacatactttt

SEQ ID NO: 230729 - DNA, 265 bp, Glycine max
gtaagatcaagtcattgggagtcaaaatggttatctctggagaaggatctgatgaaatctttggagggtatctatatttccacaaggcacccaacaaagaagagtttcaccaagaaacatgccgcaagattaaagcactccacaaatatgattgcttgcgagccaataaatcgacctttgcctggggtctagaagccagagtaccatttttggacaaagagtttatcagagttgcaatgaacattgatcctgagtgtaaaatgat

SEQ ID NO: 230730 - DNA, 410 bp, Glycine max
agaacatgagaggatgcaattggactggcccagaagaatgcaaatttgtctgggtatagcaaagggcttagcttatcttcatgaggaatcaaggttgaaaatagtgcacagggatattaaggcaaccaatgtcttacttgataaacatctgcatgccaagatctctgactttggtttagccaaacttgatgaagaagagaatactcatatcagcacaagaatagctgggacaattggttacatggctcctgagtatgctatgaggggttacttgactgacaaagcagatgtctatagctttggaattgtagctttagagattgttagtggaaagagcaacacaaattataggccaaaggaggagtttgtatatcttttagattgggcctatgttctccaagagcaaggaa

SEQ ID NO: 230731 - DNA, 404 bp, Glycine max
gcgaaaacccccaactccaacctctgttcatcgtctaccgcgctttcttttcaaccagaactatgattaagctttttaaagtaaaggaaaagcagagagaacttgcagaaaatgcaagtggcggaccacctgttaagaagcaaagtgctggagagttgcgtcttcacaaagatataagtgagctgaatctaccaaaatcatgtaccatgcaattccccaatggcaaagatgatctgatgaactttgaagtttcaattcgacctgatgatggatattacttaggtggcacatttttgttttcctttcaagtgtctcccatctatccacacgaagcaccaaaggttaagtgtaagacaaaggtctatcatccaaatattgacttggaaggaaatgtttgtctcaac

SEQ ID NO: 230732 - DNA, 408 bp, Glycine max
aaattgagtttccacacccaagtgaagaagcaagagctcgaattctacagatccattcgaggaagatgaatgttcacccagatgtcaactttgaagaacttgctcggtccacagatgatttcaatggagctcaactgaaggctgtttgtgttgaggctggcatgttggctctacgccgtgatgcaactgaggtgaaccatgaggactttaatgaaggtattattcatgtccaagcaaagaagaaagcaagcctcaattattatgcataggctggattttggaacaagctatttttcagtttacgaagatctattgagacatatcaagccaatggaaaacctaagtcgatgtttgacatttgttatctatttcttttcttttttttggcaatctaatggtatgataacc

SEQ ID NO: 230733 - DNA, 391 bp, Glycine max
ccgccacttctgaatctattgaatcaacaatcatgtcggacgaagagcaccatttcgagtccaaggccgacgccggagcctccaaaacctaccctcagcaagccggtaccatccgcaagaacggctacatcgtcatcaaaggccgcccctgcaaggttgtggaagtttcgacttccaaaactggaaagcacggtcacgctaagtgtcactttgttggaattgatattttcactgccaagaaacttgaggatattgtgccctcttctcacaactgtgatgttcctcatgtgaatcgtactgattaccagctcattgatattgctgaggatggatttttgagtccgcctactgaaaatggtaacactaacgatgacctcaagcttcccactga

SEQ ID NO: 230734 - DNA, 407 bp, Glycine max
gaagcattgaaggacgtagctgctatggctcgaggaaagatccagatcaagaggatagagaacaccaccaaccgccaggtcacttattctaaacgacggaatggccttttcaagaaggccaacgagctcaccgttctatgcgatgccaaggtttctattattatgttctccagcactgggaaactccacgagtacatcagcccctccacctcaacaaagcagttcttcgatcagtaccagatgactctaggagtcgatctctggaactctcattacgagaatatgcaagagaacttgaagaaactcaaagatgtgaataggaatcttcgtaaggagattaggcagaggatgggagattgtctgaacgatctgagcatggaagatctcaagctccttgaggaagaaat

SEQ ID NO: 230735 - DNA, 408 bp, Glycine max
ggaagcacttcttcagaggagtcacgagcctctcgtgctacagaaaaccatagcatagagattgctatgggttatgcaaaatcacttgggagggaaaaatattcagtgatatgtcattattttaagcagttccgtgaacttagaaattggtgttgcccatctgagcttgattttattgcttctttaagccgctgtaggaattgggatgccaaaggtggaaaaagcaagtcctattttgcaaaaacacttgatgacagattcatcataaaagagattaagaagacagaacttgattcatttttggggttttcttctctgtatttcaaacacatgagagaatcatttgaatttggcagccaaacttgtcttgcaaaagtcttggggatatatcaggttactaaaagacac

SEQ ID NO: 230736 - DNA, 399 bp, Glycine max
aatatattccattctctctgtgtatttccctacctctcccttcaagatgcagatcttcgtcaagaccctcaccggcaagaccatcacccttgaggtggaaagctctgacaccatcgacaacgtcaaggccaagatccaggacaaggaaggaatccccccggaccagcaacgtctcattttcgccggaaagcaacttgaggacggccgtacccttgctgactacaacattcagaaggagagtactcttcacctcgtcctccgtctccgtggtggcatgcagatcttcgttaagacactcaccggcaagaccataaccctagaggttgaaagctccgacaccatcgataacgtcaaggccaagatccaggacaaggagggtatccccccggaccagcaacg

SEQ ID NO: 230737 - DNA, 483 bp, Glycine max
agtaatgaatccaggtggcatataaaagatactgacgtcggacgcacgcgtacgtaaactcggaattctccaaagtttgtatagtgtaggatttgttggtattcgtgataaaaacacctcatcctattcattttgccatgacgggcgaactccagataaaggttttgaaagtaatgagaaattattaattcatccatgttactggcttggtttgaatctaaatcgtaatgcacttgctccagaggaagcagaggagataaatgacgaatatgatattaatattatttcagataattcagccattagaaataaaacaataggtcaaataactactcatctagatcagataccgataggaaatgaaggtgccactgaatttgaacaatggtgtttagacgcactaagaatagtatttgcatcccacctaacagacatcaagtcccatccaaatggtaacgcagttcagagacgagatattatagg

SEQ ID NO: 230738 - DNA, 394 bp, Glycine max
ctgccatctgtatctgcatagcataaataccgcacgcacgcgattcctatgatttgttttttcactctgggcgattttccctattctttttgagtgccgagcaaaaccctaatcgagttcgattgcaacacacctccgttgctgtattccaccttctccgacgaatggcaaccaaacctcttacaaccgaagctattgcgcttacagaaaagaagatggacatgacattagatgacataatcaaaatgtctaaaaatacgaagaataagaagccaagaagggttctgaacaaaagtcaaaagttttcaaataattttactcaagataagtctgcaaaggtccaacgttatatggaatcaagatcttctcttagacagggggctcttgcaaaaag

SEQ ID NO: 230739 - DNA, 405 bp, Glycine max
ctacaactagtaacaaagatccaacaagcagatcaatctctctctctgtctcccaatcaaaacagacatgggtttgaaggaggattttgagcagtatgctgagaaagcaaagactttgccaccgactcaatcaaacgaagacttgcttatcctttatggattgtacaagcaggccaccgttggacctgtcaacaccagccgtccgggaatgttcaacatgagggacagagctaaatgggatgcatggaaggctgttgaagggaaatccaaggacgaagcaatgagtgattacatcactaaggtgaaacagctgctggaagcagccggcatgcctgcttgataacattgtcatgccttgctttcttattctgtgctagaagttccaacagtttggaaataaacaat

SEQ ID NO: 230740 - DNA, 406 bp, Glycine max
gataatgtattatcacattattcctgagtatcaaaccgaagagagtatgtacaatacggttagaaggttcggtaaggttagctacgatacactgcggttaccgcacaaggttctggctcaagagtctgacggctccgttaaattcggtcacggcgattcctccgcctacctgtttgatcctgatatttacactgatggtaggatctccgttcagggaattgacggcgttcttatccctcctgaagaagaagaagaacgcactcgccgcaccactccacttgttaaggttgctgctcctaaaccaagaagagggaagttgatggaaatcgcttgtagcatgtttggatcttttggacaagtctgccaatgaaatcgcattctcaactaatcacaaaaataataaaga

SEQ ID NO: 230741 - DNA, 402 bp, Glycine max
gcacttctgctccgcaattatcatgggcaaggtcaagatcggaatcaacggatttggaagaattggccgtttggtagccagagtggctctgcagagagacgatgttgaactcgttgccgttaacgaccctttcatcaccaccgattacatgacatacatgtttaaatacgacagtgttcatggacactggaagcatcacgatgtcaccgttaaggacgagaagacccttctcttcggtgacaagccagtcactatttttggacacagaaaccctgaagagatcccatgggggtcaactggagctgacatcattgttgagtccaccggagttttcaccgataaggacaaggccgccgcacatttgaagggtggtgcaaagaaggttattatttctgcccccag

SEQ ID NO: 230742 - DNA, 398 bp, Glycine max
aaaagcactggcgcagctaccctgaggcttctcttctcttctcttctctgtcgtgagtcaccatggtgagggttagtgtgctgaacgatgctctgaagagcatgtacaatgctgagaaaaggggaaagcgccaagtcatgattaggccatcctccaaagtcattatcaaattccttttggtgatgcaaaaagcacggatacatcggagagtttgagtatgttgatgaccacagggctggtaaaatcgtggttgaattgaacggtagactgaacaagtgtggggttattagtccccgttttgatgtgggcgtcaaagagattgaaggttggactgctaggcttctcccctcaagacagtttgggtatattgtattgactacctctgctggcatcatgga

SEQ ID NO: 230743 - DNA, 404 bp, Glycine max
aaagaaaagaaaatcctcaattttctgagcagccaaacactctctctctgtctctcgaaaattctcagtttgcagagaaaatctgaatcatgtcgtggcaagcgtatgtcgacgatcaccttctgtgtgacatcgaaggtaaccacctcactcacgctgctatcatcggccaagacggcagcgtttgggctcagagtaccgacttccctcagttcaaacctgaggagataactgccatcatgaatgactttaatgagcctggatcacttgctccaactggattgtatctcggtggcaccaaatatatggtcatccagggtgaacccggtgctgtcattcgagggaagaagggtcctggtggtgttactgtgaagaagaccggtgcggccttgatcattggcatg

SEQ ID NO: 230744 - DNA, 408 bp, Glycine max
  unsure (1)..(408): unsure at all n locations
gtccacgataatgctctccggaaacgaagacagctccgccgcgggctccgaccaaacccaccgtcaaatcttcgaccactatgcgtcccacacactcatccccgaccacttcctacacgcgccaacgcactccaccgccaccaccgccgccgcagccaccgtggatttcacccatcaccaccacttcaccccgcaaccccaccaccacaaccaaaaccacatgaaccaccaccaccaccatgccttcttcgacccacgcgcttttcatggcgcgtcgaacacctcttaccccccaccccattccatgctctcccttgacccgctacctcacgtcaacgcagttgggcctgggcacgggcccggttccgggccangcggacttctccttgtcccanagtctgaagacgt

SEQ ID NO: 230745 - DNA, 405 bp, Glycine max
  unsure (1)..(405): unsure at all n locations
gtaaattaagaagatcattaatggcttctcttgcaaccttagctgctgttcaaccagctgcgctcaatggccttgctggaagttccctctctggaactaagctctctttcaagccctctcgccacactgtcaaatccaagaacttcaggagtggtgccgtggtagcaaagtatggtgacaagagtgtgtactttgatttggaggatctgggcaacactacggggcagtgggacttgtatggctcagatgcaccttcaccctacaaccctcttcagagcaagttcttcgagacatttgctgctccattcacaaagaggggattgttactcaagtttctgatattgggaggttggttcacccttgcatacttcagtgcaacagcctcaggtgacattctnacaatca

SEQ ID NO: 230746 - DNA, 409 bp, Glycine max
  unsure (1)..(409): unsure at all n locations
cactcataacacaaagcacaaagcaaagctcatccttgagttaaaaaaatggcagcagcttcttccatggctctctcatccccatccttggctggcaaggccgtgaagctgggcccatcagccccagaagtgggaagggtgagcatgaggaagaccgtcaccaagcaggtctcctcaggaagcccatggtacggcccagaccgagtcaagtacttgggcccattctctggcgagcccccgtcctacctaaccggtgagttcccaggcgactacggctgggacactgctgggctttccgcagacccagaaaccttcgccaagaaccgtgaactcgaagtgatccactccaggtgggccatgctcggagccttgggctgcgtcttcncggagttgctgtcncgcaacgggg

SEQ ID NO: 230747 - DNA, 407 bp, Glycine max
gtataggcgtgccaaggtcttgttaattttgagcgttaagtgctgcaactaatcagatcccaagaccttggcctaccttgccatacagaaaaaaaaaaagcaaaaaaaaagccaaggtttggagccaacaaaaataaacacaaagcacaagtcatggaaagaataatggttggaagtgcaacaaaggttgctttcaccctcttggccactttcgccattgtcattccatgccttgaggctggcattgctgagtttgacgattttctcaaagcccaagctgatgaagcccataaaattgctcttgattcctatgtcccagagccccacgatgtcgcccatgaactcaatttccatgttcatatggcactggaaaactccacaaggagggaactaaggcagaggaaact

SEQ ID NO: 230748 - DNA, 403 bp, Glycine max
catcgaacccgtcgtagcagaaaaacttgtcaccatggtttcttccgacaaggatccacgagaggatgtccttcaagcctggtacatggatgatagtgatgaagatcaaagactcccccaccacaaagaacccaaggagtttgtctcgttggaccaacttgctgaacttggagtccttagctggaaactagatgctgataaccatgaaaatgatccagagctgaagaagattcgtgaagagcgtggttacacctacatggatgtttgtgaggtctgcccagaaaagttgccaaattatgaacagaaaatcaaaagcttctttgaagagcatcttcacactgatgaggagatccgcttttgtgctgctggaagtggctattttgatgttagggatcgcaatgaa

SEQ ID NO: 230749 - DNA, 403 bp, Glycine max
aacttaagttcattccttgtgttttgctttcttcctcaaaaccaaacatgtcgaacacatgcggcaactgcgactgcgctgacaagactagctgcaccaagggaaacagctatggtgttattgtagagactgagaagagttacatcgagactgttgtcatggatgttccagcagctgagcatgatgggaagtgcaagtgtggcactaactgcacttgcacggactgcacctgtggccattaaggaatatgtatgaaaatgtaattgccatgtgtttggcaatacaaatatccaaataatgtaatcttcgtatgaataaatgtgtgtgctgttatcctacttcaggtctgtgtagtcatgcagtctgaatcatttcaagttcctgtcttagttaatataacagc

SEQ ID NO: 230750 - DNA, 392 bp, Glycine max
atccacaccatccatccacaatctcctccagcctactactttactctgtttccttttgtttcttattgatctctgacaaccccaacacttccgaatcttgcattgtatctacccacttctcaaccaacaatggcaatggcaacccaagcctctctcttcaacccacccctctccggtctcaaacccagcgaccgagccaccgcgccatggaaacaatcctccaacctctccttctccacctcgaagcccctcaagttctcgcgaacaatcagagcagcagccaccgaccagacgacagaggcaccggttgggttcaccctatcggaactggacccaaacagcccttcaccgatcttcggaggcagcaccggcaggctcctgcgcaaggccca

SEQ ID NO: 230751 - DNA, 394 bp, Glycine max
cggatgttcccgcggcggtgcgggagttttcccggacgctgttcaacatgaggccggacatctcgctgttcgtgtcgcggacggtgttccacagcgacctgagggggattctgggtctggttaacgtcccctgttgtattatgcagacggcacgtgacatgtccgtgcctgccagcgtggcgacctacatgaaggaccacatcggcggaaagagcagcatccagtggctggacacggagggccacctcccgcacttgagtgctccttcatacctggctcgccagcttgagattgcgctttcccagtagcgcgtggggaggcgcgtgctagtcctggcgcgtgggtctgcttgttaatttaagtaatttaactctactagtactagtactaccag

SEQ ID NO: 230752 - DNA, 411 bp, Glycine max
accaaattgcttctgtccatccctgtcattctcaagttggctgatgctcttgacatagctgtgaaatctgtgaggtacactcgtggaagcttcattttccctggggcacagtcttttcctcaccgcagtttttccgaggaggtttctgttcttgacagctatttcagcaaccttggttctggtagcaaagcatatgttatgggtgacccttcaaagtcacagatttggcacatctactctgcaagtgcacagaccaaaggatcatctgaagctgtctatggcctagagatgtgcatgaccggtttagacaaggaaagtgcttctgtgtttttcaaggagaatacatcttcagcagcttcaatgaccgaaaattctggaattaggaagatccttccacagtctgatatatct

SEQ ID NO: 230753 - DNA, 410 bp, Glycine max
gatgaagaagtgtttcgcgcgcatggacgaagaggttctcaggtggagccagaacaacgagactccaaattgcaggtgcgagcttcaaaccccgcactgcgacgccgtaggctccaccgctgtcgtcgccgtcgtcacgccagagaaaatcatcgtcgccaactgcggcgattcacgcgccgtgctttgtcgcaacaaggtagccgtcccactctccgacgatcacaagccggaccggcccgacgagttgcttcggatccaagccgcgggagggcgcgtgatatattgggaccggcctagagtgcttggagtgttggctatgtccagagccataggggacaattatctgaaaccgtatgtaatttcggaaccggaggtaacggtaacggagcggagtgacaaggatgagt

SEQ ID NO: 230754 - DNA, 405 bp, Glycine max
ctcctctcaccctcctctctccccgtctctctctccttctccctgcctcctacctgctccgctgccgtcccccgccgtgctccgtccctccgccgccgcctccgacgacctcagcttccgcgacgtcgaaaagctcttctcctctgtctccaccaccagcctcctccgctcctccgccgtgctgcacgccaccgccgtcgagcccatggttgacttcggcacatggctcttgcgatcaaatctcatgcacgtgcatggcatccgcgacctcatcctcgccaccgtccgcaacaccttcttcgaccacttttgcgccggcgaggacgccatcaccaccgctgccagcatccgccacctaaaccgtgccggcctccgcggcatgctcgtctacggcgtcgaagacgc

SEQ ID NO: 230755 - DNA, 334 bp, Glycine max
caccaccatcttcttcctcttcacagtgctcaaggtttcagcatcatcgtcagtgatattctacaacaagtgcccccacccagtgtggcccgggatccagcccagcgcaggaaagcccgttctggcccgcggaggcttcaagctcgccccaaaccgggcctactccctccagctacccgccctctggtccgggcgcttctggggccgccacggctgcgccttcgacgtcggcgggcgcgggcgctgcgccaccggtgactgcggcgggtccctcttctgcaacggcatcgggggaagcccaccggcgaccctggcggagttgacgctgggcaac

SEQ ID NO: 230756 - DNA, 405 bp, Glycine max
caccaattcacacacataataaactcactgctcttctctctacccctccctccctcctcgcctccgcctcaagcttccctccttcaccctcccctccccgaacgccgtcttcgccctcctcctcctcacctacttcatggtcgtctccggcattgtttacgacatcatcgtcgagccccccggcatcggctccactcaggacccctacaccggcgccgtccgccccgtcgtcttcatgtccggccgcgtcaacggccagtacatcatcgagggcctctcctccggattcatgttcgtccttggtggcatcggcatcattctcctcgacctcgccctcgatcgcaaccgcgcgaaatccgtcaaggtttcctacgcctccgccggcgtttcctccgtcgtgctagc

SEQ ID NO: 230757 - DNA, 404 bp, Glycine max
tccatagcttctttagccttggataagggagaacttgtttctgatgacttggttgttggcattatagatgaagcaatgaagaaaccatcatgtcagaaaggtttcattcttgatggttttccaagaactgtggtccaagcacagaagcttgatgagatgctgcaaaaacaaggagttaaagttgataaggtgctcaattttgcaattgatgatgcaatccttgaggagcgaattactggtcgctggatacacccatccagtggcagaacttaccatacaaaattttcccctccaaaggttcttggtgttgatgatgttactggtgaaccacttatccagcgcaaggatgacactgcggctgttcttaagtcaagactggaggcatttcacaagcaaaccgaacc

SEQ ID NO: 230758 - DNA, 408 bp, Glycine max
gacaaagtaaattcagcacttctgctgccattgaggaagaacccattaaaccatcaatacaagtagaacacacccaactcttaattgatggaaaatttgtagatgctgcttctggtaaaacttttcaaactttagatcctaggacaggtgaagtgattgctcatgttgctgagggtcactctgaagatgttgatcgagcagtttcagctgcacgaaaagcatttgatcatggaccatggcctaagatgacagcttatgaacggcaaaggatcttgttgcgtgtggccgatctgatcgagaagcataatgatgagcttgcagcacttgagacttgggataatggaaagccttatgaacaagctgctaagattgaagttccaatgcttgttcgcctgattcgatactatg

SEQ ID NO: 230759 - DNA, 212 bp, Glycine max
cattttccctcttctttctctctcacgttttccgcttcagttttctcgggaaaatcacggtgaaaggtccaggcctctagtctgacattggcaagagagctcgcgatcttcggttcaacgattaccagaatgaccacaagttcaccatcaccacttacacttccaccggagtggaaatcactgccactggagtcaggaaaggtgagatacat

SEQ ID NO: 230760 - DNA, 412 bp, Glycine max
caagcattggcagagagggaaggtctctcgtttcttgagacatctgcactggaagcaaccaacattgagaaggcattccaaaccattttgacagagatttatcatattgttagcaaaaaggcgctcgctgctcaggaagcagctgttggtaccatacttcctggtcaaggtaccaccatcaatgttggggatgcatctgggaatacaaagagaggctgctgctccgcttaatgtgacatgtgaggaaaaagcgatggtagcagatagtattttttccccccaattctgttttgcccctttctcttttcatcttttttttttcctcctttctttatgggtgagagacacatgtagagtacatttacttcatctagttgcaaaaacaaagtctgtgaaattttataaaacaata

SEQ ID NO: 230761 - DNA, 402 bp, Glycine max
tcgtgttgctgttcaatgtaaggttgcatcagatcttcccaagcttgttgaaggtcttaagcggttggccaagtcagatcctatggttgtttgtaccattgaggagtctggtgaacacattgttgctggtgcaggagagcttcatcttgagatctgtttgaaggacttgcaggatgatttcatgggtggagctgagatcattaaatctgaccctgttgtgtcattcagggagactgtcctggagagatcatgccgcactgtgatgagcaaatcacccaacaagcacaatcgtctgtacatggaagcaagaccattggaggaaggtcttgccgaggccattgacgatggcaagattggaccaagggatgaccccaagattcgctccaagatcttgtcagaaga

SEQ ID NO: 230762 - DNA, 398 bp, Glycine max
gaactcatgaccaagattgacaggcgatccggcaaagagcttgagaaggagcccaagtttttgaagaacggtgatgctggttttgttaagatgattccaaccaaacccatggttgttgaaactttctccgagtatcctccacttggtaggtttgctgttagggacatgcgtcaaactgttgctgtgggagtcatcaagaacgttgagaagaaggatcctaccggagccaaggtcaccaaggctgcccagaagaagaagtgaatcgtgcgggctggttcatcaggggatgttggttacaataaatgttggtttcttttctgtactcttgtgtcttcttttctaggtagcttgtttttcggacaaagtttgaagtctccaccatcatctcgcaactgttg

SEQ ID NO: 230763 - DNA, 409 bp, Glycine max
cttttacctttccttccttccacttccaattttcaataattcacgactccttccgagatctctctctctcgcccacaatccaaccatggcgaatacggggaatttagacgcggcgatagagcaattgctgaacgtggagaagcagatgaggctcgccggtgacgtggcgggtaccagaaaagcagccaccgatattttgcagctctgcttcgatgcacgagcctggaaaacactcaatgaccagattgtcgttttgtcaaaacgacgtggccagctcaagcaggctgtaacagctatggtgcaacaggctatgcaatatattgacgagacaccagatatcgaaactcgcatagaactcatcaaaacgttgaacagtgtgtctgcagggaagatatacgtggaaattgag

SEQ ID NO: 230764 - DNA, 405 bp, Glycine max
atagcccaagccctatacaaccaaaccctaacacacacccatttgattcagtttccatggctagcctcaaggttgcatttttggctgcagtgctctgcatggttgtggtgagtgcacccatggcacatgcagctatcacgtgcgggcaggtgacgaatagcctgatcaattgcatcggttacctccagaacggaggaacgccgccgtcgggatgctgcaacggagtgaagagcctcaatgccgccgccaagaccaccgccgaccgccagacggcgtgcaactgcctcaagtcggccgccagccaaatctccggcttcaaagccaacaacgccgcctcgctccccggcaaatgcggagttcccatcccctacaagatcagcacctccaccaactgcgctaccatca

SEQ ID NO: 230765 - DNA, 406 bp, Glycine max
gaacgcagatccagccgcttccgcttgttcgatcgctacagacgcttgtatcggattattcatgattgattcataagcagcatgtcttcctccggctatagttgttgcagatctcggatgttgtaaaattagtgtatgatgtgaagctatgggctggaaaatgtggatgtaggagatttcgggacgaaaggcctcaaaacgcttcgtcgtttgtggttactgagtcctgagtgatcttgtcatccgacctttgccatgacaggtgcgcttgcttggcaggtcaaaatatgttaataaaaaaagttttattggtttagggagagatcgcacgggagttgcccggggtctctctctcgtgtggtgtgtggtgtttgctgtgctctccttttcgttatgccttttatta

SEQ ID NO: 230766 - DNA, 408 bp, Glycine max
ttggcatcttgtgttgtgtccctcttttaagctatttccttctcttaacacaattggttgtgccaattgccatagtcaccaaccaattaacaaaggtatatatatcatcatatcatcaccaaatgaaaaatattgggttgttttttcttgtggtggtggctacttttgtggtggcagccacagctggtagcttttaccaagactttgaaataacgtggggtggtgagcgtgccaaaatctatgagaatggaaaccttctcacactctcccttgacagagcctctggctctggctttcgttccaaaaaagagtacttgttcggaaaaattgacatgcagctcaagcttgtgcctggtaactctgctggaacagtaactgcctattatttatcttctctggggcctactc

SEQ ID NO: 230767 - DNA, 410 bp, Glycine max
ataacattaacatctccaaccttggcagcacaaagcaagccgcaggatctggtccggtcctcgtgcgtgcacgcgcggtacccgcgtctgtgcctgcacaccctctccaactatccgggctccgccaacacgccattagacgtggcccggacagcgctgaaggtgagcctagcgcacacacgccgggcctccaagttcctgcacgcgctttctcatgacgattcaatcatcatgagaaagcgtgagcgctccgcgctgcgagactgcacggagcagatctcggactctattgatcagcttcggcggagtctcgacgagctgcagcatctccgctcggagacattccggtggcagatgagcaacgccctgacgtgggtcagcgccgccctcaccgatggcgacacctgcct

SEQ ID NO: 230768 - DNA, 410 bp, Glycine max
ctagcagcactggagctgccaaggctgttgggaaagtccttcctgctttgaatggaaaattgactggtatggcattccgtgttcccaccgtggatgtctctgttgttgacctcacggtgaggctggagaaggaagcctcatatgatgaaattaaaaatgctatcaaggaggaatcagagggcaagttgaagggaattcttggttacactgaagatgatgtggtctccaccgactttgttggtgataacagatcaagtatttttgatgcaaaggctggaattgcattgaataagaattttgtgaagcttgtctcttggtatgacaacgagtggggatacagttcacgtgtcattgacctgcttgtaatcgttgccaagaagtctttttaattaaggtggttctaacattat

SEQ ID NO: 230769 - DNA, 385 bp, Glycine max
ggaaagttagaaatggctgaagagtgtttaaaacacgcaacagatttgagtgggttattgctgctatattcttctttaggagatgctgaaggaatatcaaaacttgcaactcttgctaaagagcaagggaagaataatgttgcattcctttgcttattcatgttgggtaaacttgaggactgccttcaacttttggtagaaagcaatcggattccagaggctgctttaatggctcgatcctatctcccaagcaaggtctcagagatagtggcaatttggatacaagatctcagtaaggtgaatccaaaagctgctgaatcattggctgatcctgaggaatatcataatttgtttgatgactggcaagttgcactagctgttcatt

SEQ ID NO: 230770 - DNA, 409 bp, Glycine max
atgaacacggtgctagatgaggaaagcgcggttggtggcggggacaagaagaaaaagaagatgcaaaagaaagaaaaggaagtcaggactttttactctattccagcagcacccgcgatggaaacgacccaaaggagggttgattttgcaaaagctgggccacccaatgtaatgttaatgcagcagatcccaaagcaaaaccctgagtattcattggtggagacaagtccaccactggcggctcgtttgcgctatagaggaggccgggacaagatatccaccacctacgacttagtggaacagatgaattacttgtacgtcaatgttgtcaaggctagggatctccctgttaaggatatcactggtagccttgacccttatgtggaagtcaagcttggtaactacaagg

SEQ ID NO: 230771 - DNA, 417 bp, Glycine max
gttattagggtttttgagtgcggcggtccaaacactcttctctgcagcttttgcctacaactcccttcaccatggctgaacaaaccgagaaagcttttctgaagcaaccaaaagtgtttctcagcacaaagaagactgggaagggaaagagacctggaaaaggtgggaaccgcttttggaagtccattgggcttggatttaagactcccagggaagccatcgaaggaacctatattgacaagaagtgccccttcactggcaatgtttccatccgtggccgtatcttggctggaacatgtcacagtgctaagatgaacaggactattattgttagaaggaattatctccattttatcaagaagtaccagaggtacgagaagaggcactcaaatattcctgctcatatatcacctgcct

SEQ ID NO: 230772 - DNA, 409 bp, Glycine max
  unsure (1)..(409): unsure at all n locations
cttctccttctcttctctgcttctcttttcatctccgaaaacaatgaagctcattagcagcattaaccccaaaaatctcaaactcagtcccaaacgcttctttcgcaaaaaggaacgatctttagtctcacgctccgacccaccttcattcggatccggatcttcctccgacgactccaccacaaatcacaagccttccgccggtaaccaaactccgaccagcgtcctcccgggcgtctccggagactggtccgacgtcgccgccgtcgacgtgcggtgggacctcgcccaggccttccgcctcatcgaccgcgacaacgacggcgtcgtcacgcgccaggacctcgaggccctcctcacgtgcctcggcgcgtcgccgtgccncgacgacgtggcggtcatgctcggc

SEQ ID NO: 230773 - DNA, 400 bp, Glycine max
gccattcgtattgtcgcagagaaagaaaaccctagctcaccgtttcaagatgcaaatcttcgttaagaccctcactggtaagaccatcactctcgaagtcgagagttcagataccatagacaatgtaaaggccaaaattcaagacaaggaagggatcccaccagatcagcaacggctcatttttgctggcaagcagcttgaggatggacgtacccttgctgattataacatccaaaaggagtccactctccacttggttcttcgtctccgtggtgggatgcaaatctttgttaagaccttgacgggaaagacaatcacccttgaggtcgagagctccgacaccattgacaacgttaaggctaagattcaggacaaagagggtatccctccagattaacag

SEQ ID NO: 230774 - DNA, 405 bp, Glycine max
atttcaaccaacagttctcaagggccataattttgttatcggagacaaatcctttaacaggagatgaaggagaaatcagaaaggattgtcgctacctcaatgccaattagatatataatataagcttgcatttgtgcatgataatatgtataattagcataagattataatgcacgagtgtgtcaaaataaagagggtgtggaacgtactgggcctgggttaccatacatattcagtgcaaaaagctattgggcctagccttatatatacccttgtgtttgctttgttcatagatgtgaatgttacttgacttcagctgacaaagcctcaaacatcttaaaggtttatgaagtactttgttcttcgctgtcgatctataatggaaaatgtttgatcaacatttca

SEQ ID NO: 230775 - DNA, 491 bp, Glycine max
  unsure (1)..(491): unsure at all n locations
ntccgcaatctnaatgtcgtaaagaagactactgacgtcggacgcacgcgtacgtaaactcggaattcggctcgagagcaatatggggggagttcccatcaggcaacaacggttctgcctgaccctacttaagcatgcatattatgtcagtgaagacttggtgtgaagccttggagcttacgttagaagagcaaaaggcccggggctagggtgagctgaggggggacagcgtaagtgagcgaatgtgtgtaagcccagtcaaacatgactgttctaggcggggcgggccacccaccttcgaatggtgttggtcctacggaccgtgaatggattcgcctctggcctctgggcacgtcggaaccgcatgagttcaccggggtggagcacagtccgccaaaatcggcataggttaggtgctattgatggaacatggtaagcctatctttctccatatggaagtgctgcgggcacatagagatgtgggtaganga

SEQ ID NO: 230776 - DNA, 405 bp, Glycine max
cgaaaatgtggaagagaacgggttttgaagaagaagcagttcaattgatcaactcagatttcagggacctaagtctagctgctaatagactcgcccatcatgccatcaaacttggtggcattggctttggagcctcttttttcggattgtttgctgccattgctgctatttatctgttgattttggatcgtacaaactggaaaacaaatattctcacagcactactcattccatacattttcttcagcttgccttcattaattttcgacgtcttcaggggagagcttggaaaatggattgctgcagttgctgttgtattacgccttttccttccaagacacttccctgattggctggaattgcctggtgctctgattcttcttatcgttgtagctccttctctaa

SEQ ID NO: 230777 - DNA, 405 bp, Glycine max
ggaaacatgataaaataatcaaagctttgtgtgatatggctaaagataatgcacatgttcctatgctttcccgcactcatggacagccagcttcaccaactactttgggaaaggaaatggcgatctttgctgcaagattaagcagagaaaggaaggatctgtctcaggttgagatagtggggaaatttgctggtgcggttggaaattacaatgcacatattgttgcatatcctgatgttaactggcctcacattgcagaacagtttgtacactctcttggattaagttttaatccttatgttgctcagattgaaactcatgactacatggcaaagctttttcatttgctcatccagttcaataatatattaatcgattttgatagagatgtatggggctatatat

SEQ ID NO: 230778 - DNA, 402 bp, Glycine max
cctaattgtttaaacctaattctcatttcttcatcgttcgattcttctcctcctaaagatgcagatcttcgtgaaaactttgaccggtaagaccatcacccttgaggtggagtcctccgacaccatcgataacgtgaaagctaagattcaagacaaggaagggatcccacctgaccagcagagacttatctttgcgggtaaacagcttgaggatggtcgaacccttgccgactacaacatccaaaaggaatccactctccacctcgtgcttcgcctcaggggtggcatgcaaatctttgtcaagactttgactggcaagaccatcaccctcgaggtcgaatcctcggacaccattgataatgtcaaggccaagattcaggacaaggagggtatccctccaga

SEQ ID NO: 230779 - DNA, 429 bp, Glycine max
  unsure (1)..(429): unsure at all n locations
taattgcaaacaatccaacagggctatgtgagggtggctgtgctgctattattgactcagggacctctttgattgccggtccaacaaaaattgtgactcaaattaaccgtgccattggagcagaaggatatgtgagttatgaatgtaaaaacatcatccataactacggtgattcaatatgggaatatataatttctgggttaaagcctgaaattatttgtgttgacattggactctgctcgcgtaatagaacatttataacaaatgatgttattgaaacagctacacataatgaaagttggggcgagtcacgaacaaaggagagccccttgtgtactttttgtgacatgattgtcttttggatgcaagttcagcttaagcaaaagaatacaaaggaaaaaatattanaatatgtggatgagctgtgtt

SEQ ID NO: 230780 - DNA, 402 bp, Glycine max
ccattttaaaaaaagtatggatggtttcagcgagctaaataagggacccagagctgccaagagttctgataataaaaacatcaaaagtcttggacctgtcacattattacacaagggacagaacctttcagtgaagagtgacaacacagaagttcctttggttcccgacaaggaacagtacaatgggaaagatttggctgagaattattctgatgccaagttttttgtcatcaaatcctatagtgaaggatgatattcataaaagcataaaatacagcgcttgggcaagcacccctaacggcaacagaaagctggattcggcatatcatgaagccaaggagaagcccggtggctgtcccatatttttgttattttcggtcaacactagtgggcaatttgttg

SEQ ID NO: 230781 - DNA, 302 bp, Glycine max
ataagcatcaagcggtggcattgagagtccaagcagacgggtccatctttgtacaattgctcaatggatgggtatcaggacacactttatgcacacaccatgcgtcaattcgaaagagattgcaccatttcaggtaccatcgactttgtgttcggtaatgcagtatctgtttttcaaaattgcacttacgtggtccgaaagccattggagaaccatcattgcattgtgactgcacaaggtagagaagacagacagcaacgacctggaatagtaatcaagggggatccattgtgtctgaccct

SEQ ID NO: 230782 - DNA, 501 bp, Glycine max
aatcaggttgcatatagaagactatgacgtcgcgcccacgcgtacgtaaactcggaattcggctcgagattccatcaccgctacccagaagactgttgatggaccatcagccaaggactggagaggtggaagagctgcttcatttaacatcattcctagcagcactggagctgccaaggctgttgggaaagtcctccctgctttgaatggaaaattgactggtatggcattccgtgttcccaccgtggatgtctctgttgttgacctcacagtgaggctggagaaagaagcttcctacgatgaaattaaaaatgctatcaaggaggaatcagagggcaagttgaagggaattcttggttacactgaagatgatgtggtctccactgactttatccgcgatagcagatcaagtatttttgatgcaaacgctggaattgcattgaataagaactttgtgaaacttgtttcctggtacgacaacgagtggggatacagctcacg

SEQ ID NO: 230783 - DNA, 426 bp, Glycine max
cccctccacccacccagcatatctctctattcctatttattagcacccctcacattaccttgtgtcaccaactactttgactcctttaccataccattacaataattatcaaacctaaccagtaaaaatggtgaccgtggaggaaatccgcaacgctcagcgttcccatggacccgccaccatcttggccttcggcaccgccacgccgtccaactgcgtctcccaagccgattaccctgactactacttccgcattaccaacagcgaacacatgactgatctcaaagaaaagttcaagcgcatgtgtgaaaagtccatgataaagaagcgatacatgcacctgacggaggagtttctgaaagagaacccgaacatgtgcgagtacatggcgccatcgctggacgtgagacaagacgtagtggtgat

SEQ ID NO: 230784 - DNA, 400 bp, Glycine max
ctcttttgtcagacacgtataagtgtatgacattctctactacaactacttggtgtttcccataccgaacactcttcttcaatcaagcgaaggtggtctcgattgcaagtgatccacgatacactctacgcttcacaaaaccttcaaacccaattccacagaattcttctgcttcaccatgccaccaaagcctttagactatgggtcaataaatgaaaacgtgaaaaaaagtcaatatgctgtcagaggtgaattataccttcgagcttctgaaacttcagaaagagggcaaaaggattatctttactaatgttggcaacccgcatgcattgggacagaaaccaatgagcttccctccccaagttgttgctttgtgccaagctccattcctacttgatga

SEQ ID NO: 230785 - DNA, 373 bp, Glycine max
tggcaggaaaggaaagggaaagggtgtttaccagtttgtagacaaatacggtgctaatgtcgatggttacagtcctatctacgacaccaaggactggtctccaaccggtgatgtctacgctggcggtacgactggcttggctatctgggctgtgactctacttggtcttttagctggtggtgcacttcttgtctacaacacaagtgctttggttcaatagactttgcaaatcgatgtttaagttataacatagtccatgtaactatctaaaaatgaagaactattcgtgaagtactttgtggatatgttccttctgttctataaatgagtggatgtgaaaaaacttttttgttagtaatcatgcttcttcatc

SEQ ID NO: 230786 - DNA, 367 bp, Glycine max
ggagttccctattttgagctacgccgatttctaccagttggctggcgttgttgccgttgaggtcacgggtggacctgaagttccattccaccctggaagagaggacaagcctgagccaccaccagagggtcgcttgcccgatgccactaagggttctgaccatttgagagatgtgtttggcaaagctatggggcttactgaccaagatatcgttgctctatctgggggtcacactattggagctgcacacaaggagcgttctggatttgagggtccctggacctctaatcctcttattttcgacaactcatacttcacggatttgttgattggtgagaaggaaggtctccttcagcaaccttctgac

SEQ ID NO: 230787 - DNA, 380 bp, Glycine max
aggaggagaagtgatggagaggttgacaacactaggcatcgcggtgaatttggtaacatatttgactgggaccatgcatttgggtaatgctgcctctgccaacgttgtaaccaacttcttgggaacctccttcatgctctgtctgctcggtggcttcctcgccgatactttcctcggaagataccgcaccatcgccatcttcgctgccgttcaagcaactggtgtgacaatcttgacaatatcaaccataattccgagccttcaccctccaaagtgcaacggagacaccgtgccaccttgcgtgagagcaaatgagaaacaattaacggtgctttatttggcgctttatgtaacggcgctcggcaccggacgtttgaaat

SEQ ID NO: 230788 - DNA, 343 bp, Glycine max
cagctattgataaagctgtggctgatggagtgaatgttctttccatctctttgggtggtggagtctcctcttattacagagatagtttatcagtggcagcatttggagcaatggagaggggtgtttttgtttcatgttctgctggaaatgcaggacctgaccctgccagcctcaccaatgtgtcaccatggatcaccacagttggagccagcacaatggatagggattttccagcggatgttaggcttgggaatggcaaaaaagtgactggagtttcactctataaagggaaaaatgtgctatcaattgagaaacaataccctttggtgtacatggggagcaa

SEQ ID NO: 230789 - DNA, 257 bp, Glycine max
ggaattcagctcgagcagctattgataaagctgtggctgctggagtgaatgtcctttccatctctttgggtggtggaatctccacatattgcagagataattcagcagtggcagcgttttgaccaatggacaggggtgtttttgcttcatgttctgctgtcaaatgcatgacctgaccctgccattctcaccaatgtgtcaccaggaatcaccccacgttggacgactcacaccggatacggattttccactggctc

SEQ ID NO: 230790 - DNA, 364 bp, Glycine max
tggcaggaaaggaaagggaaagggtgtttaccagtttgtagacaaatacggtgctaatgtcgatggttacagtcctatctacgacaccaaggactggtctccaaccggtgatgtctacgctggcggtacgactggcttggctatctgggctgtgactctacttggtcttttagctggtggtgcacttcttgtctacaacacaagtgctttggttcaatagactttgcaaatcgatgtttaagttataacatagtccatgtaactatctaaaaatgaagaactattcgtgaagtactttgtggatatgttccttctgttccataaatgactggatgtgaaaaaacttttttgttagtaatcatgc

SEQ ID NO: 230791 - DNA, 300 bp, Glycine max
gcccacccttacttaaactcggaattcggctcaagcttctccctcttactcttacactctcatccaaatcttgcaaaaaaaaaaaatcacaatggcagcgagcgctcacactccatccaaagagttcgtgtacatggccatcctggcggatcatgcccatcgctactaggagatggtagagttcatgagaaaggtctccgcctccgccgacaaccatgagcttagcgttgaggaacgcaacctcctctccgttggcgaacataactttatctgagcttgccgctccacctggcgcatcat

SEQ ID NO: 230792 - DNA, 338 bp, Glycine max
gttgggtcttagcattgatgaggatgacaatggtggagacgatgttgatatgcccccattggaagaggacggtgctgaggagagcaagatggaggaagtggactaaatgccaaaggtctcgtgttaaatgaattgtggttcgtgtctgttaaatggtggtggatgcagaagtcttttagttttatctttctttttgttttggttttttgagaaatatagggtttttactttttaagtttttgtgatgttaaaaaaatgtgtctgtcaatctgtgtgttgcatctacctacttttgtcagttattgttccggataaaacatcctttgtcagtaactgtt

SEQ ID NO: 230793 - DNA, 416 bp, Glycine max
gcaagaacatcacagatagagcaatgtattccttggcacacagcaaggtgaacaacaggatgtggggaactgtgaaaggaggaggaaatgatgaagatggtttaaggactttgaacattagccaatgcactgcactcaccccatctgctgttcaagctgtttgtgactcattcccttctctccacacatgctcagggaggcactcactcatcatgagtggctgcctcaacttgacatcagtgcattgtgcctgtgctgtccatgcgcaccgtgcattcaccactttcccttatcctgcccattaagaagcccatccttttgatgttgaacacacttcgaggatgtgccccttgaaagggctcagagaaatgaaagaagtgaaatccaccccccttgtagatgtatgcctgcataag

SEQ ID NO: 230794 - DNA, 208 bp, Glycine max
accacaagaatgagggagatattgcacgtgcaaggtgggcaatgcgggaaccaaatcggttccaagttctgggaagtgatatgcgacgaacacggcatcgaccccaccggaaagtacaccggcgacgaggcctccgatctccaactggagaggattaacgtctactacaatgaggcctccggcggaaggtatgttccccgggccgtcc

SEQ ID NO: 230795 - DNA, 379 bp, Glycine max
attgagtttaagatctgattgggcggcgacgatggagaacaacgacagtatcatatcgcgggagaagatcgaccaggcggccgtgtggctcggctccgccgtctcttccgctttcttttcctctttggaacgcttttcctgcgtcaacgtcgccacctctgaccccgacaacgacgaagacgacgacgattattactccaccaccaaccgccactcccaccgccgcatccaccaccaccactagccctccctccattcagatcgacgggaaaaaaacaaacgacgtctccaacctccccgtttgagacaatataacgacgacgtcgttgctgcgctgtgtatagacctttttccctttccttcgttcgtgtgtgttatg

SEQ ID NO: 230796 - DNA, 422 bp, Glycine max
gtgggattttaacaatggaggatttacacaattacaagttggaagtaacagatgcaacgactgtgaatgtgatgggatacaccatatatggaatgccacctccttcatctggaacacttgctctttctctggttctgaacatcttgggcagttatggaggttctaatgctgcaaggggaaatcttggtctacatcgactaatagaagctctgaaacacatgtgggctgttcgaatgaacttgggtgaccccaactttgtaaacattgatgatactatatccaaaatgctttccccatcttttgcaaaagatattcagcacatgatacttgataacactactttccctccagagtactatatgaacaggtggagtcaacttagcgattcacggacaagccatatgtgcattgtcgatgctgat

SEQ ID NO: 230797 - DNA, 343 bp, Glycine max
gtctcaagcaaccatggcaatggcaacccaagcctctctcttaaccccacccctctccggtctcaaagccagcgaccgcgcctccgtgccatggaagcaaaactccagcctctccttctccagcccgaagcccctcaagttctccagaacaatcagagcagcagccgccgacgagaccacagaggcaccagcaaaagtagaggctgcaccggtcgggttcaccccaccagaacttgacccaaacaccccttccccgatcttcgggggcagcaccggcgggctcctgcgcaaggcacacgtggaggagttttatgtcaataccttggactcacccaaagaacag

SEQ ID NO: 230798 - DNA, 452 bp, Glycine max
aggcctacttaagatcggaattcggctcaagttttttttttctcttcctctgaagccattttttcttccttcctttttggtttcctattccttcttcaattatctctcttcatttagttgtgaacattttttcggtctcgtcgaagcaatggtggcgggtggcaattccaaatccgacatctcctttgctggcacttacgctagcagtgctttcgctgcatgtttcgccgaggtgtgtactcttcctttggacaccgccaaagttaggcttcagcttcaaaaacaagctgtagttggtgatgtggtgaccttacctaaatataggggtttgctgggaacgattggaaccattgccagggaagaaggtctttcagcactctggaaggggattgtgccagggctacatcgtcaatgtttgaatggtggtttaagaattgcgttatatgagcctg

SEQ ID NO: 230799 - DNA, 177 bp, Glycine max
tggcaggaaaggaaagggaaagggtgtttaccagtttgtagacaaatacggtgctaatgtcgatggttacagtcctatctacgacaccaaggactggtctccaaccggtgatgtctacgctggcggtacgactggcttggctatctgggctgtgactctacttggtcttttagctgg

SEQ ID NO: 230800 - DNA, 325 bp, Glycine max
ggcctacgtaagatcggacttcggctcgagcagcacgaattgcatcactctcgtccgttaccactgcggccctagaccacgtcaagcgatctctcacaacgccctcatccgttagggcaaagatgagtcgaggaactggaagttgaaaccatcgtgacagcactactttctcacctgaacgacgtctctatcaagtggagtaagctttcaatgctgtgaacgtcgcaggaatcacctcgattggtgtccgaagaacggattcaaattgtgtcgttactcagaagaacgtttcggatacgcttttggaccacacaactgttaaaca

SEQ ID NO: 230801 - DNA, 419 bp, Glycine max
tcgaggaagttcccaacataaacaactttagcgaaatgctctcagggaagaccaggttatttgttgtcgatacaagtttcaggacgtgcttgcttctgtccttcctattcaagatattgcacaatgggcacatgatgtcggatcacaagttgcttgtagatgcatgccacagtgttccacacatgatgattgatgtccagagccttaatgttgactttcttgtggcttcttctcacaagatgtgtggccctacaggcattggattcctatacggtaaaatatacctcttgtcttccatgcctccatttttgggttgtggtgaaatgatttccgatgtatatcttgatcattcaacttattccgaacctccaaccatatttgaacctggaacaccagctagtggggaagcaattggttta

SEQ ID NO: 230802 - DNA, 371 bp, Glycine max
cctctctctctttctctttctctctcatccagatcttgcagaaaaaaaaaaacacaatggcagcgagcgctcccactccacgcgaagagttcgtgtacatggcgaagctggcggagcaggccgagcgctacgaggagatggtggagttcatggagaaggtctccgcctccgccgagagcgaggagctgaccgtggaggagcgcaacctcctctccgtcgcctacaagaacgtaatcggcgctcgccgcgcctcctggcgcatcatctcctccattgagcagaaggaggagagccgcggcaacgaggaccacgtcgccgtcatccgtgactaccgctccaagatcgaggccgagctctccaacatctgcgac

SEQ ID NO: 230803 - DNA, 431 bp, Glycine max
ccctctctctctttctctttctctctcatccagatcttgcaaaaaaaaaaaaacacaatggcagcgagcgctcccactccacgcgaagagttcgtgtacatggcgaagctggcggagcaggccgagcgctacgaggagatggtggagttcatggagaaggtctccgcctccgccgagagcgaggagctgaccgtggaggagcgcaacctcctctccgtcgcctacaagaacgtaatcggcgctcgccgcgcctcctggcgcatcatctcctccattgagcagaaggaggagagccgcggcaacgaggaccacgtcgccgtcatccgtgactaccgctccaagatcgaggccgagctctccaacatctgcgacggaatcctcaagctcctcgacacgcgcctcgtcccctccgccgcctccggcgactccaa

SEQ ID NO: 230804 - DNA, 424 bp, Glycine max
cacattcaaatccaaatggccctttacattacactaataattggcctcctagtaaacaccctagtactctataaatagcatttgcatgcaccttagtcttcaccaaaatactcctcttggcatcttgtgttgtgtccctcttttaagctatttccttctcttaacacaattggttgtgccaattgccatagtcaccaaccaattaacaaaggtatatatatcatcatatcatcaccaaatgaaaaatattgggttgttttttcttgtggtggtggctacttttgtggtggcaaccacaactgggaaccttttacacgaactttgacataacgtggggtggtgagcgtgccacaatctatgagaatggaaaccttctcacactctcccttgacagagcctctggctctggctttccttccaaaaa

SEQ ID NO: 230805 - DNA, 377 bp, Glycine max
cccaaaccagcaaaaacctttcttcacaaaatggcctcaacagctctaacaagcctcaccctccgcacgctatcttatcctacaccctcctcttcttaccctacgcacctctccgccaaagcctcctctctcgaattccccaatctctcccaccgcgccgctaccacacgccgcctccgtgtcgtcgtctccgccgttgaggcgcctgagaaagtcatcaaactcggcgacgaaatcgccggactcacgctcgaggaggccaagaacctcgtcgacgtcctccaggataagctcggcgtctccgcggcggcgttcgcccctgtggcagttgccgtcggttccggcggctctgtggcggacgcaccagcggtggttga

SEQ ID NO: 230806 - DNA, 178 bp, Glycine max
gacagtaccaatatctatgcctacatttccatcattgctctaattgtgtgtataccacctgccgtaattttggaagggcccacactgttgaagcacggcttcaatgatgctattgctaaagtaagtttggtcaagttcgtctcaaattccctccgggttggtatgttttaccaacccc

SEQ ID NO: 230807 - DNA, 413 bp, Glycine max
cagtgctaaagacctagtcaggaagatgctgacacaggatccaaacaagcggattacttcttctcaagtccttgaacacccatggatgagagaaggtggagatgcatctgataaaccaatcgatagtgcagttctatccagaatgaaacaattcagggcaatgaataagctcaagaagctagcattgaaggttatcgctgaaaatctatcagaagaggagattaaaggtctcaaagcaatgtttgccaacatggacactgacaatagtggcactatcacctatgaagaattaaagactggcttggctcgaatcggatcaaaactgtctgaggctgaagtgaagcaactcatggatgcggctgatgttgacggaaatgggtcgattgactatcttgaattcatttcgggtacaa

SEQ ID NO: 230808 - DNA, 503 bp, Glycine max
aagcatccgcttgcaaaggcgagaccacttgtactcgtgcaggtctactctagaggataaccccggggaattcaaattccacattttcacaaaataatgaggcaaaaatgttcatatataaattggaattatttgttttcttattacgcctatcctgaagccaaaggaaatgagatcggaattcctcggggaattccaattccacattttcaagaaataacgaggcaaaaatgttcatatatgaattggaattatttgttttcttattatgcctatcctgaagccaaaggaaatgagatcggaattcctcgggggtaccgagctcgaattccctatagtgagtcgtcataaattcgtaatcatgtcataactgtttcctggtgtaaatttgtaatcggctcacaattccacacaacatacgagccggaagcataaagtgtaaagcctggggtgcctaatgagtgagctaactcacattaatttcgttgcgctcactgcccgcg

SEQ ID NO: 230809 - DNA, 390 bp, Glycine max
gattacccaatgttgtttgaactccgtaatgatgctgccgagcgggtttctcattgtggggttctggagttcattgctgatgaaggcatgatatacatgccatactggatgatggagaacatgcttttacaagacggggacattgtcaaagtgaaaaatgtgacacttccaaaggggacatatgttaagtttccagccccacacaaaagaccttttgggatatttccaatccaaaagctatcttagaaacaacattgaggaatttttcctgccttgacaactggagatagcattatggtggcttacaacaacaagaaatattacatagatattatagaaactaagcctgacactgccataagcataattgagactgactgtgacgtggac

SEQ ID NO: 230810 - DNA, 390 bp, Glycine max
ctcgagccgagaagtgcaagaagtgcggacaaccaaaggaggtagcagccatgccagcaattgcgatgaccggagcatctttccccacttattcacactatttttccagggccccaggagtaccagaacaaaagatgaatattggattgcttggcaatggtgcaccatcacagtcactgcatttaaactccaattggcctgttcctggagcagataagtacggtgtccagccactttccatatggctacctggtggaaattatggcactgtgcatcatcatgaaaattctaccaaccagaacctatctgttccaaagggatggcgcaatggggactggatctgtaactgtggcttccacaattactcatcccgctcccagtgtaaaaagt

SEQ ID NO: 230811 - DNA, 405 bp, Glycine max
gcatttcctcgtttttttcttcccttttctctttctccggcgacgatctcagattccggccactcctctcgccggcgagcccttactcttccctcctccgtcgagccctctccgattcgaatcgttcccagcctcgcaccaccatgaatcccgaatacgattatttgttcaagcttttgctgattggagattctggtgtatgcaagtcatgtcttctcctgaggtttgctgatgattcataccttgacagctatatcagtaccattggagtggactttaaaatccgcactgtggagcaggatgggaagactattagacttcaaatttgggacactgctggtcaggaacgtttccgaacaatcactagcagctattatcgtggggctcatggcattattgttgttt

SEQ ID NO: 230812 - DNA, 359 bp, Glycine max
ctcgagccgaatcggctcgagcaatgaccaatcacaattctctgtgaactttctagaatctcgttcttcctttgccttctccttcttcttcaaccctttttctttctctttctttcgcactttcattctctaaaaaaatctaagtccctttggtcttcatcttctgttctgatccaggtatggcttctaaacgcatcttgaaggagctcaaggatttgcagaaggatcctcctacctcatgcagtgcaggccctgtggctgaggacatgtttcactggcaagccacaatcatgggacctgctgatagcccatatgcaggtggtgttttccaagtttcaattcatgttcgtcctgactat

SEQ ID NO: 230813 - DNA, 394 bp, Glycine max
ttcatataatattgcttcttggttcattctagctaattttgatggctcttccaatttgtctcaccgttattgcaattttcaccctttgttgtgtcattaattgtaacaatggcgttgaagcgtttcatgacatatacccggatcttcaatccatttcagcacgttcggtgagcaaacttcagagaactggataccattttcaacctcgtaagaattggatcaatgatccaaatgggcccatgtactacaatggaatctaccatctattttaccaatacaacccaaaaggagcagtttggggcaacatagtgtggggacacgcagtatcaaaggacctcatcaattggaaagaacttgaacctgccctatacccatcaaaaccctttgacaaata

SEQ ID NO: 230814 - DNA, 383 bp, Glycine max
ggttcacgtttcacaatcactttttgcgcttctctcactcactcactcttcttcttcctcttcgtgtggttttctttctcgaactcgaacgaagatgcgtgagattcttcacatccagggagggcaatgcgggaaccagatcggagccaagttctgggaggtggtgtgcgcggagcacgggatcgattcaacggggaggttacaaggggacaacgagttgcaactcgagcgagtcaacgtctactacaatgaagcgagttgcggaacgttcgtgcctatggcggtgctcatggatttggagccagggaccatggacagcgtcagatctggtccctacggtcagatcttccggccagataacttcgtccttggacagtccggcg

SEQ ID NO: 230815 - DNA, 404 bp, Glycine max
ggcaaagattatgttcatcagctgagacttatcacagagctgataggttcacccaatgatgccagccttggatttctacgaagtgataatgctcgtagatatgtaaaacagcttccccaatatccaaagcaaaacttttctgctagatttcccgacatgtctcctggtgcggttgatttgttagagaagatgctcatctttgatccaaacaggcgaattacagttgatgaggcgttgagccacccatacatggcacctctccatgacatcaatgaggaacctgtttgcaccagacctttcagttttgactttgagcaaccatcattcactgaagaagacatcaaggaactcatctggagagaatctgtgaagttcaatcctgttccaccagtctactgaaattt

SEQ ID NO: 230816 - DNA, 386 bp, Glycine max
ggcgtcatttcatttccaccaaacaccaaagaaagaggtgaagtcaaatggtccttagttctgggagtgttgatgcttgagtcttgacggaacgaacggaaaaggggatctcaatggacaacaccaagccccttatcgaactggaactcgacgatgatggcagaatcagaagaaccgggaatgtgtggactgctaacatacacattataacagtggttgtaggggcaggggtgctgtctttggcatgggttatggcacaactaggatggttagctggcatagccagtatcattaccttttcagctgtcgccattttcacttacaatcttgtagctgattgttacagatatccagaccctgtcactggcaagagaaattatacttat

SEQ ID NO: 230817 - DNA, 430 bp, Glycine max
  unsure (1)..(430): unsure at all n locations
ggaattcggcccaagccggtgccctgcaaactacgtccccctcactcaaatcagcttcttggaccgcgccgccgtcgtttaccgcgacagactttctcttgtctccggtgacgttacctacacgtggacccagacacaccaacgctgcatcaaacttgcttcttccatttctcaacttggtgtcggtctttctcccctcgatgtggttgctgtattggcccctaatgttccagctatgtatgagctgcattttgctgttcccatgtcaggggctgttctctgcacgctaaatacacgtcatgattctgcaatggtttccttgttgctaaaacattctgaggccaaacttgtttttgttgattatcaattacttgatattgctaaaggagcacttcanatcctgtcaaaaattcacaccaagcttcccaat

SEQ ID NO: 230818 - DNA, 409 bp, Glycine max
ctttcccctaattccgaccatggaagccacggcctccgcaatgagcttcgcccttccctcaacaaaagcccaagcccaagcccaactcctgacccggcccaccaatccattcaccattccctcccgcagcccagcccaccgccccccgccgcgcctccccaccatccgcgccgcaattccccgcacaaagaaagaggcaacggtggagactgtgcgggagcagctcgagaactgttacctcctcgccggcatcaactacaagggcttcacggtgaagcagttccaggagcttcgaaagacgctcccagaaacaacgaaactgatcgtggcgaaaaacacgctcgtttacaaggccgtggaaggcacgccctgggagacgctgaagccctgcatgaagggcatgaacgtg

SEQ ID NO: 230819 - DNA, 416 bp, Glycine max
  unsure (1)..(416): unsure at all n locations
caaaagggagaagaaaangaaagaaaactctcaaaaaactattatagcaatggcagaacaaaaccaaaaccaaacaactgaagctggaaggcaccaagaggttggtcacaagagccttctccagagtgatgctctttaccagtatattctggagacaagtgtctacccaagagaacctgaatccatgaaagaactgagagagttgacagcaaaacacccatggaacatcatgacaacctctgcagacgaagggcagttcttgaacatgctccttaagctcatcaatgccaagaacaccatggaaattggtgtctacactgggtattcacttcttgccaccgctctcgctcttcctgaagatggaaagatcttggccatggacattaacagggagaattatgaattgggtttgcctg

SEQ ID NO: 230820 - DNA, 426 bp, Glycine max
gcttcatcccaaaaagctcttttccttctaaatttgattccttagttcagcattctattattatatatggcttcttcaccttcctcagaaaacaaaaacctagagggagtagctggtggtgccggagagaaacccattccacttggtgagaacgttctgcagaagcatgctgcattctttgacttgaataaagatggtgtcatctacccatgggagacttttaaagggttgcgtgaaatcgggactggggttttgctgtccgttggaggtgctattttcatcaatgtgtttctcagtcagagtactcgtcccggaaagtttccatctatactttttccaattgaaattaaaaatatccaacgcggcaaacacggcagtgacactggagtctacgatactgaaggaaggtttgtaccttcaaaattt

SEQ ID NO: 230821 - DNA, 384 bp, Glycine max
  unsure (1)..(384): unsure at all n locations
tcaaggccttaataaaggctttcctccccgtttccgtttcccccgtccaaatccccttttggtttgccaaaattagaaaatggaacctgattcaaattgggccaggtggttaccaagtccggaaatccttgcgggaagcccaacggcttcaaccacggcatcgggcccgatgggcaaatgccaattgacangacaattggcggtggtgatgatgctttcaatactttcttcagcgagactggtgctggaaagcacgtgccacgtgcagtgtttgtagatcttgagcccactgttattgatgaggtgagaaccggaacttaccgccagcttttccacccagagcagctcatcagcggcaaagaagatgccgccaacaactttgcc

SEQ ID NO: 230822 - DNA, 384 bp, Glycine max
ccagaatcggttgataatgacatcccggttattgataagtcatttggttttgacactgctgttgaagaggcacaacgagccataaatgctgctcatgtggaagcagaaagcactgagaatggtattggtgttgtcaagttaatgggtcgtcacagtgggtttatatctatgtatgcaactctcgccagccgagatgtggattgttgcttaattccagagtcacctttttacctcgagggtccaggtggactctttgagttcattaggaaaagactcgcataaaacgggcacatggttatagtaatttctgaaggtgcaggtcatgagcttatttcagaaagcctatctgctacaaataagcaggaagcttctggcaacaagtta

SEQ ID NO: 230823 - DNA, 396 bp, Glycine max
gagggttctctccaaaactattgccaagatagttaataaacaccacttctctagattgaagaatcttcttgctgataaaaaggtcaaagaatctgtgatttatggtggttcaatggacgaacaaaacttatttattgagccaacgatcttggtggatcccccactggaagcagcacttatgtcggaagagatttttggcccattacttccaattattaccgtggataagattgaggacagtattaagttcataaattctagacctaaacctcttgccctttatgttttcaccaagaaccaaacactgcagagaagaatgatatctgaaacatcatctggcagtgtgactatcaacgacgcaattctacaatatgcagtctatactgttccatttgg

SEQ ID NO: 230824 - DNA, 422 bp, Glycine max
ccaccctacagatgaagagctcattcttcactacctaaggaagaaggttgcctctattcctttgccagtttccatcatagctgaggttgatatctacaagtttgatccatgggagctaccagctaaggccgagtttggggagaaagagtggtacttcttcagtcctagagaccggaagtacccaaatggagcaaggccaaacagggcagcagcttcagggtattggaaggccacaggcactgataagaacatattggcatcactggcaagaggaggggttagagagcactttggtgtgaaaaaggctttggggttcaacaaaggaagacccccaaagggtgtcaagaccaattgaataatgcatgaatatcgctttgttgacaccaatagacccattaggatcaaagacacctccatgaggt

SEQ ID NO: 230825 - DNA, 379 bp, Glycine max
aataaaccgaatgagagcattaacctcttcttcttccactttcattccaaagcgttattccttcttcttcttcctctccattctcttcgctcttcgatcctcgtccgggggctgctccgaataccaccaccaccacgcgccgatggccacgataggaggcttacgcgactcccaaggctctcagaacagcgtccaaaccgaggccctcgctcggttcgccgtcgatgaacacaacaagaagcagaattcacttctggagttttctagggtggtgaggacacaggaacaggttgttgcgggaaccctgcatcaccttactctcgaggctattgaggcaggtgagaagaagctctatgaagccaaggtgtgggtgaaacca

SEQ ID NO: 230826 - DNA, 399 bp, Glycine max
atttctccatttccattttctctctcacttttcaagaatcgtaagctatgggaaagtcttacccaactgtgagtgctgattaccagaaggccgttgagaaggcgaagaagaagctcagaggcttcatcgctgagaagagatgcgctcctctaatgctccgtttggcatggcactctgctggaacctttgacaagggcacgaagaccggtggacccttcggaaccatcaagcaccctgccgaactggctcacagcgctaacaacggtcttgacatcgctgttaggcttttggagccactcaaggcggagttccctattttgagctacgccgatttctaccagttggctggcgttgttgccgttgaggtcacgggtggacctgaagttccattccaccctg

SEQ ID NO: 230827 - DNA, 425 bp, Glycine max
  unsure (1)..(425): unsure at all n locations
gacgtcggattcactcgtacctagaacttcggctcgagaataaaccgaatgagagcattaacctcatcttcttccactttcattccaaagcgttattccttcttcttcttcctctccattctcttcgctcttcgatcctcgtccgggggctgctccgaataccaccaccaccacgcgccgatggccacgataggaggcttacgcgactcccaaggctctcagaacagcgtccaaaccgaggccctcgctcggttcgccgtcgatgaacacaacaagaagcagaattcacttctggagttttctagggtggtgaggacacaggaacaggttgttgcgggaaccctgcatcaccttactctcgaggctattgaggcangtgagaagaagctctatgaagccaacgtgtgggtgaaaccatggttgaa

SEQ ID NO: 230828 - DNA, 396 bp, Glycine max
cttcttcccaaccactactactcactcactgcagatctcaattgcatcgctgtccatggctaccatcgttagcatcaaggcccgccagatcttcgacagtcgtggcaatccaactgtcgaggtggatttgacttgctccgatggtacttttgccagagctgctgttccaagtggtgcatccactgggatttatgaggcccttgaattgagagatggaggatctgactaccttggaaagggtgttacaaaggctgttgacaatgtgaacaccgtcattggccctgctttgattggcaaggacccaactgagcagactgctattgacaacttaatggttcaacagcttgatggaactgttaacgaatggggttggtgcaagcaaaacctatgagcaaa

SEQ ID NO: 230829 - DNA, 392 bp, Glycine max
ctcgagccgctccgtctctgcaattacgatggcgcccagggacaagactagtgccgttaagcctagcggtaacgccggggtgaaggacctgcattttcgtggagtcaggaagagaccgtgggggaggttcgccgccgagatcagagatcccgccaagaagacccgcgtctggctcggaaccttcgacaccgcggaggaggcggcccgtgcctacgacgccgccgcgcgggagtttcgcggccctaaggcgaagacaaacttccctctcccttcggaaaattttaagaacgcgagccctagccaaagcagcacggtggagtcctccagccgcgaccgcgacgtcgccgccgattcctctccgctcgacctcaacctcgcccccgttcccgtct

SEQ ID NO: 230830 - DNA, 392 bp, Glycine max
ctttctctttattctctcacacaaaataatggacaagaagcttggcaacacgtctcatgatcctgaagtgagaaaggggccatggacaatggaagaagacttaatcttgatcacctatattgccaatcacggggaaggggtttggaactctttggccaaggctgctggacttaaacgtaccggaaagagttgccggctccggtggctaaactacctccgtcctgatgttagaagagggaatattacacccgaggaacagcttttgatcatggaacttcatgcagagtggggaaacaggtggtccaaaattgccaagcatctacccggaaggactgatactgagattaagaactactggaggacaatgatccagatgcacctcaagcaagctt

SEQ ID NO: 230831 - DNA, 342 bp, Glycine max
caaagtcacaatggaccccctctctctcttctgcaccggagccctcctcgccggcggcctctactggttcgtgtgcgttctgggcgccgccgagcataacggcaaacgcgccaccgatctttccggcagctccatctccgccgagaaagtccaagacaactacaaacagtactggtccttcttccgccgcccaaaggagatcgagaccgccgacaaagtccccgacttcgtcgacaccttctagaatctagtcacagacatctacgactgggggtagggccagtccttccacatctccccctccatccccggcaagtcccaccgagacgccaatcgcctcca

SEQ ID NO: 230832 - DNA, 324 bp, Glycine max
acttcatccaaaaacatggcacccttaaccatcagaaccatcatggacacctccgctattcagcattcaggattcactgggcaaactgctctgaaccatctcagtcacttcgtccgcaacaccggtggcgcccgcaaaggtctcactaacatacgtcgcactctcaatagtgctcatcacagcaattggtatggccctgaccgtcccaattacttgggtccagtcgctgagcagattccatcggtcctgagcggacaattccctggtgaccaccgttgggacactgcagaatatccagctgacccggaaaccttgtctaggaac

SEQ ID NO: 230833 - DNA, 319 bp, Glycine max
cgagagtgcttactacgagcattacaagagcatcatgggaactaagagttggggaattggaccggtttcgttgtgggcgaaccaggatgctcaagataaagctgcacgagggtatgctaaagaagaagaagagaaagaagggtggcttaagtggctcaactccaaagcagagagctctgttttgtatgtgagttttgggagcatgaacaagttcccttactctcagctcgttgagataacacgtgcgcttgaagattcggggcatgattttatctgggtggttaggaaaaaccatgggggttaaggggaaaactttttg

SEQ ID NO: 230834 - DNA, 357 bp, Glycine max
gcactccgtcttcatcaatcagcatcaccaccgctccaacacaggggaaaatgagggagatccttcacgttcagggagggcaatgcgggaaccagatcggttcgaagttctgggaagtggtgtgcgacgagcacggcatagatccgacggggaagtacgtcggaaactcagatctacaactcgagcgcgtgaacgtgtactacaacgaagcttcctgcgggcggtttgtcccacgcgcagtgctgatggacctggagcccggaaccatggacagcgtgcggactgggccgtacgggcagatattccggcccgacaacttcgtgttcgggcagtccggcgcgggcaacaactgggcca

SEQ ID NO: 230835 - DNA, 413 bp, Glycine max
attccattctctctgtgtatttccctacctctcccttcaagatgcagatcttcgtcaagaccctcaccggcaagaccatcacccttgaggtggaaagctctgacaccatcgacaacgtcaaggccaagatccaggacaaggaaggaatccccccggaccagcaacgtctcattttcgccggaaagcaacttgaggacggccgtacccttgctgactacaacattcagaacgagagtactcttcacctcgtcctccgtctccgtggtggcatgcagatcttcgttaagacactcaccggcaagaccataaccctagaggttgaaagctccgacaccatcgataacgtcaaggccaagatccaggacaaggagggtatccccccggaccagcaacgtctcatcttcgccggaaag

SEQ ID NO: 230836 - DNA, 343 bp, Glycine max
aacaaactgcagcagccactggaatagagggcatgatcataaatctgtcatcaattgcccataactacacttacataaaggggattagatttaataagatcaatgaaccgaaaggttacggtaacaacaaggcgtatggacagtccaagttaacagacatagtacatacgcatgacctttcacatcccctgcgagaagatggtgtgaacattacagcaaactcattccatccaggagtcataattactcctcttatgagacactcttctttccatatgcacttcctcaacgtctttaccttttacatatgcaagaacgtcacccagggagcatccaggacatg

SEQ ID NO: 230837 - DNA, 380 bp, Glycine max
gtttttaataggtagtacgtaggtgtaatcgttgtcttcctgcagatatggaagaagcgggtttaggagattgttgttcctctaatacgactattacgaggaaaagcgagaagcgaaagcagcagcaccaacaacaagagaagccatacagaggaataaggatgaggaagtggggcaagtgggtggcggagattagagaacccaacaagaggtcgaggatctggttgggttcttacgccaaccccgtcgccgccgcacgcgcctacgacaccgccgtcttccacctccgaggcccttccgctcgccttaacttccccgaattgctgtcccaggacgacgacgtttcgacccaacaacagggcaagatgtccgccgattca

SEQ ID NO: 230838 - DNA, 399 bp, Glycine max
catagctgaaagctgactctagctagaggataataataagattaagatcatccatccaacaagaaagaggaagtgtgtttttgattggatccacaaaattcaagatgactccagttaatttggctggccagtttggtgacacaacatacactaaggtgtttgttggaggcttggcctgggagactcaaaaggagacaatgaagaagtattttgagcaatttggtgagatcttggaggctgttgtcatcactgacaaagccactggaagatctaaaggctatggatttgttacttttcgtgaaccagaagctgccatgagagcttgtgtggatcctgctcctgtaatcgacggtacgagagctaactgcaaccttgcttctttgggtgtccagagatcta

SEQ ID NO: 230839 - DNA, 373 bp, Glycine max
atgtatttcacccaaatataaatagcaatggaagcatttgccttgacatattgaaggagcagtggagccctgcgctaactatttcaaaggtgttgctctcgatttgttccctgttgacggaccctaatcctgatgatcctttggtccccgaaatagcccacatgtacaagacagacagaaacaagtacgagtcaactgccagaagctggacccagaaatatgccatgggttaagtgacctgtggtatgtgtgaggaagagcctttctactcacagtgtttatgcctctcagcccttgtatgaatatttgtcgtttttaataaggcccctccagttgaagattaatggagcaggacgtttctcctgttgtttgt

SEQ ID NO: 230840 - DNA, 423 bp, Glycine max
caagagacagcagagcagagatctagcgtattctctcgctctttctttcactgtcacagagccacatccatgggcttcccagccaacggcgcctctgcggcccagcccctaaacttcctcatctacggccgcacgggctggattggcggcctcctcggctccctctgccgggcccagggcatctccttccattacggctcgggccgcctcgagaaccgggcctccctcgaaaccgacatagccctcctcaagccctcccacgtcttcaacgccgccggcgtcacgggccgccccaacgtcgactggtgcgagtcccacaaagtcgagaccatccgaaccaacgtcgttcggaacctcactctcgccgacgtctgccgcgaccacggcctcattctcatcaactacgccaccggttgcattttc

SEQ ID NO: 230841 - DNA, 383 bp, Glycine max
aaaccttttgtcctcacaccatagcagtatattctaagaactggagaaggcattacagaagtctgccttagtgggtttattgcttttgatgttcctcctccaaagggtccattgtggattcttggcgatgttttcatgagggcatatcacaccgtctttgactatggaaatctccaagttggctttgccgaagcagtctaattacgctttctggaggattttctttgtaaatttgttaagcgtgttgtaaataagctgttataattgtagctctggttactttttgaaaccacgaatgtatttatccatttaagacgtagaagtatcccacttgcaagtgttgtgtgctttttatatgaaaaaaccatcctcatttcattccg

SEQ ID NO: 230842 - DNA, 518 bp, Glycine max
  unsure (1)..(518): unsure at all n locations
tgagtcgcccggcaatncgatatgaatcgcgtggactatagaagagcactgacgtcgcatccacgcgtacgtaagatcggaattcggctcgagctctctcaaggattggatgatggggatgatgtggagctggaaaagagtaatgttctcttgatgggtccaaccggttcagggaagacgttacttgcgaaaacactggctcgttttgtgaatgttccctttgtcattgctgatgctactaccctaacacaggctggttatgttggggaagatgtcgaatcaatattgtataaactacttgcggcagcagagttcaatgtccaagctgctcaacaagggattgtttacattgatgaagtggacaagataactaagaaggctgaaaacttgaatattagcccggatgtttctcgtgaaggtgtttaccacgcactttttaaaatgctcgaaagaaatatggtgaacctttcccagagacgaggaccggggaatcctccggggtgataaaaaaaaaattg

SEQ ID NO: 230843 - DNA, 319 bp, Glycine max
ctccagaaaaaatggcggtgcctcttctctcgaagaagatcgtgaagaagaggctgaagaagttcaagaggcctcaaagtgacaggaagatttctgtgaagacaaactggcgcagaccaaagggtatcgattcccgtgttaggagaaagttcaagggatgcactttgatgccgaacattggttatgcttcagacaagaagacccgccactatctcccgaatggtttcaagaaatttgttgttcacaatgtgaaggatttggaactgctcatgatgcacaacaggacttactgtgctgagattgcccacaatatatccac

SEQ ID NO: 230844 - DNA, 402 bp, Glycine max
aaaaaatgggttcctcctcctccaagttgaccgtgtgtgttaacttgggcacactgtacatcctgatctttgtgctccaacctaccaaggcaacttgatgtaaatcttggtagtgagtttttgtctgcaggggcttttgttcacacgaaatatttcaaaggtgggttgtgacaatcccccatcattctgacaagttaaccgggactggattccattccataggggcctaattgtttggtcacttcagcatgttcatgaagacggttcctggagattccgctggcacagtcaacggctttctatttatcctcccaaaacgcggaaccttatgagatagactttgagttcttggggaacagaacaggacaaccttacattctgcaaacaaatgtgttcaccgga

SEQ ID NO: 230845 - DNA, 293 bp, Glycine max
ctccagaaaaaatggccgtgcctcttctctcgaagaagattgtcaacaagacgctgaacaacttccacccgcctcaaagtgacaggaagatttccgtgaacacaaactggccacaaaccaccgggtatcgattcccgtgttatgagaaagttcaagggatgcactttcatgccaaacactcgttacgcttcacaccacaagacccgccactatctccccaatggcttcacgacatttgtcgttcacaatcgtaacgatctggaactgcccatcatccacaacccgacttactg

SEQ ID NO: 230846 - DNA, 366 bp, Glycine max
tcttcatccatagacatggccaccgtcacttctgcagccgttgctattccctcattcactggcctcaaggcaagcgcaggcaaagtgagtgccgcagttaaagtctcagctccccaagccacaaggttgggcatcaaggcttcgctgaaagacgttggagtcgctgttgtggccactgccgcgagtgcagtgctggctagcaacgccatggccattgaagtgttgctgggtggtgatgacgggtctctggctttcgttcccaacaatttctccgtggcctctggggagaagatcgtgttcaagaacaacgcaggtttcccccacaacgttgtgttcgaccaggacgacattcctagcggcgtggat

SEQ ID NO: 230847 - DNA, 313 bp, Glycine max
ggtcaaactgacgttaatgctgtgacatggggtgtcttcccagctaaggagataattcaaccaaccattgtagatcctgtcagcttcaatgtatggaaggatgacgcatttgaaatttggtcaagatgatcggcaagcttgtaccctgaggattaggcatccaggaaattggttgaagaggttgggggcagccacttcttggttactttggtcgacaattattacatcaatggtgatccttttgccgtctttgcatatctctgacatgagcttattactcagtagaacttatcctatgtcacatctgttggtg

SEQ ID NO: 230848 - DNA, 404 bp, Glycine max
ggaatggaccaatgggagtgtttgagtttgacaagtttgctgttggtacagaggctattgcaaagaagctggctgatctcagtggaaagggggtgaccacaattatcggaggaggagattctgttgcagctgtggagaaagtaggagttgctagtgtcatgagccacatatctactggtggtggtgccagtttggagttattggaaggcaaagagcttccaggagtccttgctctcgatgaagccgtcccagttgccgtgtaagacaattttcagcttggaaaatttttccatcctcagatttcggtgttgtcaatcttgtaaaagagcatatgttgtaggacccttcggagtctgttagtgtaaattttatcatgcttgagttattattggcttcacacataa

SEQ ID NO: 230849 - DNA, 367 bp, Glycine max
tgaaatttacaaggcaactaacactatcaaggcttataatcagataggttttctaaagctcgagaagtcaattccagatgccattctaagacaagcaaaaggccttgcaattatcactgtggtcaaagtacgagtgggggttacttacaatattggaacaggacttgtggttgcccgtacggaagacggttcatggtctcctccatctgctgtttccacctttggtgtacggtggggggctcaggctggaggcgagttgacagacttcatcattgttttgagaacaaatgatcctgtcaagacatttggtggcaatatgcatctttcacttggagcaggtttgagtgctgcagtaagctttgttggt

SEQ ID NO: 230850 - DNA, 357 bp, Glycine max
cttctctctgagaacaacaccccacactcctctctctctctccgcttccttctcttctcacacctccatggcccaaacttcccttccctccgccgatgccggcattgacgctgtccagcgccgtctcatgttcgaagacgaatgcattttggtggatgagaatgaccgtgtggttggtcatgattcaaaatacaattgtcacttgatggaaaagattgaagctgagaatttgctgcatacagctttcagtgtattcctgttcaactcaaagtatgagttgcttcttcagcaacgatctgcaacaaaggtaactttccctcttgtgtggacaaacacctgttgtagccatcctctgta

SEQ ID NO: 230851 - DNA, 421 bp, Glycine max
atcagctcaagatggagctcacagagggacatgtattccaaggttggcatgaaggagctatagagtttccacctacatacaaataccgtctgaattctgtagactacctaggctgtgatcagcagcatgtgagcagaaagcggcgctccccagcatggtgcgatagaataatatggtttgggaagggaatgaagcaaatccaatacaacaggagcgagtcaaaactttctgatcataggcctgtacgagcaatgttcacagctgatatcagggttgcagggacttgtaaatgattaaaaaagttacaaaggcaatttgtccaagaaattttggttttaatggactaaatttagtcatggaccaaaaccagacacagacaccggacacctaaccaaacttagtcctgggctaaaacaagcat

SEQ ID NO: 230852 - DNA, 288 bp, Glycine max
ggaatacattgataaagttgttcttgttttttcttcagcttgcaataaggctaagcttcttaaagtgaaagtgttaattgctgataaagagtatgagagtgctattgctgagtctggttttcttcttaaggaagatgaaaataatttagaggcattgttgttacgtggtcgtgcatattactatttagctgatcatgatgttgccacgaggcattttcagaaaggtctccgcctagatccagagcatagtgaactgaaaaaggcatattttggattgaaaaatctact

SEQ ID NO: 230853 - DNA, 415 bp, Glycine max
cagttcaacaactctcagcaacatgcacaatcctcccccgccaggcggtccaggccctcaccaccaccccggcccaccggctccgccaccacatgctcatccatctcctccgcctcctgggcctccacaccaccaccacggcccacccggcccaccgcatgcttatccaactcctccgcctcctgggcctccacaccaccatcccggcccaccctaaccaggctttcatcaacaccatggcccacccgggccaccgtatgctcatccaactcctccgcctcctgggccatcgggacctccccctccaaggcctccacaccaccaacaccaccgttgctgatgttatgcatatggaagcttatcaataacgatcctacatatatatgatgttatcttgaatgctttttaatttctg

SEQ ID NO: 230854 - DNA, 418 bp, Glycine max
gtcatcatcttcagacctggacaggcaaatagagcagttgaagaggtgtgagcctcttaaggagtctgaagtgaaggtgctctgcctcaaagccatggaaatcctcgtcgaagagagcaacgttcaaagggtcgacgctcctgtcaccatatgtggtgatattcacggtcagttttatgacatgaaggagcttttcaaagtaggaggggattgccccaaaactaactatttattcctgggggattttgttgatagagggttttactcggttgaaacgtttctgcttctgctcgctcttaaggtgaggtatccagatcggataacacttattaggggaaaccatgaaagccgtcagatcactcaggtatatggattctatgatgagtgccttcgaaaatatggttcagtcaatgtctgg

SEQ ID NO: 230855 - DNA, 412 bp, Glycine max
caacaacactctctcttctcgctcttggcttttcgctcttcactcactctcattcattcatttccaccgttcatggatccagtaagcgtgtggggtaacacgcccttggcgacggtggatcccgagatccatgacctcatcgagaaggagaagcgccgtcaatgccgcggaatcgagctcatcgcctccgagaacttcacctccttcgccgtcatcgaggccctcggcagcgctctcacgaacaaatactccgagggcatgccgggcaaccgctactacggcggcaatgaatacatcgaccagatcgaaaacctctgccgctcacgcgccctccaagccttccacctcgacgcccaatcctggggcgtccacgtccagccctactccggctccccggccaacgtcgccgcct

SEQ ID NO: 230856 - DNA, 404 bp, Glycine max
attcattcagaggcaataaaggagttgtaaattaagagcatggctgcacaagctcttgtatcatcatcatctcttaccttctcagccgaggctacaagacaaagtcttggaccaagatcattccaatctccatttggcttctcaagaagagcctcctttcttgttaaggcagctgctactccccctgtcaagcaaggatcagacagacctttgtggtttgcatcaaagcaaagtctttcctacttggatagcaaccttccgggtgactatggatttgaccctctgggactttcggaccctgaaggaacaggacggttcattgagccgaaatggctagcatatggtgagataatcaatggtcgttatgcaatgttgggtgcagttggtgcaatagcacctgaaat

SEQ ID NO: 230857 - DNA, 358 bp, Glycine max
aagcactatagtacaaaaaggacattcattcatctatggctacccttattgctcccagcaaccactctccccaagaagatgctgaagctctcagaaaggcttttgatggatggggaactgatgagaacactgtcattgtaattttgggtcatacaactgtgtatcagacgcagcaaatcataacagtttatgaggaaatttaccaggaggatcttgtgaatcgccgagagtctgaaatcacaggacactttgagaaagccgtgtaacgatggatactggaacctgcagattctgatgctgtcttggccaatgttgccatcaatactggcaccctctcctatgtcattgaggaaattgc

SEQ ID NO: 230858 - DNA, 398 bp, Glycine max
atctgcgtgtaaatactccaacttgtcccaattcacacctttgcctcgcgattctccgatgcgttacacctttgtccaccgattcctctttaattttcttccctttttcccccaattcaactaaattttctgctatctatattcccaggtaagtaaagtcagatttttcttggtggacggacatgcagaagaaggctgcactcaacttccaagctttcctctagaacaaaagcaaagattatactgtcataaaaaggttttgtacttattttaatgggtgctcctaagcagaaatggaccgcagaggaagaagcagcattgaaagctggagtagtcaaacacggggctggaaaatggcgcaccatacttacagacccagagttcagttccattttgcg

SEQ ID NO: 230859 - DNA, 425 bp, Glycine max
cggatttcacacaattgaggatcagagaaacaaagacaaccacaacaataacaataacaacggtgatgactgctcaagtgcatcttcaattactgtttccaatgaggaaagtgggaaaagcacgtctcaagaatcgattatggtgcccaacagcaacggtttcatccaccatgttccatgcatttccactctcccttggccttatccttttccctcagcagcacctgctatgtgccctccagggtttcccatgtcattctaccctgcagcattttggaacattccatggtttccctcacaacactcacaccattctgctcctactccaaggtctcccagttccggtcctaattctccaacactagggaaacactcccgcgacgacgacgcggaaaaacaagaccatttgcaagaagaatcaccct

SEQ ID NO: 230860 - DNA, 393 bp, Glycine max
atttgaggccaggcaagccccactcaatcagcacacctctcctcgttcacgctacccctttctgctcgtcttccacctttcaagttttaaaagtataaagatggcagagacattcctaattacctcagagtcggtgaacgagggacaccctgacaagctctgcgaccaaatctccgatgctgtcctcgacgcttgcctcgagcaggacccagacagcaaagttgcctgcgaaacatgcaccaaaaccaacttggtcatggtcttcggagaaatcacgaccaaggccaacgttgactacgagaagatagtgcgtgacacctgcaggaacatcggcttcgtctcacatgatgtgggactggatgccgacaactgcaaggtcctcgtcaacattga

SEQ ID NO: 230861 - DNA, 394 bp, Glycine max
ccatgattactgccattttgtgggttggttatcacgggcaagctgggggaactgccattgctgatgtaatccttggtacaactaacccaggatgaaggttacccatgacatggtacccacaaggttacttggccaaagtgcccatgacaaacatggacatgcgtccaaacccaacaacacggtacccaagaagaacctatagattctacaaaggtcctgtagtgttcccattcggacatggcctaagttactcaagattcagccacagcttatcacttgcccccaaacaggtctcagtgcccataatgagcctccaagccttgacaaactcaaccctctcaagcaaagcagttaacgtgagccatgccaattgtgatgactcattggagatgga

SEQ ID NO: 230862 - DNA, 418 bp, Glycine max
ctcatgctgtgattgaaccatttgtcatagcaacaaacaggcatcttagtgtgctccaccctatttataaacttttgttgcctcactatcgtgacaccatgaacatcaatggactcgcaagacaatcactcatcaatgcaggtggcattattgagcaatcatttctgcctgggccatttgctgtggagatgtcttcggcagtttacaaggggtgggttttcactgatcaagcccttcctgcggatcttatcaagagaggaatggcagtggaggatccatcctctccctatggccttcgccttgtgatagatgactacccttatgctgttgatggactagagatatggagtgctatccagacatgggttaaggactacgtctccttgtactatgccacggatgatgcagttaagaaaga

SEQ ID NO: 230863 - DNA, 379 bp, Glycine max
tgaatacgtgatatctcacaaggcctatgcgagggtgggattgcttgggaacccgagcgatgtctactacggcaaaacgatagcgttaagcgtcgccaacttcttcgccaccgtcacgctgcgtccctccgaccagttaatcctccaaccccaccccctccacgatctccttcatttctcatcgctccctcaattggtcaacaggttgagctcccaaggttactatggaggcgtgcgattgcttatggctatttgcaatgtcatctacgcgtattgcagagagaacgccatcgatcttggcgacgacaatttcactctctcctacgacaccaatatccctcgccaggctggtctttcgggttctagcgggatcgtgtgt

SEQ ID NO: 230864 - DNA, 396 bp, Glycine max
  unsure (1)..(396): unsure at all n locations
caaattcattttaatcctaattctgcacttcttgatcattcgatttttctcctcaagatgcagatattcgtaaaaactttgaccggcaagaccatcacccttgaggtggaatcctccgacaccattgacaacgtaaaagctaagattcaagacaaggaagggatcccacctgaccagcagagacttatctttgcgggtaaacaacttgaggatggtcgcacccttgccgattacaacatccaaaaggaatcaaccctccatctcgtgcttcgcctcaggggtggcatgcaaatctttgtcaagactttgaccgggaagaccatcacccttgaggtggaatcctcggacaccattgataatgttaaggccaanatccaggacaaagagggcatcccc

SEQ ID NO: 230865 - DNA, 402 bp, Glycine max
gcgaagaaagattcgaaacgaagaaagaaagcgttgtgaagaatggcggaagagggacaagtgatcggtgtccacagcgtagaggagtggaaggaacatctcaagaagggagaagagtccaagaaattgattgtggtggattttactgcttcttggtgcggtccatgccgtttcattgccccaattcttgcagagtttgctaaaaagttgccgaatgtcaccttcctcaacgtggatgtggatgaattggagactgtttccaacgagtggggaattgaggctatgccaaccttcctgttcttgaaagaaggcaagctggtggacaaggttgtgggtgccaacaaagacgagctgcaattgaccctacgcagacatgccgcaactgccgggtgcttgaagtgc

SEQ ID NO: 230866 - DNA, 360 bp, Glycine max
gcgccaagtactatgaagccggtgcacgttttgccaagtggcgtgctgtgctgaagattggtcccaacgagccatctgagctggctatccatgagaatgcctatggcttggccagatacgctgtcatatgccaggagaatggcctggttcccattgttgagcctgagatccttgttgatggatctcatgacattcacaagtgtgctgccgtcaccgagcgtgtccttgcagcatgctacaaggctttgaatgatcaccacgtccttcttgagggtaccctattgaagccaaacatggtcacccccggatccaattctgctaaggtttcccctcaggtggttgcggagcacactgttagag

SEQ ID NO: 230867 - DNA, 375 bp, Glycine max
  unsure (1)..(375): unsure at all n locations
atttgcgtgagaacgannaaagaaannaaaaaaccctaacgcactcgagaccctgagatttttcatcttcgtttcccattctccttttgattatggacgtcgaagtgcggcagatcttcaacaagttcgacaagaacggcgacggaaaaatctcggtaacggagctgaaggacatgctcgcggccctcggatccaaaacgacggacgaggagttgaaacgcatgatggaggagctcgaccagaacggcgacggtttcatcgacctcaaggagttcgcggattttcactgcaatggcggtgccggaaaggacgactcgaaagagctccgcgacgcgttcgatctctacgacgtcgacaagaacggcctcatctccg

SEQ ID NO: 230868 - DNA, 398 bp, Glycine max
gtgagctataagctagtttatcgtgaggagaatatgaagttgtttgttttctttgttgctgcagtagttttggtagcatggccatgccatggcgcaggctaccaaaggttccctctccgaatgaaaactggctatggtgagcgttcttcggaggtaaaatgcgcaagttttaggcttgctgtggaagcacacaacatccgagcctttaaaaccattcctgaagagtgcgttgaaccaacaaaggactacattaatggcgaacaatttagatcagactctaaaacagttaaccaacaagctttcttttatgctagtgaacgcgaagtccatcacaacgacatatttatattcggcatagataacaccgtactctctaatatcccatactatgaaaaaca

SEQ ID NO: 230869 - DNA, 381 bp, Glycine max
  unsure (1)..(381): unsure at all n locations
actcaccctcattaccancacgaaagcatagccaaaaccttttttcgaagtccccgattttccctaatggctccggcaaaggcaaagaagaagcggcggagaagaagccagcggcggagaaagcaccggcgaagaagaagccgaaggccgagaagaagatctcgaaggaaggatggagcgagaagaagaagaagcgcacgaagaagagcgtggagacctacaagatctacatcttcaaggtcctcaagcaggttcaccccgacattggtatttccagcaaggccatgggcatcatgaacagcttcatcaacgacatcttcgagaagctcgcccaggaagcgtcgcgtttggctcgctacaacaagaagcccaacatcacct

SEQ ID NO: 230870 - DNA, 402 bp, Glycine max
caaagtcccaccacttggttttcataacccattctccatctcagaatggagaatgcgagaataagccagtggttgatccttctggtgtgtgcgctgctgttgctgatatcagaagcttcttatgtgccaatcactattgttcagaacgcggtagcaaaaggagctgtttgtttggatgggagtccaccagcttatcattttgataggggatttggatcagggattaacaattggttggttgcatttgagggaggaggatggtgcaacaatgtcactacttgccttgctcgcaagaccaatcgtttaggttcatctaagcaaatggccaagctaattgccttttcaggaattttgaataacagggaaatgtttaatccagatttctacaactggaacagaatc

SEQ ID NO: 230871 - DNA, 409 bp, Glycine max
gtgttaaacttcagcgcttatggataatggattgcattggagacaaaggactaggtgttgtagctacgacatgtaaagatttgcaagaattgagggtttttccatctgttccctttggggatccagcagctgtcacagaaaaagggctggttgcaatatcaatgggctgccctaagcttcactcgttactctacttctgccaccagatgacaaatgctgcactcataacagtggctaagaactgcccaaattttattcgattcaggttgtgtatccttgatgcaacaaaacctgaccctgatacaatgcagccactggacgaaggttttggcgcaattgtgcagtcttgcaggcgactcaggcgcctatctctctcggggaaattgactgaccaggttttcctttacat

SEQ ID NO: 230872 - DNA, 378 bp, Glycine max
ctcgagccgaatcggctcgaggacagatgaactggtttttgttttggcggcaacgaatcttccctgggaattggatgcagccatgctccgacgtcgtgagaagcgtagccttgtaccacttccagaaccagtagcaagaagagcaatgttcgaggaactccttccgcaacagcctgatgaggaaccgatcccctatgatatactggtggacaagacagaaggatattccggatcagatatccgattactctgtaaagagacagcagtgcaacccttaagacgcctaatgtcgcaacttgagcagagccaggatgtggtgcctgaagaagagttgccaaaagttgggccaatcaaatctgaagatatagagacagcttt

SEQ ID NO: 230873 - DNA, 395 bp, Glycine max
ggattgggtagttttgcagcagctattcattcttcaaagttatgggtcatgaatgttgtgcctactatagctgaggcgaatacactgggtgtgatatacgagcgaggacttattggcatctatcatgattggtgtgaagccttttcaacatatccaaggacatatgaccttattcacacccatggtgtctttagtctgtacaaggataaatgcaaggccgaagatatacttctggagatggaccggattttgcgaccagaaggtgctgtcatattccgcgacgaagtagatgtgcgaattaacgtaaagaaaatacttggaggaatgagatgggacactcaaatggttgaccatgacgatggtcctcttgttcctgacaatgtgcttgttgctgt

SEQ ID NO: 230874 - DNA, 397 bp, Glycine max
ctcgagcctaatcggctcgagcttcacaacattctcacataacagctttcaaactctgagaaagaatggctgcgaagacattgatgagtactgctatctcaaccttcgaatctctcctttcttcctcaaaatccatatttgccaccgcagttcctctttctaactttggtgtcaccaatgcctcttcgtctcgcttttctatgagtgctgactggatgccaggccagcctatacctccatagcttgatggttcagcacctggtgactttggattcgaccctcttcgtcttggtgaagtaccagagaatcttgagaggttcaaggagtcagaagtcattcactgcagatgggccatgcttgctgttccagggattttggtttcagaggcattgggctt

SEQ ID NO: 230875 - DNA, 416 bp, Glycine max
ctccatgctaccttgtgacagagggaagatgctgctcaactgcatcaatttatccttcatgctgctcttgatattgttcaggaccttgcatggactactagtgccatgtacttgaaatcagtagacaggtttaatgaacttgtggtgtcagtgtatgttacagctggtcatatcctttatacttgggattcttttatagtttagataaaaagaattgcattactcttgtttgttcacttttttttaatctttttttttccaaataaatgaagtactgagtacccaactttgaggaccaatcaatttagttagcttctttaattgtataattatgccattgtcactggcaggggagcaaaatataagtgcctagagtggagaagtcttaaactaaaagcttacagcaagcacatatc

SEQ ID NO: 230876 - DNA, 327 bp, Glycine max
gacttcaactccactgttactccgtgcaaaagtcacgaactgaacatggatctcttgatgaactgtatggagccagtggataaatgtttgaaggatgctagcatggacccaagacgtgttgacgagcttgtacctgtaggtggttcaacaaggaatcggagcgttcaggaactgctgcaggacttcgttaattgacaggagctgtgcagcatcaacaatcctcatcaacctgttgcatactgtgctgcagttcacgcttccattgtaagtggatacggcactcacagtgttcaagatcgtcacatccgtgatgtaacgccaccatct

SEQ ID NO: 230877 - DNA, 405 bp, Glycine max
tattagctaatgttttgggaatttcagttataagactctcaggtggtggtgcatcgctgagttgtgtgagagtgagaaagagagagtgtgtgtgtgtgcagaagatgtggccattcagcagaaaaggggcttctggtttttcatcatcatccacggcagagcaagtcactgaaggaattgatggaactggtctcactgccattgtcacaggagcatccagtggtattggcactgagactacacgtgtcctttcattgcgtggtgtccatgtgattatgggtgtgagaaatatgcttgctgctaaagatgtcaaagaaacattacttaaggagattccctccgctaaagttgatgccatggagttagatctcagttcattggagtctgtcaagaaatttgcatcag

SEQ ID NO: 230878 - DNA, 373 bp, Glycine max
ggctttatggtgagggtgaagatgaaactaaaggtgtatatactgccaagcttgaggaactcaaaaagcatggtgatccaattgatgagcgttacaaagaattcatggagaggggtactataatcgaacagtttgtctattgtataaatagttacagacaagttgcaatgtcgaatgatcccagatttgagcacattgacattaacgagaaacagaaggtcataaatgaatgtgttgaagctgaaaagtggtttaatgagaagcagcagcagcagaactcacttccaaaatatgccaaccctgtactcttgtcagctgaaataagaaagagagctgaagctgtcgataggttctgcaagccgattatggcaac

SEQ ID NO: 230879 - DNA, 401 bp, Glycine max
ctcatgggatcccaactcaacatatatccatgaacccccatacttcaagaacatgacgatggatcctcctggacctcatggtgtaaaagatgcttattgcctgctgaattttggtgacagtataaccactgatcatatttctccagccggaagcattcacaaggatagtcctgctgccaaataccttgttgagcgtggggtggaacgcaaggacttcaattcttatggaagtcgtcgtggcaatgatgaggtgatggcaaggggaacttttgccaacattcgccttgttaacaagctcttgaaaggggaagttggtccaaagacagttcacattccaacaggggaaaagctttacgtgtttgatgcagcaacgagatacatggcttctgggcaagacacca

SEQ ID NO: 230880 - DNA, 406 bp, Glycine max
caatgatggagttctactaagaaaccatattccacgtatccttaaaaagcacttcaggggaaagccatattacgttgatcttcttgatttgtttaatgaggttgagttccagactgcttcaggacagatgatagatctgatcaccacactggaaggagaaaaagacctgtctaaatacacattaacactgcatcgacgtattgttcagtacaagactgcatattattccttttaccttccggttgcatgtgcattgctcatggcgggtgaggatcttgacaaccatgttgatgtaaagaacattcttgttgagatgggaacatactttcaagtacaggatgattatttggattgttttggtgattctcaaacaattggaaagataggtacagatattgaagatttc

SEQ ID NO: 230881 - DNA, 411 bp, Glycine max
attgatgccaatggtatcttgaatgtctctgccgaagataaaaccactggccagaaaaataagatcactatcaccaatgacaagggtagattgtcaaaggaagatattgagaagatggttcaagaggctgacaagtacaagtctgatgatgaagagcacaagaagaaggttgaggccaaacacgctttggaaaactatgcatacaacatgaggaacaccgtgaaggatgacaagattggtgataaacttgacccggctgacaagaagaagattgaggatgcaattgagcaagcaatccagtggttagacagcaaccatcttacataagcatatgagtttgatgacaatctgaacgaattggaaagcatctgcaatccaatcattgccaagatgtaccaaggtggtgctggt

SEQ ID NO: 230882 - DNA, 413 bp, Glycine max
atttgaggccaggcaagccccactcaaccaccacacctctcctcgttcacgctacccctttctgctcttcttctacctttcaagttttaaaagtataaagatggcagagacattcctatttacctcagagtcggtgaacgagggacaccctgacaagctctgcgaccaaatctccgatgctgtcctcgacgcttgcctcgagcaggacccagacagcaaagttgcctgcgaaacatgcaccaaaaccaacttggtcatggtcttcggagaaatcacgaccaaggccaacgttgactacgagaagatagtgcgtgacacctgcaagaacatcggcttcctctcaaatgatgtgggactggatgccgacaactgcaaggtcctcgtcaacattgaacagcagagccctgaaattg

SEQ ID NO: 230883 - DNA, 337 bp, Glycine max
aaacactgctggatggtgtgtagcgaaagctggagtttctgatgctcagttgcaggccaacattgactacgcctgtagccaaggtatagattgcgggccaattcagccaggaggctcttgttttgagcctaacacaatagcatcccatgctgcatttgccatgaatctctactatcaaacttctggcaaaaatcaatggaactgtgatttctctcaatcagcaacactcacatcccaaaatccaagttacaatgcttgcatttacactggtgggagcacctgagaacagaggcttcggcttgatgttaactaataagttttgtggatagaggtgtat

SEQ ID NO: 230884 - DNA, 402 bp, Glycine max
ggccttttagaaataaatttttcttatatttctttcattagtagtacctataatggatacagtaagagagttggcatcaaagagtgcagcagttagattcaccaagagttcatgttacatgtgccacagcatcacgcaactgttctatgagcttggtgcaagccctgcagtgcatgagctatacaaagatggctatgggaaggaaatggagtgggctttgaggagcatggggtgcaacccttcagtgccagcagtgttcattggtggaaaatttgtggggtcttcaaaggatgtcatatccctccatgttgatggctctctcaaacaaatgctcatggctgcaaaggccatatggttctagctagtactcatccacactccaataatataatataagaagct

SEQ ID NO: 230885 - DNA, 392 bp, Glycine max
  unsure (1)..(392): unsure at all n locations
ggaatgatttttaaaactttgatctgtaccaaaatccctatactaataaagcaaaaggcaggttcatacatgtatttgttagtttgttgactcctttcaacctaacccatcatcgttcacacccgtggttctggctctgccctattttcggttcctctcgttatcgaaacagaaaccatttgtggtgaacatggatttggaccagtggatctcgaaggtcaaagatggccagcatcttctcgaagacgagcttcaacttctctgcgaatatgtaaaagagatccttattgaggagtccaatgtgcagcctgtcaatagtccagtgactgtntgtggtgatattcatggtcaattccatgatctaatgaaacttttccagactgggggtcatg

SEQ ID NO: 230886 - DNA, 376 bp, Glycine max
cgagttcagccgaaccaaactccgaagctatggcagagctccaaaccaaggttgaacctgttacggtcccggctccggtggatcccgagccaccgctagctgaggctccgccgctcgaaaagaaagcggtggcggtgccaccaactgttccggctgcggcagaggaaaccaaagctcttgttattgtggagaaggagaaggagaatgagatgataccagaacctgtaagaaagaacgcctcacgtggatcccttgatagatacattgctcttgcagaaatagataaagagaaacgattgtctaatgtgaacgcttgggaagaaagtgaaagatccaaagcagagaataaagcccaatagcagctctctgctgttgc

SEQ ID NO: 230887 - DNA, 428 bp, Glycine max
acgcgtacgtaaactcggcaaaggatttcaactttaggctccatctaaaaaaaatggctggtttggctagcaatcttcctcgaattgttatgataggtctgcaaattcattatgcagcacttgccatattcacaagagccgctctcttagatgggttgagtacaacggtgtttgtagtatacaggcaaggcatagccactttggctttggcgcctatatttttctctcctaagaggagacaatcagtgaaagattctttgggattcaggagcttctttttgatgtttgtgaccgctcttgttggagtcacggcaaatcagaatgcatacttcaaaggattattttatgcatcttctactgcagctaccgctatgagtaatctgataccggcattaacgtgtgtaattgcagcaattgccggatttgag

SEQ ID NO: 230888 - DNA, 392 bp, Glycine max
ggccgatacatcaagcccatgcttccaaagggccctgtaaagagattagctgtagatgcaacccttagagctgctgcaccttatcaaaaattgcgaagggcaaaagattctggaaacaatagaaaggtatttgtggagaaaacggacatgagggcaaagagaatggcacgtaaggcaggagcattggtgatatttgttgttgatgcaagtggaagcatggcattgaacaggatgcagaatgcaaaaggtgcagcacttaagcttctggctgaaagttatacaagcagggatcaggtatctataattccattccgtggagatgcagctgaagttctcctgccaccttctagatcaatttcaatggcaaggaaacgtcttgaaaggcttccatg

SEQ ID NO: 230889 - DNA, 333 bp, Glycine max
ccaaattccattttccaattcaaaaccctaactccgttcgaagcaccaaatcgtgatggcaccaaaggcagagaagaagccagcagagaagaagcctgtggaggagaagaaatcgacggtgggagacaaggctccggcggagaagaagccaaaggccggaaagaagcttccgaaggagggaagcgccggcggagaaggtaagaagaagaagagaaacaagaagagcgtggagacatacaagatctacatcttcaaggttctgaagcaggttcaccctgacattggtatctcaagcaaggccatgggaatcatgaacagcttcatcaacgacat

SEQ ID NO: 230890 - DNA, 392 bp, Glycine max
caaaaagcggggaaagggagattgaattcgatcctgggacgttaacgttgtttcaattcaattgtggtcctgtcggtgccctatctcagacgacgatgtcatctttatatagaggggaatccaggaggtacaacaataaaccaagaggacgtcataatttgacaacgcagaagaagcaagagattaaggaagcctttgagttatttgatactgatggctcaggtactattgatgccaaggagctgaatgttgctatgagggcccttggatttgagaagacagaagaacaaatcaatcaaatgatagcagatgtggacaaggatggaagtggagcaattgattatgaagaatttgagtacatgatgacagccagaatacgagacatggacact

SEQ ID NO: 230891 - DNA, 361 bp, Glycine max
  unsure (1)..(361): unsure at all n locations
ggttcgtggaggccgtggaggtggacgaggtgggggacgtggatttggacgtggtcgtgggtttagtcgtgactcctcgaatgatgagaactcattccctaccagcagagctccttataatcagggtccttttgaagaaggagatgctgggaagtcttctgaaagacgcagttatggtggaccacgagttccttaccgtggtggtcgtcgtggaggtttcagcaatggtgaaactggtgaaggtgaagacggacgacctcgaagagcatttgatcgtcgcagtgggactggacgaggaaatgaattcaaacgtgaaagttcaggacgangtaactggggaacccaaactgatgaacttgct

SEQ ID NO: 230892 - DNA, 353 bp, Glycine max
ggagccactcaaggctgagttccctattttgagctacgccgatttctaccagttggctggcgttgttgccgttgaggtcacgggtggacctgaagttccattccaccctgcacgagaggacaagcctgagccaccaccagagggtcgcttgcccgatgccactaaaggttctgaccatttgagagatgtgtttggcaaagctatgcggcttactgaccaagatatcgttgctctatctgggggtcacactattggagctgcacacaacgagcgttctggatttgagggtccctggacctctaatcctcttattttcgacaactcatacttcacggagttgttgagtggtgaga

SEQ ID NO: 230893 - DNA, 354 bp, Glycine max
  unsure (1)..(354): unsure at all n locations
attcggctcaaggggtgataaaactcatgtgtctactcgagtgatgggaacctatggttatgcagcaccagaatatgtcatgacgggacatcttacatcaagaagtgatgtgtatagtttcggagtggtactacttgagatgttgactggcagaagatctatggacaaaaaccgacccaacggtgaacacaaccttgtggaatgggctagaccacatctgggagagagaagaaggttctacagattgatagacccccgcttggaaggccacttttccataaaaggggctcanaaagccgcgcatctggctgctcactgccttagcatagatccaaaagcacgacccttgatgag

SEQ ID NO: 230894 - DNA, 391 bp, Glycine max
caaccttccaatccttccaaccaccactagtggatccttcccacagacggtagaactgaggagggtacgccgtgagttcaaggctaacatgatctccgaggaagagtaggttaagtcaattaaggaggaaattcgcaaagttgttgaacttcaacaagagcttgatattgatgttcttgttcatggagaaccagagagaaatgatatggttgagtacgtcggtgagcaattgtcaggctttgccttcactgttaatgggtgggtgcaatcctatggttcccgttgtgtgaagccaccaatcatctatggtgatgtgagccgcccaaagccaatgactgtcttctggtcatctctggctcagagctttaccaagcgcctaatgaagggaatg

SEQ ID NO: 230895 - DNA, 405 bp, Glycine max
gacgccataagaaagagcaagtcgaaaagttcatccctccctctctctcacacatcccagccatgagcctcttcggtataggcagaaaccagagaacattccgcccgaaaaaaagtactccttctggaagtaagggagctcaacttagaaaacatattgatgccacgttgggtagtggaaatctgagggaagcagtaaagctacctcctggggaggatttaaatgagtggctagctgtcaacactgttgatttcttcaaccaggtgaatctgctttatggtacccttacagagttctgtactcctgagaattgtcggacgatgtctgcaggacccaagtatgaatatagatgggcagatggtgtacaaattaagaaacctattgaggtttctgctccaaaatatg

SEQ ID NO: 230896 - DNA, 414 bp, Glycine max
gcgaagttgcgttaatgctactactctccttcagcttcttaatcactctcacccaaccctttcttcttcttcttcttaccagcgtcaacaatgtcagatccgtaccagatttcgttcgctcaagccttcttgtgcagcgctttcgccgcgtgtttcgccgagttttgtactattcctctggacacagctaaggtcaggcttcaactccaaaagaaggtagggattgatgatggagtgggtttacctaaatacaagggtttgctgggcacagttaagaccattgctagagaagagggtatatcagctctgtggaaaggcattgttcctggtttacaccgccaatgtttatatggacgcctaagaattgggttacatgatcctgtgagtataaatatctgactttcattgaataag

SEQ ID NO: 230897 - DNA, 369 bp, Glycine max
ccctaacctctcctcaatgggtagaaacgaagccgccatttccttcctcaccaacgtcgcccgcactgccttcggcctgggcgcagcggccaccgccgtctcctcttccctctacaccgtcgacggcggccagcgcgccgtcctcttcgaccgcttccgcggcatcctggactccaccgtcggcgaagggacccacttcctcatcccctgggtccagaaaccctacatcttcgacatccgcactcgtccccacaccttctcctccgtctccggtaccaaggacctccagatggttaacctaaccctccgcgtcctctcgcgctccgacaccgagacagctccccaccatcgtccagaacctcggcctcg

SEQ ID NO: 230898 - DNA, 389 bp, Glycine max
caagtgataaaattggaatgtctgattcaaaaaataaaatcgatgaagatgagactaatcctatcagtgcaggtagattttgtgaaaccatgcagggtgagacatctgtggaaaatatagttcttcgaaggcatactaatcctgatgctgcagctagaaatgggaaatcactaccaccagtgtatttttatgccctagaaagtgatcagcctatactggatatattaaagccgtctatagtcattgtttaccatccagatatgacctttgttagggaaattgaagtctacaaagctgagaatccctcaaaaaggttgaaagtatattttattttctatgaagattcaagtgaggttcagaagtttgaagcaagtatacgtagagagaat

SEQ ID NO: 230899 - DNA, 386 bp, Glycine max
gcggaatctgctagaattttctaataatggcgaaagacgttgagcaggtcacagagcaaggtgaatactccgcgaaggactaccatgaccctcctccggcaccgttgatcgacccagatgagctcacaaagtggtccttgtacagagccgccatagctgagttcatagcaacactcctttttctttacatcaccgtgttgaccattattggctacaagagacagagtgacaccaaaatccccggtaacaccgaatgtgacggcgttggcattttgggcatcgcttgggccttcggtggcatgatcttcatccttgtttactgcactgccggaatctctgggggacacatcaaccctgcggtgacattcgggttgttccttggacgc

SEQ ID NO: 230900 - DNA, 390 bp, Glycine max
acaaaatgaacaacctcttctttctcttcttcttcctcttcttagcctccgccgccgccagcgtccccgcccacaacatcacccgcatgcttgccaaacaccccggcttctccaccttcaaccactatctctccctcacccacctcgccgaagagatcaaccgccgccagaccatcaccgtcctggccctcgacaatgccgccatgtcctccctcctcgacaagcacctctccctccccaccatcaaaaacgtcctctccctccacgtcctcgtcgactacttcggcgccaaaaagctccaccagatcaacaacagcaccaccctcgtctcctccatgttccaggccaccggctcagcctccggcaccgccggctacgtcaacatcacca

SEQ ID NO: 230901 - DNA, 399 bp, Glycine max
  unsure (1)..(399): unsure at all n locations
agtagagtannacaaaagagagtgcaataactcgttgtacattcctagtgtgtgggagagacatggctaagatgtgtgttttggtgttggttcttgctctggctgtggccacaagtgccagaaacgttcccaaccccaaggatgctggtcttaaggaccagaagaacttcatcagctatggtggagttggtggttattccgggattgggaacaatggactgccttttggaggagctggtgccggaataagtggtggttttggcggacgtggtggacttggtggtggcctcggcggtcctaccggtgggatcggagggtttggcggtaccggtagcggtgtcggtggcggtattggtggtggcgttggaactggcgttggtggtggcagcggtgttcttc

SEQ ID NO: 230902 - DNA, 410 bp, Glycine max
agaagctggctgatctcagtggaaagggggtgaccacaattatcggaggaggagattctgttgcagctgtggagaaagtaggagttgctagtgtcatgagccacatatctactggtggtggtgccagtttggagttattggaaggcaaagagcttccaggagtccttgctctcgatgaagccgtcccagttgccgtgtaagacaattttcagcttggaaaatttttccatcctcagatttcggtgttgtcaatcttgtaaaagagcatatgttgtaggacccttcggagtctgttagtgtaaattttatcatgcttgagttattattggcttcacacataaattgcgtgtaactgtaaaccctggctgagagccataaattcgaataaatcttttagttgctgccaaaaa

SEQ ID NO: 230903 - DNA, 396 bp, Glycine max
  unsure (1)..(396): unsure at all n locations
gatagctccaataatctcaaggctcccaaaggcattggcaccttcactgagcaatcgaactgttatgatgtccaaacaggcagtaatggggattggggccattacttttactatggaggccccggtaaaaatcctaattgtcaatgagtaatgatgagaggaaagtaaaaaagaaaaaagaaaaaaattgcagcctctcttgtatcattgaatgcaagtgttaaagcccttccttctcttccatcttgtatacccttttttctgtagtggaaagttttgactctttttttttttttttttccttctaatattgaaagattctccatgtaagctangggagaagtgtggccaagtttctcaaaagcctaaagaaacaggcctgccttttataacatc

SEQ ID NO: 230904 - DNA, 282 bp, Glycine max
cacgctcacctaagtttcaatttcaatcccttttctttttccgttacaaaataattcaaaattccctccctcatttacccttgtttgtgtaaagtagtagcagagtgagactaggtatcatcgatggcagggtacaagggcgatgacgaatacgattacctcttcaagctggttctcatcggcgattccggtgtcggcaagtccaacctgctttcgcgcttcacgaggaacgagttcaatttggagtccaagtccaccataagggttgagttcgccaacaag

SEQ ID NO: 230905 - DNA, 388 bp, Glycine max
ctctctttcgtcagtttcgggggaagagatccagcagcaatggtgtacgtcaaggctcagaaatcaaaagcctacttcaagagatatcaagtcaagttcaagagaagaagagagggaaaaaccgattaccgtgccaggattcggttgattaatcaggacaagaacaaatataacactccgaaataccgatttgtggttcgctttagcaacaaggacattgttgcacaaataatatctgctagcattgccggcgatttagttcttgctacagcatattcacatgagctgccacgatatggtcttgaagtacgacttacaaattatgcagcagcttattgcactggtctcctgttggcccgaagagtcctcaaaacacttgaaatggatg

SEQ ID NO: 230906 - DNA, 362 bp, Glycine max
ctcgagccgtttcgattagagggttgggctggtctgtacaaggggataattccatcaactgtcaaagctgcacctgctggtgctgtgacatttgttgcttatgaattgacatcagattggttagagtccactttcaattgattttttcccattttttcttcatgattagtgatcatattcttttttgaaatacaagttgattccctcgtagtataggaagaaagtgtgagggatatgctaattttttgtaatgatagtggtagttgataagattgaacttcctttaagatggaagatttgtccttgatgcttgcgtctgatttggaattcaaaatgtaaatttcaaaaatggtgcaaaagcc

SEQ ID NO: 230907 - DNA, 390 bp, Glycine max
ctcacttctcagcactcagcagcgatatcagttgaagaaacagaaacaaacaaaagaggcagaagatgttgtgggtggacaaatatcgtcccaaaaccctcgaccaggttatggtccacaccgacatcgctcgcaatctcaagaaattggtaacggaacaggattgcccccatttactcttctatggcccatctggctccggcaagaaaaccctaatcatggctcttctccgccaaatgttcggacctggtgccgaaaaggtgaaggtggataataggacctggaaagtggatgctgggagtagatctcttgatttagagctgacaacattatcaagtgccaatcacattgaaatgagtccgagtgatgcaggctttcaggacagataca

SEQ ID NO: 230908 - DNA, 418 bp, Glycine max
tctgtctcctcctcaatcttcattgtcctgttctttcccttggtgacaaaccaagactaacacacacagaacatagcttgtgttggtgaggtgagaagataaagaaagaatggcatttgcaggaacaacacagaagtgtatggcctgtgacaaaaccgtttatctggttgataagttgaccgcggataaccgagttttccacaaagcttgcttcagatgccatcactgcaaaggaaccctcaagctgagcaactacaactcttttgagggagttctttattgtaagccacactttgaccaactgttcaaaagaacagggagccttgacaaaagctttgaaggaacaccaaaaattgccaagccagagaaaaatttggaagagaaacctgcagcagccaaagtctcaagtatgtttgga

SEQ ID NO: 230909 - DNA, 406 bp, Glycine max
tggggttcttgcacttgctgtgtcctcttcaagcttttgaactggggtgttaggggttcgaccattcctcgagcctagtacaagttgtggttgggatttcaatgcattgtcaaggtcttgtaatgcttcattgaggttgtttgagagtgtttgaggggagaattgacgtttgttccttatgctgttggccagttcccttaatacttttgacacttcctctccaagtctgatgcaagaatctttgtacaccgcacgaattgactttggtgtcttaagaatcaaatgttaataaattaataaatcagtcaatggaatatataataaaatcatgataataagcatcaaataagaagctgcacttataggcttaactaatcctcctattattgttgttgaaattcgattt

SEQ ID NO: 230910 - DNA, 410 bp, Glycine max
aaaaaaataccctcgattcatgcctcaaaagggttgataataagtaaaaaaaatcaatgaattcatgataaaacccttctgcgtttttttattataaatttttttgtcaataaagggatcaaggggttgggggatcaaatggtaaagttcttttgttggtaaattggaggattagaaacatgactattgctttccaattagctgtttttgcattaattgctatttcatttattttattgattagtgtacctgttgtatttgcttctcctgaaggttggtcgaataacaaaaatgttgtattttccggtacatcattatggattggattagtgtttctcgtgggtattcttaattctctcatttcttgaagctctatttattctagatcaaaaacgaaatgacccctcccc

SEQ ID NO: 230911 - DNA, 345 bp, Glycine max
cattgcaaaaatggcatcattcaccatgacagcttccatccttggcagcccagccgtcaccaaccggtcggcagtagcaacgcagaggagatcactcgtagtgaatgctgccaaagctgttgaagcagaaaaggtcagttatgacaatgacatggatggtagcaatggaaggaggaacttgatgttcgccgcggcggcggctgctgtttgctctgttgctgggatggcagtggcagatgagcctaaaccaggaaccccagaagccaagaaaaagtatgctccgatttgtgtcaccatgccaactgccaagaattgtcccaattgaaggaacttgggttttaattt

SEQ ID NO: 230912 - DNA, 397 bp, Glycine max
gattagtccctttgtgattcctgggaaactcatttcattagagtgagagagagagagagagagagagagaggtatcacagtgaaacgaagaagccctaactacgcacgcactcattcttgagaaagctcaatattcattcgtccatggcactctcttctcgtctcttttccaaatccaaattgatctatggctgtcaaatacttctgcaaaaggagcatgctattccagttcgtcactttgctaaagagtctgcccctcctgcccttaagggagatcagatgctgaagaacatttttgtggatgtgaagaacagatttgagactgccatatgaatattaaagaacgagaagatcaccattgacccagaagatcgagctgctgtttctcattatgcaa

SEQ ID NO: 230913 - DNA, 397 bp, Glycine max
gtggaacagctcgttgataatgcagatgaacgcagggttttggagaacgaagcgctcgatgaggtctgcttccgcacgcttaagctcagtagaccaagctttggggatcggaaacgacgactttcagctaccatgagtggtgtgacatgttgtcttcgtttcgctgggcaagtcaactcagatcttcgcagacttgctgtgactctcattcacttctggcgtctgcactttttcacggtgggtcttgccccactcatatctcgtggttcccaacactacagagctctgacagtacccgaactgagataccagttgtgggatgataggaccatgatgtgtgcagctgatgtacgccatggtcgacacttgacagcatctgcgatgttccgtggtaaca

SEQ ID NO: 230914 - DNA, 388 bp, Glycine max
ggaaacttagaggaggaggcaaatgtcaagcctccaaccccattgacgcttgctggagatgcaataaagactgggccaatgaccggttcaggctagccaagtgcggcaaagggttcggaagacgggccaccggcgggctcggtggtcccatctatgtcgtcaccgataattccgatgacgacatggtgaaccctaagccgggaactatccgtcacgctgtcacccaaaaaggccccttgtggatcatcttcggacacagcatgatcatcagtttgaggcaagagctgatgatttcctccgacaagaccatcgatggtcgtggcgcaaacgtgcaatttaggggcggtgctggcctcaccattcagttcgtgaacaacgttattatcca

SEQ ID NO: 230915 - DNA, 446 bp, Glycine max
acgcctacgtaaactcggaattcggctccgaggaagttttcaatgctttttataagttgtggcctgagaagttccaaaacaaaacaaatggtgtgacaccaaggagatggatcaggttctgcaatccagatctgagtaaaataataaccgagtggataggcactgaggattgggtcctaaatactgaaaaattggcggagctacggaagtttgtagacaatgaggatctacaagtgcagtggagggaagcaaagaggagtaacaaagttaaagttgcagcattcatcagagaaaaagcagggtattctgtcagtcctgatgcaatgtttgacatccaggtgaagagaatccatgaatataagcgacaattattgaacatatttggaattgtttaccgatacaagaagatgaaagaaatgagtgctgcagaaaggaaagcaaatttt

SEQ ID NO: 230916 - DNA, 410 bp, Glycine max
  unsure (1)..(410): unsure at all n locations
aaacaatgaatcttggtgccaagggttagatggattggcttctaagtctgccgaatactacaagcaaagtgctcgatttgccaagtggacgaccgttgttagcattccatgtggtccttctgcattagctgtcaaagaagcagcatggggacttgcacgttatgctgctatctctcatgacaatggtcttgtgccaatcgttgagcctgaaattcttcttgatggagaccacccaattgagaggacgctggaagtggctgagaaggtctggtcagaagtctttttctatttggctgaaaacaatgtcctttttgagggaattttgctcaaacctagcatggttacacctgnggctgaacacaaggacaaagcttctccagaaaccattgccaaatatactctaaccatgc

SEQ ID NO: 230917 - DNA, 312 bp, Glycine max
atacgccgccgtttcgctctccggtgaccctctccaccctcagggcgccaccacccacgtccacaaagacgccggcagcaaccccacgtggaactaccccgtgaaattctctgtcaacgaatcgctggcgaaggaaaatcgtttatctcttgagatcaagctcatctccgaccgcaccctcggcgacaccgtcatcggcaccgtccatgttcctctcagggaactcctggataaccccggcgatgacagctccttccgccaagtcagttatcaggtgatgaagcaatcaagaaaatccaagggaatcttgaa

SEQ ID NO: 230918 - DNA, 392 bp, Glycine max
agcctacgtaacctcggaattcggctcaagggccaaagggcaaaaattttgagcacaatggcctcaacacaatgctttttgcacaaccacgccctcacaactccagctagagcttcaacacagcgcctatttgtgagcaccaaaccaaaccacattgtttgcaaggcagcacagaagcaggttactgtccaagagggtgaggacactactactggccttgtctctcgcaggttggccctcactgtgctcattggtgctgctgctgttggctctaaggtggcacctgctgatgcagcctatggagaagctgccaatgtgtttggaaaaccaaagacaaacacagacttcctttcatacaatgggaatggattcaaactctcaattccctcaaa

SEQ ID NO: 230919 - DNA, 393 bp, Glycine max
tgtttataaaggagttccaaaggattacaccggcgaagatgttactgttgataacttttttgctgctttacttggaaataagtcagcactgactggtggcagtgggaaggttgtggacagtggtcctgatgatcatatatttgtatactatactgaccatggaggtcctggggtgctcgggatgcctgctggtccttacttatacgcggatgatctgattgaagtcttgaagaaaaagcatgcttctggaacatataaaaacctagtattttatctggaggcatgtgaatctgggagtatctttgaaggtcttcttcctgaagatatcaatatttatgcaaccactgcttccaatgcagaagacagtacttggggaacatattgccccgggga

SEQ ID NO: 230920 - DNA, 399 bp, Glycine max
gaccttagaaagagaaggaaaaaaaaaacttgtgtttcttgggaagccatgagcaccaccgagagtcaaagatataagggcacagtgaaatggttcaacgaggagaagggtttcggtttcataactcccgaagatggtggctctgatctcttcgttcactacagtgcgatccaaaccgacggcggcttccgcaccttgtcggagggtcagtcagtagagttcctcgtcactcaggacgacagcgggcgagccgcggccgtcaacgtgacgaccaccacggttaaatctagtgacagcggtaacggggaaaactctggtggtgatgctgccaatgttgagaaataagtgagaatgaattattggagtttcctgaattgcgagtatgatatttatattgat

SEQ ID NO: 230921 - DNA, 399 bp, Glycine max
cgcaagcaaaaagaaagaatcccaggcgaggagaaagatggaggggaaggagcaggatgtgtcgttgggagcgaacaagttccccgagagacagccgattgggacggcggcgcagagccaagacgacggcaaggactaccaggagccggcgccggcgccgctggttgacccgacggagtttacgtcatggtcgttttacagagcagggatagcagagtttgtggccacttttctgtttctctacatcaccgtcttaaccgttatgggagtcgccggggctaagtctaagtgtagtaccgttgggattcaaggaatcgcttgggccttcggtggcatgatcttcgccctcgtttactgcaccgctggcatctcagggggacacataaacccggcggtgac

SEQ ID NO: 230922 - DNA, 387 bp, Glycine max
aacacatatttctttttcttttccctttttcctaggcacagcacacgccctctcaaatagaaactgagagatgaattctgatcagtttcagaagaacagcatgttcgtagaaacccctgaagatggtggcaaaaacttcgacgatgatggacgagtcagaagaacgggtacatggataactgcgagtgcccatatcataacggcagtgatagggtcaggagtgttgtcacttgcatgggcaattgcacaaatgggttgggtggctggccctgccgttctctttgccttctctttcatcacttacttcacttccactcttcttgccgactgttatcgttcacctgatcctgttcatggcaagcgaaactacacctattccgatgttgt

SEQ ID NO: 230923 - DNA, 384 bp, Glycine max
aaaacactcataacacaaagcacaaagcaaagctcatccttgagttaaaaaatggcaacagcttcttccatggctctctcatccccatccttggctggcaaggccgtgaagctgggcccatcagccccagaagtgggaagggtgagcatgaggaagaccgtcaccaagcaggtctcctcaggaagcccatggtacggcccagaccgagtcaagtacttgggcccattctctggcgagcccccgtcctacctaaccggtgagttcccaggcgactacggctgggacactgctgggctttccgcagacccagaaaactttcgccaagaaaccgtgaactcgaagtgattcactccaggtgggccatgctcggagccttgggctgcg

SEQ ID NO: 230924 - DNA, 380 bp, Glycine max
gtcaaataccaatgaaagcaactactggcgcattttcttcttcgtcttcgtctcctctttctcaatttcgatttctcaattctcaattctcaatctcaaggtgaaatgatgcactcagtggcaataattacttttggatgctggagataaggcgtgatgggcggttgctgttgttgttgttcttctaaggagactgtgttgagcgctccacctgcgtactactattatccaagagcatcagaagagcatgttcctctatcttctcacccgggtgctgcttctgctttctctgggcggctattggttgatactaatctagatacttcatctcctgatacttatagacctcctcctgctcctatccctttcaatgttacctt

SEQ ID NO: 230925 - DNA, 368 bp, Glycine max
  unsure (1)..(368): unsure at all n locations
gtcacaagcgacaaccatggaccgtcacatangaaaaacatttcaaatgcccgcggcatcaatgaccgttttcttaattggaacaattctcctaactgtccccttctacgaccgtttcattgttcccgtggcaaagaaagtgctcaagaatccacatggtttcacccctttgcaacgcattggagtcggtttagtactctcagtggtttccatggtggtaggagcactgatagaaataaagagactaagatatgcccaatcacatggtttggtagataagccagaagcaaagatccctatgaccgtgttttggttgataccacagaacttgtttgtgggggcaggggacgcatttatgtacatggggc

SEQ ID NO: 230926 - DNA, 382 bp, Glycine max
cggaattcggctcaaggcaagtacccggagaataacgtttggcaacatgaggtcattcgtaagcaattcgatgggaggtctcatgggcggaagcaaccttgcttcttgggtcgtcgccggaaccctagcctactttctctggattaaaccctcccaagacttcaagcgtcaacaacaggagaaggccactcttgccgccgctgagtctgattcttatcgtaaacccattcccgaccctcacgttacgggtttgatatatggaaacatgaacacggacaaagcaaccagtccagaggattgattgattagcattcatgtgagtgtgttgccttacatctactcagttctacacaaatacaccatccccagagttaatgaagat

SEQ ID NO: 230927 - DNA, 362 bp, Glycine max
ctcacaacagcagctgcagcagcaatggctcccaaacgaggtggaaaggctccggctcttgccgctaagaagaagcctgagaaggtcacgaatccgttgttcgagaagcgtccgaagcagttcggaatcggaggggcgttgcctccgaagagagacttgactaggttcgtgaagtggccaaagaatgttcaaattcagaggaagaagaggattctgaagcagaggttgaaggttcccccagctttgaaccagtttaccaaaactcttgacaaaaacctagcagcaagtctgttcaagttgcttctgaagtacaggcccgaggacaaagctgaaaagaatgagagggtcttgaaaatggctca

SEQ ID NO: 230928 - DNA, 416 bp, Glycine max
ttccatcagatatattttcttcaaaaacaatggcaggcgaggtggtgaagaaggaagactctctcaacctgaaagtcactaacaggagtcatgttcaacctgaggagaaaattggaaggaaagagtaccagctggtcacttttgatcttccctacttggccttcgactacaaccagaagctgctgttttacaagggtgaagattttgagggtatggtccaaaaactcaaagttggacttggtgtggtgctgaaggagtttcaccaacttgctggtaagttagggaaagatgaagagggggtgttcagagtggagtatgatgatgacatgcttggtgtggaggttgttgaagctgttgttgttgatgataatgagattggtgtggatgatctaactgtggctgaaattagtaacact

SEQ ID NO: 230929 - DNA, 385 bp, Glycine max
gtcaccgttgcttactagatgtcaaaatccagttacaaagtttcaacaatgtccacttttgaacataagttactgtcctgcatcagaagttgatctggttcaaggaaagaatttggttattgtagtttacaactctctaggttggaggaggaatgaagtgattcggattccggttattgaggccaatgttagagttcatgactctaatggtatagaaatagaatctcaacttcttcctcaggctgagaaatatgtagacttaagaaattactacgtgaaggcatatctaggacaaactccacccaaggcacctaagtactggcttgcatttacagtttctgtaccgccacttggttttagcacatacactgtctcaactgccaaa

SEQ ID NO: 230930 - DNA, 360 bp, Glycine max
agcaaggagtaaccaccaaattcattccaaacaggagagaaaaagcaaagctcctcctgttatttcttggtggttggaggaggttcagaggaagaagaagatgagttaggagaaattaatattaactcttcaattttgtagtccaattgatccatccatggtgggggaatcaagaaagtgggtgatacttttggcatcaatatgggtgcaggcattcacagggacaaactttgacttctcatcatactcatctgagctcaaatctgtgcttgacataactcagcttcagctcaattacctctctgtggcctcagacatgggaaaggcctttgggtggtgctctggggtctcactcatgta

SEQ ID NO: 230931 - DNA, 395 bp, Glycine max
gccgcaccttgattcagagcagagcgaccttgaagagctatggctgtcggaaagaataagaggatttccaagggaaagaagggtggcaagaagaaagccgctgatccctttgccaagaaggactggtacgatatcaaggccccttccgtctttcaggtcaagaatgttggcaaaaccctcgtctctcgtacccagggaaccaagattgcttctgaaggactcaaacatagagtgtttgaggtctcattggctgatctccaaggagatgaagaccatgccttcaagaagattcgtttgagagctgaggatgttcaagggaaaaatgttctgacaaacttttggggaatggatttcacaactgataagttgaggtccttggtgcggaaatggcaaac

SEQ ID NO: 230932 - DNA, 378 bp, Glycine max
  unsure (1)..(378): unsure at all n locations
gaattcggctcaagaaacactcataacacaaaccacaaaccaaagctcacccttgatttaaaaaatggaaccagcttcttcaatggttctctcatcccaatccttggctggaaaggccttaaacctgggccaatcaccccaaaaagtgggaagggtgagcatgaggaagaccgtcaccaagcaagtctcctcangaagcccatggtacggcccagaccgagtcaagtacttgggcccattctctggcgagcccccgtcctacctaaccggtgagttcccaggcgactacggctgggacactgctgggctttccgcagacccagaaaccttcgccaagaaccgtgaactcgaagtgatccactccaggtgggccatgct

SEQ ID NO: 230933 - DNA, 411 bp, Glycine max
  unsure (1)..(411): unsure at all n locations
cctggccaaaaagtactggatgttggttgtggtacaggaggaggtgacatttacatggctgaaaattttgatgttgaggttgttggcattgacctctccataaacgtgatttctcttgctattgaacgtgctattggactcaaatgctcggtagaatttgaatgtgccgattgcactaaaaaaacataccctgagaatacatttgatgtaatctattcccgtgacacattgttacacatcaaagataaaccaccactattcagatcattttacaaatggttgaagcgtggaggtacacttattattactgattactgcaaaagtgaaggaagtccatcattangatatgctgagtacataaaaaaaggaggatatcatatccatgacatgaaaacatattgtcagatgttt

SEQ ID NO: 230934 - DNA, 369 bp, Glycine max
  unsure (1)..(369): unsure at all n locations
tgaaaatgttgctattgtgaaaccaactgatgaggagccttatgcaccaaacaatcctaaaggttttgttggcaaagctcttggacaaccaggactgaaacgttcagtgagggttggggagacaggtttcagagaagttgcagcctaccttcttgaccatgatcattttgccaatgtaccctttactgcccttgtaaaggtcacacattctatttttaatgttaatgacagggtcaatggtagtatgcatcataacaaaaagcaaataagcaagattgcatctctgcagcagtttattcctcatgattttgatgcaagtgatcatggaacttctagtttccctgttgctgctgttcatangattgggat

SEQ ID NO: 230935 - DNA, 400 bp, Glycine max
  unsure (1)..(400): unsure at all n locations
cagaattctctaaaagagatctttttctgctctttgaagaaagaagggtctttgcttgattttggagatgtctctgctctcagatctcatcaaccttaacctctccgataccaccgagaaggtgatcgcagagtacatatggatcggtggatcaggaatggacctgaggagcaaagcaaggactctcccaggaccagttagcgacccttcagagcttcccaagtggaactatgatggttccagcacaggtcaagctcctggtgaagacagtgaagtgattttatacccacaagccattttcagggattcattcanaaggggtaacaatatcttggttatctgtgatgcctacactcctgctggagaacctattcccactaacaagaggcacgctgctgcc

SEQ ID NO: 230936 - DNA, 399 bp, Glycine max
agagaaacaacaacagaggagcaagcaggcacatgctgtcaccaccccacgatctaaaagaagaaagaaccagcttaagaaagtttgtcaagtgccagttgagaatctctcctcagacatatgggcatggaggaaatatggccagaaacccataaaggggtctccatatccaagggggtactatagatgtagcagctcaaaggggtgtttggcaaggaaacaggttgaaagaaacagatcagacccaacaatgtttatagtgacttacactgctgagcacaaccaccctgctcctactcacagaaactctcttgctggctccacacgtcagaagccattggtacctcaaacagccaccaccactgaagaagactctgacaagagcaagagccctcacaa

SEQ ID NO: 230937 - DNA, 364 bp, Glycine max
tccattttccctctgtcttccccccctcctctacacaaaaatatattattagcatggagaaggtgaattttgtgaagaatggagagcttagattgcctccggggttccgtttccacccgactgatgaggagctggttctgcaatacttgaagcgcaaggtcttctcctgccctttgccagcctctatcattcctgagcttcatgtttgcaagtctgatccttgggatttgccaggtgatttggagcaagagagatacttctttagcaccaaagtggccaaatatcccaacggaaatcgctccaacagagccacaaattcgggttattggaaggcaactggcttggacaaacaaattgttacttc

SEQ ID NO: 230938 - DNA, 303 bp, Glycine max
accggattgtgggtgctgcgttggtggagatggacggtgccgtcgttaaacaagagcacacggcgaggctgttgattcactccatttcccccaattgccaattcgacacattcctttgccacaacaacaacaataatgaatattgaatcccttgttacgtctttggaagtggttcgaataattaattcaataatgaagtactagtgcattttaatcaaatcctttacatatttaattggactgcaccagcttcaagtaattaatatatctggaaggctgaggatatgcttcaatttggctttg

SEQ ID NO: 230939 - DNA, 374 bp, Glycine max
acgtcgacagctacataagtaccattggagttgatttcaaaatcagaaccgtggagctggaaggaaaaaccgtcaagctgcagatttgggatacagctggacaggagcgattcaggactataacaagcagttactatagaggagcacatggaattattattgtctatgatgttactgagatggaaagctttaacaatgtcaagcagtggttgaatgagattgatagatatgcaaatgacactgtatgcaagcttcttgtggggaataaatccgatctagttgataacaatgttgttgactcgctaacagccaatgcatttgcagatgagcttggtatccctttccttgagacaagtgcaaagactcaatcaatg

SEQ ID NO: 230940 - DNA, 377 bp, Glycine max
gtggaatggttggcttgttggtagaagaaattgggcgtgtgggagttgttgaatcgggaagcaaaagcaatgagaatccatcacatagcatgccgccaggacgattagtcctatctgatcgtagacgagagcacgaaggaagccgcggcggtggacccggtcgaaccggagaaggttcttgaagttgccagctcgcacggactcactctcagattcgtcctcaggacccaccatcactgggattatgctggtggaaacgacaagataaagcagctggtgccaggaatcaaagtctatggtggttccattgataacgtcaagggttgcactgacaaagttgcaaacggtgataaggtctctcttggagctgaaatcac

SEQ ID NO: 230941 - DNA, 401 bp, Glycine max
atttgaaaatgccatgtgaatcgctagaaacatgtaaagtgtgtggctaacccaataacgaaagtttcgtaagggaactggagcaggctaccatgagacaaaagattttctttctaaagaaattcgattcggaactacgatatgtccaaggtccaatatggaaagaatttcagaggttttccttgactttgtccgtgtcaacaaacaattcgaaatgcctcgacttttttagaataggtccgagtcaaatagcaatgattcgaagcactttacactattttggaaacctaaggactcaatcgtatggatatgtaaaatacaggatttccaatcctagcaggaaaagggggggaacggatactcaatttcaagtgagtaaacagaattccatactagatatc

SEQ ID NO: 230942 - DNA, 281 bp, Glycine max
gtgaggtagaacccttccactgtcgtgaatctgctatgggtgcctacaactatgtttcagagcgatggcgcaagaaacagtctgatgtcatgcgcatcttgcagcgggtgaggtgctgggagtataggcagcaatattccaatgttcgtgtgacagggtctacccgctctgaaagtgctcgtcgcttgggcttcaatgcgaagcaaggctatgtgagtaccgtgttcgtgttatgaggggtggtcgaatgagactaattcgcaacagtattgtctatggga

SEQ ID NO: 230943 - DNA, 317 bp, Glycine max
ctagctgttcgtctcctaagtatacaagggatcagatcagtatttcatttggggatgcttatggcaaccagatatatgcgccaagactggatgatccagcttcaggtacattcgagagctgttcttcagatacatttcatataactggtccgtgtgcatatcagatatgttatgtgtacctatatagatctggattatatggctggaagcctgacagtgtgaacataaatggttataacggcaagcctgttactttctattacaacacatatatcaccagagatacgtggtatggatttaagttgtgcaacggtgct

SEQ ID NO: 230944 - DNA, 292 bp, Glycine max
cccgggattcatatgggtctaactactgttaagcttgttctagctcaattggtgcattgttttaattgggtgcttccattggacatgtctcctgatgagttagacatgaatgagatatttggactcacaacgccaagaagtaagcatttgctagctacaccagtttatcgactagttgattaagttaagagatcgaggttaataatgcgcagtaaggtttatttacatatatttgtagtttgtttaaatttcaatgagtcatgtgaaattaaaattaacaatttttctaaaa

SEQ ID NO: 230945 - DNA, 360 bp, Glycine max
  unsure (1)..(360): unsure at all n locations
gtcttttatagcagcagttgagaaaggaaacatgagaagcatgccaaacagaagcatgcctgcatctccttatcctacacctggcgcccttctcatgggagatgccttcaacatgcgtcaccctttaaccggagggggaatgactgtggctttgtctgacattgttttgctaaggaaccttcttagacccctgcatgatctgcatgatgctaatgctctttgcaaatatcttgaatcattctccaccctgcgcaagccagtggcatctacaataaacacactagctggggcactgtacaaggtgttttgtgcattccctgacccagctagtaaggaaatgcgccangcatgttttgatta

SEQ ID NO: 230946 - DNA, 401 bp, Glycine max
tgcaaagggattgctctatcttcatgaatttagtcccaacaaatatgtccatggagacctcaagccaagtaacatacttcttggacacaatatggaagcccacatttctgactttggagttgggcgccttgcaaacattgccggagggtctccgaccttgcaatcgaaccgagtggccgcggagcaactacagggaaggcagaatagcatatccactgaagtcacaaccaatgtgttgggaaatggttatatggcaccagaagcactgaaagtggtgaagccatcacagaactgggatgtgtattcatattgtgtgatattgttggaaatgatcacaggaagatcatccattgtcttagtggggaactcataaatacaccttgttcagtggattcagttgt

SEQ ID NO: 230947 - DNA, 405 bp, Glycine max
ctcgagccgattcggctcgagtgcctattgttttctgtatttagattttttcgtcaacttttccgattttttcctcacttgttgtgaataatctggcagaggcggcagcaaataagaatggcttcaaatcccaaacctttgacttttgaggaggtggctaatcacaacaacaaaaaggattgctggattattatcaatggaaaggtgtatgatatcacgccatttctggatgagcatcctggaggagatgaagttttggtaacgtcaacagggaaggatgccaccattgattttgaagatgtgggccacagtgattctgccatagaaatgatggaaaaatacttcgtcgggaaggttgacacttccactcttccagcgaaagttaaccataatctgccacaacct

SEQ ID NO: 230948 - DNA, 406 bp, Glycine max
caataataataactccattttccctctgtcttccccccctcctctacacaaaaatatattattagcatggagaaggtgaattttgtgaagaatggagagcttagattgcctccggggttccgtttccacccgactgatgaggagctggttctgcaatacttgaagcgcaaggtcttctcctgccctttgccagcctctatcattcctgagcttcatgtttgcaagtctgatccttgggatttgccaggttcctttctattttccattcacacccatcatcccctttctctttctctaatttcaattccatgcccccatttttaggtgatttggagcaagagagatacttctttagcaccaaagtggccaaatatcccaacggaaatcgctccaacagagccacaaa

SEQ ID NO: 230949 - DNA, 353 bp, Glycine max
ggcaaacgcagcatctggtatggcagtccatgatgactgcaagttgaggtttttggagctgaaggcaaaaaggacacaccgtttcatagtttttaagattgaggagcagcagaagcaggtcattgtggagaagcttggtgagcctgcccagggctatgaagatttcactgccagccttcctgctgacgagtgccgttatgctgtttatgattttgagtatctgactgaagggaatgtccctaaaagcagaatttttttcattgcgtggtcccctgacacatcaagggtgaggagcaagatgatttatgcaagctccaaagacagattcaagaaggagctggatggaattcaag

SEQ ID NO: 230950 - DNA, 387 bp, Glycine max
gttggtaaagaggctggtgaaaagtggaggtctatgactgatgaagagaagaagccatatcttgacaaagttgctgagcttaaggaagagtacgagaaggctatggaaagctatgaagctggtcaagatgaagaagatcaaactgtgtctgataaggaaacttctgataaggaagctgctgcaaaagaagttgcaatagaagttgaagaggagctaactgacgaggactaatggttgcattatggcactccttgaacttgatagctagtattctaagggccacataattacttaacgactaaggttgtaaattttggaacatgttttagttggagttaaaaactgttgaaatccatgcgcaatatcttttcattttttgtaatgctc

SEQ ID NO: 230951 - DNA, 392 bp, Glycine max
gacctcgcccaggccttccgcctcatcgaccgcgacaacgacggcgtcgtcacgcgccaggacctcgaggccctcctcacgtgcctcggcgcgtcgccgtgccccgacgacgtggcggtcatgctcggcgaggtcgacggcgacggcatcaccgtagaaaggctcatgagctacgtcgggtcgggtctgaaacccgggtcggatccggacgagctcaaggaggcgttcgaggtgttcgacacggatcgcgacgggaggatctcggcggaggagctgcttagggttttcaaggccatcggcgacgagcggtgcacgttagaggagtgccggcgcatgatagagggtgtggacagaaatggggacgggttcgtctgcttccaggacttttctcg

SEQ ID NO: 230952 - DNA, 381 bp, Glycine max
cccggatttgagtggaaatgatcctgagaccacaaatttctgcatgttcatcaatgaagtctacacggtgctcagcgatcccgtccaacgcatgatttatgatgaaattcatggctactctttaacttcaatcaatcctttcttggatgattcaagcccaagggatcatgcctttgttgatgaattcagctgcataggctgcaaaaattgtgccaatgtagcccctggtgtgtttgcaattgaggaagactttggaagagccagagcatacaaccaatgtggggaccctgaattagttcaacaggcgattgacagttgccctgttagctgcattcattggacatcttctgcacagctatcattactggaagatgagatgcg

SEQ ID NO: 230953 - DNA, 406 bp, Glycine max
  unsure (1)..(406): unsure at all n locations
taataacgaaccttggggattaattgataatattagtttattatttgggaaagattcctgtgaaatgaaagatttcattaactcctaagtcatgtcgagtagaccttgttgtttcgagaattcttaattcatgagttgtagggagggatttatgtcaccacaaacagagactaaagcaagtgttgggttcaaagctggtgttaaagattataaattgacttattatactcctgactatgaaaccaaagatactgatatcttggcagcattccgagtaactcctcaaccaggagttccgcctgaagaagcaggtgccgcggtagccgccgaatcttctactggtacatggacaactgtgtggaccgatgggcttaccagtcntgatcgttacaaagggcgatgctac

SEQ ID NO: 230954 - DNA, 409 bp, Glycine max
caaatcccttttctcgttcttcccaattccaatttccaattctccggccatgtcaaccgcggcagcggcggggggcgacatggaggcgggtttcgcgaagctccagggcgaggactttgagtattacatgcagacctactccatcgtcctcggccgcaactccaagaagtccaccgtggacgtcgacctatccagcctcggtggtggcatgaacatctcccgccaccacgctcgcatcttctatgactttgcccgacgccgcttcgccctcgaggtcctcggcaagaatggctgcctcgtcgagggcgtcctccacctccccggcaacccccctgtcaagctcgattcccaagatctcctccagattggggacaaggagttctattttctcctgcccgttcgcagcatc

SEQ ID NO: 230955 - DNA, 406 bp, Glycine max
gaaacataccgaatgagagcatcaaactcttcttcttcgatttccattgcgaagcgttactttttcttcttctttctcttcattttcttcgctcttcgatcttcgtccggggactgctccgaataccaccaccaccactcgccgatggccacgatcggaggcttacacgactcccaaggctctcaaaacagcgtcgaaaccgaagccctcgctcgattcgccgtagacgaacacaacaagaagcagaattcgcttctggagtttgctagggtggttagggcacaggaacaggttgttgctggtaccctgcatcaccttactcttgaggctattgaggctggtgagaagaagctctatgaagccaaggtgtgggtgaaaccatggctgaatttcaaagaactccaag

SEQ ID NO: 230956 - DNA, 395 bp, Glycine max
actatcttctctgctctctttctactttgtgccttcaccacctcatacctaccttcaaccaccgcggtggtcgataccgacggtgatattcttcagaatcctggcacatactttatcttgtccgtttttcgacccggcggcggagtagaattcgccgccactggaaacgaaacttgccctctcactgtcgtgcagactctcttcgggaggggctttccagcaatattatcgtcccggttacgaatccctttcatcggcgaaggacaactcttcagcatcctgttccgtattgtgccatggtgcgccaccactccttctaagtggaccattgtggagggtttaccagaatcacccgcggttaaactcactgggtacgacaacacagtgcctggtga

SEQ ID NO: 230957 - DNA, 393 bp, Glycine max
ggcacccagagacgaggaagggcgtagtaagcaaagctcaacgtcgattactacaaaaacacatgcccagacttcgaaaaaatcgttagggaaaacgtcttcaccaaacaaagcgctagcgtggccacagcaccgggtctccttcgcctcttcttccacgattgcatcaccgatggctgcgacgcttccctcctcataacttccaatgcatacaaccctcatgcagaacgtgatgcggacctcaacctttctctctccggtgatgccttcgacatcatagttaaaatcaaaaacgcattagaacttgcatgccctggtgttgtgtcgtgttccgacatcgtggcacaggccacaagagaccttgttaagatggtcggtggtcctttttacccg

SEQ ID NO: 230958 - DNA, 410 bp, Glycine max
gaaactgtttggtgttgctacagttgacaaagtccctaccctgtttgtattgcagcagtacgacaatccactatcaaagaagttaaatgaagtggtaaatgagatacggcggcaaagatgttcctacttccggttcaagctctgcaggaaaggagatccatcaggaatgctattcttctcgtatatgatagaagacaagagcgcaggtggcttctcctatgtagagtttcttatccatgttcataggcaaattcaaaataaaatgtcatcataacgagtatatggcagcttcatttttgcaagcttttagacctaaatgatagagcaagccccaagtataggtgagattctgcatatttatgtgcattcaattgccttgagtttgacagacgaataccagaagacacaag

SEQ ID NO: 230959 - DNA, 415 bp, Glycine max
cattccaatcgctcccaaaatcttttctaatttgttcataactcaataattctcatcatgggctccttgattgttccaggtgaacatgatcacaaactaaagcttgtttctcttccctttgtatcaaccagtcacctcattcccgtagtagacatagctaggctctttgccattcatggtgttgatgtcaccataatcaccaccacagccactgccgccattttccaaagctctatcgatcgcgaccgtgaccgcggccacgctattagaacccacgttgtcaagttcccatgtgaacaagttgggttgccagaacgagtagagagcttcaactccaacactcctcgggatttggtccacaaaatctaccagggactcaccattctccaagaccaataccaacaactcttccatg

SEQ ID NO: 230960 - DNA, 410 bp, Glycine max
caattaccattccataacctaaatctcctctttgtttccgagtcagagagcaatggcacgtaccaagcaaaccgctcgcaagtccaccggcggaaaggcgccgaggaagcaattggcgactaaagccgctcgcaagtcagctccggccaccggcggagtgaagaagccccaccgcttcaggcccggaacggtggctctgagggagatcagaaagtaccagaagagcactgaacttctgatccgaaaactcccattccagaggctcgtcagagaaatcgctcaggatttcaaaacagatcttcgtttccagagcagcgctgtttctgcgcttcaggaagccgcagaagcttatctcgttggactcttcgaggacaccaacctctgcgctattcacgccaagagagtcacca

SEQ ID NO: 230961 - DNA, 397 bp, Glycine max
cccgctgaaacctttcttcacaaaatggcctcaactacactaacaaccctctccctccgcaacctctcttatcctacaccctcctcctcttcttaccctacgcacctctccgccaacccctcctccctccaattccccaacttctcccaccgcgccaccaccacgcgccgcgcccgcgtcgtcgtcgtctccgccgtcgaggcaccggagaaaatcaccaagctcggcgacgaaatcgcgggactcacgctcgaggaagccaagaacctcgtcgacttcctccaggacaagctcggcgtctccgcggcagcgttcgcccccgtagccgtcgccgcgggtgccgtcggcgccgtggcggacgctccggcggcggtggacgagaagacggagttcgacg

SEQ ID NO: 230962 - DNA, 408 bp, Glycine max
gatctcatccttgctttctgctgctcctttggagggtgctgctgatcaggttcagaagaccaacaactcgcaggatgtggtggctgcacaagatgattctgcaaaaaccctttccgaagagcttgcagacattgaatcccagctcaagttctttgagaccccttcttttcttgatgaagcctgggctgatgctacattggcgtctttgctcggcggagacgcaactcatgacgccgccggaaaccctatgaacctttggagcttcgacgacctgccttccatggcaggagtcttctgaacaccctttatctccccttttatgtaaataaagctacaagaattgtgatcgtgatgttggtgatggagtccacagcaagaaacctgcttaaagcttatgtggagtttatt

SEQ ID NO: 230963 - DNA, 359 bp, Glycine max
gctggcccaaggttcgtggtgttgctatgaaccctgttgagcatccccacggaggaggtaaccaccagcatatcggtcatgctagtactgtcaggcgtgatgctcctcctggacagaaggttggtctcattgccgcaaggaggactggtcgtcttaggggacaagctgctgcaactgctgctaaggctgataaggcttaaatagaacgttgttagggttattttatttgattgcatgtttttcagttttgtttttattttttctgatagtttgtttgttaaactatttgggcacccttttgagaaccattttcttcccaacatatggagttttcaatagacggtcttctattatttgtt

SEQ ID NO: 230964 - DNA, 381 bp, Glycine max
cttcatataaattttctattccccaaatctcctccttagactgccaacccaatatagccattggatcgaattcagtctgaattcggtctaatggtttgggagttctaattaagtctaagaattctgtacatatatatatttagaagatcacagggtgcttgatcagtggtgtatcaggatggacaaggtgacgaggttggcttctgaaaagggtgtggtgattttcacaaagagctcttgttgcctctgctatgcagtcaacattctgtttcaagaacttggtgtgaatcctgtggttcatgagattgatcatgaccctgaaggcagagaaatggagaaagctctattgaggcacggctgcactgctccagttccagctgt

SEQ ID NO: 230965 - DNA, 413 bp, Glycine max
attaacatatacaaattctctgtgttgtgttgtgtacttgtgttaattgtgttgttgttgtaggaaatttaagtgaagagagaatgatgatgaagtctgctatgtgtgcattggtgcttgtggcactggttgtggttgaagtggggcccatggctgaggctgcggtgacttgcaacccaacacagttgactccttgtcttccggcaattaattcaggttctgcaccttcgagtgcttgttgccagaagctgaaggagcaaaagccatgcttctgtggctacctcaaaaaccctagcttgaagcagtatgttaactctcctaatgccaaaaaaaccgttagttcttgtggtattgcctatccaacttgttaagcacctcttatatatatatataaaatgtgtgaacaatatata

SEQ ID NO: 230966 - DNA, 330 bp, Glycine max
cttgttatggattcaataatatgggcgtttcggcatacagaaaggaatattgctgaaactgggctgaacctgttgttggagatgttgaaaaagtttcaggcatcagagttctgtaatcagttttatcgaacatactttttgacaattgaacaagagatatttgctgttctgacagacacttttcataaacccgggttcaaatttcatgtcttggagcatcaacatttgtactgtcttgcacaaactggtgccctaaccgagcctctttgggatgctgctacaaatccgtatctatacccaagtaatacatcttttgtacgcgagttgact

SEQ ID NO: 230967 - DNA, 387 bp, Glycine max
tgccggtgtacctttcttgtgttggccatgcgccactgatcaatatcttgacaagtcatatatatgtgatgtgtggaagattgggcttggactagacaaggatgaaaatggaataatttctagggaagagataaggaagaaggtggatcaactgcttgttgatgaagacatcaaagctaggtcattgaaattgaaagacatgaccataaataacatactagaaggtggtcagtcatcaaagaatctcaacttctttatggattgggcgaagtaattatgcttaatttggttctatattgaaaagtcatgtgtaatttctacatgtaagaatttaatttctatgtaaatcttaatgtaatctatttaaaaattaataagctttattat

SEQ ID NO: 230968 - DNA, 387 bp, Glycine max
atgcacacgaaatcagactcggaggtgacgagcaacagcatggagcagtcgtcgccggcgcgttctcctccgcggcggccactctactacgtccagagtccttcaaaccacgacgtggagaaaatgtcctacggctcaagccccatgggttccccacaccaccatttccactactacctctcttcccccatccatcactctcgcgaatcctccacctctcgcttctccgcttccctcaaaaaccctcgcaacttctcctcctcctcctcctggaagaagctccaccctcaccccaaccgcgacgttgaccccgacgaccatgacgacgccgaccaccacctcaagcagtcctcccgcaacctccgcttgtacttgtggttcttcctc

SEQ ID NO: 230969 - DNA, 366 bp, Glycine max
ggccttcaatttcacccttcacacgtggtggtggtgttgttcttcttctcttcccctttctttttcttcttctgagcttgtttaagctctttctatttgattccattaacatatattatcacaatgtgtggtattcttgctgttcttggttgttctgatgactctcgagccaaaagggtccgcgtgcttgagctctctcgcagattgaagcaccgtggccctgactggagtgggctccatcaacatggtgactgctttttagcacatcaacggttagccatagttgatcctgcttctggggatcaacctctctttaacgaggacaaatccgtcattgtcacggtgaatggagagatttaaaccatg

SEQ ID NO: 230970 - DNA, 410 bp, Glycine max
cttcaaaaaccaaagccagaccgaccctaagaagaaaccaacaaacatgggaagcaagaaaacctacgaggaagaagaaagcacggctctattttcccattcccaaacacaaacagacttgctgttacccttcaacgagaacgacccacaggacatggtcatataccaagtcctccacgaagccaatgctctcaccaacacattcctccctcagcccaccagaaacataacaaagaagcactacagaggagtccgccgccgtccttggggaaaatacgccgctgagattcgcgactcggcgcgccacggcgccaggatatggctcggcaccttccaaaccgctgaagaggctgccatggcttatgaccgagccgcgttcaagatgaagggctccaaggccttgctcaatt

SEQ ID NO: 230971 - DNA, 364 bp, Glycine max
gtcggcggcgtaaccctccaacaacaacacttcctcgtcagaaaatgtctctggtggcgaacgaggatttccagcacattctgcgtgtgctgaacaccaacgtggatgggaagcagaagataatgttcgcaatgacctccatcaagggtattggaaggagattcgccaacatcgcttgcaagaaggctgatgttgacatgaacaaaagggctggtgagttgactgctgctgagttggacagtgtgatgactgtggtggcgaaccctaggcagttcaagatcccaaactggtttttgaacagaaagaaggattacaacgatggcaaatactctcaagttgtgtctaatgctcttgatatgaagct

SEQ ID NO: 230972 - DNA, 393 bp, Glycine max
gaccaaggtaggtcaattgccatggacattggtggtgaagtggaagagaccgtgagagagttgaggcaatacttcaaaactggaaaaaccaagagtgtgacatggaggaaaaaccagctcacagctctcttagaccttgttcatgagaatgaagatgctatatttaaggccctccatcaagatcttgggaagcaccctgttgaggcttaccgtgatgaggttggaggggtagaaaaatccgccagcaatgctttgagctgcgttgagaaatggatggcccctaaaaagagtgatatcccttttcttttcttcccagctaaaggagaagtgttgtcagaaccacttggtgtggttctcatattttcttcttggaacttcccaatcatactgaca

SEQ ID NO: 230973 - DNA, 415 bp, Glycine max
catttttctttcattttccgttagtgttgtggctatggagtcggcattgatatttctgggaacgggagtttcgggaacggttccctccatgaggtgcctcatcgacccttcagatcctccatgtctcgtctgcactcaatctctctccctcccacctcacctaaaccctaactacaggtgcaatacctctctgttaatcgattattactctcaaagcgacgccactcacaaatatatattgatcgacgctggcaagaccttcagggagactgtacttaggtggtttgttttccatcacattccaagaatagattctattcttttgactcatgaacatgctgatgcagtccttggattggatgatatacgagctgtgcagccgtttagtcccactaatgatattgatcccaccccc

SEQ ID NO: 230974 - DNA, 416 bp, Glycine max
gccgacgtggtatcgacaaagcaaggttccgccggagacgccgcaacgccatgaaccactccccgttcaggctctgaggatcgggggaggactaagagagtagcttcgagctatactatgatggcttcgacaataattaaggggctccgcccgctgtcgtcgaggatgtcggagtttctgctcggatcgggattcgacggactgctacagtatgtttcgtagattgagatcaacaacttgggtaaggtggagaatctgccggtgttgaatgtggcgctagagtcaatgccaacggtggaaattactgagtctctggttgcgacggagacgcacagcgccgtgtgcaaggaacattggcgcgcgagatgtcgtgcaagcacctcttacactctaattgcttgtgtccagtgtgctgc

SEQ ID NO: 230975 - DNA, 429 bp, Glycine max
  unsure (1)..(429): unsure at all n locations
acgcgtacgtaagaccggaaattcgctcgagatttcnggagctcgttggtgcaacgctgaatgcttttttttctttttgtgtgatagattttgcaagttgcgtgtgtgtgagagtgagtgagtgcagaagatgtggccattcagcagaaaagggtcttctgggttttcatcatcatccactgcagagcaagtcactgaaggaattgatggaactggtctcactgccattgtcacaggggcatccagtggtattggaactgagacttcacgtgttcttgctttgcgcggtgtccatgtgattatgggtgtgagaaatatgcttgctgctaaagatgtcaaagaaaaaatacttaaggagatttcctccgctaaagttgatgccatggagttagatctcggttcgatggagtctgtcaagaaatttgcatc

SEQ ID NO: 230976 - DNA, 407 bp, Glycine max
caataataataactccattttccctctgtcttccccccctcctctacacaaaaatatattattagcatggagaaggtgaattttgtgaagaatggagagcttagattgcctccggggttccgtttccacccgactgatgaggagctggttctgcaatacttgaagcgcaaggtcttctcctgccctttgccagcctctatcattcctgagcttcatgtttgcaagtctgatccttgggatttgccaggttcctttctattttccattcacacccatcatcccctttctctttctctaatttcaattccatgcccccatttttaggtgatttggagcaagagagatacttctttagcaccaaagtggccaaatatcccaacggaaatcgctccaacagagccacaaat

SEQ ID NO: 230977 - DNA, 402 bp, Glycine max
ctatactgcttcaccttctgctctagaaaattcagtgctgaaacatggcttcggctactctctctgtagccaaaccagcccttcaggcaaatgggaaaggcttctctgaattctctggcctccgaagctcatcaggcttccttcccttttctagaaaatcttcagaggatttccattctgtcattgccttccagacctatgcagttggaagcagtggaggatacaagaagggtgtgacagaagcaaaactgaaggttgccataaacgggtttggaaggattggaaggaacttcttgaggtgctggcacggtcgcaaagactcccctcttgatgtcattgccatcaacgacaccggcggcgtgaaacaagcctctcaccttctcaaatacgattccatcctcc

SEQ ID NO: 230978 - DNA, 410 bp, Glycine max
  unsure (1)..(410): unsure at all n locations
ctcataacacaaagcacaaagcaaagctcatccttgagttaaaaaatggcagcagcttcttccatggctctctcatccccatccttggctggcaaggccgtgaagctgggcccatcagccccagaagtgggaagggtgagcatgaggaagaccgtcaccaagcaggtctcctcaggaagcccatggtacggcccagaccgagtcaagtacttgggcccattctctggcgagcccccgtcctacctaaccggtgagttcccaggcgactacggctgggacactgctggggctttccgcanngaccagaaactttcgcaaagaaacgtgaactcgaagttattcaatccaaggtgggccatgctcggagccttgggctgcgtcttcccggagttgctgtcncgcaacggggt

SEQ ID NO: 230979 - DNA, 402 bp, Glycine max
  unsure (1)..(402): unsure at all n locations
aagaaagtagcaaagatgacaggtgggatgtttggaaggaaggggcaaaagataaaggggacagtggtgttgatgccaaagaatgtgttggacttcaacgccataacctccgtcggaaaaggcagtgctaaggacaccgccaccgatttcttgggcaaaggcttggacgcattaggtcatgcagttgatgctctcactgccttcgctggccatagcatctccttgcagcttatcagtgctactcagactgatggtagtggaaaaggaaaagttggaaacgaagcctatttggaaaaacatcttccgaccttgccaacgttgggagcaaagcangaagcattcgatnataactttgaatgggatgctagttttggaattccaggagcattttacatcaaaaac

SEQ ID NO: 230980 - DNA, 412 bp, Glycine max
gtgcaaaaatattaagatgataaacattggagcacttgttgtactctttgcatttctcttcctcagttgtgcctatgcacaagacacaacaacccttgtgcctgcaatcataacttttggtgactcagccgtggatgtagggaataatgactatcttcccacccttttcaaggctgattaccctccttatgggagggactttgctaaccaccaacctactgggaggttttgcaatggcaaattagctactgattttactgctgacactttgggttttaagacctatgctccagcatatcttagcccacaggcatcagggaaaaacctccttattggagcaaactttgcttctgctgcatctggttatgatgaaaatgctgctactttgaatcatgcgattccgttgtcccaa

SEQ ID NO: 230981 - DNA, 394 bp, Glycine max
aattcctgtaatgtgcaccagtaaagaccaaagtatgattattgtcacattatgccacatgattgtacttgtatatacatattttgtcccgcctttgtaaatacaattgggacactactaggattgggaataaaggtctttacatttttagtttggcaaatagatattgcaactacctttgtataaatctatttctgaagaagcaattacaactttcaagggatgatagcattttgtggcataaggattaaggaggcataaaggaccaattgctttggaatattcactcatgacaaggcacaaggtcatgcgtgtatgccaacacatagtaatgatgtgtgtttttattcactaggcaactggcagatctggttttcccttgtcacttttgtat

SEQ ID NO: 230982 - DNA, 398 bp, Glycine max
cacaaattctcaaatccaaatccaattccaattccaattcccaatcttctcaaaccctaattcctcatcttgaaaatgagagaaatcttgcacatccagggagggcaatgcgggaaccagatcggagcgaagttctgggaggtgatatgcgacgagcacggcatcgaccacaccggaaagtacagtggcgactctgaactccaattggaacgcatcaatgtttagtacaacgaagcgagtggcggaaggtacgttccacgcgccgtcctcatggatctagagcccggcaccatggactccgtcagatccggcccctacggccagatcttccgccccgacaacttcgtcttcggccagtccggcgccggaaacaactgggccaaaagtcactacaccga

SEQ ID NO: 230983 - DNA, 335 bp, Glycine max
atagattctcaactaatgagaacactctcacccttggttcccactcttctcaaaccctaattcctcatcttgagcatgatagaaatcttgcacatcgaaggagggcagtgcgggaaccagattggagcgaagttctgggaggtgatatgctacgagcactgcatcgaccataccggaaagtatagtggcgactctgaactccatttgggacgcatcaatgtttagtacaaggatgcgattggcggaaggataattccacgctccgtcctcattgatctagaccccggaaccatggactccgtcagatccggcccctacggccatatcttccgctc

SEQ ID NO: 230984 - DNA, 410 bp, Glycine max
  unsure (1)..(410): unsure at all n locations
ggtcattgcaggatagcttttttgccagctttgcccttggatggctcatcaccaatggtgcaggtcttgcatcatacccaatagacactgttagaagaagaatgatgatgacctctggtgaagctgtcaagtacaagagctccttggatgcattcacacagatcctcaagaatgagggtgccaagtccttgttcaagggtgccggtgccaacatcctccgtgccgttgccggtgctggtgtgtttgctggttatgacaagttgcaggttcttgtgttcggcaagaagtacggctctggtggggcttaagttctaatgctgagtcagtactattatttgtttttagatggcgatgaannaaaacattgaagttccaagagtcctagactaattgctgccgcaaattttgtt

SEQ ID NO: 230985 - DNA, 304 bp, Glycine max
  unsure (1)..(304): unsure at all n locations
caggatgccactgctgatgaggatgagtatgaggaggaagaggaggaggaggagtatggccaacatgatatgtgattttgaacttggtaatgtattgcggtggcttgaagatgtataacatgccgcaacttcctgttgccggttgattgtctcttttgaggggatggttctgttccggctagatctagtttccattactgttctataaaactggttctgtttgtttccgtttttatgtaacctgttgtttgtanggaagacaatatgaaactgctattattttaaagctctaaatgttcaatcc

SEQ ID NO: 230986 - DNA, 409 bp, Glycine max
gaaatttaagtgaggagctagagaatgatgatgaagtctgctatgtgtgcagtggtggttgtagcacttcttcttctggcggaggtggggcccatggctgaggctgtgacatgcaccccaacagagttgagtccgtgtcttccagcaatcacttccggtgctaaaccttccaatgcttgttgcacgaagctgaagcagcaaaaaccatgcttatgtggctacctcaaaaacgctagcttgaagcagtatgttaactctcctaatgcccgaaaaaccgttgcttcttgtgggattccctttccaacttgttaattaattaagccttcttataattaaagtgtgggatatatatatatatatagataaacagtttaatttatacacactttgatcctacaaagcatcttga

SEQ ID NO: 230987 - DNA, 389 bp, Glycine max
  unsure (1)..(389): unsure at all n locations
ctggtcacccctttcttcatatcagtgaagaggatcaggagttctctggtctttgctccttggctccttcactatctgagagcattttgtgcactactgggttgaaaatgtatatgctggagagcaaaggaggtgccatagcatgcatgttcttgtctcttttcttcttggggacatggcctgctcttttgactatgttagagaggcgtggtcgtcttcctcagcatacctaccttgattactcaatcaccaatttcttggctgctttactcattgcttttacacttggtgggatangcaagggcacacatgatcagccaaatttcttagttcaacttgctcaggataactggccctccgttcttttcgcaatggggggtggtttgttc

SEQ ID NO: 230988 - DNA, 408 bp, Glycine max
acgcctacgtaagatcggaattcggctcaaggctttggggagatgatgatcaatttggtccctacagtagcaagagtgtcccttgcagatgcaactgcctataagaaattcccttctggagccactgccaatgttgctgttggaatttgtagactaagaggctcagcagctttcattggcaaggtgggaaatgatgaatttggacatctgttatctgatattctgaaacaaaatggtgttgacaattctggcctgctctttgatgatcatgcaaggacagcgttgggaatttatgctcttaagagtaatggagaacctgaattcatgttttaccgaaatccaagttctgatgtgctccttcgtcctgatgaaattgatatggacctcataaagaaagcacaatatttc

SEQ ID NO: 230989 - DNA, 417 bp, Glycine max
caaaaagaaaaagaaaaaaaatatgaagttcgctataaacaacatattgtcccctttatttcttcttgactttggttttgcacaacagggggatcttgacatatcaagatttggaggaaaaccaaatacaaatataggccaggctttcttaagtgcctggactcaagcatgtgcatcaccaactgctgtcaaaattgtgattccagctggcacataccaaatgggtgcagttgatgtcaaaggtccttgcaaggctcctattgaggttcaagttgatggaacaattcaagcacctgcaaacccaactgaccttaaggcggctcatcaatggtttgttgttcaatatgttaactctttcaacctgtcgggtaaaggtgtttttgatggtcaaggggcaactgcttggaaacaaaatga

SEQ ID NO: 230990 - DNA, 412 bp, Glycine max
gcagaagaaggcaaagatagtggcagagctccaagctgtgaagcacaacagtggcaagtcctacaatcagttagcggaggagactggactcaccaacgtctatgttgctcagcttctcaggagacaggctcagctcaatccccaaactgcccctctacttcgggcagcgctgcccgacctgccccaagaccttgtttctgagatgatgagaccccctttgaggtcttatgaccctaatctcatccaaaaccccactgtctataggttgaatgaagctgttatgcattttggggagagcatcaaagaaataatcaatgaggagtttggtgatgggatcatgtcagcaatagatttctactgctcggttgataaaattaaaggagtagatgggaaggatcgtgtggtattgaca

SEQ ID NO: 230991 - DNA, 404 bp, Glycine max
caattcaggaaaccctagtgattaatttcgttgcgaaacggcgattcaagattatcgtgagccagaagatggtagcggaagcggaaattatctgtcagcagaacattccgatgttggacgtgaagtatcatatttgcgtggctcaagaacacaacgtgaaggttgaggtttcacccaaatcaccttcacctcctgttccgatctttggccaagcagtgagttgctctgagatcattaaagattccattttggaggcccctgcgatgaattttttcccaaatgtgcgttctggtagctatgccgagattggaccgcgcgtttctatggatgatgaacacatttgtattgatgatctgggagctcatcttggatttgtgttcaagtgtccgataccgagtgcattt

SEQ ID NO: 230992 - DNA, 400 bp, Glycine max
gaaacaattgctggtttgaatccaaatgtcatcaagattattgaggagttcccactaagtagcaagctagatactcaagcctatggtgatcatacctgtataataacaaaagagcatttggagcctaacttaggtggtctcactgttgagcaggctatccaaaacaagaagttgttcatcttagatcaccatgactatctcattccatatttgaggaaaataaatgcaaataccacaaagacttatgctacaagaaccatatttttcttgaaaaatgatggaactttgacgccattggccattgagttaagtaagccacatcctcagggtgaagcatatggtcctgttagtgaagtctacgtgccttcgagtgaaggagttgaagcttacatttggttac

SEQ ID NO: 230993 - DNA, 400 bp, Glycine max
ctaagatggcttcctttgtatccttcctagtgctgcttcttgcagcccttatcctcatgcctcaagggcttgctacttactacaaaccaattaagaagccaccagtgtacaagcctccagtgtacaagccaccagtgtacaaaccaccggtttataagccaaaaccaccggtttacaagccgaaaccaccggtttacaagccaccatataagaagccaccatacaagaaaccaccttatggaaagtaccctccagtagaggacaacacccatgcctaaagcaagcaatgaggtctattatctacttaataaataagaggaactgctttgtgttttctagcattgtgatttacaacttcgtagcaatgcatattcttgactcttgcatgcacttcaatcct

SEQ ID NO: 230994 - DNA, 396 bp, Glycine max
ccaaaattttctctgaagaagaagcaacaatgtctggtcgcggaaagggaggcaagggtttgggaaagggtggagcgaagaggcatcgcaaggtgctccgcgacaacatccagggaatcacgaaacccgcgattcggaggctagccagaagaggcggcgtgaaaagaatcagcggcttgatctacgaggaaaccaggggtgtgctcaagatcttcctcgagaacgtcattcgcgacgccgtcacctacaccgagcacgctaggagaaagaccgtcacggccatggacgtcgtttacgcgctcaagaggcagggaagaaccctctacggtttcggaggctgagggcttgggctttttctgggcctggatttgttcttcgctgggctttaaaatgttg

SEQ ID NO: 230995 - DNA, 229 bp, Glycine max
  unsure (1)..(229): unsure at all n locations
ttggattaccgtgaagcctgcacgccatgcttttatcgtcaatatcggagaccaaattcaggttctaagcaatgcaatttacaagagtgtggagcacagagtgatagtaaattcagataaagagagagtttctctggcatttttctacaaccccaaaagtgatatacccattgagccaatanaagagctggtaacacgggaaaagccctcactctacccagcaatgacc

SEQ ID NO: 230996 - DNA, 397 bp, Glycine max
aattcagctcgagggaactttgtaaaagcataaaccctgatgatgccgtggcgtatggtgcggaggttcatgccgccattttgagtggcgaatgagacaataaggtggacgagttgttgctgctggctgtgatgccgcttattcctgggattgagaccgatgctggtgaaatgtcagtgttgattcccaagaacaccatgatccccaccaagagggagagcgtcttctccactttttctgataatcaaacaagtgttttgatcaaagtgttcgagggggaccatgcaaagacagaggataacttccttcttgggaagtttgagctttccggtttcactccatcgccaacgtgagttccacaaatcaatgtggggtttgatcttggtgtttatggcat

SEQ ID NO: 230997 - DNA, 150 bp, Glycine max
ggctggcaaggccgtgaagctgggcccatcagccccagatgtgggaagggtgagcatgaggaagaccgtcaccaagcaggtctcctcaggaagcccatggtacggcccagaccgagtcaagtacttgggcccattctctggcgagccccc

SEQ ID NO: 230998 - DNA, 474 bp, Glycine max
agagctaagacgtcgcaggcccgcgtacgtaagctacggaattcggctcggaaagaatggcacgcatcaaagaggatccatctctgaaacatattttggaggagatagagactggcggtcctgctgctatgatgaggtactggaataatgaggaggttttgcagaagttgggacaagccatgggtcttgccaattcgggagatgcaggtgcctctgctgaaaattctggggcagatgagaccgaagatttgggaaatgaagatgaatcaattgttcatcatactgctagtgttggtgatgtggagggcttgaaaaatgcactagcctctggtgctgacaaggatgaagaagattcagagggaagaactgctttgcattttgcctgtggatatggcgaggtaaaatgtgctcaagttctcctcgaggctggagcaaaagtggatgctttggataagaataagaacactgctctcc

SEQ ID NO: 230999 - DNA, 373 bp, Glycine max
cttcagatcaacgatgatgaggtggaactatgggtggttagaggattaactgctaagttaattgactgtaagatggaccaaatgaatcaagttgtagttgtcagtcatcctactgagcgtgtgtttggtcagcaccaatggcaagcactgagaacaaagctagtgacatggaggggaaatattgtaaatgttatcagtaccattcaggccaacaaaataacggaagatgggtcccaggcagcccaaggtttggttgttcgttgaggacaattgagtgaagcaattatctgagtatctagattttaatcaggtggaattttttgatcttaaacagaggataagagtgtaaattgttttgttaagaattaatttt

SEQ ID NO: 231000 - DNA, 325 bp, Glycine max
aaagaaggatgttccttgtgagactgaccaacttactcatgtttacacatttatcctccgtccggatgcaacctacagcatcctgattgataatgtggagaagcaaactggtagtctctactctgattgggatcttctccctccaaagacaatcaaggatcctgaggctaaaaaaccagaagattgggatgacaaagaatatattcctgatcctgaggataagaaaccagaggggtatgatgacatcccaaaagagctcccagaccccgaagccaagaagcctgaagattgggatgatgaggaagatggtgagtggacaccccct

SEQ ID NO: 231001 - DNA, 314 bp, Glycine max
ccctacctctcctttcaagatgcagatcttcgtcaagactctcaccgggaagaccatcacccttgaagtggaaagctctgacaccatcgacaacgtcaaggccaagatccacgacaatgaaggaattcccccggatcagcagcgtctcatcttcgccggaaagcagctcgaggactgccgtaccctcgccgacgacaacatccataaggagtcaatccttcaacttgtccttcgtctccgtggtcggcatgcacatcatcgtcaagacgctcactggcaagaccataatcctagaagtcgaaagctctgagacc

SEQ ID NO: 231002 - DNA, 372 bp, Glycine max
cgtcgcatgcccgcgtaggcaagctaggaattcagctcgagtaaatataaccagctcttgagaattgaggaggagcttggtgctgaagcagtgtacgccggagctaacttccgtacccccgttgaaccctactaaagttttcaagtggaaaaaacctggagatccacacgagtttgagcattgagatttgggtgcgcggtttttggtgtgatatataagttgatagttggaacattagtcttggtatgataaagaccttgccaataatttgagttctgattcacagagctaggacagttatgtcttaagactttgaaaggtgtttaatgatatttagctttaatacttgaagcctacttacagtttatttcc

SEQ ID NO: 231003 - DNA, 542 bp, Glycine max
gttagccctcgttggctctgaatgaaatcagttgagcctatgtaagtcctaagacgtcgcatgcacgcgtaggtcagctaggaattcgactcgagcagaaaacggtggaatttcagacaggccagatgatgccgtggatgtctttcatacattcttcggggtggctggactttcacttcttgaatatccagggctgaaaccggtagatccagcgtatgctttacctgttgatgttgtaaatagaattttctttactaaagaaggacttaagtagttaagttcgatgataattttccagtaatgacaaaatcttgggtttgtaagactcactcttgggagttggaccccctcctcccatctccagtccaaaaacagttgatttcttaaaaacagtgtgaacattttgagcatcttttagttaaattgcagtgatacgacatgttaagattgatcagtattgtagtcaaccatcaaatttatcctactagttaaaaaaaaaaaaacaagggcggcgccgactatttacctcgtccaaccgggaa

SEQ ID NO: 231004 - DNA, 397 bp, Glycine max
  unsure (1)..(397): unsure at all n locations
cttatgctttcgtttttaaatcatgagtggtgtggattggactgttgttgattctgaaaacacataaggaaatcctgttgtaactctggagctgaaggatggtccttatagttgtactgtgtgggatttcagcttccatgctttattcaaggtcacactaaatgctaaaagtctagcgactgagttaacagttaaaaatacagacaataaagcattctcatttagtaccaccttgcacacatattttcaagcttctgtgagtaatgcatcagtaaaggggttgaaaggttgcaaaactctgaacaaagatccagatcctaaaaatccagtgtanggtaaggaagaaagggaagttgtcactttccctggatttgtagattgtgcttatcttgatgct

SEQ ID NO: 231005 - DNA, 327 bp, Glycine max
aataattattcgcaaaaaagaagaaaacacgttgaacagataccatcatcattcatcttcagccccacatcagcaggatttcaagactcagtttttgactcactaagtaagtagcgaaacaatttctcgggttcctgttcaagttgattcctttgataagttaccaacttcactcgatgaaaagccattaacataccaaacagagtgacagagtttgcaattacaagaggttcaattatcaaatctggtcagtggtgatacggaacaccagggagagtctgccatggttgacgccagtcctagaactgatatttctacagatgttga

SEQ ID NO: 231006 - DNA, 393 bp, Glycine max
  unsure (1)..(393): unsure at all n locations
actgaaaaaggttactggcagattgaaatgggagattttttcgttggaggtgtttcaacaggtgtttgtgagggtggctgtgctgctattgtggattcaggaacatctttgcttgctggtccaactcctgttgtggctgaaatcaaccatgccattggagctgaaggagttctcagtgtagaatgtaaggaagtcgtttctcaatatggagagttgatatgggatctcttggtatcaggggtgaaaccagatgacatatgttcacaagttggtttatgttcttccaaaaggcatcaatctaagagtgctggaattgaaatggtgactgaaaaaggacaggaagagttggcagcgagagatactcctttgtgttcntcttgtcagatgcttgtt

SEQ ID NO: 231007 - DNA, 361 bp, Glycine max
gagagagtcctgaaacttgggtgcgattccttcactcacaacaacaacacatcactatggctcttctgagtcgagcctcttcacgcttccctcagctggtttcccctcaaagggtagtttcactccacacaacgctcccatctctgaacgcatccccatccacagccacgcctacaccatatgccccgccaccgcctccgtccgcttcctctcccgccggcgtttctaaggcggcggagttcgtgatctcgaaggtggacgatctgatgaactgggcccgccgcggctccatctggcccatgaccttcggcctcgcctgctgcgccgtcgaaatgatgcacaccggcgccgcccgctacga

SEQ ID NO: 231008 - DNA, 369 bp, Glycine max
gccatcctgaagttctgtgggcacaacgttctgatacggtttacctcactgttgctctagctcatgccaatgatgtttttgtgaactgtgagcctcagggtttgtttgctttctctgcttctggggttcaagatacagcctacagctttagcttggaactttatggatccattgaacctgacggttgtaaaactaaatctggcttaagaaacatactatgctcaattcagaaaggagaacatggttggtggaataggctattgaagtctgaagagaaacctgctccatacttgaacgttgattggaacaaatggtgtgatgacgatgatgaatagtcaacctctgatttcgtatctaaatatcatgctc

SEQ ID NO: 231009 - DNA, 309 bp, Glycine max
ggcagcgacgatccggctcacggtgccggccggaggagctcggccggcgccaccggttggaccggcgctgggtcagtaccggctgaacctgatggcgttctgcaaggacttcaacgcccgcacccagaagtacaaggcggagacacccatggccgttacgataacggcgtacaaggacaacaccttcgagttcaccgttaagtcgccgccggtgtcgtggtacctgaagaaagccgccggcgtggaatccggtagcagccggcccggtcacgtgaccgcgtcctcgttgtccgtgcggcacgtgcacga

SEQ ID NO: 231010 - DNA, 349 bp, Glycine max
  unsure (1)..(349): unsure at all n locations
ttttgcactactgatgcctttttgggcacccagatttccaccattctgagtaacttcacacactatataacagaaaatgagggggggcttatggcaactcgggcaatcaatcactcgccgtcttgcccagggtgataagaaggctgttgctcgtaggtattttgcctcagatgctgagctgaaaaagacagtcgtttatgacttccatgttgctaatggagggaagatggtgccatttgctggatggagcatgccaattcaatataaggactcaattatggactcaacccttaactgtanggagaatggtagcctttttgatgtttcccatatgtgcgggctaagcctc

SEQ ID NO: 231011 - DNA, 344 bp, Glycine max
aacaacttctgctacttcctactccaaccgcacttccggcccgccattaaccagggccaaggccagattcggatccaacggattgggaaaattttggccgttgggaacccaaattggctctgcaaagacacaatgttgaactcgtcgccgtaaacaaccctttcatcaccaccgattacatgacatacatgtttaaatacgacagtgttcatggacactggaagcatcacgatgtcaccgttaaggacgagaacactcttctcgtcggtgacacgccagtcactatttgtggacacaaaccccctgaaaatatcccaggggggtcaactggacctgacatcatt

SEQ ID NO: 231012 - DNA, 385 bp, Glycine max
aaagaaccagtttggaatatatttttattccttctttgtttcttcactttcttccatacacataaccatgtcttctcagaccgttgtcctcaaagttggtatgtcatgtcaagggtgtgctggagctgtaaacagggttttggaaaaaatggaaggtgttgagtcatttgacattgatctgaaggagcagaaggtgacagtgaaaggaaatgtgcagccggacgaagttctgcaagccgtttccaaatccggaaagaagacggcattctgggtggatgaagcacaaccacctgaaaacaagccttctgaaactgcacctgttacctcagctgagaatgataacaggacttcagaaagtggacctgttgcctcagaaaacaagcct

SEQ ID NO: 231013 - DNA, 416 bp, Glycine max
tgggtctccaaagagagtttgagcaaagccattaagttagtgatggatggagacagtgaggttggtgctagagtgaagaagaatcacatggagtggaagaaaactgggggcagtcctaatttaatgaatggttacatggataggtttgtccaaaatcttcaagattttcctctccatgggtgattgaaggatttttttcagagggatggaattcatcgtttgcccaccaaatgaaaatgaaattgtttagaaaataagttaagagataaaatatctagagtttaatgctcagtctactttatgaatggtgcagtttgactcttatttagtagttgaattcagtagttcatgtgatactttatatttaaatatattttttagttttaataaatatttaatgttatgtttggtttttt

SEQ ID NO: 231014 - DNA, 349 bp, Glycine max
gtgtagtggaagaatcactcccttatccatttccacaccacaccatggcctcaaccaacgctctctcttcagcctccattctacgctctcccaaccgccagtctctgacccgaagagcgaaccataatggaagagtaaattaccggaaaccgaataaccgtttctccgtgaaagcctccgccaaagagattgcctttgaccagcattcccgctctgctatgcaggccggcattgacaagctcgccgacgctgttgggctcactcttgggcccagagggaggaatgttgtgttggatgagtttggaagtcctaaagtggtcaacgatcgtgtcaccattgctcgcgcaat

SEQ ID NO: 231015 - DNA, 360 bp, Glycine max
gtgatggacacgcttaacatgcttggccttgcgaaaagaattggggctaggtttctgcttactagtactagttaggtttacggtgatccgttggagcatcctcagaaagagacttactggggaaatgtgaatccaattggtgagaggagttgttacgatgaagggaaaaggattgtggagacgttggccatggattatcatcggggtgctggtgttgaggtcaaacatatgagaggcaatccatccaaaagtggcttgatcatgggttgaatgtttgtccaaaaactcatcagagacttactcttacaaatgtcattcctaattacactgtcaaatctcatgttattagattgattgaag

SEQ ID NO: 231016 - DNA, 303 bp, Glycine max
gcatgtcatccaggacatgcttgtccctttgtaaaaggtgggacaggctttagaatgggttcaccgtgagatggaggtataccccatttggctctgcccacacaaattgttcaagctgcctgtcaaaactatgatttacccagagccagggttcgaactacatcgcaggcaaggagacacccaaactgctcaaatgtacacagatgttggagtttactatgcaccacgtcctgtttttaggggtgaggtatttgatggggcagaagcagtgcgtaaaatggagaactggttgattgaaaatca

SEQ ID NO: 231017 - DNA, 413 bp, Glycine max
gtgaggctatagaggcgctctgacgtcgcatgcccgcgtgcgcaagctaggaattcagctcgagaagaggtgccggagcaagtttcgtcacgccggaacgatgaccggcggcggatccacggggaggttgccgacgtggaaggagagagagaacaacaagaggagagagagaagacgaagagcgattgcagctaagatctacactggccttcgagcccaggggaactacaagcgtccagagcactgcgacaacaacgaggtcctgaaagctctctgcgccgaagctggctggatcgtggaagaagatggcacaacttatcgaaagggatgtcagagacccacgagtgagattggaggaacaccactgaacttaagcgcgtgttcttccattcaggcaagtccacaatcctcgt

SEQ ID NO: 231018 - DNA, 320 bp, Glycine max
  unsure (1)..(320): unsure at all n locations
gcgtgcgcaagctaggaattcagctcganngtattgagaactaagaaggacaagcaaatggcttcctcaatgatctcttccccacctgttaccactgtcaaccgtgccggtgccggcatggttgctccattcactggcctcaagtccatggctggcttccccaccaggaagaccatcaatgacattacctccattgctagcaacggtggaagagtgcaatgcatgcaggtgtggccaccagttggcaagaagaagtttgagactctttcctacctgccagaccttgatgatgcacaattggcacaggaagtanaatacct

SEQ ID NO: 231019 - DNA, 398 bp, Glycine max
aagaaatagagttagaaatgaagataaatatgtatccaccatgtccacagccacatctagctttgggagttgaacctcacactgacatgagtgcccttaccatactcgtcccaaacgaagttccaggcctccaagtttggaaggagaatagttgggttgcggtcaattacttgcaaaatgcactcatggtacatgttggtgatcaacttgaggtgttgagtaacggaaagtacaagagtgttctgcatagaagcttggtgaataaggaacgaaatcgcatgtcatgggcagtgtttgttgcgcctccacatcaggcagtgatagggcctcttccttctctcatcaatgatcagaacccacccaagttttcaacaaaaacctatgctgagtatcgttat

SEQ ID NO: 231020 - DNA, 371 bp, Glycine max
cttggttgagagtgagtttggaacttgaaagaaactagaatggccactttagacgaacgcccttctgcgaaaaggtggcttcctctcgaagctaaccctgacgtcatgaaccagttcctttggggtcttggccttccagtggatgaggcagagtgcggtgatgtgtttggcttagatgaagagcttctgaaaatggttcccaagccagttctcgccgtgctttttctttatccaattaccgcgaagtctgaagaagaaaggttgcaacaggaaaacgtaaaaaaggattatagcagtaaagtatatttcatgaagcaaaccgtgggtaatgcttgtggtacaatagggctgcttcatgcacttgggaacat

SEQ ID NO: 231021 - DNA, 396 bp, Glycine max
  unsure (1)..(396): unsure at all n locations
cacaaagcaaagctcatccttgagttaaaaaatggcagcagcttcttccatggctctctcatccccatccttggctggcaaggccgtgaagctgggcccatcagccccagaagtgggaagggtgagcatgaggaagaccgtcaccaagcaggtctcctcaggaagcccatggtacggcccagaccgagtcaagtacttgggcccattctctggcgagcccccgtcctacctaaccggtgagttcccaggcgactacggctgggacactgctgggctttccgcagacccagaaaccttcgccaagaaccgtgaactcgaagtgatccactccaggtgggccatgctcggagccttgggctgcgtcttcccggagttgctgtcncgcaacggggtgaa

SEQ ID NO: 231022 - DNA, 389 bp, Glycine max
gcaagcaaaaagaaagaatcccaggcgaggagaaagatggaggggaaggagcaggatgtgtcgttgggagcgaacaagttccccgagagacagccgattgggacggcggcgcagagccaagacgacggcaaggactaccaggagccggcgccggcgccgctggttgacccgacggagtttacgtcatggtcgttttacagagcagggatagcagagtttgtggccacttttctgtttctctacatcaccgtcttaaccgttatgggagtcgccggggctaagtctaagtgtagtaccgttgggattcaaggaatcgcttgggccttcggtggcatgatcttcgccctcgtttactgcaccgctggcatctcagggggacacataaaccc

SEQ ID NO: 231023 - DNA, 461 bp, Glycine max
gcgtaggcaagctaggaattcagctcgaggcatattccaattcgcaattcccaattcgaaacccttattcctttcaaagaagcaaattgagtgatcgtgatggcaccaaaggcagagaagaagccagcggagaagaagcccgcggaggagaagaagtcgacggtgggagacaaggctccggcggagaagaagccaaaggccggaaagaagcttccgaaggagggaggcgccggcggcgaagggaagaagaagaagagaaacaagaagagcgtggagacatacaagatctacatcttcaaggttctgaagcatgtccaccctgacattggtatctcaagcaaggccatgggaatcatgaacagcttcatcaacgacatcttcgagaagcttgcccaggaatcttctagacttgcccgttacaacaagaagcccagcatcacttcaaaggaaattcagaccgc

SEQ ID NO: 231024 - DNA, 473 bp, Glycine max
tagaagaccttgacgtcgaatgcccgcgtacgtaagctaggaattcagctcgagctcgagccgatttccctcatggagtttcaaaaacctctatggctattcttgcttctcctcactctcctctcaagctcccaagccaacaaattcaacgttggtggaagcaaagggtgggttccaaacccttccgagagttacaacaattgggctggaagaaaccgattccaaatcaatgacacaatagttttcaagtacaataagggttcggattcggtgttggaagtgaagaaggaagattacgacaagtgcaacaagaccaacccaatcaaaaagtttgaaaacggtgacactgaattcaagtttgatcgatcaggaccattctacttcattagtggaaaagatgggaactgtgaaaagggtcaaaaattaatcgttgttgttttgaccccaagaacacaacaacaccattaacacca

SEQ ID NO: 231025 - DNA, 409 bp, Glycine max
gtgcggtgcggcgatcctagcactctcttctgcagctttcgccgacagcttcattcaccatggctgagcaaaccgagaaggcttttttgaaacaaccaaaagtgtttctcagctcgaagaaaactgggaagggaaagagacccggaaagggtgggaaccgcttttggaaatccattgggcttggatttaagactcccagggaagccatcgaaggaacctacattgacaagaagtgccccttcactggcaatgtttccatccgtggccgtatcttggctggaacatgtcacagtgctaagatgaacaggactattattgttaggaggaattatctccattttatcaagaagtaccagaggtacgagaaaaggcactccaacattcctgctcatatatcacctgctttccg

SEQ ID NO: 231026 - DNA, 400 bp, Glycine max
caaacctaacgcagcatcgctattctcttcattccatggctttgcccaaccagcaaaccgtggattaccctagtttcaaactcgttatcgtcggcgatggtggcacaggaaagacaacctttgtgaaaaggcatctcaccggagaattcgagaagaaatatgagccaaccatcggtgtggaggttcacccattggattttttcacaaactgtggaaagattcgattttactgctgggatactgctggacaggagaaatttggtggcctcagagatggatactatatccatggacaatgtgctattatcatgtttgatgttactgcccggctaacatacaaaaatgttcccacctggcaccgtgatctttgcagggtctgtgagaacatcccaattgttct

SEQ ID NO: 231027 - DNA, 376 bp, Glycine max
ggtttctgcgtttatgcgaagatgactaagttcaggaaattgggtcgacccaccggtcaccgaatgtccatgctcagaaccatggtctcgcagttggtgaagcacgagcgcatcgaaactactgtcgccaaggcgaaagagatcagaagactcgcggataatatggtgcagcttggaaaggagggatcccaacatgctgcgagacgtgctgctagttttgtgcgaggagatgatgtccttcacaagctgtttacagaactggcttatcggtacaaggatagagctggaggatacaccagattgcttcggacccgtattcgagtgggtgatgctgcaccgatggcctatattgagtttattgacagagaaaatgagc

SEQ ID NO: 231028 - DNA, 363 bp, Glycine max
gctgttgaaaagagctatgagctacctgatgggcaggtgatcacgattggcgctgaacgattccgatgccctgaagttctgttccagccatccatgattgggatggaatctcctggtatccatgagacaacatataactctatcatgaagtgtgatgtcgacattaggaaggatctctatggtaacattgtcttgagtggtggttccacaatgttccctggcattgctgataggatgagcaaggagattacagcattggcaccaagtagcatgaaaattaaggttgtagcaccaccagagaggaagtacagtgtctggattggaggctccatcttggcttccctcagcaccttccaacagatg

SEQ ID NO: 231029 - DNA, 379 bp, Glycine max
aattcaactcgaggacctgtatgaccagtatggtgaagatgcccttaaagaaggaatggagggaggaggctcgtttcataatccatttgatatatttgaatcattttttggtggagcaagctttggtggtggtggtagttcccgacgtagaatacagaagcatggtgaagatgtggtgcattctttaaaggtttccttggaggacgtctataacggcacaacaaagaaactatctctttctagaaacgtattctgctcaaaatgtaaagggaaaggttcaaaaagtggaacagctggtacgtgttttggatgccaaggcactggtatgaaaattacaagaaggcacattggactacgcatgattcaacaaatgcaacat

SEQ ID NO: 231030 - DNA, 368 bp, Glycine max
atcctggaacaactattgtcacagacagtgtgacttctgatgggcttaccacgtttattgagaagaaacttggtggcagacaccatcggttcaaaagaggctacaaaaatgtgattgatgaagctattcgtttgaattctattggtgaggagtcacatttggcaattgaaactagtggacatggagctctcaaggaaaatcattggcttgatgatggcgcatacctaatggtcaagatcttaaataaacttgcttctgcaagagcttctggaaagggtggtggaagtaaggttttgactgatctaatagacggacttcaggaaccagattttgctgtagaactgagattaaagataaaccaaaaccat

SEQ ID NO: 231031 - DNA, 521 bp, Glycine max
cggtgtgaatgaaatccgtgagcctatagaggcgcaaggacgtcgcaggcacgcgtacgtaagctacggaattcagctcgagtttttctctcacctgaaaatgtcttgctgcggtggtaactgtggttgcggaagctcctgcaagtgcggcaacggctgcggaggctgcaagatgtacccagacttgagctacactgagtcaaccaccaccgagaccttggtcatgggagtggcacctgttaaggctcaatttgagggtgctgaaatgggtgtgcccgctgagaacgatggctgcaaatgtggaccaaactgctcctgcaacccctgcacttgcaagtgaggtgttgggagagcaagcttcaagcagagatagccctttattaaggataaatgataactattaatgtgttaccaaaaacctaagttataagtccggtatggttttccgtcaacctggtggtttggtggtaacaaaacatccttaaaataagatggccaagttcttgcctttaaacaatttg

SEQ ID NO: 231032 - DNA, 426 bp, Glycine max
atcgaaagccttaaacttgctcgcagggtctggaaagactattatgccaaggtggatgctgtcgtgtacctggttgacgccttcgataaagagaggttcgcggaatctaagaaggagctcgatgccttgctttctgatgaatccttggcaaatgttccatttcttgtgctaggcaacaagattgacatcccttacgcagcttcagaagacgagctacgatatcatctaggcctgaccaatttcaccacaggcaaaggaaagattaacctcacagactccaaccttcgaccccttgaagtgttcatgtgcagcattgtgcgcaagatggggtatggtgaaggcttccagtggctttcccaatacatcaagtagagagtccttattcattcttagttcccctttctcttgtcaactagcactgtctgc

SEQ ID NO: 231033 - DNA, 348 bp, Glycine max
aaagaaaaactcagcacagcacccctcgcaagcctctttttctcttaatttctcatcatatcatatctattaatcttacacatatattaagacatagatataatttttttcgtttgatttttccttgcatgggctgttaagataagatgtctcgcacgtgctcacagtgcgggaacaacggccacaactcgcggacatgcaccgacggtggcgccgccgcttcctgcggggggtctcccagggagaacgggatcatgctgttcggcgtaagagttatgaccgaagctaactcctccttccggaagagcgccagcatgaacaacctctcagagtacgacgcggaatcca

SEQ ID NO: 231034 - DNA, 353 bp, Glycine max
gaatgggttccctagaagctatgactaaagggagtgatgcaaggtacttgggtgatacagcaaaactaaaaattgctcagggggttgttggagctgttaaagataagggttctgtcttgaatttcataccatacaccttgcaagcagtcaggcaagggtttcaggatatcggtgcctcctctctacagtctgctcatgaccttctaagatccagggagttaagactggaggtccggagtggagcagcacaggttgaaggtggagttcatgggctggtttcttatgaaaagaaatacttttgaagtatgaaaccatccaaaatcataagcggtgctataatcccttgctgcaat

SEQ ID NO: 231035 - DNA, 365 bp, Glycine max
ccgaaattaaaaaattaactcttttcacaaactctaattatctttacattttgttttcttaatttattgttttgttatgaattggattgaacttgatttcaggcttcagagaagaaactttcgaacccaatgagggagataaaagtgcagaagctcgttctcaatatctctgttggcgagagtggagatcgtctcaccagagccgccaaggtgttggaacaacttagtggccaaaccccagtgttttccaaaggttagttctcaataattttctaaatgggtagttcagtgatgctggtaatggccatagatctcacatctgtgttcattggttttgttgatcatttttgtgattctatcacttt

SEQ ID NO: 231036 - DNA, 198 bp, Glycine max
gtatcaaatttcagtcacatattggctgtgtacatagggttatattattgatgcactgtatttgtattcaaattccaattccaaatggtgaacatatttgattgctgttagtttcccaggttatgtagactatgtgacaatgcagcattatttggatttgcccgaaagaaaaaaaaaagaaggaaaaaaaaaagtaat

SEQ ID NO: 231037 - DNA, 421 bp, Glycine max
tggagcttcaaagccagaacaaccctttctctattcacttgattaccttctttttgtttctcttgttcctgttattcaaattagttaagaaatcgagttccaacaacaccagcaaattacctccaggaccaaagacactacctctcatagggaacctacaccagcttgttggttcaaagagtcatcactgctttaaaaaattggcagacaagtatggtcctctaatgcacctaaaactgggagaggtatccaacatcatagtcacttcaaaagaattggcacaagagattatgagaactcaggatctcaactttgcagatagaccaaaccttgtatccacaaaaatagtttcctacaacgccaccagcatttccttcgccccacatggagactattggaggcaactgcgaaagttgtgcac

SEQ ID NO: 231038 - DNA, 431 bp, Glycine max
ctgggatatgcgatatggttgcagtggcaaaaataatgaatgccacccttgtccttccttctctagaccatgattcattttggactgatccaagtgactttaaagatatctttgactggagacacttcgtgaaagttttgaaagacgacattgagatagttgagtacttaccggtccagtatgcgtcgctgaaacctcttgtgaaggcccctgtttcctggtcaaaggctagttactacagaggtgagattcttccattgttgaagcaacatactgttgtacagtttactcacacagattcgcggctcgccaacaatggccttgcttcctcattgcagaagctgaggtgccgtgccaattaccatgctctcaagtacacggcagaaattgaagagcttggaaaggtcttggtgaataggctaagaaacaat

SEQ ID NO: 231039 - DNA, 422 bp, Glycine max
gctttagccatcactaacactcagtctctgaattggggctgagggtttcgagtaacgtttatttttcacgagtttaagatatcatgggtaaagagaaggttcacattaacattgtggtcattggccatgttgactctgggaagtcaaccaccactggccacttgatttacaagcttggaggtattgacaagcgtgttattgagaggtttgagaaagaagctgctgagatgaacaagaggtcattcaaatacgcctgggtgcttgacaagcttaaggctgagcgtgagagaggaattaccattgatattgcattatggaagtttgagaccaccaaatactactgcactgttattgatgctccaggacatcgtgatttcatcaagaacatgattactggaacttcccaagctgattgtgctgtc

SEQ ID NO: 231040 - DNA, 338 bp, Glycine max
caacaactcaattcctaacttgcctccatagcaatctttgcttaattcttctgttcaattaccacattcattatagctctctcattcacaaactttcaatttctgcttccaaatctgaattcaacccatttggcattattgttacatataattaattaaggaagatcgaatggagagggtgacaaagatggtatcagaaaggccagtggtgatcttcagcaagagctcgtgctgcatgagccacaccatcaagaccctcttctgtgactttggggtgaatccagcggttcatgagctcgatgagatcccaagaggcagagacattgagcaagctcttt

SEQ ID NO: 231041 - DNA, 374 bp, Glycine max
cccggttcatccgaagcccttcaccgaaccatgtcgaggagaaaggttagagagccaaaggaggaaaatgtgactctgggtccagctgttagagatggtgaacacgtttttggcgttgctcgcatctttgcctccttcaacgacaccttcatccatgtcactgatttgtctggcagggaaacccttgtccgaatcactggtggtatgaaagttaaagctgacagagatgaatcatctccttatgctgctatgcttgcagctcaggatgttgctgccagatgcaaggaactgggcataactgctcttcatatcaagctccgtgctactggtggaaacaagaccaaaacacctggtcctggtgctcaatcagctct

SEQ ID NO: 231042 - DNA, 324 bp, Glycine max
gaaaaataacacacatttgaaactcaaactgaaatgggtgcatagctttggggcaaaaactacacaaaactcctcattgcccccaagttttttctttcaaagcaattttgcacttttttgctttcattgtcttcaatttgtagtaagaggaaattgttgtttcctacttagcttgattattattatcaatggcttctttagtatcttcacaatttacactaccaagttctaaacctgaccagcttcattctcttgctcagaagcatctttttctccactctttccttcccaagaaggccaattacaatggtagcagctcaaaat

SEQ ID NO: 231043 - DNA, 408 bp, Glycine max
cgtaggccagctaggaattcaactcgagaacattttccccttcaacactccaaccaccaaagaagcataccactatagaatgatatttgagaggttcttccctcagaactcagcaaggctcactgttcctggaggaccaagtgttgcatgtagcacagcaaaagctgttgagtgggatgctgcttggtctaacaaccttgatccatcaggtagagcagcacttggagtgcatgcatcagcttatggaaaccaggtcaaagctgtagaaccagagaagatcataccaaagatggaattttctcaactaggagttgcaatataaaccttgtatgacccataccagggataattatttgcccaaaaaccaccatatattattattatcctatccaccataaattgaaaatt

SEQ ID NO: 231044 - DNA, 399 bp, Glycine max
tattcaactcgaggctctttctgatctctctccccctctctctaacaataaccctcgctgtcgctggttccaattcaccatgaccgtgatgatgcccgctcccattgatcagcaagaggacgaggacgtgctcgtgccggacgcggatttgcctgagaacaatcaccaacccatggaagttgtagctcaacctgaaaatgccaatactgtggagagtcagcccgttgaagatcctccgtcatctagatttacatggagaattgataacttttcaaggctgaatacaaagaagctctattcggaaatatttgttgttggtggctataaatggcgtgtgcttattttcccaaaaggaaacaatgtggactatttgtccatgtatttggatgttgctgattc

SEQ ID NO: 231045 - DNA, 436 bp, Glycine max
ctttcaaaagggagaagaaaaggaaaggaaacaaaacgcacaaaggattattatagcaatggcagaacaaaaccaaaaccagacaactgaagctggaaggcaccaagaggttggccacaagagccttctccagagtgatgctctttaccagtatattctggagaccagtgtctacccaagagaacctgaatccatgaaagaactgagagagttgacagcaaaacacccatggaacatcatgacaacctctgcagacgaagggcaattcttgaacatgctccttaagctcatcaatgccaagaacaccatggaaattggtgtctacactggatattcacttcttgccaccgctctcgctcttcctgaagatggaaagatcttggccatggatattaacagggagaattatgaattgggtttgccagtaattaagaaa

SEQ ID NO: 231046 - DNA, 428 bp, Glycine max
ctgttctcccacaccacacccatgacactcctcctgctccttattctcctctttcacgcggcggaagccaagggacagtggcagctcctccacaaaaacatcggcattgtcgccatgcacatgcagcttctccacaacgaccgcgtcatcatcttcgaccgcaccgacttcggactctccaacctaaccctccccgacggaagatgccgcaacaacccaaacgagttggtcgtcaaacgcgactgcaccgcgcactccatcgaatacgacgtcgcagccaacacattccgcgctctctttgtccaaaccaatgtctggtgctcctccggttcggtctctcccgacggaacattagtccaaaccggtggcttcaacgacggctaacgtgcggtcagaaccttcaccccgtgccgctcgtgcgactgggc

SEQ ID NO: 231047 - DNA, 374 bp, Glycine max
ctcctctattctcaccactcaatttctcactccctcttcattttcttctctctttctcaaaaccctcactttaaggtcctccacgccgtttcagcgtctttcttttgcgtcacaaccactgcgcaggctcatggctcgcgccaccctcggcctcactctcccagccaacaccgaatcccttaaggtttctttcgcggcaaaggagcttgacgtggcggaatggaaaggggaccttctcgccgttggcgtaacggagaaggacgtcgcgagaaacgtggaatcgagattcgagaacgcgattctgagcgcgttggactccaagctgggcgggttgttgggccaagtctcgtccgaagaggacttcagcggcaaac

SEQ ID NO: 231048 - DNA, 368 bp, Glycine max
gtttatggcatattcaatgggaggccaaatgcagggttcaggcaaatgatggttcagcttcttggcattgtgtttgtgatacttctcaatgtcaccacaactagcattgtgtgcttgttggttaggatcatagttccacttaggctgagtgaagatgacttgcaagttggggatgaagcagtccatggcgaagttgcatatgcattgtggggtgatggagagaagcttgagactgctactgagcctttgacatctgaaaagaatcttgaatggccaactgtggaactaagaacttaattcgagtgatgctcaattaatggaatgaactcaatgaaggataaaatattctagctcttttgttggttttg

SEQ ID NO: 231049 - DNA, 377 bp, Glycine max
ggaacggatccaaggtttaacaaggttttcaacaaggggatggctgatcactctaccattacaatgaagaaaattcttgagacctacacaggctttgagggacttaaatccctggttgatgttggtggaggaactggagctgtagtcaacatgattgtctcaaagtatcccactattaagggcattaattttgatttgccccatgtcattgaagatgccccatcttatccaggagtggaacatgttggtggagatatgtttgtcagtgttccaaaagctgatgctatttttatgaagtggatttgccacgattggagtgatgagcactgcttgaagtttttgaagaactgctatgaggcactaccagataatgggaa

SEQ ID NO: 231050 - DNA, 430 bp, Glycine max
  unsure (1)..(430): unsure at all n locations
atcttatccttagcagttagggaagctattgatctggttggatgaccttcttggcctgttgcattaggccgaagagatgcaacaaaagccaatcggatggaagctaatcaagaaattccttcaccgttcgagcctctagataacatcattgcaaagtttacttcaaagggtcttaacttgagagatgttgtagccctttcaggggcacatacaattggttatgcccgatgcttgaccttcaaaaggagactttttgattttcaaggctctggcagacctgatcctgtgcttgcctcttcacttctctcaaaattgcaaagcacgtgtccaaatggagacacttcanacagctacattgcacctcttgattctaatactactttgaccttcgacaatgagtattatagaaatcccttatacaacaaagggc

SEQ ID NO: 231051 - DNA, 414 bp, Glycine max
gcgtaagtaagcacggcattcggctcgaggcagaaagcaggctcatcctagagttttaaaaatggcagcagcctcctccatggctctctcttccccatccttggctggcaaggccgtgaagctgggcccatcagcccccgaagtcgggagggtcagcatgaggaagaccgtcaccaagcaggcctcctccggaagcccatggtacggcccagaccgcgtcaagtacttgggcccattctctggcgagcccccgtcctacctcactggcgagttcccaggtgactacggctgggacactgctgggctttcggccgacccagaaaccttcgccagaaaccgtgagctcgaagtgatccactccaggtgggccatgctcggggccctgggctgcgtcttccccgaactggtgtcccg

SEQ ID NO: 231052 - DNA, 349 bp, Glycine max
gtaaattaatttctcgtatcgaaaatcatttccaccaccacaatttttttttatttccgtttactaaagattagtaattgtttggtttgtgtgtagattttgattcgattcgattcgattcagtcgaggttttaagcagcagcaagatgtctgggcgtggaaagggaggaaagggattgggaaaaggaggagcaaaacgacatcgtaaggtgctccgcgacaacattcagggaattacgaagccagcgattcgtcgtttggctcgcaggggtggcgtgaagcgtatcagcggtttgatctacgaggagactcgcggtgttcccaagatcttcctggagaatgtcaaccg

SEQ ID NO: 231053 - DNA, 368 bp, Glycine max
atcttatccttagcagttagggaagctattgatctggttggaggaccttcttggcctgttgcattaggccgaagagatgcaacaaaagccaatcggatggaagctaatcaacaaattccttcaccgttcgagcctctagataacatcattgcaaagtttacttcaaagggtcttaacttgagagatgttgtagccctttcaggggcacatacaattggttatgcccgatgcttgaccttcaaaaggagactttttgattttcaaggctctggcagacctgatcctgtgcttgcctcttcacttctctcaaaattgcaaagcacgtgtccaaatggagacacttcaaacagctacattgcacctcttga

SEQ ID NO: 231054 - DNA, 310 bp, Glycine max
atatgtcctaaactttctgcagcatcgttctccatttttggctttacagaatgactgtgtctgattaagggttctttagtatttccaatatttcttgtagtgaataagttgttagctaaatcaagatcaagtttttggtgttgtagaaggaagagaagaattaacatgagtattcactgtgaagtgtgtgagacagctccaggagcagtgatttgttgcgcggatgaagctgctttgtgtgccaagtgtgacgttgaagttcatggctcaaacaagcttgatcgcaagcatgaaacacctcttcttcaat

SEQ ID NO: 231055 - DNA, 438 bp, Glycine max
aattcagctcgagcatgcacacaatgtaatggacaaaaaaccatgcaactcatcatcccaagattcctaaattaaaaaaggaacaatggacaagggaaaaagacttgatcttgataaactatattgcaaatcacggtgaacgtgtttggaactccttagccaaagcttctggtctcaaacgaacgggaaagagttgtcgactccgttggctaaactaccttcgtcctgatgttagaagaggaaacattacacccgaggaacagcttttgatcatagaacttcatgcaaagtggggcaatacgtggtccaaaattgcaaagcatcttccaggaagaactgacaatgagattaagaacttctggagaacaaggattcaaaagcacattaagcaagctgagacttcacaacaacatggtaattcagagaataatgatcatc

SEQ ID NO: 231056 - DNA, 321 bp, Glycine max
agctaggaattcagctcgagccaacacatcatattcttggtggataacattcccataagggtgttcaagaatggtgagactattggcgttcctttcgcagagaagcaacccatgagaatttattctagcctgtggaacgctgatgactgggccaccagaggtggtttggtgaaaactgattggtccaaagcaccctttacagcctactagcgcaatttcaaagccacagagttcaccatcaattccttctctgatgctgcatggcagagcaacgagcttgatgcctatgggagaagaaaactgagatgggttcagaagtac

SEQ ID NO: 231057 - DNA, 403 bp, Glycine max
aattcagctcgagcaatgcaatgctcgtgtcgttttggtgtcactgagtcagtctgagtaggaagaggaagccatgggcaacacatcctccatgctcacccaatacgacatcgaagaggttcagcaacattgcaaaaacgcttttacgcaacaggagatagtttctctgtaccaacgcttctgtcagctggatcgcaacaactgcggtttcatcccttccgatgaattcctctccattcccgaattcgccgtcaatcctctctctcagagtttgttgaggatgctggatgggttgaacttcaatgaatttgtggccttcttgtccgccttcagtccccgtgccactctccaccacaaaattgaattcattttcaaggtctatgacaccgattgcaatggaaaa

SEQ ID NO: 231058 - DNA, 400 bp, Glycine max
ctttcaccgaagaataacttgactttcccgaactccacctgagaaaaagatacccttaattcgcaggcgcgtcttgtgttggacaacaaccacaagatgattaacttcgaagaaaccgagttgcgactcggcctccctggcaacgactcagcactcaagggaagtgctgccaagagaggcttctctgaaactgcttctgttgatttgaagcttaatctttcttcttgcattaacgactctgcctcggattcaccctcatctatgtctacagagaagcccaaagagaacaagactaccactgctgaacctcctccagctaatgatccagcaaaaccacctgcaaaggcacaagtggtgggttggccaccagttaggtcatttagaaagaacatagttcaaa

SEQ ID NO: 231059 - DNA, 425 bp, Glycine max
  unsure (1)..(425): unsure at all n locations
cagaaacaaaagtggcagtattaggtggcatcaccgaagtgcagggagctgccaacagcgtcgagatcaacaatctcgctcgctttgctgtagaggaacaaaacaaaagagagaattcagttctggagtttgtgagggtgattagtgcaaagcagcaagtggttgctggagtgaattactacataacattggaagcaaaagatggtgagattaaaaatgagtataaagcgaaggtttgggagagggaatcccaagagttgctagaattcaagccaacattaggtgcaggaggcatcatcgatgtgcctggagctgccaacagcatcgagatcgaccatctcgctcgctttgctgtagaggaacanaacaaaagagagaattcggttctggaattggtgagggtgattagtgcaaagaaacaagtg

SEQ ID NO: 231060 - DNA, 409 bp, Glycine max
ctaactttcacacgcagcggcttcttcttccgttttcctgaatcggtgtgaacaatggcgacgtacgctgcgatgaaacccaccaagccagggttggaggagtcccaggaacagatccataagataaggatcaccctttcttccaagcacgtcaaaaacctcgagaaggtttgtgcggacttggttcgtggtgcaaaggacaagcgcctcagggttaagggacctgttaggatgcccactaaggttcttcacatcactaccaggaagtccccctgtggtgaaggtaccaacacatgggatagatttgaacttcgtgtccacaagagagtgattgacctctacagttccccagatgtggttaagcagattacctctatcacaatcgaacctggtgtggaagttgacgtga

SEQ ID NO: 231061 - DNA, 425 bp, Glycine max
gagagaatggggaaaagacaaatcccagaccctccgaactttaagaaatacggcgttcctttctactccgttgcgtggattccccaacacgttgtcaaatcgcgccaaatcgaaaccgccgatgagtcctcggactccgatcacagcacttcgccggcgaccgaggcggagaaggaacccgcgacggtcgccggtaactacctgctgttcgccggcggcggcggagcaggccacagcggtatccccaatgctttggttattgcgcacttcgatgtcgcgtcgaattctctctctgatcaaccggtgtgtaagctaggaactgattctgaattgccttataggatggcacttaactctaatggtgatggccttatttgtgcaatggaaacgcccatggtttgcagatgggttgacggggataaaac

SEQ ID NO: 231062 - DNA, 330 bp, Glycine max
tgtgtttgttattcactatcgtcattcctgttcctcaagctttgtagtgagcagatataatggctgttgaaaggtctggaattgccaaagatgttacggaattgattggtaaaacccccttagtatatctaaataaacttgcggatggttgtgttgcccgagttgctgctaaactggagttgatggagccatgctctagtgtgaaggacaggattgggtatagtatgattgctgatgcagaagagaagggacttatcacacctggaaagagtgtcctcattgaaccgacaagtggtaatactggcattggattagcctttatggcagcag

SEQ ID NO: 231063 - DNA, 352 bp, Glycine max
  unsure (1)..(352): unsure at all n locations
atccagggttggtgttgagcggtgagacgatgggggagaacgagaaaggagagcgatggagcggagcgatgacaaatctgacggagatggcctccaatctcgactctctccagaagcttctcctcaccaaagccgtcttcgtcgacgacgacaccttctccaaagcctccctcgccgccgaccaggcccgcaccatcaagctcctccagcaacgagtccagaccttggagagagaggtcgacgccgccatcaccaccgccgcccgcgctcgctccgagaagcgccaggccgaggctgctcagaaatccgccgaatcgcgcgctcatcagctcancgccgaactcgaaaacac

SEQ ID NO: 231064 - DNA, 420 bp, Glycine max
gcgtgcctaagctaggaattcagctcgagcaattactactttctctctctttgtaacttgtaagcatggagtcctcaaagatctatgcttacctcttcctttgcatgctcttcctctcctccgccactcccattctcggttgtggctactgtggcaaaccccccaaaaagcacaagcctggtaaaacaccaaagacacccacagtacccgttgttaagccaccagtcacaatccctcccattgttaagccaccagtcacaatccctcccattgttaatccaccagtcacaatccctcccattgttaatccaccagtcacaatccctcccattgttaatccaccagtgacagttccacccgttgtgcttccaccaatagtgaagcccccgggttttctccctccaattcttaacccaccaa

SEQ ID NO: 231065 - DNA, 425 bp, Glycine max
aagctaggaattcaggctcgagagcaacctcaccccatgcatttcttatgtgctcaatggtggcaaaaccgtgcctggcccttgctgcaatgggatcaagaccctctttaacctcgctcactccacaccagaccgccaaaccgtttgcaagtgcataaagaacgctgttagtgcgttccattatggcaagtccaatgtggaccgtgctgctgctcttcctaagcagtgtggggttaacattccttaccagatcagcccttccaccgactgtaccagagtgcagtgaggttaatgatatatggagcggtaactcgagaagagaaggatatacaatatatagctagtgtgtgaataagtggctggctatacgtacgccacacattacattaatgactggtggctgcttattattacatccatcaact

SEQ ID NO: 231066 - DNA, 410 bp, Glycine max
cttccttccgcaaatggcttctcacgacagcatctccgcttctccaacctccgcttctgattccgtcttcaatcacctcgttcgtgctcccgaagatcctatcctcggggtaactgtcgcttagaagaaagatccaagtccagttaagctcaacttgggagttggtgcttaccgaactgaggaaggaaaacctcttgttttgaatgtagtgaggcgagttgaacagcaactcataaatgacgtgtcacgcaacaaggaatatattccgatcgttgggcttgctgattttaataaattgagtgctaagcttatttttggggctgacagccctgctattcaagacaacagggttaccactgttcaatgcttgtctggaactggttctttaacactttgcggtgaatttttgg

SEQ ID NO: 231067 - DNA, 415 bp, Glycine max
gaaaaaaaatgggttcttctctgtggacctgtctgattttgttatcacttgcttctgcttccttcgccgccaacccaagagcaccaattgatgtgccatttggcagaaactatgtgcctacctgggcctttgatcacatcaaatacctcaatggtggttctgagattcagcttcatcttgataaatacacaggtactggcttccaatcaaaagggtcctacttgtttggtcacttcagcatgtacataaaattggttgctggtgattcagctggcacagtcactgctttcgatttatcatccacaaactcagaacatgatgaaatagactttgagttcttgggaaacagaaccgggcaaccttatattttgcaaacaaatgtgttcaccggtggcaacggtgacagagaacaaag

SEQ ID NO: 231068 - DNA, 294 bp, Glycine max
  unsure (1)..(294): unsure at all n locations
cacggttcctcccccgctgccgctgactctcacatccatattcatcccgccngtcaatcataagactcaacgaaggtgatcccattctgattcatctgaagcacagatcacctagtggaactggaatcctttcagctgctggcctaaccaggtgggcatgctgcaacaccaaacccaaggaccgtgagtcatgctcccgcagcaattggcgctgggaaaatcaggtctcctcgtcaacccccaccaaatgctaccattgctgctccgactgcttccaccggttgcgctacaggt

SEQ ID NO: 231069 - DNA, 375 bp, Glycine max
caagaagatctgacccaactctacgatggaatccggtcgaattacaaagcatggtgttcggggttcgctccgctggtgatcggcggcgacatggactcggtggcggtgcaggagttcagccgaacgctcttcaacatgcggccagacatagccttgagtttggcgcagaccatattccagttcgacatgaggccaatcctatgccacgtcacggtgccgtgccacatcattcagagcaccaaggacctggctgcgccggttgtggtggcggagtatctgcagcagaatttgggagggaagaccatcgtggaggtcatgcccaccgagggccacttgccgcagctgagctcgccggatattgtggttccgggtttg

SEQ ID NO: 231070 - DNA, 337 bp, Glycine max
aaaaaaaaacccttagccaacacaaccatcatggccacctctgctattcagcaatcagcattcactggtcaaactgctctgaagcagctcaatgagttcgtccgcaagaccggtggcgccggcaaaggtcgcactaacatgcgccgcaccgtcaagagtgctcctcagagcatttggtatggccctgaccgtcccaagtacttgggtccattctcggagcagattccatcatacctgaccggagaattccctggtgactacggatgggacactgctggattatcagctgacccggaaaccttcgccaggaaccgggagctggaggtgattcacagca

SEQ ID NO: 231071 - DNA, 213 bp, Glycine max
  unsure (1)..(213): unsure at all n locations
taagctaggaattcagctcgagtttctcactccctgtgtatgcngctgaggattccgaacgagtcgaccttcttcgtttcccgcaaagtttaagttaacacgggtaaggaaaaggtcacaacaacattgccgtcattggccatgtcgacccgggaaagtcaactagcactggtcacctgatctacaaactttggggtattgacaagcgtgtga

SEQ ID NO: 231072 - DNA, 380 bp, Glycine max
gcgtgcctaagctaggaattaagctcgagctcgagccgctattatcgttcttcttcttcactaagaatccaaaaaaaatgaacgatcttatgacgaaatccttcaccagctacgtggagctgaagaaggtcgcaatgaaagaagacgttgatttggaagccggtggtcctggtgattgcaaagtggaactgagctcttccacgacccacttggacacagacatgggcctcttcctagaagagggcgagaaagtgaaaggcgacatggggtccctccgagacatcctgggccggctccaacaaggcaacgaagagagcaagtccctccacaagcctgaaacccacaaaggcctcacaagcccgatcaaagctgaaatccct

SEQ ID NO: 231073 - DNA, 370 bp, Glycine max
cttccaggaaccaccacaaaacattctcatcattcacccaacaaaatggctctgcttctgatagtacccatttcactggtaaccctctggctcggttacaccctataccagcggctacgcttcaagctccctcctggcccacggccctggccggtagtcggtaacctctacgacataaaacccgttcggttccggtgcttcgctgagtgggcgcagtcttacggccctatcatatcggtctggttcggttcgaccctaaacgtcatcgtttcaaactcggagttggccaatgaggttctgaacgagcacgatcagcagctggcggaccggcaccggagccggtcggcggcgaagttcagccgcgacggga

SEQ ID NO: 231074 - DNA, 389 bp, Glycine max
aattagttcattctctttgcgcagttccctacctctcctttcaagatgcagatcttcgtcaagaccctcaccggaaagaccatcacccttgaggtggaaagctctgacaccatcgacaacgtcaaggccaagatccaggacaaggaaggaattcccccggatcagcaacgtctcatcttcgccggaaagcagctcgaggacggccgtaccctcgccgactacaacatccagaaggagtcaacccttcaccttgtccttcgtctccgtggtggcatgcagatcttcgtcaagactctcactggcaaaaccataaccctagaggtcgaaagctctgacaccattgacaacgtcaaggccaagatccaggaccaagagggaatccccccaga

SEQ ID NO: 231075 - DNA, 374 bp, Glycine max
caacccccaattcttccccctccacccacccagcatatctctctattcctatttattagcacccctcacattaccttgtgtcaccaactactttgactcctttaccataccattacaataattatcaaacctaaccagtaaaaatggtgaccgtggaggaaatccgcaacgctcagcgttcccatggacccgccaccatcttggccttcggcaccgccacgccgtccaactgcgtctcccaagccgattaccctgactactacttccgcattaccaacagcgaacacatgactgatctcaaagaaaagttcaagcgcatgtgtgaaaagtccatgataaagaagcgatacatgcacctgaacgaagaatttccg

SEQ ID NO: 231076 - DNA, 352 bp, Glycine max
ctttacttaattagcacatccaaatatggcactttcttcttcatcatcttcaacatccatatttgctttagctttgttcactcttttgcttataggaagttcttcagctcaactctctgagaacttctatgatagtaaatgtcccaaggttttctatgccgtaaaatccgttcatcaatctgctttggctaaagaacctcgccagggagcatctatcgttcgcctcttctttcatgactgctttgtcaatggttgtgatggatcagtagtacttgatggcccttcctcagagatgactgcacctctcatcaataactctttgagaggttatgaagtcattgatgccatcaag

SEQ ID NO: 231077 - DNA, 443 bp, Glycine max
cgtcgaatgcccgcgtacctaagctaggaattcagctcgaggaatatctctccgcaatggaaactgtgtgtgaaaggattggtgtaacagaaaactgtacacaagagggattccaaaaccaagtgctgagaaaagggtgtcaaaatcttggcctcaaagttgactatgtgccaagaaactcctcagggaatcactactgtggctcatgtggttatggctgtccgaaaggagagaaacaagggactcaagctacatggcttgtagatgcagttgaaagagatgcagtaataataacaggatgcaaagctgagaggttcttgttggaaagcaacaggagtggaaatggcagaaagaagaaatgtttgggagtgatggcaaaagcattaaacagcatagtcacaatgaaattacaaattgacggccaagggacaatttctgcaagt

SEQ ID NO: 231078 - DNA, 372 bp, Glycine max
gcgtgcctaagctaggaattcagctcgagattcactttgcgcagttccctacctctcctttcaagatgcagatcttcgtcaagagtctcaccggaaagatcatcacccttgaggtggaaagctctgagaccatcgataacgtcaaggccaagatttaggacaaggaacgaattcccccggatcagcaacgtctcatcttcgccggcaatcagctcgaggactgccgtagcctcgccgattaaaacatccagaaggagtcaacccttcaccttgtccttcgtctccgtggtggcatgcagatcttcgtcaagactctcactgggagtaccataaccctataggtccaaagctctgacaccattgacaacgtcc

SEQ ID NO: 231079 - DNA, 413 bp, Glycine max
gtgttacccctccaaatgcaaggagttgaggagtttccaccaagcaatttctcaggttatacttctggaaacgtctcacaatggcccattgaagaatttctcggattaaatgaactcagtcagtattataattacatggatggatcatctaaggctgacagtggtaaacttggggattctgattcttctgttttgaggtctggtgaagaggatatggatgatgacggcttcttgggacgtgttccagattcatcctggacagttcctcagatcccttcacctcctacagcttcgggtttatattggccgaaagtccctcaatatacatctgacagtgccatgtctgttcctgacatatgcttttctcatgtgcgacagccccaccatgcccagcataaatctaatgtttcaaa

SEQ ID NO: 231080 - DNA, 426 bp, Glycine max
gtgacggtagattgcaagtcacgacatggacacttcagaacgagaggggcaggtgcgcttgatgaatatggaaacttcaaagtatcacttccacaggacatggttgaagatggtgagctaaaagaagattgctatgcccagttgcatagtgcatctgctgaaccttgcccttcccacggaaactccaaaattgtgaccaggtcagtctctgaagacacacacacccttgcacctgctgctggaaaactcagattctcatcagcattgtgcacttcagccttcttttggcatttcttcaaacaccacccagaattcccttaccctcctaaagatgactactctctccctccccctgtgccagtctataaggaacctcttcctccagtgccagtgtataagacacccccagcaccatattagaaacct

SEQ ID NO: 231081 - DNA, 373 bp, Glycine max
ggaaaatggctcttcttggatttcttctgggacttttctacatgatctcacatgtcaaggggtatggttttggaggttggaccaatgcacatgccaccttctatggagggggtgatgcttctgggacaatgggtggggcttgtggttatggaaatctgtatagccaaggttatggaactgatacaacagcactgagcactgcactgttcaacaatggcttaagctgtggtgcatgctttcaaattaaatgtgcgaatgacccacaatggtgccttcctggctccatcatagtcactgccacaaatttctgtccacctggtggttggtgtgaccctcccaatcaccactttgatccttcccaacctggtttcca

SEQ ID NO: 231082 - DNA, 399 bp, Glycine max
  unsure (1)..(399): unsure at all n locations
acctaagctaggaattcagctcgaggtttgtaacccctctgctttggttatgctggattgtatacaaaggagagcatcatgttggtgagcacaagccggagcaccatggaggagaagagcacanagaggggttcctagacaagatcaaggacaagatccacggcgaagagggtggcgccaccgccgagggcgagaagaagaagaagaagaaggagaagaagaagcatgaacatggccatgacagcagcagcagcagtgacagtgattagattatctcccactgctgcatcacctatatatcttataaggtgtatgggaccatagtagtgagggctgtgtccttctctttttttcctacttgtcatttatatttatgagcgagagaaatagtgcgtgtat

SEQ ID NO: 231083 - DNA, 409 bp, Glycine max
gacagaagttgaaaattttggttgagtgagaggcttgtctttgttccgctaccatgtctcatgagacatgcccttctgtaaagaatgtccttcttttggattccgatgggaaacgtgttgcggtcaaatacttctctgaagactggccgacaaatagtgccaaggaaaattttgagaaagttgtattcaacaagactcagaaaaccaatgcccgcacggaagcagaaatagcaatgtttgagaataacattgttctttacaagtttgtccaagatcttcacttctttgttaccggtggtgattatgaaaatgagcttatcttagccacagttctgcaggcattttttgattctgtgggccttctgctcataggcaatgtagacaagaaaggagcactagagaaactgga

SEQ ID NO: 231084 - DNA, 404 bp, Glycine max
atacgatccaatggctgcgacccttttccagggattgggagttgtgaccccatcattctcttcttcccactccaacaagttcatgctttcttccctctcagagaggaaagatggcatatttgtggtcagatctgatgctgatgcaaggattctgaagactggagctcgtaagcatgaattgttggttactaatgcagttgcaacaaagggagccagttctgcggcctctacatcaaaatctggatctgggcatgaacttctcctttttgaggccctacgcgaaggtttggaggaagaaatggagagggatccttgtgtatgtgtcatgggtgaagatgtaggtcattatggaggatcttataaggtgactaaaggccttgccccaaagtttggggaccttagag

SEQ ID NO: 231085 - DNA, 343 bp, Glycine max
ggtaatatgggcagttggaatcttggacaaggttgtcttacgatggaggagaaaaggagctggtttacgaggtttccgacaagagatggacatcaacgaaaatgaaaatgaagatgaagatattctcaaggtgttccgaaaacagaaagttgatgtagaaattgaagaggctgtttcaagggtgctgtccatggtcgactcaccagatgctcgtgagcaatatcatcgcatgcttgagaaatatcgtcaagctaaggctgaacttgcgggtacgagtgacgaggcatcattatcaacttctgtaggagatgacttatttattgatgatttttatccatttccc

SEQ ID NO: 231086 - DNA, 352 bp, Glycine max
ccaatatattccattctctctgtgtatttccctacctctcccttcaagatgcagatcttcgtcaagaccctcaccggcaagaccatcacccttgaggtggaaagctctgacaccatcgacaacgtcaaggccaagatccaggacaaggaaggaatccccccggaccagcaacgtctcattttcgccggaaagcaacttgaggacggccgtacccttgctgactacaacattcagaaggagagtactcttcacctcgtcctccgtctccgtggtggcatgcagatcttcgttaagacactcaccggcaagaccataaccctagaggttgaaagctccgacaccatcgataacg

SEQ ID NO: 231087 - DNA, 363 bp, Glycine max
caacaatccaccaaccatcaagcagactcttccacaaatttgacaagttgatccttcttggaaaagggagccttctttactttggaaaagcctcagaagcaatgacttacttccagtccataggatgttcaccacttatttccatgaacccggcagagtttttgctagaccttgctaatggaaacataaatgatgtttccctaccttcagagttggaagataaagtgcagatgggaaatgcagaagctgaaacacaaaatgggaagccatcaccagctgttgtacatgagtatctggtggaggcatatgaaactcgagtagcagaaacagaaaagaaaagactaatggttcctaaaactcctg

SEQ ID NO: 231088 - DNA, 424 bp, Glycine max
cgtcgactgcccgcgtacctaagctaggaattcagctcgagcgaagatatgtttttctctttttttcctacggtgtggccaggctgttcactttagcgaaggatcaaaaaccctgtgaaagtgtgtttgtttggtcgagttgattgaattcgctggcagcttacagctatgatcatcaacaacgccccttttcctctatgattgattcgattcgattgaagtcgattccgtagagagtgagaaatcagatcacaataatcatcgatgggtaatttgttcgtgaagaagcccaaggtaacagacgttgataaagcaatcctcgcactcaagacccagagacgcaaactcgcccaatatcaacaaaagctagatgctgttattgaagcagaaaagcaagctgcacgagacttgattcgtgaaaaga

SEQ ID NO: 231089 - DNA, 440 bp, Glycine max
  unsure (1)..(440): unsure at all n locations
cgtacctaagctaggaattcagctcgagccgcctcagagggctcttctcgttctcttttacattccaaagccaacaaaacaaaaaactcactaaccctaaccctacccccacccttttgaaatgaacttcaaaccctggctctctttcctcctcttggccctggccctggccatggtggctgaggcttctagtgttcatcatgaatatggcttccatgttaatgctgtggtccatgatctcattggagatgacaatgagatgttgctagattccgaatccaatcgccgaaccctcaccgggcgacaacggtacattagctatggtgccctaaatgccaacaatgtgccatgtggtaaccgtggaagattctactacaattgccagcagangggtcgtgccaacccttacaatcgtggttgcaccaaaatcacacattgtg

SEQ ID NO: 231090 - DNA, 373 bp, Glycine max
gcgagtctcagtccagttagcacaccaaccccaaatccaaaggttcatttcaatatgaccatcatgtcaagttttggacctttgaccattcttagtatagtcttgttagtggttggtgtcattgtctctggggctgaagctaggccaagggctttctttgtgtttggagattcacttgttgataatggaaataacaattacttggctaccaccgcacgtgctgatgcccctccttatgggattgattaccctccaagtcatagaccaactggtcgtttctccaatggctacaacattcctgatcttatcattcagcgacttggtgctgagtctacattgccatatgtgagtccagaattaagaggaaataagc

SEQ ID NO: 231091 - DNA, 432 bp, Glycine max
gggaaggaaaagtggtgttggtggttgtcctcctcattggtatggcaaccctttcctccatcctctcctcctctcttcctcttttccatcgctaccctaaccctaacccttcgctctttcgcccctccctttctctctctttctctcgcactaaaccccgttcccccttcctcgttctcgctgcctcttcccatgatttcgcctccaactccaagaaatcagtgctcaccgagttgatacaagagatagaacctctggatgttagccacattcagaaggatgttccaccaactacagcagatgccatgaagaggactatatctggtatgctgggcttgcttccgtctgatcaatttaatgttgtcattgaggccttgtgggaaactctctccaagttacggatttcctcaatgatgaacgggtatacactac

SEQ ID NO: 231092 - DNA, 359 bp, Glycine max
ctcgagccgaatcggctcgaggccggttgttgttacttctgtggagaagaatgagaagaagatgaagaggaagtatcagaagaagagggttttggccgaggatgagcctaagcccgatccttattggctggatacgttttttgggtttgcacccgaagaggcggagagggtacccaattgggggcattgtggggtgcttagtccgcttttggccaatgtttgcttggatgagttggataggtggatggaggggaagattaacgagttttatgttccttccaagagtgatgttatatggaatagtcccgacgaggatcaagggaacacgtcgtgggcggagttcgtgcccaagagtgggc

SEQ ID NO: 231093 - DNA, 356 bp, Glycine max
ctacctctttttcttctctctcaacaacttcaccttcttcctcctcgatcatgtctcacttcaagggcaagtaccatgatgagcttatcgccaatgctgcgtacattggcactcctggaaagggtattcttgctgctgatgagtcaacagggacaattggcaagcgtttggccagcatcagtgtagagaacattgaatccaacaggcgagctcttagggagctgcttttcactgctcctggtgttcttcaatatctcagtggtgtcatcctctttgaggaaaccctctaccagagcacagctgcaggcaagccctttgtgaatgtcttgaaggaagctggtgtgcttcctggcatc

SEQ ID NO: 231094 - DNA, 359 bp, Glycine max
gttgtgaaagcagagaagtgagatacactaagttatcctcataaatacactctaattaggtggcaagataagtgtctaaccttagtaacattgccacatattgtgttcattttggaattgtgccactaaaattctattcaattcatctatggctgcctcttcttatgctatgcaatcaatcctggcaaaccctttgatccgcatttccagcgggtctagggtgaaccaatttggcgttcctgctttgcacatgagaaggaatgttggcctgagagttaggtccatggctaaggaagaacaaccaagtgagcctgcaaccccagttacaccgccaccatcagtagaacccaagccaaaac

SEQ ID NO: 231095 - DNA, 426 bp, Glycine max
cgtcaaagcccgcgtacctaagctaggaattcagctcgaggaagaaagaatacgcgcagagtggactttgacctcagcgccgtttgggtccgaaccaagacgcacacaggacggtgcgttcaacaaacctaccttggtgggccccacttttcccccgaaccgtagcttcagagtgatccctttcgcaccctctatataatagcgccctcgccactcgcctcgacgcgtgactctcgcgggtggacaacgaaatttctcagccaaagaacaaggatcagaatcgtttaatcaagttgaggaagatggcactagtctccggaggaagatcaacactgaaccctaacgcccctctttacattcccgccgcgttccgccaagtggaggatttttctccagaatggtggcagctggtgacgacactgacat

SEQ ID NO: 231096 - DNA, 415 bp, Glycine max
agctaggaattcagctcgaggagacattacagtttgtattattgtagaagagagagggagagagatggagttgagcatgaaagtgttggtgaaagttgcttcgttgcttttcctattggaattcactgcaacagttgttgatgctcgcttcgatccaagttcattcatcactcagtttctccccaatgctgaagccaacaattactatgttaaatccacacaaaagcgtgctgtaacagctgtccttgcacaaaatcaatccctccacagtgtcgttgttcagatattggagaaacatgtcactctgcatgcaaaacttgtatttgcactcgctcaattcctccacagtgtcattgcagtgacataaccaacttctgttatgaaccttgcaactcctctgaaaacgaagctcact

SEQ ID NO: 231097 - DNA, 399 bp, Glycine max
acaacgcgcactctctcttttctctcttaacacaaaaaccctatcgttcttcgcggtttcgccgattctcgccatgccgaaagccaaatccgacgccaaagccgccgatagccggttgaagcgcaagggcgctggtgctggaaggaagcaatcgaagaaagctgctaaggatcctaacaagccaaagagacctccaagcgctttcttcgttttcatgtccgagttcagagagcagtttaagaaggagcatcctaacaacaaatccgtcgctgttgtcggtaaagctggtggtgacaaatggaaatcgctgtctgatgctgaaaaggcccccttcgttgccacggccgaaaagaagaaacaagagtatgagaaaactattttggcttacaataagaaatt

SEQ ID NO: 231098 - DNA, 394 bp, Glycine max
gcctcagctcactttttgcaccttgattccatttttccaacaactcactggcattaacgttgtcatgttctatgcccctgtccttttcaagactttgggctttggcaacgatgcttcccttatgtcttcagttatcaccggaggtgtaaatgtggttgccactcttgtttccatcttgactgtggacaaggttggaagaaaagttttattccttgaaggtggtgttcaaatgttgatttgccagattgctactggagtcatgattgctatgaagttcggggtgagtggctaaggctcgttttcctccggagaagccaaccttactttgttctttatatgtgcatttgttgctgcatttgcatggtcttggggtccactaaggtggttggtgcct

SEQ ID NO: 231099 - DNA, 420 bp, Glycine max
ggaaagagcaccattgttttgcacaacacatgcgaggattccctcttagctgctcctattatcttggacttggtccttcttgctgagctcagcactagaatcgagtttaaagctgaaaatgagggaaaattccactcattccacccagttgctaccatcctcagctacctcaccaaggctcctctggttccaccgggtacaccagtggtgaatgcattgtcaaagcagcgtgcaatgctggaaaacataatgagggcttgtgttggattggccccagagaataacatgattctcgagtacaagtgaagcatgggaccgaagaataatatagttggggtagcctagctgaatgttttatgttaataatatgtttgcttataattttgcaagtgtaattgaatgcatcagcttcattaatgc

SEQ ID NO: 231100 - DNA, 330 bp, Glycine max
ctcactcacttccattgtcactgctcctttctcggatctctctcttcttcttcttcgttttctcttcgcgagtgagagatggcgcaaattctgcttcatgggactctccatgccaccatcttcgaggttgataggctcaatgctggtggtggtggcggcaattttttcagcaagctcaagcaaaactttgaggagactgttggtattggaaagggagttactaaactctatgcaaccattgatctggagaaagcaagagtaggaaggactagaatcatagaaaatgaacatactaatcccagatggtatgagtcttttcacatttactgt

SEQ ID NO: 231101 - DNA, 363 bp, Glycine max
cagtttcgggggaagagatccagcagcaatggtgtacgtcaaggctcagaaatcaaaagcctacttcaagagatatcaagtcaagttcaagagaagaagagagggaaaaaccgattaccgtgccaggattcggttgattaatcaggacaagaacaaatataacactccgaaataccgatttgtggttcgctttagcaacaaggacattgttgcacaaataatatctgctagcattgccggcgatttagttcttgctacagcatattcacatgagctgccacgatatggtcttgaagtaggacttacaaattatgcagcagcttattgcactggtctcctgttggcccgaagagtcctcaaaac

SEQ ID NO: 231102 - DNA, 350 bp, Glycine max
cgcaagcagaaagaaagaatcccaggcgaggagaaagatggaggggaaggagcaggatgtgtcgttgggagcgaacaagttccccgagagacagccgattgggacggcggcgcagagccaagacgacggcaaggactaccaggagccggcgccggcgccgctggttgacccgacggagtttacgtcatggtcgttttacagagcagggatagcagagtttgtggccacttttctgtttcgctacatcaccgtcgtaaccgttatgggagtcgccggggctaagtctaagtgtagtaccgttgggattcaaggaatcgcttgggccttcggtggcatgatcttcgccctcg

SEQ ID NO: 231103 - DNA, 397 bp, Glycine max
ctcgagccgattcggctcgaggattatactctgaaagctgttggtggaagtttaacggctattcctggaatctcagatatgattgatgatactgtgaactcaattgttactgacatgctccaatggcctcataggattgtggttccacttggtggcattcctgttgataccagtgaactggagcttaaaccccagggaaaacttgcactgactgttgtcaaagcaactgctttaaagaatatggaaatgattggaaagtcagatccttatgtaattgtgcatattcgaccattatttaagtataaaaccaaggttattgataacaacctgaatcctatttggaatgagaaattcgagttgattgcagaagacaatgataaccaatcactcattcttg

SEQ ID NO: 231104 - DNA, 411 bp, Glycine max
ctcagtctcagaccctttctcaccaccatcttctttctcacactcacagtgctcaaggtttcagcatcatcctcagtgattttctacaacaagtgccagcacccagtgtggcccgggatccagcccagcgcaggaaagcccgttctggcccgcggaggcttcaagctcgccccaaaccgggcctactccctccagctccccgctctatggtccgggcgcttctggggccgccacggctgttccttcgacgccggcggccgggggcgctgcgccaccggggactgcggcgggtccctgttctgcaacggcatcggcggaagcccaccggcgaccctggcggagttcaccctgggcaacgagcaggacttctacgacgtgaccctggtggacgggtacaacctacccatctcc

SEQ ID NO: 231105 - DNA, 404 bp, Glycine max
gtgtttctttctctctcatgttgtagtatctcactagtgtttttcattcgtttctgaaccacacaaacatcaccaccgaacaatgccgacggggttaccggcggcgaattccttagtggcgccggacgaagaggggtgggtgtgggggcagatcaaggcggaggcgcgccgcgacgccgagtcggagcctgctttggcgagctacctctactcgacgatcctctcgcactcgtcgctcgagcgttctctgtcttttcacctcggaaataagctctgttcctccacgcttctctcgacgctcctttacgacctgttcctcaacgccttctcctccgacccctccctccgctccgccgccgtcgccgatctccgcccctgccgcgaacgcgaccccgcctgcgtct

SEQ ID NO: 231106 - DNA, 410 bp, Glycine max
  unsure (1)..(410): unsure at all n locations
cgctctttcgtgtttttgttcgcgaaggaaactctatccttagctatcgcgatggatcggtaccagaaggtggagaagccaagagctgaaactccaatcgatgaaaacgagatccggattactagtcagggaaggatgcgcaactacattacttatgccatgagcttgcttcaggagaaaggttctaatgaaattgttttcaaagcaatggggagagctatcaacaaaaccgtgacaattgtggagttgatcaagaggagaattgtgggcctccaccagaatacagcaattggatccactgatatcactgatacttgggagcccctagaggaaggcctccttcctttggagacgacanagcacgtgtcaatgataacaataaccctttcaaagaaggaactcgatacatc

SEQ ID NO: 231107 - DNA, 358 bp, Glycine max
attcatccaaatttctcaaactcaagctagcctttgggggatatgatagagaagaagacacagtgtgagaaaaaggaaaaaatggaaggtgaagaaactgagatgaaacaacaatccaggttcaaaaggatttgtgtgttctgtggcagcagccctgggaacaagagtagctataaggacgctgctattgagcttgggaaagagttggtgtcaagaaatattgatctggtttatggaggaggaagcattggtttgatggggttggtttcccaggctgtttatgaaggaggtcgccatgtaattggagttattcccaagacactgatgccaagagagattactggagagacagtggggg

SEQ ID NO: 231108 - DNA, 364 bp, Glycine max
ccataacacaaggcagaaagcaagctcatcctagagttttaaaaatggcagcagcctcctccatggctctctcttccccatccttggctggcaaggccgtgaagctgggcccatcagcccccgaagtcgggagggtcagcatgaggaagaccgtcaccaagcaggcctcctccggaagcccatggtacggcccagaccgcgtcaagtacttgggcccattctctggcgagcccccgtcctacctcactggcgagttcccaggtgactacggctgggacactgctgggctttcggccgacccagaaaccttcgccagaaaccgtgagctcgaagtgatccactccaggtgggccatgctcggggc

SEQ ID NO: 231109 - DNA, 386 bp, Glycine max
atgatgatgaagtctgctatgtgtgcagtggtggttgtagcacttcttcttctggcggaggtggggcccatggctgaggctgtgacatgcaccccaacagagttgagtccgtgtcttccagcaatcacttccggtgctaaaccttccaatgcttgttgcacgaagctgaagcagcacataccatgcttatgtggctacctcaaaaacgctagcttgaagcagtatgttaactctcctaatgcccgaaaaaccgttgcttcttgtgggattccctttccaacttgttaattaattaagccttcttataattaaagtgtgggatatatatatatatatagataaacagtttaatttatacacactttgatcctacaaagcatcttgac

SEQ ID NO: 231110 - DNA, 395 bp, Glycine max
ccagctccaaccgaatccggtccagcgttgcaattcgccttttccaaaagcaatcacattaacatcacgctgtccccgccgtcgttcaaccacggcaagaagcattcgaactccgccgtcatccgtttacggcaagactgagttcatgacatggatgtggatacgatcgtcacatcacgattttctcccctgaaggacgtctcttccaagtcgagtatgctttcaaggctgttaaggccgcaggaatcacctcacttggtgtccgctgaaaggattcgatttgtgttgttactcagaagaaggttccggataagcttttggacaacacaagtgttacacacctctttcccatcaccaagtaccttgggttattggccactggcatgacaactgaa

SEQ ID NO: 231111 - DNA, 414 bp, Glycine max
aagacacagtgttggaggtgcagactatggttctgttagaattggcgcctttatgggtatgaagatgataaaggccaaggcatctgaggaattgtctgagagttgggctgctaatgggttgaactatgatgaagtggaacaagatgacatagaactacttaaacaagaaacctccttagattacttatgtaatttgccacctcatagatttgtgactctttacgctaagacaattcctgagtccattgtcggtgagacatttttggagcaatatcaaaatcataatgatcctgtcactactattgatccgaagcgtacttacggagttagagctcccacaatgcatcgcatatttgaaaatttccgagtcgtgaccttgaaagcacttttaacatctgcagcttcaacctatca

SEQ ID NO: 231112 - DNA, 325 bp, Glycine max
gtcatcttcgtctttacgcttttcttcaccgaagcgaaaaagaaaacgcttgacttgagagaaatagagcttcgaatcgaaactcagaattataacaaaacacaaatcataatcacaatggcaaggtacgaccgatcaatcaccgttttctcccccgacggccacctcttccaggtcgagtatgccctcgaagccgtccgcaagggcaacgccgccgtcggcgtccgcggcaccgacaacgtcgtcctcggcgtcgagaagaaatccaccgccaagctccaagactccaagtcggtgatgaagattgtgaatctggacaaccaca

SEQ ID NO: 231113 - DNA, 406 bp, Glycine max
tgggaaggtccccttgctgtgagaaagcacacacaaacaaaggtgcatggaccaaagaagaagatcatcgcctcatttcttacattagagctcacggtgaaggctgctggcgctctctccccaaagccgccggccttctccgttgcggcaagagctgtcgtctccgctggatcaactatctccgccctgacctcaagcgcggcaatttctccctcgaagaagaccaactcatcatcaaactccacagcctccttggcaacaagtggtctctaattgctggtagattgcccggtagaactgacaatgagatcaagaattactggaatactcacatacgcaggaagcttctgagcagaggtattgaccctgccactcacatgcctctcaacgactcttcccatcaaga

SEQ ID NO: 231114 - DNA, 407 bp, Glycine max
cttcgtggcgggagatcctctcgcagcttctggtgtactttctcgtagaggattacaccaattactggatccacaggtttctgcacaacgattgggggtacgagaagattcaccgcgtccaccacgagtaccatgcgcccattggattcgccgcgccctatgcccactgggccgagatcttgatcctcgggattccctcctttcttgggcctgccatggttcctggccacattatcaccttctggctctggatagccttgcgccagattgaagccattgacacgcacagcgggtatgactttcctaggagtatcacaaaatatattccattttatggtggtgctgagtatcatgattaccatcattacgttggaagacacagccaaagcaattttgcttcagttttc

SEQ ID NO: 231115 - DNA, 370 bp, Glycine max
tacaaaggttgctgtaggagataagattgcagtagtgctaagtgctaacacctgcagtgaacaatggcctctgcatcagcatctctgctcaagtcttcacttgttcttgacaagtctgagtgggtgaagggacaaacccttcgccaaccttctgcatcagttgtgagatgcaaccccaccagcccatcaggcctcaccatcagagctggttcctatgctgatgagctcgttaagaccgcgaaaacagtggcttcaccagggaggggtattttggccatggatgagtccaatgctacctgtgggaagcgtttggcttcaattgggctagagaacactgaagctaaacgccaggcataccgttacctcctcg

SEQ ID NO: 231116 - DNA, 355 bp, Glycine max
aaagaaagaaaaaaacccttagccaacacaaccatcatggccatctctgctattcagcaatcagcattcactggtcaaactgctctgaagcagctcaatgagttcgtccgcaagaccggtggcgccggcaaaggtcgcactaacatgcgccgcaccgtcaagagtgctcctcagagcatttggtatggccctgaccgtcccaagtacttgggtccattctcggagcagattccatcatacctgaccggagaattccctggtgactacggatgggacactgctggattatcagctgacccggaaaccttcgccaggaaccgggagctggaggtgattcacagcagatgggcaatgc

SEQ ID NO: 231117 - DNA, 386 bp, Glycine max
gcctcacgtcaacgctgttgggtctgggcctggacacgggcccgggccaggacccgggccaggcggacttctccttgtccccaagtctgaagaagtcggtcggcccatggactttgtcggctcacgaattggactcaatctcggaggacgaacttacttctcgtcctctgaggatgacttcgtgagccggctctaccgtcggtctacgcccgtggaaccgggttcgactatctcgtcgaactcgccgcgatgccaggccgacggttgcaatgctgatctgtcgcaagccaagcactatcaccgccgccacaaggtgtgcgagtttcactccaaagccgccatcgtcatcgccgccggcttgactcagcgattctgccagcaatgca

SEQ ID NO: 231118 - DNA, 408 bp, Glycine max
  unsure (1)..(408): unsure at all n locations
atcaattataagcatgggtttgtggaacacaacgaatgcagtgtcttgccgctttcacaagtttggtgatgaccaaaagaatctggtcttccaaggtgatgccacgtcttcttccaggggcatagaactcacaaagttagacggtggaggaaaaccagtgggtggcagtgtggggagagtgttatactcttctccagtgcacctttgggaaagctctacagtggtcgcaagctttgaaaccgacttcaccttttccatctcatcagactctactactccaggtgatggccttgccttcttcattgcaccatttgacactaaaatccctccaaactctggtgggagcaaccttggactcttcncatcagacaatgttgttgctgtcgagtttgacacctaccctaatcg

SEQ ID NO: 231119 - DNA, 411 bp, Glycine max
gctccgtaccagtttcactgcataaatttgagagaaaactctgcaaacatgttggtttatcaggacctccttacaggtgatgagcttctctcggactccttccgttacaatgaaattgagaatggaatgctgtgggaagttgaggggaagtgggttgttaagggagcagttgatgttgacattggtgcaaacccttctgctgagggtggagaagatgagggagtcgatgacgcagctgttaaggttgttgacattgttgatacattcagacttcaggagcaacccgcttttgataagaaacagtttgttaccttcatgaagaggtttatcaagaatttgactcccaagctcgatgcagacaaacaagagttgtttaagaagcacattgatggagcaactaaatacctggct

SEQ ID NO: 231120 - DNA, 391 bp, Glycine max
  unsure (1)..(391): unsure at all n locations
cgtttcccagatctgctccttccgttccccctcagaaatcagttgaagagcatgggtcgtggagttagcagtggtggtggtcaaagttcattgggttatctttttggcagtggagaggcccctgccccaaaaccagcaacaaataatgccccagcccaacctgaagtgcaggctgtaaataatgtgcctcctccaaaagcatctcctcctactaaaacaatagaccctaacaaggctgctggtatcaacagtcattctactgatggccagaacaccggcaacttcatcacggaccgaccctcaaccaaggtccatgctgcccctggtggtggttcttccctaggttatctctttggtgaacctgnggaggggaaatgataccttgtttgca

SEQ ID NO: 231121 - DNA, 412 bp, Glycine max
cctagctagtagtctcagttcgtttgagagagaaaaaatggcagagggtctcgttctccgcggaaccatgcgcgcccacaccgacgtcgtgacggcgattgccactcccatcgacaactccgacatgatcgtgacggcgtcgcgcgacaaatccatcattctctggcacctcaccaaggaggacaagacctacggtgtcccccgccgccgcctcaccggacattctcacttcgtccaggacgtcgtcctctcatccgacggtcagttcgccctctccggctcctgggacggcgagctccgcctctgggacctcgcggctggcacctctgcccgccgcttcgttggccacaccaaggacgtgctctccgtggcgttctccatcgacaacggtcagatcgtgtcggcctctcgt

SEQ ID NO: 231122 - DNA, 382 bp, Glycine max
ttagtttgttccatttcttgcttcttaatttcttgatcatgtcacttgctggtaaaatcagcattgaaattggggtgcatgcaagcgctgcaaagtggttcaacctctttgcaacgcaactccatcatgttcaaaaccttaccgaaagagtgcatgaaaccaagctacatcatggtgatgactggcatcacaacgaatcgatcaaacactggacttgtaccatagatggtaaggttacaacatatcacgagagtattgaatccgttgatgaacctaacaaaacaatcacttacaagatcttcggtgaagatatcgatcaccagtataaggtctttaaggtcatctttcaagcaattcataaggatcatgggggtgcattcat

SEQ ID NO: 231123 - DNA, 368 bp, Glycine max
caaagagacaattcaacttaagagatcaatatggccaccaccactacccagcctccctctaatatctgttttttccttctgttgttgcttctagcacactttcatttgggcataagccaacttgagctgaattactactctaaaagctgcccaaaagctgaagagatcatcaaggaacaagtcacacaactatataacaagcatggaaacactgccgtttcgtgggtcagaaatctcttccacgattgcgtggttaagtcatgcgatgcatcattactgttagcgacggtgagcgatgtagtgtcggagcagacatcggatagaagttttgggatgagaaacttcaagtacgtaaacactatcaaagc

SEQ ID NO: 231124 - DNA, 379 bp, Glycine max
agagaaaaaaaaaaaaaaaacagaacaacacagaaactcaaaaccaaaataaaattattatggatcacattcataggttacgttgttttgggacaatacccaaaattccttttctattgctactttccctgcttctcttcagtttcgttaacgcatccttcgacctcgctactatacccttcaacgacggctattctccgctcttcggagctagcaacgttgttcgctccgaggatggatacggcgtacaactccgcctcgatcgctacacaggttcgggtttcatttcctccagtatgtaccagtatggattcttcagcgcgagaatcaagttaccatcgaattatagtgctggtaattgcgtggcctttttaacatc

SEQ ID NO: 231125 - DNA, 383 bp, Glycine max
tccaagggttgccttgtccggaaaacaacctcaactgattaacgttggaatctccaagggattggcgggttaaaaacttttaagggaataggaaaaaccaatggtgttggatgctgcccaacggaaccccgggattcaacttcctccaattggaattgttgcggctgtaaaatttgcaaatctttgtcactgttttcctgaatgggcagatgtaatagcagtttccacaagtgcatctttgcatttcattgatagagcagcaatgcccaaggatgtaattctatacacggatgacaatgaatggtctacttggaagaaattaagtgatagcgtgcttcacattgagcttcgcacatgggctgatatcatggtcatcgctccat

SEQ ID NO: 231126 - DNA, 500 bp, Glycine max
  unsure (1)..(500): unsure at all n locations
gagggtgcgaatgatttactcgtccgacagaagatacagacgtcgcacggaccgcgtacgtaaagctcaggaattccngctccaagaacctggggctaaccttccgaaaaattccccttaaaaacaatatgcctataaccccgggttacaaaaatttggcttttcccggttcccggcctttcaaggtcataaaggggggttacatgctggaaacacacttgccactcacgagtttatggttcttcctgtgggagcttcctcgttcatggaagccatgaagatgggtgtacaagtgtatcacaatttgaagtctgtgattaagaagaaatatggtcaagatgcaataaatgttggtgacgaaagtggctttgcccctaacatccaggaaaacaaggaaggcttggaattgctgaaaactgccatcgccaaagctggttacacaggcaaagttgtcatttggatggatgttgcagcttctgaattctacaaggaagacaaac

SEQ ID NO: 231127 - DNA, 382 bp, Glycine max
gagcttgctgtgccacctctgtgttcataccttcttttcacaattaccgtatttggtcttttctgggacttggaatgaccacttacactgcttggtacttggcaatagcagcccttattcatggccaggcagaaaatgtgacacacacgggtccaacgaagctagtgctgtacttcacaggagccaccaacatactgtacacgtttggtggacatgcagttactgtagagattatgcacgccatgtggaagccacagaagttcaagtacatatacttgctggccactttgtacgttttcacactaacgattccttctgctgctgccgtttactgggcttttggtgatgaacttctcaatcattccaatgcattctctctcct

SEQ ID NO: 231128 - DNA, 408 bp, Glycine max
gaaaaaaaatgggttcttctctgtggacctgtctgattttgttatcacttgcttctgcttccttcgccgccaacccaagagcaccaattgatgtgccatttggcagaaactatgtgcctacctgggcctttgatcacatcaaatacctcaatggtggttctgagattcagcttcatcttgataaatacacaggtactggcttccaatcaaaagggtcctacttgtttggtcacttcagcatgtacataaaattggttgctggtgattcagctggcacagtcactgctttctatttatcatccacaaactcagaacatgatgaaatagactttgagttcttgggaaacagaaccgggcaaccttatattttgcaaacaaatgtgttcaccggtggcaagggtgacagag

SEQ ID NO: 231129 - DNA, 378 bp, Glycine max
ctcattttcattatcttaccactttcaattccaaattcactctcagaaattagaatggctagccaatcaaacactaaatcagttcacgatttcacagttaaagatgccaggggaaatgatgttaatctcgccgattacaaaggaaaggtccttctccttgtcaatgttgcctcacaatgcggcttgactaattcaaactacacagagcttaatcaattgtatgagaaatacaaagggaaaggacttgaaattctggcattcccgtgcaatcagtttggggctcaggagccaggaactaatgaagagattgtggagtttgcttgtactcgcttcaaagctgagtttcccattttcgacaaggtggatgtgaatggtgac

SEQ ID NO: 231130 - DNA, 430 bp, Glycine max
ccgtacgtaagctcagaattcggctcgaagcgccgtctccgatttccgacaatgggcgaaccaaaataagcaaaaaaaaaaatttcgtacctgatggattgttcttccctgaactgaacgaggttctgacaagagagttggccgaggacggttactccggcgtggaagttaaggttacgccgatgcgcaccgaaatcataattagagccaccagaacccaagctgttctcggtgagaagggaaggagaataagggaacttacctctgtggttcagaagaggttcaagtttcccgagaacagtgtcgaactttatgctgaaaaggtcaacaataggggtctttgcgctattgctcaagctgagtctcttcgatacaagctccttggtggactcgctgtgcgcagggcctgctatggtgtttttgaggtttg

SEQ ID NO: 231131 - DNA, 378 bp, Glycine max
cacagttagtacaaaaaagggttacttcagcttccacatatcttgaagaattgatcaatgggcaagtctgtagttgagaagctactttggatggcaattgtgtgcttggtgctgggtgtaatttccattactcccaaggcccaagcagcagtgacatgcaaccaggtggtgagcaacctcaccccatgcatttcttatgtgctcaatggtggcaaaaccgtgcctggcccttgctgcaatgggatcaagaccctctttaacctcgctcactccacaccagaccgccaaaccgtttgcaagtgcataaagaacgctgttagtgcgttccattatggcaagtccaatgtggaccgtgctgctgctcttcccaagcagtgt

SEQ ID NO: 231132 - DNA, 415 bp, Glycine max
gagagtgatttcagtgagtgatcggtgttcacttgatctcatcataatcgtcagcgtcaattgaagaagatgccgatcagaaacatcgccgtcggaaggcctgaagaggcgactcaccccgacacgttgaaggcggctttggctgagttcatctcaaccttcatcttcgtgttcgccggctcaggctccggcatcgcctacaacaagctcaccgacaacggcgctgccacccctgccggcctcatctccgcctccatcgcccatgcattcgccctcttcgtcgccgtctccgtcggcgccaacatctccggcggccacgtcaaccccgccgtcaccttcggcgccttcgtcggcggcaacatcaccttcctccgcggcatcgtctacgtcatcggccacctcctcggctcaatcg

SEQ ID NO: 231133 - DNA, 386 bp, Glycine max
gatcgagataactagaaacagtgtgatgaaaatgaaggtccttgttttcttcgttgctacaattttggtagcatggcaatgccatgcgtacgatatgttccctctccgaatgaacactggctatggtgcccgtactccggaggtgaaatgcgcaagttggaggcttgctgtggaagcacacaacatctttggctttgagaccattcctgaagagtgcgttgaagcaacaaaggaatacatccatggcgaacaatatagatcagactccaaaacagttaaccaacaagcttacttttatgccagagacctcgaagtccatcccaaggacacatttgtgttcagtatagatggcaccgtactctctaatattccatactaacaaaaac

SEQ ID NO: 231134 - DNA, 220 bp, Glycine max
cattcctttactgaagtcttacttgaaggatgggtgagaccttgttttcctcgtcactagaattttcgtagcatggaaaggccatgcgtacgatatgtgccctctccggatgaacactggctatggtgccagtactcctgaggtgaaatgcgcaggttggtagcgtgctgtggatgcacacaagatctttggctttcagatcaatcctgaccattgcgtt

SEQ ID NO: 231135 - DNA, 397 bp, Glycine max
  unsure (1)..(397): unsure at all n locations
gtacgtaagctcagaattcggctccaaggtggcaaattttggtcctgcaaaacctgttggaaaggaatttaacaaggtcctcaacaacaataaaaggaaaagaaggcatcctgctccctgagtggatttcaggtgtggctatcactgccaaagctgatgtctacagctatggaatgatgctttttgagtttgtgtcgggtaggaggaactccgaggcatcggaagatggccaagtgagattctttcctaccattgctgcaaacatgatgcaccaaggagggaatgtgctaagccttttggaccctaagttggaggaaaatgctgacattgaagaggtcactagagtcatcaaagtagcttcatggtgtgtccaagatgatgaatctcatangccttc

SEQ ID NO: 231136 - DNA, 418 bp, Glycine max
agataagattgcagtactgctaagtgctaacacctgcaatgaacaatggcctctgcatcagcatctctgctcaagtcgtcacttgttcttgacaagtctgagtgggtgaagggacaaacccttcgccaaccttctgcatcagttgtgagatgcaaccccaccaccccatcaggcctcagcatcagagctggttcctatgctgatgagctcgttaagaccgcgaaaacagtggcttcaccagggaggggtattttggccatggatgactccaatgctacctgtgggaagcgtttggcttcaattgggctatagaacactgaagctaaccgccatgcatagcgtaccctcctcgtgacagttccaggccttggtcagtacatctctggtgccattctctttgaggaaacactctaacaat

SEQ ID NO: 231137 - DNA, 412 bp, Glycine max
cggctcgagcggctcgagcggctcgagagggaatcgaaggatctctctctctcatcacatgatcattcagcgagcaatagcatagtgtgaaatttgagtgagcgagcgaggaatcggaagaaaacgaaaccctaagaagaagatgccgaagaagatgggggtgaacacgaaggcggatgcggcaagggcacgtaagagcgcggtggatacggagcgcaaggagaaggagactcgagagaaggaggaccagtactggcgagaggcggagggttcaaagtcacgcgccgcgaagaagaaggaggaagaggccgaaaagagggcggaggcagccgcgcggaaagcggaggcgcgtcggttggcggagcaggaggagaaggagctggagaagtcgatgaagaaagtggacaagaag

SEQ ID NO: 231138 - DNA, 412 bp, Glycine max
tgaaaaggaaaaccctaagagatgaagagaactcctatcttgttccctctcttctttcttctttgtgccttcacctcatatctaccttcagccaccgctgatgatgatcatgtgtacgacactgacggcgataagcttcaatacggtgtcaattatttcgtgttgccagtgataagaggaaatggcggtggaatacaagtagcaaaagcaggaaacgaaacttgccctctgactgtggtgcaatctggcaacgagctctctgaggggttaccgataaagattgcatctcgatcagcaggagtcgctttcatcacccaaggccagcttttcaagagcattcagttcggtgtgtttccatccacactcagaccaggggtgtccccaggtccaattccttctaagtgggacccac

SEQ ID NO: 231139 - DNA, 368 bp, Glycine max
tggtggttgtagcacttcttcttctggcggaggtggggcccatggctgaggctgtgacatgcaccccaacagagttgagtccgtgtcttccagcaatcacttccggtgctaaaccttccaatgcttgttgcacgaagctgaagcagcaaaaaccatgcttatgtggctacctcaaaaacgctagcttgaagcagtatgttaactctcctaatgcccgaaaaaccgttgcttcttgtgggattccctttccaacttgttaattaattaagccttcttataattaaagtgtgggatatatatatatatatagataaacagttaatttatacacactttgatcctacaaagcatcttgacacaagcattca

SEQ ID NO: 231140 - DNA, 359 bp, Glycine max
catcaatgcccctcaatggtatgatgctgggaaatcggagtactttgcttcatcgtcgaccctctttgtgatcgagttcatcttgttccactacgtcgagatccggagatggcaggacatcaagaaccctggctctgtcaaccaagaccccatcttcaagcaatacagcttgccccaacatgagtgtggataccctggtagtgtgtttaaccccttgaactttgcacctactttggaggccaaggagaaggaacttgccaatgggagattggctatgttggcattcttgggattcatagttcaacacaacgtgacaggcaaaggaccatttgagaacctattgcagcacctctctgacc

SEQ ID NO: 231141 - DNA, 331 bp, Glycine max
tcccctcggggaattccaattccacattttcaagaaataaggacgcaaaaatgttcatatatgaattggaattatttgttttcttattaagccgatcctgaagccaaaggaaatgagatcggaattcctcggggaattccaattccacattttcaagaaataaggaggcaaaaatgttcatagatgaattggaattatttgttttcatactaggcctatcctgaaaccaaaggaaatgagatcggaattcctcggggaattccaattccacattttcaagaaataaggaggcaaaaatgttcatatatgaattggaattacttgttttctt

SEQ ID NO: 231142 - DNA, 409 bp, Glycine max
attagtttcaattatacaggcaagaaataatgcccggatattgatctctggctcattgagcttgttcagcaaccgatttttcaggtcaggtgtgcagaaggctgggagtccaaccaaacatgagaagtcaggtaatgagcagttcttgaatgaacttagcacatggattttccatgaacgaggtcacctcaaggcggtgaatgtgcaacaccacaaagttggggaagctaatgaaccagccatctatcggatcaatgataatttggaatactctgttgaagtttatgagtggtctgggacagcatgggaaccttacgtagctgatgatgttcaagtgcaattttacatgatgagcccctatgtcctgaagactttatcaactgatggcaagggccgttatttcacatca

SEQ ID NO: 231143 - DNA, 405 bp, Glycine max
ctcgagccgtccaaataaaaaaaaaaaaagaaaaaggaaggagataggaaagggttaattgaatccaaaaaaaagaagagaaaaacaaaatgggcagggtttggacttcgatgatagcattgttgctttgcctgatgacatcatcggttcggggcgaggacccttacatttactacacatggaacgtgacctacggcaccattgccccattgggtgtcccccaacagggtatcctcatcaatggtcagtttcccggccccgaaatcaactccaccagcaacaacaacgtggtcatcaatgtcttcaacaacctcgatgagcctctcttgttcacagggatggtgtccaacagaggaaaaactcttggcaagatggcacattgggtgcccagtgccctacccccca

SEQ ID NO: 231144 - DNA, 407 bp, Glycine max
  unsure (1)..(407): unsure at all n locations
ctcctacccactgaagtcgaacccctatttttcctctccctaatggcttctcaagttcttcttcaggcactgtttgcccccaagctaagtttcccttcttcttctcgtaacgtggcgttaatttctagggttccttccaccccaatttcatggcgttgcactcccctcattgctaagcctagtttcgtagtgagagctgacaccaacctcgatggcggtggtgaagccaccgaggatgttccttcggataatgctgaaaaagtttcggaaggcgaagcagaacaagtttcggattctgaagctccgaaatcgcctagaaaaccccgagtcaaactcggagacattatggggatattgaatcagagggcaattgaggcatccgagaagcanagaccaactccagacat

SEQ ID NO: 231145 - DNA, 296 bp, Glycine max
agcaggtgtttgaaggaaccaacattcaagattctggaacagaggcagctgttgttgctgctgctgtggctgcggctgcccgtttgactgatgcagacttagtaagatgaatttagatctaaaagccatagcaatgtcttttaacggtacccagcacaagtgcaaggcttgtgacaaaacggtttatcccgttgatcagctttctgctgatggtactgcttatcacaaagcttgcttcagatgctctcactgcaaaggaatattaatgctgaataactattcctcaatggaaggtg

SEQ ID NO: 231146 - DNA, 371 bp, Glycine max
tggggtttgaggaaactgagctaaggcttggactgcctggaaacgtaggaggcactggcactgaagaagtgctcatcaggaagagaggtttctctgagactgaaactgaaactgaggaggatgagtctgctaccactgtggatttgatgcttaatctttcttctaaggaagctgctgctgctgcagatccaactgataagcacaagactttgcctaaggagaagactcttctgcctgcagatcctgctaagcctccagccaaggcacaggtggtaggttggccacctgtgcggtccttccggaagaacatgttagctgtacaaaagagcgtcggagaagagaacgagaagaacagcagcagccctaatgca

SEQ ID NO: 231147 - DNA, 358 bp, Glycine max
gttcttcttctttgtcttccatttccaattctctgtgtagaagccatgtctaagggtcctggtctctactctgacattggcaagaaagccagagatctcctgttcaaggactaccacagtgaccagaagtttaccatcactacctactcacccactggagttgctataacatcctcggggaccaagaaaggtgacctttttgtggcggatgttaacacccagttgaagaacaagaacatcaccactgatatcaaagtggacaccggttccaatcttttcacaactatcactgtcaatgagcctgctcctggtctcaagactatttttagctttagagttcctgatcaaaggtctggaa

SEQ ID NO: 231148 - DNA, 388 bp, Glycine max
cggctcgagccaattatgacagacaaacatttcatgttgatgctggttttattgatcttacaatgggaagtggacaagggcatcacaagcgtaagagccctggaattccttcagtctacgagggaggcagtactagtagatactttaatgctgggagttcaactgatcttcctatatcttcagaattgtggcaggagaagccaaatattgattctcaatatatgccctgggatcattttactatgacacccacattcagaggtactggcctttcaattaagggtgagggttctttgcggaatgtgaggagccgttctacacttgatttggattccaatctgtctaggacccatttatcaagtaatcattcacacaattcctaccctac

SEQ ID NO: 231149 - DNA, 392 bp, Glycine max
aaaatgcccactttttttcttccaacgctcctcctccttctcatagccttcgccacctctgtctccggccgccgtgacctcgtcggagactttctccggctgccctccgaaactgataacgacgacaacttcaagggcacccggtgggccgtcctcctcgccggttccaatggttactggaattacagacatcaggctgatgtttgtcacgcctatcaaatattgaggaaaggtggtctgaaagaagaaaatattattgtttttatgtatgatgacattgcattcaatggggaaaacccaaggcctggagtcatcattaacaaaccagatggaggtgatgtttataaaggagttccaaaggattacaccggcgaagatgttactgttgataa

SEQ ID NO: 231150 - DNA, 424 bp, Glycine max
gctcaaatttctcaaacaaatgggccactaacacaacaactttcacttaccccctggattcaaattcaatccaacagatgaagaactcgtcatccactacctttgtcgcaaatgcgcttcgcaacatatcgcggttcccataatcgccgaaattgatctgtacaagtacgacccttgggaccttccaggaatggctttgtacggagagaaagagtggtattttttcacgccgagggaccgcaagtacccgaacggttcgcggccgaaccggtccgcgggaaccgggtactggaaggcaaccggagcggataaaccagttggtaaaccgaaaccggttgggatcaagaaagcgttggttttttacgctggaaaagcgcccaagggagagaaaactaactggatcatgcacgagtatcgtcttgca

SEQ ID NO: 231151 - DNA, 211 bp, Glycine max
attctcccatttcctctcagaaccctcgatcactcccacgcgctcctatatcctctccttcaccgtcgctctctccaacgatcacaacaacatcgtcatcccatggcaaacgccgcatctggtatggcagtccatgatgactgcaagttaaggtttttggagctgaagacaaagatgacacaccgtttcatagtttttacgattgaggagc

SEQ ID NO: 231152 - DNA, 412 bp, Glycine max
aaggatttcaactttaggctccatctaaaaaaaatggctggtttggctagcaatcttcctctaattgttatgataggtctgcaaattcattatgcagcacttgccatattcacaagagccgctctcttagatgggttgagtacaacggtgtttgtagtatacaggcaaggcatagccactttggctttggcgcctatatttttctctcctaagaggagacaatcagtgaaagattctttgggattcaggagcttctttttgatgtttgtgaccgctcttgttggagtcacggcaaatcagaatgcatacttcaaaggattattttatgcatcttctactgcagctaccgctatgagtaatctgataccggcattaacgtttgtaattgcagcaattgcgggatttgagaaag

SEQ ID NO: 231153 - DNA, 407 bp, Glycine max
  unsure (1)..(407): unsure at all n locations
aaacgacattcattcatctatggctacccttattgctcccagcaaccactctccccaagaagacgctgaggctctcagaaaggcttttgaaggatgggggactgatgagaaaactgtcatagtaatattgggtcatagaactgtttatcagaggcagcaaatcagaagagtctatgaggaaattttccaggaggatcttgtgaaacgcctagagtctgagatcaaaggagactttgagaaagccgtgtaccgatggatactagaacctgcagatcgtgatgctgttttggccaatgttgccatcaagaatggcaaaaactacaatgtcattgtggaaatcgccactatcctctcnccggaagagcttttggccgtgagacgtgcttatctcaaccgctacaagcact

SEQ ID NO: 231154 - DNA, 339 bp, Glycine max
gcctcatgtttccgtttccgtttcaatttccactcacaggctttaaccttaccagctcgagataagacatggaccggatcaagcgcccaaggagtccgggagaggacgaagctctgcagaagctggtggagaaacacgggcccaggaactgggcactgatcagcaagtccatcccgggccggtccggcaagtcgagcatgctccggtggtgcaaccagctgtccccccagatggagcaccgggccttcacggccgaagaggacgacaccataatccgggcccaggcccgcttcggcaacacgtgggccaccatagcccgcctcctcaacggcagaaccg

SEQ ID NO: 231155 - DNA, 342 bp, Glycine max
  unsure (1)..(342): unsure at all n locations
atttgtttttctatagagaaccagaggaggctaagcaacaagaggaggaggaagctccggcaggtgattatgccatcacagatttcaatgcaggtgctattgctgctgatggccagtggcctggtacaattgatcaatcatggagtgatgcagttccacaacctattccagcagcacctggtgtcaactggggggcacctgcagaagcacctgctgctgttgcagaaggagattggggtgaagctgttccaccaccacaacaaatccctgttcctcnctctggaattgactctgtccaaccaactggctgggaataaactagtgttttttgatgctatgatt

SEQ ID NO: 231156 - DNA, 313 bp, Glycine max
gtgatggcgcagagagctcaaccagtattggccacagatgttttcaagatgggaaacatccaatggaagcaattcaatgtggatacaatcattgcttcattctcacctcaaaaaccattgctaatttttacaccaactgttcctgtcgcataccctgtaatattgttcgtccatggctttttcattcgcaatttctactactcaaagctcctagcccacatagtctcacatggattcataatcgttgctcctcaactgttttccaatgggcttcctatgtatggacccactgaagtggaatatgcaggaaaag

SEQ ID NO: 231157 - DNA, 348 bp, Glycine max
cggctcgaggccgaaccttggcagattacaacatccagaaagaatctaccctccacttggtgctccgtcttcgcggtggtatgcaaatctttgtgaagacccttactgggaagaccattactttggaggtagagagctctgacacaattgacaatgtgaaggcaaagatccaagacaaggagggtattcctccagaccagcacaggttgatttttgcgggaaagcagcttgaagatggacgtacgctggcagactacaacattcaaaaggagtctacccttcaccttgtccttcgtctgatgggaagtatgcagatctttgtgaagaacttgacagggaaaactatca

SEQ ID NO: 231158 - DNA, 378 bp, Glycine max
gttctgtgggtatccttgtttgtttgctcacaaccttatttgcaactgacttctttgagatcaaggctgtaaaggagattgagcctgcattgaagaaacaactcatcatttccactgccctgatgactattgggattgcaattgttagttggattgcactcccaacttccttcactatcttcaattttggagttcagaaagatgtcaagaattggcagctattcttgtgtgttgctgttggtctttgggcaggtcttattattggatttgtaactgagtactatactagcaatgcatatagtccggtgcaagatgttgcagactcctgcaggactggtgctgcaactaatgttatatttggccttgccttgggataca

SEQ ID NO: 231159 - DNA, 361 bp, Glycine max
atccgcagctgctgttattcgcaccgcaaacaaacagtgagccatggccgtcggaaagaacaagcgcatctccaaagggaaaaagggtggcaagaagaaggcagctgatccctttgccaagaaggattggtatgacattaaggccccttctctttttcaagtgaaaaatgttggcaaaaccctcgtctctcgtacgcagggtaccaagattgcttctgaaggacttaaacatagagtgtttgaggtctccttggctgatcttcaaggggatgaggatcatgcattcaagaagattaggttgagagctgaagatgtgcaagggaagaatgtcctgacaaatttccctgggaaatggattcac

SEQ ID NO: 231160 - DNA, 353 bp, Glycine max
cttcagcaactgcgattttggatcggaacctcttctgcggcgtagcaatgggacactccaacgtttggaattctcacccaaaaaactacggtcctggttctcgcacttgccgagtgtgtgggaatccacatggattgatcaggaagtatggccttatgtgctgcaggcagtgcttccgtagcaatgccaaggaaattggcttcatcaagtatcgctaaaagagctgttgtcacctacggaccaatattatgttctggcactaggatgttttgaagatgttatgtttgaagaaacttgagacttgtttttttcatctattttattatcagacataatgtgtggaacgaagaata

SEQ ID NO: 231161 - DNA, 330 bp, Glycine max
  unsure (1)..(330): unsure at all n locations
cagactgcaattgacaacttaatggttcaacaccttgatggaactgttaacaaatggggttggtgcaagcaaaagctaggagcaaatgccatattggcagtgtctcttgcagtctgcaaagctggtgctagcgtcctgaaaattcctctttacaagcatattgctaatatcgcgggtaacaaaaagttggttttgcctgttcctgctttcaatgtcattaatggtggatcacatgctggaaacaaacttgctatgcangagtttatggttcttcctgtgggagcttcctcgttcaaggaagccatgaagatgggtgtagaagtgtatcac

SEQ ID NO: 231162 - DNA, 351 bp, Glycine max
gcgcccagatcaacgaactggctctcgggttggaaaatagccagcaacggttcttgtgggtggtgaagagcccaaacgatgcaatagccaacgcgacttacttcaacgcggagagccacgaggatcccttgcagttcttaccagaagggttcgtggagagaacaaaaggaaggggctttttggttaagtcatgggctccgcagccacaggttctggcccatcaatcaacgggaggattcttgagccattgcggctggaactctatactggagagcgtggtgaacggcgtgcctttaatagcctggcctctgttcgcggagcagatgaccaacgcgtttatgctcatgcatg

SEQ ID NO: 231163 - DNA, 382 bp, Glycine max
  unsure (1)..(382): unsure at all n locations
cgctaaattactttctttccattttccttcgttttctctctctttctcagtttctcagtttctcagtcatcaccatcgcagcagcaagatgtggaaccaaccattcggaaaaaccgatttggaaagcggttctcggcctctgtatccgatgatgctcgagagccctgaactgcggtggtcgttcatcagaaaagtgtacgccataatcgccatccagttgctcgtaaccatcgtcgtcggcgccgtcgtcgtcaccgtccgcccaatcagtgtcttcttcgccaccaccggcgccggactggctctctacatcgtcctcatttttgttccctttataacgttgtgtccactttactactattcccagaagcatcncgtcaat

SEQ ID NO: 231164 - DNA, 356 bp, Glycine max
caaatataaagacagaggtcttgagatactggcatttccatgcaaccagtttctgaaacaagagcccgggagtagccaggaggcagaggaatttgcctgtacaaggtacaaggctgagtatcccatttttggaaaggtacgtgtcaatggacctgatacagcacctgtctacaaattccttaaagcatataaaacaggatttctgggtagtaggataaagtggaatttcactaagtttttggttgacaaggaagggcatgtcctcgctcgttatggtccaaccacctcaccgttgtccattgaaaatgacatcaagacagcattgggggaggcttgaaagactctacaatcacttc

SEQ ID NO: 231165 - DNA, 349 bp, Glycine max
gttctgtgggtatccttgtttgtttgctcacaaccttatttgcaactgacttctttgagatcaaggctgtaaaggagattgagcctgcattgaagaaacaactcatcatttccactgccctgatgactattgggattgcaattgttagttggattgcactcccaacttccttcactatcttcaattttggagttcagaaagatgtcaagaattggcagctattcttgtgtgttgctgttggtctttgggcaggtcttattattggatttgtaactgagtactatactagcaatgcatatagtccggtgcaagatgttgcagactcctgcaggactggtgctgcaactaa

SEQ ID NO: 231166 - DNA, 392 bp, Glycine max
gtgaaacagctggacaatctaatttgtttggaactattacgaaaggcctggtcgactcttctaagaatgcagtgaaagctgtgcaggttaaggcacggcatgttgtttcacagaataaacgcagataccaggaaggaggttttgatttagatatgacatatatcactgaaaacattattgcaatgggattccctgctggcgacatgagctctgggtttttcggctatgttgaaggattttacagaaatcacatggaagaagtgattaagttttttgaaactcaccataaggataaatacaaagtttataatctttgttctgagcggttgtatgatgcatcattgtttgaggggaaggtggctagcttcccatttgatgcacacaattgccca

SEQ ID NO: 231167 - DNA, 356 bp, Glycine max
ctctctcatcactacctctgcatttttctctcgctctctgccttccatcaccctcgccatttcccttcccaagatagtagaagatggcagacgctgaggatattcaacctcttgtttgtgacaatggaacaggaatggttaaggctggttttgctggagatgatgccccacgtgctgtgtttcccagcattgtaggtcgtcctcgtcacactggtgtgatggttggcatgggccaaaaagatgcatatgttggtgatgaggcacagtctaagaggggtattttgactctcaagtaccccattgaacacggaattgtgagcaattgggatgatatggaaaagatttgggatcataac

SEQ ID NO: 231168 - DNA, 363 bp, Glycine max
gagaaggcaagatgtcgaagagaggacgcggtggttcggcggggaacaagttccggatgtcgctgggtctgccggtggcggcgacggtgaactgcgccgacaatacgggggcgaagaacctctacatcatatcggtgaaagggatcaaagggcgtttgaaccgtctcccctcggcttgcgttggcgacatggtgatggccaccgtgaagaaggggaaacccgatctgaggaagaaggttttgccagctgtcattgttcgccagcgcaagccatggcgccgaaaggacggcgtctacatgtatttcgaagataatgctggtgttattgtcaatcccaaaggagaaatgaaaggttctgctatca

SEQ ID NO: 231169 - DNA, 274 bp, Glycine max
attgaaaagaagaagaacctgttttcggaactaaccgacgacatcgttctgaacatcttctacaaactcgaagacgatcctcgccactgggctcgcttagcctgtgtctgcaccaaagtctcttccctcgttagggatttctgttggaagatcaaatgctccctcaccatccctcaagatctcctctccgccgccgcctctgagccccctctcgcgctccacaaactctccttctgctgccccggcctcggccatgccgggcctcctgttcgac

SEQ ID NO: 231170 - DNA, 386 bp, Glycine max
  unsure (1)..(386): unsure at all n locations
ttccctcttgttctatgctttcaagtagtaccaattgggcactttgtttagtgtcttcattttttttttcatcctcatcaaattaaccccctaaacatcatttagctagctagccaaattaattattaattaggcaaataatgggaaacccagaatccaatttgccacccggttttaggttccacccaaccgatgaggagctcattcttcactaccttagtaaaaaggtagcatccatacccttgcccgtttccatcattgcagaggttgatatctacaagttagatccatgggacttaccagctaaggcaacctttggggaganagaatggtattttttttagtcctagagacggaaagtaccctaatggtgcaaggccaaacag

SEQ ID NO: 231171 - DNA, 356 bp, Glycine max
  unsure (1)..(356): unsure at all n locations
cttgttttggggtttcgccacgccaaaggtgttgtttctgtggggatgttttccctttcaattanggctgaatgctatcccaacattgacccatttggctcctttgagcatttttgctgattttgttgacattgtagccaagagtgtggtgatggtggatgatgtctttgtgttcatgaagaataggcctcctttgaaagcctttgggggctggtccgtgtttctctatggtttaggtgtggctgtgtatgcatttgaggggattggattggttttgcccttggaagcagaggccaaggataaggagaagtttggtggggttttgggtgtaaggatgttccttaattctttgttgt

SEQ ID NO: 231172 - DNA, 347 bp, Glycine max
caccacgatggcgaccaaagcgatggaggtggtgaagggtctggacgtgaaacggtacatgggtcggtggtacgagattgcgtgtttcccgtcgaggtttcagcccagtgacggcgtcaacaccagagccacctacgctctcagagatgacggcaccgtcaacgttctcaatgagacttggagtggcggcaaaagaagcttcattgagggcactgcttataaggccgatcccaacagtgacgaggccaagttgaaggtcaggttctgggtgcctccgttcttacccctttttcccgttactggggattactgggttttgtacattgaccaagattatcagtttgctc

SEQ ID NO: 231173 - DNA, 363 bp, Glycine max
tctctctctctctctctctgaagatggcttcacgcaggctcgtatcttctctgattcgatcctcccttcgtagatctcaatcgaagccctcaatttccgcatcgacatcgaggctcacgtcatccaaccgtgcctcaccgcacggatacttgctgaaccgcgtcgccgagtacgccaccgccgcggctgctgctaccactcctccctctcctcctcctccggggaagaaggagctcggcggcggcgggaagatcaccgatgaattcaccgggaagggcgcgatcgggcaggtctgccaggtcattggtgccgtcgtcgatgtcagattcgacgagggtttgcctccgatcatgaccgcgctgg

SEQ ID NO: 231174 - DNA, 385 bp, Glycine max
atttggccagaaagcttgcaggtgatcctaacttgcactttgtggagtctccagcattggctccatcagaagttctaattgatttagctgcacagcagcaacatgaggccgagcttcttgcagctgctagtcagccccttcctgacgatgatgatgaatcttttgagtaaaattatgccttttgagtcgtgctactgcttatgctacagtatgtaatttggggggtgtaatgttgagagttttggatgccggatttgagtgtcagaaatttaatcattttgctttaatcttaaaagaatctcccaatagtttgacatatccttgtagccaacggctgtagtacgtgcttttgtgttagttggctctcttgaagagacagcggggc

SEQ ID NO: 231175 - DNA, 393 bp, Glycine max
aattacatagcctcagtaatctgagagagaaacaaaaacaatgaaggtttccattgccaagttccactcccttcccctatgttttttccttctcttggccttcaacacaaaacccctcctagcagcagaaccagagccagtggttgataagcaagggaaccctttggagccaggagtagggtactacgtgtggccactttgggctgatgaaggaggcctcacactaggccatacaaggaacaagacatgccctctttatgttatccgtgacccttcattcattggcaccccagtttcattcttagcaccatgccttgaccatgttccaacactcactgatctaaccattgatttccctgtggtgacagtgtgtaaccagccaacagtgtggag

SEQ ID NO: 231176 - DNA, 392 bp, Glycine max
cagaaatgttactgcaaacattagctatccctacaatagtccttgtgatattcatatgggtggtacaaccaaagcaacgtcatgggaagattgcaccaggtcccaaggcgttgccaattattggtaacctccacatgctagggaaactcccgcaccgcacccttcaaacctttgcaagaaaatatggacccataatgtccttgaagctagggcaagtccaagccatagtggtttcctcccctgaaaccgctgaactattcctcaagacccatgacactgtttttgcaagcaggccaaagattcaagcctctgaatatctctctcatggcaccaagggcttggtgttttccgagtatagcgcctactggcgcaaagtgaggaaagtgtgcacc

SEQ ID NO: 231177 - DNA, 397 bp, Glycine max
gccaaacacacatgggattgatccagattcttctgacaatgtatgcactgacgactgttacataagcactggtgatgatctgattgccatcaagagcgggtgggatgactatggcattgcatatggtcgcccaagcacaaacattatcatccacaggctacttggtagaactcaaacaagtgggattgctattggaagtgagatgtctggtggtgtatctgaagttcatgcagaagatattcaattctatgattcatatcatgcaatcacaatacagacttctcctggcaggggtggttacgttagaaacatctatgtctctaacgtgaccttggctaatgtatatattgctattacgttcactggtttatatggggagcatccagatgatgcttat

SEQ ID NO: 231178 - DNA, 343 bp, Glycine max
ctgagaaaaggtcacctgactctgatccgtcacctaagaaccctgagaatgagtttttgaccacgactcctgggaacaaacagaccctcaatgaccttacaattcataaaattttatcacagcacgcatcagatgaattctaccttgggcaaacagacggcggcgactactggacttctgatgccgggccactacaggcctttaagacgttagcaagaatcttgatgagattgaaaagaaccttatagagaacaacaataatgagacattgataaaccgctatgggccggctaaaatgccttacaccttgcactatccttctagtgacgacggattgactttc

SEQ ID NO: 231179 - DNA, 352 bp, Glycine max
tgggaaggtccccttgctgtgagaaagcacacacaaacaaaggtgcatggaccaaagaagaagatcatcgcctcatttcttacattagagctcacggtgaaggctgctggcgctctctccccaaagccgccggccttctccgttgcggcaagagctgtcgtctccgctggatcaactatctccgccctgacctcaagcgcggcaatttctccctcgaagaagaccaactcatcatcaaactccacagcctccttggcaacaagtggtctctaattgctggtagattgcccggtagaactgacaatgagatcaagaattactggaatactcacatacgcaggaagcttctgag

SEQ ID NO: 231180 - DNA, 385 bp, Glycine max
ttccttttctcttctctgtctaatgggtgccctgagatcacattgaacaatggtgaatgctgtggccgttcttggcagcagtgagggtgtcactggaactattcacttcgttcaggagggaagtggtccaaccaccgtaactggatctcttgctggtcttaagcctggtctccatggtttccatgtccatgccttgggggacactaccaatggttgcctctcaactggatcacatttcaatcctaataacaaggagcatggtgcccctgaggatgagaatcgtcatgctggtgatcttgggaatgttaatgtcggtgatgatggtactgtcagcttcactattactgacagccatattcctctcacggggacaaacaacatcata

SEQ ID NO: 231181 - DNA, 482 bp, Glycine max
aggggtcgctgattgaatgattcgcgtgtcactatataaaagatgacgtcgcctgcacgcgtacgtaagctcggaattcggctcgagcacctggtcgcgaagcttatccaggggatgttttttatttacattcacgtcttttggaaagagccgctaaattaagttctcagttaggcgaaggaagtatgactgctttaccaatagttgaaactcaatcgggagatgtttcagcttatattcctactaatgtaatttccattacagatggccaaatattcttatctgccgatctattcaatgctggaatcagacccgctattaatgtaggtatttccgtttccagagttggatcggcggctcaaattaaagccatgaaacaagtagctggtaaattaaaattggaattagcacaattcgcagaattagaagcttttgcccaattcgcttctgatctcgataaagctactcaaaatcaattagca

SEQ ID NO: 231182 - DNA, 381 bp, Glycine max
ctcgagccgcggctctttcaacaatccaaacactagcacgcggcagccgttcgttgctgtctgagaacagcaactccccagttgcttctctagacaaagctgatggccttccttcttggatgaaccatgaggaccgaagggtattgaaggctatggataacaaacctgcacctaatgtcaccgtggctaaagatggcagcggagacttcaaaaccatctctgaatgtttaaatgctgtccctcaaaattttgaaggacgttatgtgatttttgttaaagaaggagtatacgatgagactgtgaccataacaaagaaaatgcaaaatataaccatgtatggtgatggatcccaaaagagcatcatcactggcaacaaaaact

SEQ ID NO: 231183 - DNA, 340 bp, Glycine max
  unsure (1)..(340): unsure at all n locations
gcanaattccctataacgttgttttggttgaaacaacagaacttgtttgttgggggcagggaaggcatttatgtacatggggcagttggactttttccttagagagtgtcccaaagggatgaaaacaatgagcacgggattgttcttgagcacactctctttggggtttttctttagcaccttgttagtgtctatagtgaacaaaatgacagcacatggtaggccatggctcgcagataatcttaaccaagggaggctctatgacttttactggctcttggctatattgagtgctataaatgtggtcttatacttggtttgtgctaagtggtacgtctac

SEQ ID NO: 231184 - DNA, 335 bp, Glycine max
catctctcttcccagttctcacctcaccgctgcatcttcacgtcgtctctaacgagggaaaatgagtcgaggaggtgcagcagcagcgaagggaaagaagaagggtgctacattcaccattgactgtgcaaagccagtagaagacaagatcatggacattgcttctctcgagaagtttcttcaagagaggatcaaggttggtggcaaagctggtgctcttggtgactctgttaccgttacacgtgagaagactaagattattctcacctctgactgtaacttttccaaacggtatttgaagtacttgacgaagaagtacttgaagaaacacaatg

SEQ ID NO: 231185 - DNA, 359 bp, Glycine max
aatgaaacaaaagtacacaaccctagtactaaatgtgagtgagtaaatcccaatcttaatggttgttgtccaaggctccaaggtccatctcccacacccttcctccctctctccctctccccaccctctcccaacaacctccatcctctttgaaccctcctccctttctcttgccctcacccactctgactcctccctctctctctacccttccttctccccccaaaccctaaccctagccctaaccatcccctcctcttccaaaaccacccataccctacctgctcttcctcctctgtgggtcccaccgtcatatttatagtctcctccccacatagagccggcatcctccttcgcct

SEQ ID NO: 231186 - DNA, 391 bp, Glycine max
  unsure (1)..(391): unsure at all n locations
tacgttgttgaatcttctagctggtgatttggttccttctgagggtgaagttcgaaggagtcagaagttgaggataggaagatattcccaacactttgtggaccttctaacaatggatgaaacagctgtgcagtatcttctgcgtctccatccagatcaggagggacttagcaagcaggaggctgtccgtgcaaaacttggtaagtttgggctaccaagtcataaccatcttactcctattgccaaactatcaggagggcagaaagctcgggtggtcttcacatctatctccatgtcaaatccacacattttattgttagatgaacccaccaatcatctggacatgcanagtattgatgcattggccgatgcactggatgaaatcaccggt

SEQ ID NO: 231187 - DNA, 342 bp, Glycine max
attcatccaaatttctcaaactcaagctagcctttgggggatatgatagagaagaagacacagtgtgagaaaaaggaaaaaatggaaggtgaagaaactgagatgaaacaacaatccaggttcaaaaggatttgtgtgttctgtggcagcagccctgggaacaagagtagctataaggacgctgctattgagcttgggaaagagttggtgtcaagaaatattgatctggtttatggaggaggaagcattggtttgatggggttggtttcccaggctgtttatgaaggaggtcgccatgtaattggagttattcccaagacactgatgccaagagagattact

SEQ ID NO: 231188 - DNA, 339 bp, Glycine max
cggctcgattgtcatatgcttggatgattaccaccctttggataaaactggcagaaaggagaagggtgtcactgcccttgatcctagagccaatgattttgatctcatgtatgaacaagttaaagctcttaaggatggaattgctgttgaaaaaccaatctacaaccatgtcactggtctcctggatccccctgagctcattaaaccccccaaaatcttagtcattgaaggcttgcacccaatgtatgattctcgggtcagagatctcttggactttagcatctacctagacattatcactgaggtcaaattcgctttggaaattcagagagacatggc

SEQ ID NO: 231189 - DNA, 296 bp, Glycine max
acaccttcaattacctcgtcgacaatggctacacatattgtgttgttgcagatgaatcaattggaagacagttacccatggcttttctagagcgtgtcaaagatgaatttgtgtcaaaatatggtggtggaaaggctgccacagctcctgcaaacagccttaacaaggaatttgggccaaagttgagggaacatatgcagtactgtgttgatcatcctgaagagataagcaagcttgcaaaggtgaaagctcaggtttctgaagttaagggtgtcatgatggagaatattgaaaag

SEQ ID NO: 231190 - DNA, 359 bp, Glycine max
ctccggtttccatcgatcgggaccgccccaaccacgtgctggcaaaatcgcccgctcagtgtcagttagggctcgatgcgtccatcaggacggtgaaccacgcctccaaatccagctcctccacgcaggattcctccgtcgccgtcgactctgtcaaggccacctccgccgtcgcggatctcccggaggaggaggagccacgcgattccaaggccttctccggcgggaacggcggcggagtggctgggagtgtcgccgggatcctgtacaagtgggtgaattacgggaaggggtggagatcgaggtggttcgtgttggaagatggagtgctttcgtattacaagattcacggaccggac

SEQ ID NO: 231191 - DNA, 339 bp, Glycine max
gtggtaacaccgaagaatactgttccccttctaagaactgccatatcaactgctggggaggctgcggcagtggcagttgcagctcgccgcggtgaaagtgcttcgaatgtctccgccacatatcatcactatgagccagagcaacacgggtgggacctgaacgccgtgagtgcttattgctcaacttgggacgctggcagaccttactcatggcgcactacatatggctggaccgctttctgtggtcacgttggtcctcgtggccgttattcttgtggaaagtgcttgcaggtgacaaatacaggaacatgagcaaacacaagtgtgagaatcgtacat

SEQ ID NO: 231192 - DNA, 368 bp, Glycine max
gaaatttggaaaaagggttctgaaatcttagctactgagtgcgtaatcactgagatctgccttcatcctgggttggttttgttgatgggtgcttgctggagtaataggattaagtctgtgagtccttccaatacagggatcacttctagaagtgtcagcaggagtggccatgacgtcagctcaaatagcaggagctcatcagcctccatatccgtcgcttctcggagtgagggtgagatcttgcaatcttccaacttgaaaagcttcagctataatgagctaagagcagccacaagaaatttccgcccggatagcgtcttgggggagggtgggtttggttcagtttttaatgggcggattgatgagca

SEQ ID NO: 231193 - DNA, 398 bp, Glycine max
caaccatgggtcaatactcaattcatcatcagcttgtggccatagtctcattatttatccttttgcttccaaatatccatgggtggggagacgatgggcatgtcattgtttgcaagattgcacaggctcgcctcagtgaagcagctgcagaggctgtgaagaaactgctgccaatatccgcaggaaatgatttgtccacaaagtgttcttgggcagatcatgttcatcatatctatccttgggcctctgctttgcactacgcaaataccccagaggccctctgcagttacaaaaacagcagggattgtgtagattacaaaaaaggaattaaggggcgatgtgttgtggctgcgattaacaattacacaacgcagctccttgaatatggcagtgacact

SEQ ID NO: 231194 - DNA, 374 bp, Glycine max
aatttggcgttcctgctttgcacatgagaaggaatgttggcctgagagttaggtccatggctaaggaagaacaaccaagtgagcctgcaaccccagttacaccgccaccatcagtagaacccaagccacagccagtctctgctccttcaccaaaggtgagcactaagttttctgatgtgttggcattcagtgggccagcacctgagaggatcaatggaaggttggccatgattgggtttgtggctgcaatggcagtggaagtagccaaagggcaaggtgtgttagaacaaatatccaatggtggcatcccatggttcttggggacaagtgtggtccttacccttgcttccttgattccactcttccaaggtgtc

SEQ ID NO: 231195 - DNA, 296 bp, Glycine max
aataaagcacagaacagttgaagtgaatggcataaaaatgcatgttgcagagaaaggagatggtccagtggtgttgttcctccacggcttccctgagctctggtactcatggcgccatcagattctctctctcagctccctcggctaccgcgccgtcgctcccgatctccgtggctacggtgacaccgaagcaccaccttcaatcagcagctacaactgcttccacatagtgggtgatctcgttgcgcttattgactctctgggtgtccaacaagtgttccttgtggctcatgact

SEQ ID NO: 231196 - DNA, 359 bp, Glycine max
gaaatttggaaaaagggttctgaaatcttagctactgactgcgtaatcactgagatctgccgtcatcctgggttggttttgttgacgggtgcttgctggagtaataggattaagtctgtgagtccttccaatacagggatcacttctagaagtgtcagcaggagtggccatgacgtcagcttaaatagcaggagctcatcagcctccatatccgtcgcttctcggagtgagggtgagatcttgcaatcttccaacttgaaaagcttcagctataatgagctaagagcagccacaagaaatttccgcacggatagcgtcttgggggagggtgcgtttggttcagtttttaagggctggat

SEQ ID NO: 231197 - DNA, 348 bp, Glycine max
gtagcattcagtgaaacactagctagggtattgggagctctcgttgtttcggagttagggaccttacgcagccatggccactgctacgaatgccgccgccgccccaccacgccagctctcccagaaggaagctgacatccagatgatgttggccgccgacgtccacctcggcaccaagaactgcgacttccaaatggaacgttacatcttcaagcgccgcaacgacgggatttacattattaaccttgggaagacgtgggagaagcttcagctagcagctagggttatagttgcaattgagaacccccaggatatcattgttcaatctgcaaggccttatgggcaaag

SEQ ID NO: 231198 - DNA, 359 bp, Glycine max
  unsure (1)..(359): unsure at all n locations
tgcatcgccgacgcttccaacaataacaatggccgataatgcaacaacgcaaggaagcaacaccctattttctccttacaagatggccaaattcaacctctctcatagggtggtgttggctcctatgacaagatgcagagcgttgaactggattccacaggcagcgcttgctgaatactacgctcaaagatcaacaccaggtggatttctcatcagcgaaggcaccttgatctcccccactgctcctgggtttccccatgttcccgggatatattcagatgaacaagtggaggcgtggcgaaacatagtggatgccgtgcatgccanaggcagcattatcttctgtcaactttggcatg

SEQ ID NO: 231199 - DNA, 378 bp, Glycine max
caagctcagaaaactcaccaccctcaaaactattgatgaaggagaaagtagcaagctgcagaagacgttgtcgatgccgtcgacaccaacaaccccgatgactccgacgactccaacgacaccgggatcggcccgtaaagctgacaacgtttggaggagcgtcttccatcctgggagcaactccgccacaaagaccatcggtgctcagatgtttgacaaaccacttcccaacactcccactgtctatgactggctgtacagtggggagaccagaagcaggcaccgctgaagctgaagtctttagctaagatgaccgtgggttgcatgtaaatattgtcgtttttcgttaagcatctgccacgtttgcagctactaata

SEQ ID NO: 231200 - DNA, 358 bp, Glycine max
  unsure (1)..(358): unsure at all n locations
aaaaatgaaaacccaaagtgcttctctcctctgtctttttctctctcttgctatccttttggctagtggcactgctgcaagtgcaactccaagaagcgcagtgccaagccaccatgtttcaacattcaacagaagcctttttccttccacttttctctttggaattggttcttctgcttaccaggcagaaggagcagcaagtgtagatgggagaggaccaagcatatgggacacctacactagacagcatactgaaaagatttgggatcatagcaccggtgacatgggagctgatttntatcatcgatacaagggtgacatanaaatagcgaaagaaattgggctggactccttcaga

SEQ ID NO: 231201 - DNA, 396 bp, Glycine max
gaaccctcgccgactacaacatccaaaaggagtccacgctccacctcgtcctccgcctccgcggcggcatgcaaatcttcgtcaaaacccttactggcaaaacaatcacgctagaggtggagtcctccgacacaatcgataacgtgaaagccaagattcaagataaggaagggattcctccggatcaacaacgtttgatcttcgccggaaaacaactcgaagacggcagaaccctcgccgattacaatatccagaaagaatcgactctgcatttggtgcttcgtctccgcggaaggatgcagatcttcgtgaaaaccctaaccggcaaaacgattacgctagaggtagagtcctctgacacaatccataccgtgaaagcgaggatccaggataagg

SEQ ID NO: 231202 - DNA, 365 bp, Glycine max
agcagcaatggtgtacgtcaaggctcagaaatcaaaagcctacttcaagagatatcaagtcaagttcaagagaagaagagagggaaaaaccgattaccgtgccaggattcggttgattaatcaggacaagaacaaatataacactccgaaataccgatttgtggttcgctttagcaacaaggacattgttgcacaaataatatctgctagcattgccggcgatttagttcttgctacagcatattcacatgagctgccacgatatggtcttgaagtaggacttacaaattatgcagcagcttattgcactggtctcctgttggcccgaagagtcctcaaaacacttgaaatggatgacgagtatg

SEQ ID NO: 231203 - DNA, 192 bp, Glycine max
tccaacgattaacctgccgaacccggtaaaaaaaaagcctggggccaaggcaacaaacttcgtccccggaaagtgaccgtcaaagaacgaaatgacttttgaaagttttaagatttgtgtttggtgaagtacttcagataatgtgaattatcttgtgtatccgaatccaacttaatgttacttgctttttac

SEQ ID NO: 231204 - DNA, 369 bp, Glycine max
acgagtggggtttcttccaagtaacaaaccatggagtgcccctcactctaaggcaaaacattgagaaagcctcaaaattgttctttgcacagagtgcggaggaaaagagaaaggttagcagaaatgagagctctccagcgggttattatgacacagaacacaccaaaaacgttagggactggaaagaagtctttgattttctagccaaagaacccactttcattcctgtcacttctgatgaacatgatgatcgagtcaatcagtggactaatcaatcccctgaataccctctaaactttagggttgtaacacaagagtatattcaagagatggaaaagctgtcctttaagattttagagcttatagctt

SEQ ID NO: 231205 - DNA, 371 bp, Glycine max
ccccggagactctgctggcacggtcactgcattttatttgaactctgacacgaactacgttcgcgacgagcttgatttcgagttcttgggcaaccgtactgggcaaccttacacagttcaaacaaacatctacgctcatggaaagggtgacagagaacagagggtcaacctctggtttgaccctgctgcagacttccacacctattcaattctctggaaccatcaccatattgtattctacgtggatgattttccaatcagagtatacaaaaacaacgaggctcgggggattccatacccaaagatgcaggcaatgggagtgtattcgacattgttggaagcaaattactgggccaaaaagggttgaattg

SEQ ID NO: 231206 - DNA, 371 bp, Glycine max; identical to SEQ ID NO: 231205

SEQ ID NO: 231207 - DNA, 371 bp, Glycine max; identical to SEQ ID NO: 231205

SEQ ID NO: 231208 - DNA, 384 bp, Glycine max
ctcttttatccctcaaaaaccaaaaccctaatggcagagcgcggaggtggcgaccgtggcagcgaccgtggcggtttcggacgcggctttggtgggcgagggcgcggaggtgacaggggccgaggccggcgccgaggtccccgccgcgaggaagaggagaaatgagtcccagtgaccaaactgggccgcctggtgaaggagggaagaatccgaagccttgaacagatctacctccactcgctcccgatcaaggagcaccagatcatcgacacgctcgtgggtcccaccctcaaggacgaggtgatgaagatcacgccggtccagaagcagacccgggccgggcagaggacccggttcaaggccttcgtcgtcgtcggagacaac

SEQ ID NO: 231209 - DNA, 348 bp, Glycine max
caaactcgtccccggagactctgctggcacggtcactgcattttatttgaactctgacacgaactacgttcgcgacgagcttgatttcgagttcttgggcaaccgtactgggcaaccttacacagttcaaacaaacatctacgctcatggaaagggtgacagagaacagagggtcaacctctggtttgaccctgctgcagacttccacacctattcaattctctggaaccatcaccatattgtattctacgtggatgattttccaatcagagtatacaaaaacaacgaggctcgggggattccatacccaaagatgcaggcaatgggagtgtattccacattgtggga

SEQ ID NO: 231210 - DNA, 383 bp, Glycine max
  unsure (1)..(383): unsure at all n locations
atcttgtcattcaccgagaaagtcgtactgattcctcttcatctttcgttaaagcgagtacttttcgttcttgatctgttggttacgatgtcgtattcaaggagatctaggtattctccttctccttctccttctccatacaagcgatacggtaggtctgtgtccaggtctctctcaatatcaagatccagaagccgttcaaggagtttatcaagagatgcagaaaatccaggaaacaatttgtatgtgacaggattgtctcctaggattaccaagagagaactggagaaacattttgctgctgaaggaaaagtgatagatgtccatctgatagttgatccttggacaagggaatcncgtgggtttggctttgtgacaatgga

SEQ ID NO: 231211 - DNA, 383 bp, Glycine max
ggagattcatgcctgagaaagggtctcctgaatatgatgcgtcagctaagaaccctgataaggagtttttgaagactattactggcaagaaagagaccctcattgaccttacaattatagaaattttatcaaggcacgcatctgatgagttcgaccttgggcagagagatggcggtgactactggacttctgatgccgggccattagaggcctttaagatgtttggaaagaatcttgaagagattgaatagaagcttatagagaagaacaatactgagacattgagaaaccgctatgggccggctaaaatgccttacactttgctctatccttctagtgacgagggattgactttcagaggaattcccaacagtatctctatc

SEQ ID NO: 231212 - DNA, 364 bp, Glycine max
ccaagccccagtcaaccaacacaccactctcactgctcttgatcgatctttcaagtcttcagggtattatgatggcaaatacattcatacttacctcagactcagtcaccgaaggacaggctgacaagctctgcgacgaaatctccgacgctgtcctcaatcgcttggcgtgaacaggacccagacagcaaggttgccagcgagacatgcaccaagaccaacttggtcatggacatcggagagatcatgaccaaggccaacgttgactacgagaagatcgtgcgtgacacctgcaggatcatcggcttcatcacaaacgatgtgggacttgatgctgacaactgcaaggtccctgtgtacattg

SEQ ID NO: 231213 - DNA, 385 bp, Glycine max
tattggagctgctaggggattggcttttcttcaccacaattgtatcccccacatcattcatagagatatgaagtcgagcaatgtgttacttgatgaaaacctggaagccagagtctctgattttggaatggctaggcttatgagtgctatggatacacatttgagtgtgagcacattggctggcacaccggggtatgttcctcccgagtactatcagagcttcagatgctccacaaaaggtgatgtctacagttatggtgtggttttgttggagctgctaactgggaaaaggccaacggactcggctgattttggagataataatcttgttggatgggttaaacaacatgccaagctgaaaatcagtgatatttttgacccggag

SEQ ID NO: 231214 - DNA, 269 bp, Glycine max
ggggagaagagagaaacgttgtattcagagatatggggaggggtaagattgagatcaaaacgattgagaactcaagcaacaggcaagttacctactcaaagaggaagaatgggatccttaagaacgcaaacgaaattagtgttctatgtgatgctcaagtttcccttatcatccttggtgtctctgggaagatgcatgagtacatcagcccctccactacgttgattgacctcctggacagataccacagagcctctgggaagaccctg

SEQ ID NO: 231215 - DNA, 330 bp, Glycine max
ctcgagccgtgctttcattgccgctgctggctctttcaatggctttggcacaaccggtgatgacaacactcgcaagaaggagattgctgctttcttggctcaaacttctcatgaaaccacaggtgggtgggcaagtgcaccagatggtccatatgcgtgggggtattgttttatcaacgaacaaaaccaggcaacttattgtgatggtgggaattggccatgtgctgctggtaaaaaatattatggccgaggaccaatccaacttacacacaactacaattacgggcaagctggcaaagcacttggtctggatttgataaacaatccgga

SEQ ID NO: 231216 - DNA, 392 bp, Glycine max
cgaagagcagtagaaagaaactagaatggccactttagacgaacgcccttctgcgaaaaggtggcttcctcttgaagctaaccctgaagtcatgaaccagttcctttggggtcttggccttccactggacgaggcagagtgctgtgatgtgtttggcttagatgaagagcttctggaaatggttccgaagcccgtcctcgccgtgctttttctttatccaattaccgcagagtccgaagaagaaaggttgcaacaggaaaacgataaacaggattatagcagcagagtgtattttatgaagcataccgtgggtaatgcttgtggtacaatatggttgcttcatgcacttgggatcataacctccgaagtcaagcttgtttagggggtcattc

SEQ ID NO: 231217 - DNA, 385 bp, Glycine max
acgcgtaagtaagctcggaattcggctcgggtctcaacagggggacactagatcttactcgcaatgggtggggtcatcgggttggtctgaaaggtgagggcaagaaagttttcagcgaggaaggatcaacaagtgtaaagtggaaaccacttggtgcagttccgagggctctgagctggtacaggacaagatttggcaccccagagggaacaggccctgttgccataaggatgagtggtatggcgaagggaatggtgtgggtcaacggtaacaacattggtcgctactggatgagttacctctctccacttggaaagcctactcaatcagagtaccacatcccaagattcttcctgaacccacaagaaaatttgcctgtgaattt

SEQ ID NO: 231218 - DNA, 406 bp, Glycine max
ctcatccttccttcgagacatgagatgaggccgatgcaactgccaccgccttccgcttccggggccaaccctgcccctgcaaccaccagcaacaacaacaaggagcagcgtccccagcgccgccgcaaggacctcacgctgccgctgccgcagcgagacaccaacttggcggtgccgcttcctctgccgccatcgacggcgcctgctgcggcggcgagcggcggagctagccagcaggcggcgcagcaggtgatccctttctcggagctggagagactgaaccgcatcgggagcgggagcggcgggacagtgtacaatgtggtccaccgcacgagcgggcgcgtgtacgcactgaaggtgatatacggtcaccaccaggagtcggttcagtggcagatccaccggg

SEQ ID NO: 231219 - DNA, 382 bp, Glycine max
gtcggcgacagcgaactacttccgtgtaatggcgacctccgtcgcagtcgccggcgctttgacggcgcatgatcgccggattctgacagcggtgaacgtcggagcgtcgagcctgtcgttggccggttccagcttcattgtagtgtgctacctcctcttcaaggagctccgcaagttctccttcaagctcgtcttcgacctcgctctctctgatatgctttgcagtttcttcggcataatacgggacgcgtccaaaggtttcttttgttatgctcagggctatagcacacatttcatttgtgtggcatcgtttctatggactacaacaattgcttttacccttcaccgcactgttgtaaaacataaaacagatgttgaagat

SEQ ID NO: 231220 - DNA, 367 bp, Glycine max
ttgtttgttgttgtaacacgttcttcttcttttgttgttctgtgtttgtgtttgttttttctctcacctgaaaatgtcttgctgcggtggtaactgtggttgcggaagctcctgcaagtgcggcaacggctgcggaggctgcaagatgtacccagacttgagctacactgagtcaaccaccaccgagaccttggtcatgggagtggcacctgttaaggctcaatttgagggtgctgaaatgggtatgcccgctgagaacgatggctgcaaatgtggaccaaactgctcctgcaacccctgcacttgcaagtgaggtgttgggagagcaagcttcaagcagagatagcgcttaattaggaatcatgat

SEQ ID NO: 231221 - DNA, 385 bp, Glycine max
tgatgatgaagtctgctatgtgtgcagtggtggttgtagcacttcttcttctggcggaggtggggcccatggctgaggctgtgacatgcaccccaacagagttgagtccgtgtcttccagcaatcacttccggtgctaaaccttccaatgcttgttgcacgaagctgaagcagcaaaaaccatgcttatgtggctacctcaaaaacgctagcttgaagcagtatgttaactctcctaatgcccgaaaaaccgttgcttcttgtgggattccctttccaacttgttaattaattaagccttcttataattaaagtgtgggatatatatatatatatagataaacagtttaatttatacacactttgatcctacaaagcatcttgaa

SEQ ID NO: 231222 - DNA, 397 bp, Glycine max
attccagtctccactggactctacatgaaccctcccactcctggtagcccctctggatcagatgtgagtgagtccagcgtactggttgcatcctcctcacatgttttccgacccgtgcctagaacaggcgcggttctaccacccgtagaaacaacaacgactttgtcttccaatgaccctccaacctcactttccctatccctccccggtgttgactcatccgaagtttccaatcgaacaactgagccgattcatgccgcacctcctccgccgccacagccacagccacagccacagccgttgaatactatccctttgctcccaatgatgacggtgccctcggtttctccgacggggatggcgccgtttaattttagcgcagagtttctggcggtga

SEQ ID NO: 231223 - DNA, 360 bp, Glycine max
  unsure (1)..(360): unsure at all n locations
atcggagacatgcaacggccatttgcatcctccgaagaagaccgcatccaaactctgagattttgaattaaaggtgccgccgggatggaacagttccggcatataggagaggtggttgggagtctgaaagcgcttatggttttgcgcgatgaaatccaaataaaccaacgacaatgctgtttgatcctggacatcttcggtttggcgatggagacgatcgcggaggagataaggcagaacctgaagctggaggagcgtaacacgaaatggaaggctctggaatttccgctgcgtgagctatgcanggttttgaagganggagagctttacataaggcagtgtttggattccaaagactgg

SEQ ID NO: 231224 - DNA, 336 bp, Glycine max
atgagaaccagttatgcagtgatgatcctgaaagtgatgatgaagccaaagatagtgatgttatatcagacgatgacgacgagagaagttctgatgacgaagctgatgttagtgatgctgatgaagttaagggggatgacattgaagacaatgaacaagctgatggagaggatagtgatgtttcagaacatgaagaagatggtgatctgcattctttaagtgatgatggacttgtgacaaaaagtacaatgaaagactcagcaaaaaagaggaagtttactgattttaatggtcaactgatagctgctgatacaagtctccgggctctgaagaaat

SEQ ID NO: 231225 - DNA, 419 bp, Glycine max
cccagatgaagatgactcgtgttcctattcatggcggattctcttggctatcattcaatgaagaaacgaccactactgatgatagttccttcaccatgactggcctgttggagcagttaaatactacaagagatttatctgactacttgtggtactccacagatgttgtgcttgatcccaatgaaggatttctgagaaacggaaaggatcctgttcttactgtgttttctgctgggcatgctttgcatgtttttataaatggtcagctatcaggaactgcatatggaagcttagaattccctaaactgacatttaacgagggagtgaagcttagagccggtgttaacaagatctctctactgagtgttgcagttggactcccgaatgtgggtcctcaatttgaaacatggaatgctggt

SEQ ID NO: 231226 - DNA, 192 bp, Glycine max
gagagatttgaaatgtaaatgccaagtgaaagtgaaaagtacagtccagttttagtgatctctttaatttatttgttcatagattaatatgatggtgtatgattgcttttctatttattgtggcatttttgtgttgtaccctgttgttgtgtttgcaataagtattagtaataaagcagcaaattcaatttc

SEQ ID NO: 231227 - DNA, 341 bp, Glycine max
gtgagctataagctagtttatcgtgaggagaatatgaagttgtttgttttctttgttgctgcagtagttttggtagcatggccatgccatggcgcaggctaccaaaggttccctctccgaatgaaaactggctatggtgagcgttcttcggaggtaaaatgcgcaagttttaggcttgctgtggaagcacacaacatccgagcctttaaaaccattcctgaagagtgcgttgaaccaacaaaggactacattaatggcgaacaatttagatcagactctaaaacagttaaccaacaagctttcttttatgccagtgaacgcgaagtccatcacaacgacat

SEQ ID NO: 231228 - DNA, 415 bp, Glycine max
gtttgttgttgtaactcgttcttcttcttttgttgttctgtgtttgtgtttgttttttctctcacctgaaaatgtcttgctgcggtggtaactgtggttgcggaagctcctgcaagtgcggcaacggctgcggaggctgcaagatgtacccagacttgagctacactgagtcaaccaccaccgagaccttggtcatgggagtggcacctgttaaggctcaatttgagggtgctgaaatgggtgtgcccgctgagaacgatggctgcaaatgtggaccaaactgctcctgcaacccctgcacttgcaagtgaggtgttgggagagcaagcttcaagcagagatagcccttaattaggaataatgataaactattaatgtgtacctaaaaacttaggttttaggtctgtgatggttt

SEQ ID NO: 231229 - DNA, 418 bp, Glycine max
  unsure (1)..(418): unsure at all n locations
ggagtctaaaggtgggaaaaagaagtctagtagtagtagtagtaaatcattgttctacgaagctcccctcggatacagcattgaagacgttagaccaaacggtggaatcaagaaattcagatctgctgcttactccaactgcgctcgcaaaccttcctgatatccatccagattgatagttcattgcatgcaaccatagttttattaggttttttcttctttgttttcaattaggtttttgctgctctccttcaaactccgtctttccgaatcctctctttgtgattgtgttctgttctgcttcctaccgcgatagtttctcttctgaagcatggccatggcggtttctgcaattggttctgaaggtttcgagaagaggctggaaatatcctttttnangccgggactttttgctgac

SEQ ID NO: 231230 - DNA, 339 bp, Glycine max
attccgctcgagctgctttgtgcacttcctgtcagatgcttgtggtttggattcagaatcaactataacacaagaacaccatcgagatagtattcacctgggtggatcagctgtcacaaagcttgccatgtcgatctttgatagtcattattagattgtacatagcatttatggattgccaaacatcacgtttactgttggtcacaaacctttcaccctcacccctgagcagtatattctgaaaactggacaaggcattgctcaactttgccttagtgggtttattgcttttgacattcctcctcctcaaggtcctctctggattcctggagatgtttt

SEQ ID NO: 231231 - DNA, 398 bp, Glycine max
acgtaaactcggaattcggctcaagcaaagtttcttcctttctctgccctttgtcttctctgacacatttggggccttgttgattgtgtttttgcaaaagggtatggcgaaggacgttgaggttgctgagcgtggctccttctctgggaaggactaccaggaccctccaccagcaccactcattgatgctgaggagctcacaaagtggtccttttacagggctcttattgctgagttcattgccactttgctcttcctctacattactgtgctcacagttatagggtacaagcaccagacggatcatgctgatgcgtgtggtggggttggcattcttggcattgcatgggcctttggtggcatgatcttcatccttgtctactgcactgctgggattt

SEQ ID NO: 231232 - DNA, 224 bp, Glycine max
ctgagagtgtgtgtgtgacttatggagtccaattcagagttcgacgtgattatcatcggagctggcgtcatgggcagctccaccgcctaccacgccagcaaacgcggccttaaaacccttctcctggaacagttcgacttcctccaccactgtggctcctcccacggcgaatcccgcaccatccgcctcacctatccccaacactactactaacctttagtcat

SEQ ID NO: 231233 - DNA, 397 bp, Glycine max
taaccattgaagaagtgcaatttcgtcctctaacactcttccaaatcatggctagctcactgcttgtgagggttgccagctgcatggttgtggtgtggatgtttagttttgggcacataattcccttggcagaagctgaaattccatgtggcagggtgcaaatcactgtggctccatgcatagggtacctaaggggtcctggtggaggtgtccctgcaccatgctgcaatggggttaagagcataaacaaccaagccaaaaccaccccagatcgtcaaggggtgtgtaggtgcctcaaaagcactgttttgagcttggctggactcaatcttgcaaccctttcagccctccctagcaagtgtgggatcaacttgccctacaggatcacccccaccat

SEQ ID NO: 231234 - DNA, 343 bp, Glycine max
ccctgttgacggaccctaatcctgacgatcctttggtccctgaaattgcccacatgtacaagacagacaggaacaagtacgagtcaactgccagaagctggacccagaaatatgccatgggttaagtgaccttgtggtatgtttgagggagagcctttctactctcagtgtttaggtctctcagcccttgtaggaatatttgtcgttttaaatcatgattaaggcccctccagttgaagatgaatgggggaaaacgtttctcctgctgtttgtattgcaaatgttcatggtaatttagaacagtgaaatgttgccccaattaaatgttatgcccaagttttta

SEQ ID NO: 231235 - DNA, 422 bp, Glycine max
cgaggagttagagcatcagattttggtcccaaagcaagcttttggatggattttcctaaagaaggttctcaattaacacctactcatcagtcagatgattttaaatggaaagattattgtcccatggtgtttaagaatttgagaaaactggtcaagattgatgctgccgattacatgatgtccatttgtggaaacgatactctgagggaactatcttctccggggaaaagtggtagtgtcttcctcctgtctcaagatgatcgtttcatgatcaagacactgcgaagatttgaagtcaaagtcctttcaagaatgcttccagactatcatcatcatgtgaagtcatatgaaaatacacttatcacaaaaattttttggtctgcacaggattaaaacttcaagtggtcaaaagtttcgctttg

SEQ ID NO: 231236 - DNA, 337 bp, Glycine max
cgaggagttagagcatcagattttggtcccaaagcaagcttttggatggattttcctaaagaaggttctcaattaacacctactcatgagtcagatgattttaaatggaaagattattgtctcatggtgtttagaaatttgagagagctgttcaagattgatgctgccgattacatgatgtccatttgtggaaacgatactctgagggaactatcttctccggggaaaagtggtagtgtcttcttcctgtctcaggatgatcgtttcatgatcaatacattgcgaagatctgaattcaaggtccttctattaatgcgtccagactatcatcatcatg

SEQ ID NO: 231237 - DNA, 379 bp, Glycine max
ctcaaggagcatgtgatcaagccggtgatcccggagaagtaccttgatgagaagaccattttccacttgaacccctctggccgttttgtcattggaggtcctcacggtgatgctggtctcaccggccgcaagatcatcatcgatacttacggaggatggggtgctcatggtggtggtgccttctccgggaaggatcccaccaaggttgataggagtggtgcttacattgtgagacaggctgctaagagcattgtggcaagtggactagccagaaggtgcattgtgcaagtgtcttatgccattggtgtgcccgagcctttgtctgtctttgttgacacctatggcaccgggaagatccatgataaggagattctcaaca

SEQ ID NO: 231238 - DNA, 173 bp, Glycine max
aggtttaactgccaaagtgattgaccccacaatgattatggatgatgtttatggtgatttttttgattttgcatctatgttggtatccaacgttgacaataactatcccaatgcatcaaatagatttatcaagctgctagctattgagaaaacttgcagacaatctggtctct

SEQ ID NO: 231239 - DNA, 417 bp, Glycine max
ttatcatttctccatttccattttctctctcacttttcaagaatcgtaagctatgggaaagtcttacccaactgtgagtgctgattaccagaaggccgttgagaaggcgaagaagaagctcagaggcttcatcgctgagaagagatgcgctcctctaatgctccgtttggcatggcactctgctggaacctttgacaagggcacgaagaccggtggacccttcggaaccatcaagcaccctgccgaactggctcacagcgctaacaacggtcttgacatcgctgttaggcttttggagccactcaaggcggagttccctattttgagctacgccgatttctaccagttggctggcgttgttgccgttgaggtcaccggtggacctgaagttcattccaccctggaagagaggacaag

SEQ ID NO: 231240 - DNA, 383 bp, Glycine max
cttacttaaactcaggaattcggcccaaaaaataaggcaatgaacctgatccaggcggttccctacaacccctacgggggaggtcctgccggcctcaagcacgttgaagttgccgttcccagtccaaaggcaaatgaggttttaatcaaactggaagcagttagcattaaccctattgattggaagattcagaagggtcttctccgtcctttatttctccccagaacctttccccacataccttgcactgatgtggctggagaaatagttgagatcggaactcaagtcaaagatttcaaagttggcgaccaagtccttgctaaactcactcatcaatatggaggtgggtttgccgagtttgctgtggctagtgagagcttaac

SEQ ID NO: 231241 - DNA, 388 bp, Glycine max
aattctttcatcatcaatgatataaactccttgctcctcttgactcattcattcactcccaatatgatggaattggaagccaccgccgctacttccccaccttctcgcgttctcctcatctccgccggtgccagccacaccgttgcccttctctctgggaatgttgtgtgttcgtggggtcgcggagaggacggacagttaggccatggtgacaccgatgataggcccttacccacgcagctcagtgcattggatgcccaacacattgattctattgcctgtggagctgatcatacccttgcgtattccgaatcacgcaatgaactctatagttggggatggggtgattttggaaggttgggtcatggcaattctagtgatttgctca

SEQ ID NO: 231242 - DNA, 387 bp, Glycine max
tccagcagcaatggtgtacgtcaaggctcagaaatcaaaagcctacttcaagagatatcaagtcaagttcaagagaagaagagagggaaaaaccgattaccgtgccaggattcggttgattaatcaggacaagaacaaatataacactccgaaataccgatttgtggttcgctttagcaacaaggacattgttgcacaaataatatctgctagcattgccggcgatttagttcttgctacagcatattcacatgagctgccacgatatggtcttgaagtaggacttacaaattatgcagcagcttattgcactggtctcctgttggcccgaagagtcctcaaaacacttgaaatggatgaggagtatgaaggaaatgttgaggctac

SEQ ID NO: 231243 - DNA, 383 bp, Glycine max
  unsure (1)..(383): unsure at all n locations
cgggccgtgctcgacgatggcggccccggcccagcctccaacggggacgcggcggtggctgcaaggcccaagaccaagccgaaggacggggaaagcggtggcggtggtgacggcgaggaccccgagcaggccaagctccgggccgggctcaactcggccatcataagggaaaagcccaacgtgaagtggaacgacgtcgcagggttggagagcgccaaacaggccttgcaggaggctgtgattttgcctgtgaagttccctcagttctttactgggaaaagacgaccctggagagctttcttgttgtatggacctcctggaacgggaaaatcatatttagccaaggcagttgcaacagaagctgagtccacgtntttcagtgt

SEQ ID NO: 231244 - DNA, 380 bp, Glycine max
aaacaagctgtggctgtaaaaagtcagttgcagctgattgctagacccatgtacagtaacccacctctccatggagcacttatagtttctactgtccttggtgatccagatttgaagaagttatggcttaaagaagtcaaggttatggcagaccgcatcatcggaatgaggactacactacgagaaaacttagaaaagaaggggtctactttgccatggcagcatataactaatcagattggtatgttctgctacagtggattgacacctgaacaggttgatcgtatgacaaacgagtttcatatttacatgacccgtaacggtcgtatcagtatggctggtcttaatacgggcaacgttggatatgttgctgacgctat

SEQ ID NO: 231245 - DNA, 391 bp, Glycine max
atccggcccaaaatcaatcctggtccaacctttttttttccttttaaattttccttaaaaattcccaaccgaacaaagatcttcaacaaaccggttaagtttgtgtagtttggtaagatgggtggtggatttagagtgcttcacttagttagaccatttctctcgtttcttcctgaagttcagactgctgacaggaaagtgccatttagagagaacgtcatatatactgtgatctctctgttcattttccttgtttgcagtcagcttcctctgtatggcatacactcaacaacaggtgctgatccattctattggatgcgtgttatccttgcttcaaaaccgtggaactgttatggagctgggaatcacccccattgtgacttctgggctg

SEQ ID NO: 231246 - DNA, 363 bp, Glycine max
tttgccttcaaatctcactgccagcagaaaccccagcttggattatggattcaagggagctgaaattgccatggcatcttattgttctgaacttcaatatttggcgaatccggtgacaagccacgtgcaaagcgcggagcaacacaaccaagatgtgaactctctggggctgatttcatcaaggaagactcatgaggctattgagatcctcaagctcatgtcctccactttcctggtcgccctttgccaagccattgacttgaggcatttggaggagaatttgaagaacacggtcaagaacgttgtgagtcaagttgctaagaggactctcaccacaggtgtcaatggagagcttcacccttc

SEQ ID NO: 231247 - DNA, 391 bp, Glycine max
gtgccgcagaagttcgcatttacggggatcctgattttacttttccgtatgttccagctcacttgcatcttatggtatttgagttggttaagaactcgctgcgtgctgtccaagagcgttttatggactctgacgaagttgctcctcccattagaataataatagcagatggaatagaggatgttaccataaaggtctcagatgagggaggtggaataccaaggagtggtcttccaagaatttttacatatctctacagtacagccaaaaactcatcgtcagttgaacatgaaccttctgatattggaacaatggaaaatgtaactatggctggatatggttatggacttcctatttgccgcttgtatgctaggtattttggtggtgatct

SEQ ID NO: 231248 - DNA, 346 bp, Glycine max
  unsure (1)..(346): unsure at all n locations
cacaacccatggccaccacctccgcattcctcctccttcccctcctcctgctgctccacctcgccatcgccgctcacggcatcggcatcaactacggcacgctcggcgacaaccttccaccgcccgcggcggtggcgaacttcctgaagacgaagacgaccatcgaccgcgtgaagatctacgacgtgaacccggacatcctgcgggccttcgccggcagcggcatctccgtgacggtgaccgcccccaacggcgacatcgccgccttaaccaaaatcgactcggcgaggcagtgggtggcgacgcacatcannacctttcnaccctcagacannattaattacat

SEQ ID NO: 231249 - DNA, 388 bp, Glycine max
gcagagtagagcagcacagaagagggaaaacggcaccgccgccgtagaagaaaacaaccatggtgcacgtctccttttacaggaactatgggaagacattcaagaagccgcgtcgtccgtacgagaaggagcgtctcgacgcggagttgaagctggttggtgagtacgggcttcggtgcaagagagagctgtggagggtgcagtacgcgctcagccgcatccgcaacaacgcgcggaacctcctcaccctcgacgagaagaacccgcgccggatcttcgagggagaggcgctgctccgaaggatgttccgttacggtctcctcgatgagacacagaacaagcttgattacgtcctcgccctcaccgtcgagaactttctcgagcgccg

SEQ ID NO: 231250 - DNA, 381 bp, Glycine max
agctgctgttcttgcgcgtgaacaagcctcaggtaagccaaaaccatggttaagcataacaatgttatcccaaacggacacttccgtaagcactggcagaactatgtgaagacttggttcaatcagccagcacggaagacaaggagacgattggctcgtcagaagaaagctgtgaagatattccccagacctacggctggacctctcaggcccattgtacatggtcaaactttgaaatacaacatgaaagtgagaggtggaaggggattttctcttgaagaactcaaggcagcagggattcccaaaaagcttgcaccaaccataggtattgctgttgatcatcgtcgcaagaaccgttctttggaaagtctgcaagctaat

SEQ ID NO: 231251 - DNA, 418 bp, Glycine max
ctcgagccggatcctgcacgttcagggaggccaatgcggtaaccaaatcggttccaagttctgggaggtgatatgcgacgagcacggcatcgatcctaccggaaagtacaacgacgaaggcaacagcggcatccaactcgagaggatcaatgtctattacaatgaggcctctggcggaaggtacgttccgagagccgtgcttatggatctcgaacctggaaccatggacagcatcagatctggcccctacggcaagatcttccgccctgacaacttcgtcttcggccagtccggcgccggtaacaattgggccaaaggtcattacaccgaaggcgccgagctgatcgactccgttctcgatgtcgttcgcaaagaggctgaaaactgcgattgcctgcaaggttttcaagtttgccac

SEQ ID NO: 231252 - DNA, 412 bp, Glycine max
  unsure (1)..(412): unsure at all n locations
ctttgttctttttgtttttttttttttaatttaaatgcacatgcagtctcttacttatatttatgtttacaaggtctaaacctcatagatgtaataattctggtgaaaattgcagataattagggaaatagcgaccttaaagctcctacggcatcccaacgttgttagattatatgaggtcttggctagcaaaacaaaaatttatatggtacttgagtacgtgaatggaggggagttatttgacataattgcatccaaaggtaaacacatcgaaggtgaaggtagaaagctgttccaacagttaattgatggggtgagctactgccacactaaaggtgtcttccacagggatctcaagcttgagaatgtactagtggataacaaagggaacatcanaataactgattttggt

SEQ ID NO: 231253 - DNA, 287 bp, Glycine max
  unsure (1)..(287): unsure at all n locations
gttttggatttggttccctctattgatctcatccctgccaaattggggagaaagggtcatgtttgttttggccagttttgctgtttgctccatccaacaccttcaattttgtttgaaccatttcgcagcagatgtgtatgagggcccaccaaatggcaatgactggtttgagaagcaaactggtggcacattggacatctcttgctctacatggatggattggttctttggcggcttgcaattccaacttgagcaccatttgttccctangctcccaaaggcacaat

SEQ ID NO: 231254 - DNA, 374 bp, Glycine max
tagttagcctcttcttgtttctcctgcaatcaacgacacccccccaaaaatgacaggagagacagtgaacccaaaagcttaccctttggccgatgcgcaactcgcaataacaatactggatcttgtgcaacaagctgccaactacaagcaactcaaaaagggtgctaatgaagcgaccaagacactgaacagaggcatctctgagttcgttgtgatggccgcggacactgagcctcttgagattcttctccatcttcctctcctagctgaggataagaatgttccctatgtattcgtcccatcaaagcaagcccttgggcgagcatgtggagtcacacggccagtgattgcatgttctgtaacaactaatgaag

SEQ ID NO: 231255 - DNA, 385 bp, Glycine max
  unsure (1)..(385): unsure at all n locations
agaaaatgaaagtcattgttttcttcgttgctataataattttaggtgcagaatggcaatgcaatgggtcagagcatgagcatgagcatggccacagctaccaaattttccctttgcgaatgaaaaccggccccggtggccactacattccggaggtatcgtgcaaaagttggaggcttggtgtggaagcacacaacgtcattgactggagaaccattcctcaagattgcgagggatatataggaaactacatgcttggccaccaatatagatcagactccaaaacagtttgccgtgaagcttatttttatgctaaaaccatcaacatcactgccaaaaccacatgggtgtntgatgtagatgagactacactctctaatctccc

SEQ ID NO: 231256 - DNA, 311 bp, Glycine max
cactcgcaagcaaaaagaaagaatcccaggcgaggagaaagatggaggggaaggagcaggatgtgtcgttgggagcgaacaagttccccgagagacagccgattgggacggcggcgcagagccaagacgacggcaaggactaccaggagccggcgccggcgccgctggttgacccgacggagtttacgtcatggtcgttttacagagcagggatagcagagtttgtggccacttttctgtttctctacatcaccgtcttaaccgttatgggagtcgccggggctaagtctaagtgtagtaccgttgggatt

SEQ ID NO: 231257 - DNA, 424 bp, Glycine max
  unsure (1)..(424): unsure at all n locations
acgcgtacgtaaactccgngaattcggctccaagcaaacaacgcaatgggtattccgtcggaactgagggacatgttgttgcccaacaaaaagggcgtcctcgttgcctctcccgcagaggacaggaagactttgaggtccaagcaatgcactatggaaagtgtgcgagctggattcaaggctgcttccattgctggtgttgccagtgctgtgcctacattggctgcagttcgtatgattccatgggcaaaggcaaacctcaattatactgctcaggcacttatcatatctgctgcatccatcgcctcatacttcatcactgctgataaaactatcttggagtgtgcaaggaaaaatgccaagcttgaagatgctttgagacacaatcaacaatagttgtcttagaaactgaaagaagtaccat

SEQ ID NO: 231258 - DNA, 335 bp, Glycine max
gcactatgctacaagcccaacaaacttggctttaattggtataggcgtgccaacgtcttgttaattttgagcgttaagtgctgcaactaatcagatcccaagaccttggcctaccttgccatacagaaaaacagaaagcaaatcaaaaaagccaaggtttggagccaacacaaataatcacaaagcacaagtcatggaaagaataatggttggaactgcaacaaaggttgctttcaccctcttggccactttcgccattgtcattccatgccttgaggctggcattgctgagtttgacgattttctcaaagcccaagctgatgaagcccataaaa

SEQ ID NO: 231259 - DNA, 383 bp, Glycine max
gccactttctgagtacaatacaacactgccatggctgcctcagtctccactattggagctgtcaacagagctccactgagcttgaacagctctgaagctggagattcggttcccagttcagccttctttggcacaagcttgaagaaggttactgcctcaagggtccctaacgtcaagatttcttctggaagtttcaaaatcgttgcggcggagaaagagattgatgagcaacaacagacaaacaaggacagatggaaaggtcttgcctatgatatttcagatgaccagcaagacatcacaagaggaaagggtatggttgattccctcttccaagctccacaggagactggaactcactatgcagtcatgagctcttttgagta

SEQ ID NO: 231260 - DNA, 443 bp, Glycine max
  unsure (1)..(443): unsure at all n locations
atagaagagtactgacgtcggacgcacgcgtacgtaaactcgaaanttngggctnnngggnaggatttgtgtttagggggggtgtttggggggttctcttcagcttcggttaagcgagtacttttcgttcttgatctgttggttacgatgtcgtattcaaggagatctaggtattctccttctccttctccttctccatacaagcgatacggtaggtctgtgtccaggtctctctcaatatcaagatccagaagccgttcaaggagtttatcaagagatgcagaaaatccaggaaacaatttgtatgtgacaggattgtctcctaggattaccaagagagaactggagaaacattttgctgctgaaggaaaagtgatagatgtccatctgatagttgatccttggacaagggaatcncgtgggtttggctttgtgacaatgga

SEQ ID NO: 231261 - DNA, 359 bp, Glycine max
acccagcatatctctctattcctatttattagcacccctcacattaccttgtgtcaccatctactttgactcctttaccataccattagagggggtatcaaacctaaccagtaaaaatggtgaccgtggaggaaatccgcaacgctcagcgttcccatggacccgccaccagcttggccttcggcaccgccacgccgtccaactgcgtctcccaagccgattaccctgactactacttctgcattaccaacagcgaacacatgactgatctcaactaaaagttcaagcgcatgtgtgagaagtccatgataaagaaccgatacatgcacctgactcgacgactttctgaacgagaaccc

SEQ ID NO: 231262 - DNA, 362 bp, Glycine max
tctgcccaaagctaaggagatcgtgtcgtccaattccgtcgtcgttttcagcaaaacctattgccctttctgcgtcgatgtgaagaagctcttcggtgacctcggtgccaattacaaggccatcgaactcgacactgaatccgatggaaaagagctccaagcagcattagttgagtggacggaccagcgaaccgtgcctaatgtgtttattggtggaaaccacattggtggctgtgactcaacaactgccctgcacactcaggggaagctggttcctctgctgatatctgctggagctgttgccaaatcaactgcttaaaggatctcccatttctaggttatgcagttaaataaaaataaaa

SEQ ID NO: 231263 - DNA, 395 bp, Glycine max
  unsure (1)..(395): unsure at all n locations
gtgccaatggtgggttcagatatatgtggcttctatccacagcccactgaagagctatgcaatagatggattgaactatgggctttctaccccttttcaagggaccatgcaaactactactcccctagacaggagctttaccaatggcagtcagtagccgagtctgcgagaaatgctttgggtataacgtataatctactcccattccattacaccctgaactatgaagctcatgtcagtggagccccaattgccagacctcttttcttcgcatttccaacttacaccgaatgctatggccttagcacccagttcttgctaggaggcagtctcatgggttctccagtgcttgagcanggaaaaacacaattgaaatcactctttccccctggtag

SEQ ID NO: 231264 - DNA, 308 bp, Glycine max
gtcctctcgacatgagtcacatttggctaccttcagatactgggatactaagcagtcatgtccagtgcagacacagctactcgcatagcgctgctatgctatgacagtgagacatcctctgatggctgttggcactgctgatagatatcatactgtttacaacttgcagaaacctcaggttgatttcaagagaaatgtttcacccttgaagtatcaaataaagtgccatgctgcattccctgaacaacaaagtttcatggctcgattcatagcatgtacagttggggtggatcacttgggccatagtc

SEQ ID NO: 231265 - DNA, 429 bp, Glycine max
cccttacttaaaccccggaatccggcccaaggaatcccccttattcacgattttggaaaaactgttgatatagaaaggtaggatataccactggccacagaatatatggcgcttttctatggtttcattgttagcaacattatgctgcttttcagttcagcatttgccaaaactgctactcctccctctctgagcccaactccatcaccagccccggcacccgactacgtgaacctcaccgagttgctcagtgttgctggtccatttcacaccttccttggataccttgagtccatcaaagtgattgacactttccaaaaccaagccaacaacactgaagaatgaattaccatctttgttcctaaggacagtgccttcaatgctgtaaagaaaactgtcctatccaacctcacctccgaccaaccaaag

SEQ ID NO: 231266 - DNA, 278 bp, Glycine max
gaagccacatagagacacaatacagagtgagttgttgctccttcgccacaactctctgccaacatgggtatctccagagattctatgcacaagaggcgtgccactggtggcaagaagaaggcctggaggaaaaagagaaagtatgagcttggtcgccagcctgctaacactaagctgtcaggcaacaagacagtcaggaggatccgtgttagaggtggaaatgtgaaatggagggcattgagattggatactgggaaattactctgggggaagtgaac

SEQ ID NO: 231267 - DNA, 365 bp, Glycine max
  unsure (1)..(365): unsure at all n locations
cggagagctcccgctgactgcgatcggatttcatggctcctaagaaagacaaggctcccccaccttcatccaagcccgccaagtctggtggtgggaagcagaagaagaagaagtggagcaagggaaagcaaaaggagaaggtgaataaccaggtgctgttcgatcaggctacctatgacaagctcctctccgaggcacccaaatacaaactcattactccttccattctctctgaccgtttgaggattaatggatcacttgcaaggaaggctattanggaattgatggccagaggttcaataaggatggtgtctgcccatgctagtcagcagatttacactagagcgacaaacacctagatgtac

SEQ ID NO: 231268 - DNA, 318 bp, Glycine max
gagcagtggagccctgcgctaactatttcaaaggtgttgctctcgatttgttccctgttgacggaccctaatcctgatgatcctttggtccccgaaatagcccacatgtacaagacagacagaaacacgtacgagtcaactgccagaagctggacccagaaatatgccatgggttaagtgacctgtggtatgtgtgaggaagagcctttctactcgcagtgtttaggcctctcagcccttgtatgaatatttgtcgttcttaagaaggcccctccagttgaagattaatggagcaaaacgtctctcctgtcgtttgta

SEQ ID NO: 231269 - DNA, 385 bp, Glycine max
ctcttggcatcttgtgttgtgtccctcttttaagctaattccttctcttaacacaattggttgtgccaattgccatagtcaccaaccaattaacaaaggtatatatatcatcatatcatcaccaaatgaaaaatattgggttgttttttcttgtggtggtggctacttttgtggtggcagccacagctggtagcttttaccaagactttgaaataacgtggggtggtgagcgtgccaaaatctatgagaatggaaaccttctcacactctcccttgacagagcctctggctctggctttcgttccaaaaaagagtacttgttcggaaaaattgacatgcagctcaagcttgtgcctggtaactctgctggaacagtaactgccta

SEQ ID NO: 231270 - DNA, 384 bp, Glycine max
ctcttggcatcttgtgttgtgtccctcttttaagctaattccttctcttaacacaattggttgtgccaattgccatagtcaccaaccaattaacaaaggtatatatatcatcatatcatcaccaaatgaaaaatattgggttgttttttcttgtggtggtggctacttttgtggtggcagccacagctggtagcttttaccaagactttgaaataacgtggggtggtgagcgtgccaaaatctatgagaatggaaaccttctcacactctcccttgacagagcctctggctctggctttcgttccaaaaaagagtacttgttcggaaaaattgacatgcagctcaagcttgtgcctggtaactctgctggaacagtaactgcct

SEQ ID NO: 231271 - DNA, 362 bp, Glycine max
ggaaccaaagtcagcttcacctaataagaagacttccaaaccagcaaaaaaagtcaagaaggagagcgaagacttgaacaaggttatgtttggcaagtcacatgagtggaagagtggtcaggaaatggtcaatggaggtgatgatcttaacaagcagttaactgtgtcaaaggctgattggaaaggacaggacttggggttaaaccaagtggcgtatgacgagtcaaccatgccagctcctgtgtgctcttgtactggtgtcctgaggcagtgttacaaatggggtaatgggggttggcagtctgcctgttgcacaactactctgtcaatgtatccacttcctgcagtgcccaacaagagac

SEQ ID NO: 231272 - DNA, 380 bp, Glycine max
ttcactctcaaactcttccacaagaacatcaccttcctcattggccctgaggtttctgcacacttcttcaaggcctcagagactgatctcagccagcaagaggtgtatcagttcaatgtgccaacttttggacctggggtggtctttgatgttgattactctgtgaggcaagaacagttcaggttcttcactgaggctcttagggccaacaagctcaagggttatgtcaatcagatggttgcagaagctgaggactatttctcaaagtggggaccaagtggtgaggttgatttgaagtatgagcttgagcatctgatcatcttgacagccagtagatgtctcttggggcgtgaagttcgtgacaagctctttgatgatgt

SEQ ID NO: 231273 - DNA, 378 bp, Glycine max
agagaatggctcccaagggtttaacctttctggctgtgttaatatgcgtttcagcactgtcactgagtccttctgttgcgggggaagggcaaaataatggccttgttatgaacttctacaaggaatcatgccctcaggctgaagacatcatcacagaacaagtcaagcttctctacaagcgccacaagaacactgctttctcctggctcaggaacatcttccatgactgtgctgttcagagttgtgatgcttcactgttgctggactccacaagaaggagcttgtctgagaaggaaacagatagaagctttgggttgagaaatttcaggtacattgagaccatcaaagaagctttggaaagagaatgccctggagttg

SEQ ID NO: 231274 - DNA, 400 bp, Glycine max
attcggcccaagctcttcttcccttgcggctagggttttagcgcagcttcttctaaatttaaggaagatgggtaaggaaaaggttcacatcagtattgtggttattggccatgttgactctgggaagtccactaccactggccacctgatctacaagcttggaggcattgacaagcgtgttattgagagatttgagaaggaagctgctgagatgaacaagaggtctttcaagtatgcctgggtgcttgataagcttaaggctgagcgtgaaagaggaatcacaattgatattgccttgtggaagtttgaaaccaccaagtactattgcacagtcattgatgcccctggacacagggatttcatcaagaacatgatcactgggacatcccaagctgactgt

SEQ ID NO: 231275 - DNA, 364 bp, Glycine max
agaaaatgtccaatcatctgacttgaacactggaggttctcatgttcttagtcatgtgtctccaccaaagtcatcaagcttctttgcagactttggaatggatggtggctttccaaagaaatctgggccaagttcctccaaagtgcaagtaagccatatgcttgcaactttggtctctgcaatgttatctcttatgcatccagttagcatacaggattaagttatatataaatatctagtctacattcacttcaacatttttttacatcatacagatccatggaacaaaacatggtcaacattgggagaaagtgttttcaagtgttttgtaaaaaataaatgctagcatacacatagaatgata

SEQ ID NO: 231276 - DNA, 384 bp, Glycine max
ctcgagccgaatcggctcgagcccaaaccctagttttgtcagtagcacacttcacccatggcagtagcagcagctcgccctatcgtctccgtccaaaccctatagggcgatgcaacccccaccgttcctcttcccgacgtcatgaaagcctccattcggcctgacatcgtcaatttcgtccactccaacatttctcgcggccaccgcatcgagtccgtcccggaactccccctcgtcgtcagcgacaccgtcgaaagcgtcgagaaatccaaagaagccgtcaaaattctccagaaaatcggcgcattcacagacgcggagaaagctaaactcagtcacggaattcgtcccgggaagggaaaaatgaggaatcgcaagtatatc

SEQ ID NO: 231277 - DNA, 376 bp, Glycine max
gaaaacgaaaaggagaagatgaaatgggatatgcagatggaggaaatcgaagcgattatggagaaaatttgggacctccacgataagctcagcgacgccattcactccgtctccagatcccactttctcacttccgtcaaaaccctcaaactcaacaactctccaccgcaccttcccaacgccgccgtcgccgctgccgatgaccgctcctccggtttcgttttcgtcaaggactttagaccgctcgccgtcgccgataacgacaacgatgacgatgactccgccgtccgcgaagccaagagcctcaacgccatccggaccgccctcgagaacctcgaagaccagctcgagttcttccatactattcaaacccagc

SEQ ID NO: 231278 - DNA, 390 bp, Glycine max
atcctctctttgcgattgtgttttgatctgcttcctactgcgatagtttctctactgttacatggccatggcggtttccgcaattggttttgaaggtttcgagaaaaggttggaaatatcctttttccagccgggactttttgctgaccctgaaggaaggggtctaagggctcttacaaaatcccagttgggtgagattctaacaccagctgcttgcaccattgtttcttcgctcaaaaacgataatgtcgactcctatgttctatctgagtccagcctctttgtttatgcctacaagatcatcatcaaaacctgtggtactactaagctattgcttgcaatcccacccataattaagttcgctgaaatggcttcccttaaatgttaagt

SEQ ID NO: 231279 - DNA, 384 bp, Glycine max
agaaattgagggcttatgctgaaagaatcaggcttgctgagcttgagaagtgcttaggtaagatgggtgatgatataccaaagaaaacgcggagagctgtggatgaccttagtcggggtatagtgaataagttgcttcatggtccaatgcaacatttaaggtgtgatgggaacgacagccggactcttagtgagacactggagaacatgaatgctttgaataggatgttcaaccttgagacagaaatatctgttttggaggagaagattcgagcaaaggtcgaacaaaaccagaaatgaaatctaacaccaatcagactgatttattttctcctttagaataagaggaaacatcctcaccttttagtattaatcatcctgcaat

SEQ ID NO: 231280 - DNA, 374 bp, Glycine max
  unsure (1)..(374): unsure at all n locations
cccccaactccaacctctgttcatcgtctaccgcgctttcttttcaaccagaactatgattaagctttttaaagtaaaggaaaagcagagagaacttgcagaaaatgcaagtggcggaccacctgttaagaagcaaagtgctggagagttgcgtcttcacaaagatataagtgagctgaatctaccaaaatcatgtaccatgcaattccccaatggcaaagatgatctgatgaactttgaagtttcaattcgacctgatgatggatattacttaggtggcacatttttgttttcctttcaagtgtctcccatctatccacacgaagcaccaaaggttaagtgtaagacaaaggtctatcatccanatattgact

SEQ ID NO: 231281 - DNA, 280 bp, Glycine max
cccccaactccaagctctgttcatcgtctaccgcgctttcttttcaaccagaactatgattaagctttttaaagtaaaggaaaagcagagagaacttgcagaaaatgcaagtggcggaccaactgttaagaatcaaagtgctggagagttgcatcgtcacaaagatataagtgagctgaatctacgagaatcatgtagcatgcgattccccaatggcaaagatgatctgatgagatttgacgttacaggtcgacgtgatgatggatatgacgtaggtggc

SEQ ID NO: 231282 - DNA, 400 bp, Glycine max
gagaagaacagaacaaaatcgcgatgaaccctaattgatttattgattcattttcattcccatggcgtctcgaataggtggagtctcactcccagacagacctagcaacaactcaagctccgtcctcgcgaagatctcgcgctcctccatcgtcactcgcggcaaggaagccgccggcgacgccgcattcgtcgccaagaagctcctccgcagcaccggcaatgccgcgtggatcgccggcaccaccttcctcgtcctcgttgttcctctcatcgtcgagatggaccgcgagcagcagctcaacgacctcgagctccagcaggccagcctcctcggcacccccgcccccaaataaaatttgaggttttctctctgatctgatttaccctgtttggacact

SEQ ID NO: 231283 - DNA, 328 bp, Glycine max
acggacgcttacttaaacccggaattcggtccaagctgctttgtgcacttcctgtcagatgcttgtggtttggattcagaatcaactaaaacaaaagaagaccaaggagatagtattcaactatgtaaatcagctgtgcgagagcttgccaagtccaaatggagagtcagtagtagactgtaatagcatttatggattgccaaacatcacgtttactgttggagacaaacctttcaccctcacccctgagcagtatattctgaaaactggagaaggcattgcagaagtttgccttagtgggtttattgcttttgacattcctcctcct

SEQ ID NO: 231284 - DNA, 403 bp, Glycine max
aggtcgacactagaggatcccctcggggaattccaattccacattttcaagaaataaggaggcaaaaatgttcatatatgaattggaattatttgttttcttattaggcctatcctgaagccaaaggaaatgagatcggaattcctcggggaattccaattccacattttcaagaaataaggaggcaaaaatgttcatatatgaattggaattatttgttttcttattaggcctatcctgaagccaaaggaaatgagatcggaattcctcggggaattccaattccacattttcaagaaataaggaggcaaaaatgttcatatatgaattggaattatttgttttcttattaggcctatcctgaagccaaaggaaatgagatcggaattcgtcgggggtaccg

SEQ ID NO: 231285 - DNA, 340 bp, Glycine max
gagctttcttcaattggtttaatgccagaagactggggcggtgacatcccaatggttccgataagtgctctcaaaggaaagaacataaattattttttggaaactgttatgcctgttgcccaatttccaaaactgaaagctaatcctgataaaaattccaaaggaaactgtgttgaggcggggctagataaatcaaagggaccattcgcttcatttattgtgcagaatggcaccctcagacggggagatatagtagtttgtggagaagcttttggaaaggtgcgggctttatttgatgatggtggaaagcgggttgatgaagctacaccctctatacctg

SEQ ID NO: 231286 - DNA, 369 bp, Glycine max
tacgtaaagctcaagattcggctcgagctaatactatatgtctagctgatggagtccaattcagagttcgacgtgattatcatcggagctggcgtcatgggcagcaccaccgcctagcaggccaccaaacgcggccttaaaacacttctcctggaacagttcgacttcctccaccactgtggctcctcccacggcgaatcccgcaccatccgcctcacctatcgccaacagtagtactaccctttagtcatggactcttaccgcctctggcaagatgcgcatgcccaagtcggctaccagatctacttcaaggctcatcacatggacatggcccatcactaggagcccgccatgcgcgccgtcatcgac

SEQ ID NO: 231287 - DNA, 277 bp, Glycine max
aagaatatgaaattggtctcttgtcttcctcctcatctctacagtactccacatagagcccagcctctcaagcccaagcgcaagcccgggcgcaagcccgttcatagaatcctcctgcagcagcagccagtagccagccctctgcgtctcatcgctctgcgtctacgcctccagcatttaagaggagcctcagtaactggttcagacagcagtctccctctccctgaattgcagccaagccacgagagccttcgtggctaagtgctacagattcaga

SEQ ID NO: 231288 - DNA, 398 bp, Glycine max
ataaaaataaaaacttttctttgtttctcttttctttgtattagccttttgttgtagatggcattggggagaaggagtggactctttgctcttgaaaagcattttgctttctatggagcataccacagcaacaaaattaacatagcaatccacgtgttgtttgtttggccaatttttttctcggcccttcttattctctattttgtccctctccctcccttattcaaccttcaaaacttggagttttccatgtgggagaactatgtgatattggtttggaatgttgggtttttggttgctttgctctactcagttttctatgtttctttggatctgaaagctggctctttggctgctttgctttgtgctctttgttggattggtagtagctttgttgc

SEQ ID NO: 231289 - DNA, 397 bp, Glycine max
gaggtttaactgccaaagtgattgaccgaacatagactatggctgatgtctacggtgctttttttgattttgcttctatgttggagcccaacgttgacaaaaacgatcccaatgcaacacaaacattgagcacgctggaagctatacagaaaacttgcagagaatctggtctcttaagtaaaaggaaatcttacattgtgaatgatgaaagtggatatggctcaaccatgattgtcatattggtcatcatggtttccatcatttttgcttatctgtctgctaaccaccataatagctagttgaaacactgatagcacgcctcgttcatggaatgcgaatttgcatgcatgcaagcaatagtatgatggctgcagttgactatcgtgtattttaaatg

SEQ ID NO: 231290 - DNA, 372 bp, Glycine max
cactcggttgcagaacagaacaaacttctttcactctttcgcttctgaatcttcaacaatggtgctcgaggcgacgatgatctgtatcgacaattctgaatggatgcgtaacggagattactctccttctcgatttcaagctcaagcagacgctgtcaatctcatatgcggtgctaaaacgcagtctaatccggaaaatacagtgggagttctcacaatggctgggaaaggcgttcgtgttttggttacccctaccagtgatctgggcaagatcttagcctgcatgcatggactagatataggtggtgagatgaacctagctgctggcattcaggtggcacaattggctcttaagcatcggcaaaataaaaa

SEQ ID NO: 231291 - DNA, 382 bp, Glycine max
gtaagctagctttggcatctttttcccctttttcctccaagcctataactatattcaacccaatctgcactggaccaagtgtaaaaagacattttcctgatcttctgctgtgccaagaaagcagtaatctccatgagcttctattgaattgatactttgatcaagatggatgggaaaaactctcttcaaataactagaagtggtattggtgcttatgatgatgatggacatgccaaaaggactgggaatttgcagagtgctgtagctcatatcattactgctgttattggttctggtgttctttctcttgcatggagcacttcccaattaggatggattggagggccattttccttgctttgttgtgcaattgtcacctata

SEQ ID NO: 231292 - DNA, 352 bp, Glycine max
gttaacactaaggacactgacaaggttctgaacgggatgccaagctacgctcctccattgccttcttcttccaattccatggccatggaagcaactaatgctcatccttcccgtatttctgaatttggaaccctggagcaatctcttggatttcgtgttgaagataccattaatcttagcagaaatccgatgtttaaatcaaatgaaatcaaataaccaacctcaggtgctgataattcaatttggtgcttttaaataagtcaattgcaaaatcggatataaacctctctgctgcaattgctgcatctcaggcactggtattccaaaaagattcgcaaccaattctggcttc

SEQ ID NO: 231293 - DNA, 192 bp, Glycine max
tggttttttttttgttgtttttgttttttgtttttgttgtttttttgtgttttttgttgtttttgttgtttgttttgttttttttgtttttttttttttttttttgggggtgttttttttttgttttgttttgttttttgtgttgtttttgttttttttttttttgttttttttttgtttttttgttttttt

SEQ ID NO: 231294 - DNA, 384 bp, Glycine max
gaatccggtccaatcccccccaacctttcccaatcccaaaaaccctttgaatttttaaaaggaaaccaacatggttattaaggccaacaacccaaaatccatggcaaaggttctggtcaacccaaccccttcctggccttcaccggtattaaaagttatatggagcctaccgccacccacctatgtaccaaagacccccttttggaaattacccaaaggcggcattgcatttcccggtaatgcccaaattcaaagctaccatggatttgtccgcaactgcaaaatctgccacaccgtctttgttgctgctccagcagaaaaaggccattttcttttaaactttctcatgggaagtgtttcagcagctgtctccaaaactgctgc

SEQ ID NO: 231295 - DNA, 392 bp, Glycine max
gaattcggtccaagcaacctcaaaccttcggtttcccaacaacaattcacatccttcaaaatctcaaactctccatggctcccagcacagaacataacccttctctctccaaacaaaaacttcactgcacgcttctttcccctgccaaactcttcaaatgtcttcactttctccatttggtactccaaagtgcctccaagtgcaaacccttttgtttggaatgccacagtccaagtcacaatcattgccagaatgcaccacctcaacttggtgaggctgtggggattctgtgctgagaaaggccaaaggatacttgtctatgaacacatccctggtggatcattggacaagtacctcttcagggtcaataagtctcataacaataaccatct

SEQ ID NO: 231296 - DNA, 387 bp, Glycine max
ggatgcagagccatggttcagcaagccgttcagggtgctcctgctgcgtatgccaaagaaatggaacgactttccgccaaagaatcgcttcttctcgcttttaaagatgcagggggtttcgaggccttggtctctgggaagactactgaatggcaaaagattgatgtgaatgaaaggataactggtcttgagcggctcaatccaacacctcgccccacaacgtcacccttcttggaggggcgatggaactttgagtggtttggttctggaagtccaggcttgtttgctgctaggtttatatttgaaatctttccttcaactttggctaatttgtcaaaaatggattttgttattaaggatggaaatgcgaagattactgcgaacatg

SEQ ID NO: 231297 - DNA, 265 bp, Glycine max
tttgccttctgctctccctgcccccgcggttccccgtcttggtgtgtcgctctccgcggagctgtgtttgccttgccctcgtcttgttcggtgggtccgtttttggcgactcccgtgactcgccgggtgctctccccggcgcgtcgcttgctcggtgtgggctctctggggctgatttcatcgctgaccattccccgccgctattgcgattctcaatcgcatgtcctccactttcttgctcgtcccttgcccctcccgtgacttg

SEQ ID NO: 231298 - DNA, 295 bp, Glycine max
gccggtgcttatcttagctattctagcttctgttgtgggaagccaagcaatcatcagtggaacattttctatcataaaccagagccaatctctgggttgcttcccaagagttaaggttgttcatacatctgacaagatacatggtcaggtctacatccctgaaattaactggttacccacgatcctctgcattgctgtgaccattggatttagggacacaaaacacatgggaaatgcttcagggttagcagtgatgaccgtgatgctggtgacaacattctttacttccttagta

SEQ ID NO: 231299 - DNA, 389 bp, Glycine max
ctctgagagagatgtgtggaggcgctatcatctctgacttcattctcctttttgagacttctaatatcctcagggttttttgggagaattggctaaaaaatggttatatgatccgtgtttgtgctatgatgttatttttattttttctttgtttaatggttctgaatgtctctgttcttactgcgatttttacacttttccaattatattaaagggtctaccacagcgaaatctgtggcattccaagttcgagctgagaaatttgcaaataggaagaggaaaaatcagtatatgggaatccgtcaacgcccttggggaaaatgggcagctgagattcgggatcctagaaagggggttcgtgtctggcttggaaacctcaacactgctga

SEQ ID NO: 231300 - DNA, 269 bp, Glycine max
cttgtttgaagcttcaaacaagatcaaggttttgatggccacaaatcggattgatatcctggatcaagccctccttagacctggacggattgaccggaagattgaatttccaaaccctaatgaagagtctcggctggatattttgaaaatccattcaagaagaatgaatttaatgcgtggcattgatctgaagaagattgccgagaagatgaatggagcatctggtgctgaacttaaggctgtttgcaccgaagctggaatgtttgcat

SEQ ID NO: 231301 - DNA, 386 bp, Glycine max
attctcccatttcctctcagaaccctcgatcactcccacgcgctcctatatcctctccttcaccgtcgctctctccaacgatcacaacaacatcgtcatcccatggcaaacgccgcatctggtatggcagtccatgatgactgcaagttaaggtttttggagctgaagacaaagaggacacaccgtttcatagtttttaagattgaggagcagcagaagcaggtcattgtggagaagcttggtgagccagcccaaggctatgaagatttcactgccagccttcctgctgatgagtgccgttatgctgtttatgattttgagtatctgactgaagggaatgtccctaaaagcagaatttttttcattgcatggtcccctgacacatc

SEQ ID NO: 231302 - DNA, 309 bp, Glycine max
  unsure (1)..(309): unsure at all n locations
gtaatttcagccgagaaggctcaccatgagcagctatcagttggtgaaatcaccaacagtgcattcgagccatcatctatgatggccaagtgtgatccccgccatggcaaatacatggcgtgctgtctcatgtacagaggtgacgtagtgcctaaagatgttaatgcagctgttggaattatcaagaccaagcgcactattcaatttgttgactggtgccccaccgggttcaagtgtggaatcaattaccagcctccgactgttgtccaggtggtgatcntgccaaggttcagagggccgtgtgcatga

SEQ ID NO: 231303 - DNA, 361 bp, Glycine max
ggtgttttggctttgtcaattttgaaaacccatatgatgctgccaaagctgttgaaggacttaatgggaagaaagttgatgataaggagtggtatgttggaaaagcccagaagaaatctgagcgtgaacaagaactgaaaggacggtttgatgcacagtataaaggaatctgctgacaaatatcaaggtgtgaacctgtatctcaagaacttggatgatactatcagtgatgacaaacttaaggaaatgtttgctgaatatggtacaataacttcatgcaacgttatgcgaaaacccactggaatcggtagaagattaagatttgttgcagtttcaaatcctgaagaagcatctcgttctc

SEQ ID NO: 231304 - DNA, 405 bp, Glycine max
ctcgagccgaatcggctcgaggacaagcctctaaggcttccattgcaggatgtctacaacattggtggtattggtactgtgccagtgggacgtgtatagactggggttgtgaagcctggtatggtggtgacttttggtcccactgggctgacaactgaggttaagtctgttgagatgcaccatgaggctctcacagaggctcttccaggtgacaatgttggatttaatgtgaagaatgttgcagtcaaggatctcaagcgtggttttgttgcatccaactccaatgacgaccctgccaaggaagctgccaacttcacatcccaagtcattatcatgaaccatcctggccagattggtaatggatacgcaccagtccttgactgccacacttctcacattgctgtg

SEQ ID NO: 231305 - DNA, 369 bp, Glycine max
tgacgctggaagcgtgcacgcacgctgcgcacaatgagaagcttccgctgcgcacggtggttcaggttcagtgcttcgagcagcttcagctacgacacgccatcgccggaacgctgatggcggctgacgcagccgcagaacctgcgcggcagtctgcggcactggaacgggaaacggagggcggccgacgagaaggattagggttatgacttacagcacgtgtaggaatagaacggcatgtggaacgtgccagtaagggagaatcacgtactgcccttggagattgatcgcatgatgacgcgagtacatctcatggaacacgaatgttcatctatggttagattcatcggcaagtttgataagtccgac

SEQ ID NO: 231306 - DNA, 370 bp, Glycine max
gcgaacaaagagtctaaacgaacacagaacgcgttgtgaagaatcgccgaagagggacaagtcatctgtgtccacagccgtacacgactggaaggaacatctcacgaagggagaagagtccacgacattgactgtggtggattttactgcgtcttggtgcggtccatgccgtttcactgccccaattcgtgcagagtgtgcaaggtagttgccaaatgtcatcttcgacaaggtcgatgtgtgatgaattggagactgtgtacaacgagtgcggaactgaggctatgccaaccttcctgttcgtgtacaacggcaagctggtgaataatgttctaggtgccaagtcagaggagcttcaattgactctaac

SEQ ID NO: 231307 - DNA, 279 bp, Glycine max
gaagaataatcgagacacagatcatagtgatcattttttaatttctcagatttatccgacgtcgctgcagatccaccaaccgttatggctgccttcagcggtgatgaaacggcaccgtttttcggcttccttggcgccgcagctgccctcgtcttctcctgtatgggagctgcctatggcacagcgaagagtggcgtgggcgtggcttccatgggtgtaatgagacctgagctggtgatgaagtcgattgttcctgttgtcatggctggagttttgggc

SEQ ID NO: 231308 - DNA, 407 bp, Glycine max
aaagaaaaaaaatgggttcttctctgtggacctgtctgattttgttatcacttgcttctgcttccttcgccgccaacccaagagcaccaattgatgtgccatttggcagaaactatgtgcctacctgggcctttgatcacatcaaatacctcaatggtggttctgagattcagcttcatcttgataaatacacaggtactggcttccaatcaaaagggtcctacgtgtttggtcacttcagcatgtacatagaattggttgctggtgattcagctggcacagtcactgctttctatttatcatccacaaactcagaacatgatgaaatagactttgagttcttgggaaacagaagcgggcaaccttatattttgcaaacaaatgtgttcaccggtggcaagggtgac

SEQ ID NO: 231309 - DNA, 414 bp, Glycine max
ggaggaagaagagaggagaaggagaatgaaagatgcgcaagtctttcaaggattcactcaaagctcttgaagctgacatccagtttgccaacacactagcttctgagtatccaagtgctggtgcttgcttccaaatgagattgtcctacagcccagctgctcaattcttcctttttctggttaagtggactgactgtcaccttgctggagctttaggattgctcagaattcttatatacaaggcatatgaagatgggaagacaaccatatccatttatgaaaaaaaagccagtctgaaggaattctatggtgtggtgtttccctctttattgcaacttcacagaggaatcactgatgttgatgaccggaaacaagaacatctatgtgctactaagtataagcattaagattgac

SEQ ID NO: 231310 - DNA, 412 bp, Glycine max
gtgagggccttccatggcttccgcttgtgcttcctctgcaattacagctgttgccatctctacgccgagttccgggcagaagaatggatcaggaggttgttttcttagtggaaggaaattgagggtgaaaaaggagagagcagcaattggaggacgatcgatgggcactacagtgtgcgcagttgctgagcctgacagacctctatggttcccaggcagcacccctcctccatggcttgatggcactctacctggagacttcggctttgaccctcttggtcttggatctgacccggagagtctgagatggaatgttcatgcagagctagtgcactgcagatgggcaatgttgggtgctgctggcattttcattccagaattcctaacaaagattggtgtcttgaacactcct

SEQ ID NO: 231311 - DNA, 378 bp, Glycine max
gaattttatagagagagagagtttttagagagagaaaggatgaagatcacggcattgttggtgcttaaatgcacaggtgagggttccgatcccgttattctggcgaacgcttccgacgtcagccacttcggttacttccagcgttccagcgtcaaggagttcatcgtcttcgtcggtcgcaccgtcgcccgtcgcacccctcatggccaacgccaatccgtacaacacgaagagtacaaagtgcacacatacaacagaaatggtctttgcgcgttgggatttatggatgatcattacccgattcggagtgcgttttctcttctcaaccaggtaatagatgaatatcaaaaaaactttggcgagtcatggagaaatgct

SEQ ID NO: 231312 - DNA, 376 bp, Glycine max
gaattttatagagagagagagtttttagagagagaaaggatgaagatcacggcattgttggtgcttaaatgcacaggtgagggttccgatcccgttattctggcgaacgcttccgacgtcagccacttcggttacttccagcgttccagcgtcaaggagttcatcgtcttcgtcggtcgcaccgtcgcccgtcgcacccctcatggccaacgccaatccgtacaacacgaagagtacaaggtgcacacatacaacagaaatggtctttgcgcgttgggatttatggatgatcattacccgattcggagtgcgttttctcttctcaaccaggtaatagatgaatatcaaaaaaactttggcgagtcatggagaaatg

SEQ ID NO: 231313 - DNA, 357 bp, Glycine max
gtcaaagcacttcgcgaagcgtgacaagcagtcaataaagaacctggcgtcgtcgccgaagctctaggaggctggcaacgccccctcactggccattaaagccagcgtggataagaccaatatgaggttcgacagttatgcgaagcaggggttgctgtgcagcggtgcatggttgccgcacctgatcgtgaacggataccagacgcactcaggtgagttcatcacacccggtatactaatcctgtacatctccggatggatctgcagggttggtcggacccacttgattgctatcagggaccataagaatcacaccatgaatgagatcatcatcgatgttcctctggcttctcgctt

SEQ ID NO: 231314 - DNA, 420 bp, Glycine max
aagtgatcatgaagatggtataaaggattctgaactaacggacaagataaaatcctcagagatgattgatgctttggaggaggcgcgaatggctatagagcatacagtgattctaaagggagaacctgtggatctactcccaagatcatcacacataatatctctgcagctggaacttgttcgcaaataccaactagaaacaaggagaatcagtggagattcaggtgtacatttgcgcatacttccatcccattatgaaacggatgaagtaaaaactagtgaaacttctgagtttgatagtgaattattagatgactttgcctccaatggcagtgtgaatggctcattcaacagcttggatagattgcccctgctacccgagtaataactacgttcacttaattgtatactcataatgga

SEQ ID NO: 231315 - DNA, 404 bp, Glycine max
gttggtgcaatagcacctgaaattcgaggcaaggctggtctgatccctcaggacacagcactcccatggttcataacgggtgtgttcccacctgcaggaacctacaactactgggcagactcctacacactgttcgtgtttgagatggcactgatgggatttgcagagcacagaacattccaacactgggccacaccaggctctatgggccaacaatacttcctatgactagagaagggtcttggaagttctggtgagccagcttatccaggaggacctttcttcatcccactatgctttggtaaggatgagaagtccttgaacgatttgaagctcaaggaactgaataatggactgttggctatgttggcaatcttgggtgactttgttcaagctcttgtcac

SEQ ID NO: 231316 - DNA, 385 bp, Glycine max
ggagaagatccagcacagtgaggtggaagtgaagggactgaagcttcacgtggcagagattggaagtggctccaaaacagtggtattcttgcatggattcccagagatctggtacacatggaggcaccaaatgatttctgtggcaaacgctggttatagggctattgcctttgatttcagaggctatggactttctcagcaaccagcagagcctgaaaaggaaaccatgtttgatctggttcatgaaattgtaggccttttggatgctttgaacatctccaaggccttccttgttggaaaggattttggtgccattccaggacatcttactactgcagtgcacccagaaagagtagctggtatcataactttaggcattcctttc

SEQ ID NO: 231317 - DNA, 342 bp, Glycine max
  unsure (1)..(342): unsure at all n locations
gaaaagttagggttcacaacttttccttttccttttgcttgcgaatctgaatcaaataatcaatcatccattcattattcatcatgtcgtcggcgaagaaaatcacgctgaagagttcggacggcgaggctttcgaggtggaggaggcggtggcgctggagtcgcagacgataaagcacatgatcgaggacgactgcgccgacagcggcatccctctgccgaacgtgacgagcaagatcctggcgaaggttatcgagtactgcaagaagcacgtcgaggccgcgaatcncgaagacaaaccctccgaggacgatctcaaggcctgggacgctgaattcgtca

SEQ ID NO: 231318 - DNA, 348 bp, Glycine max
  unsure (1)..(348): unsure at all n locations
ctcgttctctgaaattttaattgacctttcccccctcattgcgaatctctatcaattgctcacgcatccgctcattattcaccctctgataagaaaccggcatcaaacggcccaacttgagaagaagccggcttgtcgangtgaaggtatcgatggaacgaggatcccagaagatgaagcagataataaaggacaacgtgtgagacctacaagattcacatcgtcaaagtgttgaagcaagttcatcccgacatctggatcttcatcaaggctatagggatcatgaacaatttcataaacgacatcttcgagaaactctctcaagagtcatcacgtctcgctaggtac

SEQ ID NO: 231319 - DNA, 178 bp, Glycine max
tatacatggactacagtttattatccaatccacagtagagtctcctggaaacattgagcaaacggtcaaggcatttctccaaatgtttgagaacaaactcctcgagatgacagttgatgaattcaagagtaatgtaaatgctttgatagatgtgaagctagagaaacacaaaaatttg

SEQ ID NO: 231320 - DNA, 400 bp, Glycine max
aacttctggtctctactatgactgttcagcccatatgctctgggttggggaacgaaccaggcagcttgatggtgcccatgtcgagtttctaagaggagttgctaatcccttgggaattaaggtaagtgacaagatggatccaaatgagcttgttagactcattgagatcttgaatccccaaaacataccagggagaataactgtgattacgaggatgggagctgaaaatatgagggtgaagcttccacatctcatcagggcagtgcgcagagcagggcaaattgtcacctgagtcagtgatcctatgcatggaaacaccattaaggctccatgtggtcttaaaactcgccccttcgatttcatcagggctgaagtgagagcattctttgatgtgcacgag

SEQ ID NO: 231321 - DNA, 371 bp, Glycine max
gcatttcggactctaatacgactgttcagcccatatgctccgggttggggaacgaaccaggcatcttgatggtgcccatgtcgaatttctaagatgagttgctaatcccttgggaattaatgtaagtgacaagatggatccaaatgagcttgttagacgcattgagatcttgaatccccataacataccatggataataactgtgattacgaagatgggagctgaaaatatgacggtgaagcttccacatctcatcagggcagtgcgcatagcagggcaaattgtcacctgagtcagtgatcctatgcatggaaacagcattaaggctccatgtggtctgaaaactcgccccttcgatttcatcaggtctg

SEQ ID NO: 231322 - DNA, 391 bp, Glycine max
tatagcttcatcccaaaaagctcttttccttctaaatttgattccttagttcagcattctattattatatatggcttcttcaccttcctcagaaaacaaaaacctagagggagtagctggtggtgccggagagaaacccattccacttggtgagaacgttctgcagaagcatgctgcattctttgacttgaataaagatggtgtcatctacccatgggagacttttaaagggttgcgtgaaatcgggactggggttttgctgtccgttggaggtgctattttcatcaatgtgtttctcagtcagaggaaagtttccatctatactttttccaattgaaattaaaaatatccaacgcggcaaacacggcagtgacactggagtctacgatac

SEQ ID NO: 231323 - DNA, 407 bp, Glycine max
cactcgagctcgaggcttactcagatggatgaaactgaattggacaagagaaagcaacacggcacatatacatgatgatttagggggcactcacactttttctgctatgaagggagatgtggcttgccaacgaattttgagtctacttactgctaagcattgggttatggtgctgcagtcctccttcaaagtgggaagactggattaatatcatcggttggtaatttatgtgctcctgttgaagaatggactgttggcggaactgcactcacgtcattgatggacgtggagaggagacatggtaaattcaagcctgtgatcaagcaggcaatggtggagcttgaaggggcacccttcaaaaagtttgcctccttgagggatgattgggcccctaaaaattgctacat

SEQ ID NO: 231324 - DNA, 376 bp, Glycine max
  unsure (1)..(376): unsure at all n locations
gagagtgcagcggagcagaaagaagcaaagggggaagaaaggtggtgtgtgttgtcgcaatggacatcactgccttcaaatccctcaacattccatttccaacctttccatcaaaattttctccttttcgtccattcagtttctttcacttcaaaccttttcgcactccttcctcacctcgcttcatctcccattgctctctcaatgggtcagcagagataacaagcaaggaaggtactttgcctcgtggcgttggagaggcagtgaatgaagcgtcaagttccaagattcttcaggttgtgctcgtgtcncctcagattccaggaaacactgggtgcattgctagaacttgcgcagcatcagctgttggattaca

SEQ ID NO: 231325 - DNA, 270 bp, Glycine max
gtcgagctgagaataccagtatgctccagtagccggcacgaatcaacatggcggataaggcagtcagcatccgaaacatgaagtttatgacacacatgcgtctcgccagagagcaattcgtcgttgatgtccatcatccaaggagggcgaatgtttccaaggctgaactgaaggataagctgggaataatgtatgacgtgaaagacatcagcaccgtatgtgtcctcaagttccgaactcattttggtcgtggcaagtccactgggtttg

SEQ ID NO: 231326 - DNA, 379 bp, Glycine max
ctttaatctctcacacaaaatcatggacaagaagcttggcaacacgtctcatgatcctgaagtgagaaaggggccatggacaatggaagatgacttaatcttgatcacctatattgccaatcacggggaaggggtttggaactctttggccaacgctgctggacttaaacgtaccggaaagagttgccggctccggtggctaaactacctccgtcctgatgttagaagagggaatattacacccgaggaacagcttttgatcatggaacttcatgcaaagtggggaaacaggtggtccaaaattgccaagcatctacccggaaggactgataatgagagttagacctactggacgacaaggatccataagcacctcaag

SEQ ID NO: 231327 - DNA, 387 bp, Glycine max
aaattcattttaatcctaattctgcacttcttgatcattcgatttttctcctcaaggttcgtctctgtttcatctcttttcatcatcgcagcctaattagccttagtttattgatttagctttggtctttcaccatggttacatttttacgtttctatctttcgatttgtgattttttacgttaatatgtgtataccggttttgtcgttgttgaatccgaaactttccattcgactttctgattccgtatctcgtttgtcacatgcaaaatctttcccgatttttaatctggctatctgatttgatttgattttgaggaattagggttcgtggtttgatttgattctgtgattcgcttgtgatatgtaaaatattcccggttcctaa

SEQ ID NO: 231328 - DNA, 386 bp, Glycine max
ggcagtggtgattccacagttcgattgtggaatattgactctggagcacttctagagagaagaaggccttgagggcattcctgagcctgaatgaaggcaaggccggctcgagattgtttgttgttgtaactcgttcttcttcttttgttgttttgtgtttgtgtttgttttttctctcacctgaaaatgtcttgctgcggtggtaactgtggttgcggaagctcctgcaagtgcggcaacggctgcggaggctgcaagatgtacccagacttgagctacactgagtcaaccaccaccgagaccttggtcatgggagtggcacctgttaaggctcaatttgagggtgctgaaatgggtgtgcccgctgagaacgatggctgcaaatg

SEQ ID NO: 231329 - DNA, 384 bp, Glycine max
tttctctttctctccttcaaaatcgttgtcaatttcgcctctttctttctcaactcccttagattctctccatcgggtcttcaaaaatgcggatgagctgcaatggatgtcgagttctcagaaaaggttgcagtgaaaattgcagcatcagaccctgtttacaatggatcaaaagcccagaatctcaagccaatgctactgtgtttcttgccaagttctacggccgtgctggtctaatgaacctggttaacgcaggccccgaacatcttcgtccagcgatctttcgttcgttgttgtacgaggcatgcggtcggatattgaacccgatttacgggtctgtcgggttgttatggtccgggagctggcagctatgtcaagccgccg

SEQ ID NO: 231330 - DNA, 399 bp, Glycine max
ggctttcaagctgatgtcaaagctttgcagaaggttttgtctgctacgcatttgacttatcaacatcaacacaacaagcaaatgagttgccctgcgatggctcagttgctctcaaacactctttatctacaaacggttctttccttagtatgctttcaatgttttgggtggccttgacaatgatggaaagggatgtgtcttcagatatgatgctgttggttcttacgagacggttggatatagctctcagggttctggatccacacattagtatgccatttcttgataaccagctgaagtctcctagcgcagtcttgttacatgcccaggatgctgttactccattgtctgaagcagaagcaatggatctggtcaaaactgtttttgcatcagcaactg

SEQ ID NO: 231331 - DNA, 412 bp, Glycine max
attgaattctccagagagaagaagaaacttaatcgatcatcacttcacttcactaatacatcatggcagacgagacccagaacaagtatgagagctctgaggttgaggtccaggatcgtggtgtttttgactttctcggtaagaaaaaggatgaagaagacaagcctcatcctcaggaggaggtcatcgccaccgagtttcaaaaagtcactgtctcagaccaaggagagaacaagcacagcctcttagaaaagcttcaccgatctgacagcagctctagctcttcaagtgaggaggaaggagaagatggagagaaaaggaagaagaagaagaaggaaaagaaagggctgaaagagaagatcgaggagaaaatagagggtgatcatcatcatcacaaggatgaagacacaag

SEQ ID NO: 231332 - DNA, 388 bp, Glycine max
ctcggggctggcacatttccatctctccatctaccataaatcgttccaactcgaacatgagacaaaggcatgggagtctgtatgtcattgcattgggtgatgaatttctttgttggactactgttcttgcgtttgctggataaacttggtccacagctgctttactcgatgtatgcaaccttttgcatcatggcaataatttttgtaaaaagaaatgtggtggaaaccatagggaagtcacttcatgaaatcgacatcgcacttctaccccaagagtagagcatcatatgaagctctattcattgaatgctctaattctgcatacttccagctgagcaaattgtgtctcatctaatacggatgaccttaacagtacaacgggaagctc

SEQ ID NO: 231333 - DNA, 388 bp, Glycine max
ctcggggctggcccagttccaggtctccttctaccataaatctttcctactcgaataagagccaaaggcatgggagtctgtatgtcagtgcattgggtgatgaatttctttgttggactactgttcttgcgtttgctggagaaacttggtccacagctgctttactctatgtttgctaccttttgcatcatggcagtaatttttgtaaaaagaaatgtggtggaaaccaaagggaagtcacttcatgatatcgagatcgcacttctaccccaggactagagcatcttatgaagctctattcattgattgctctaattctgcatacttccagctgagcagattgtgtttcatctaatatggttgaccttaacagtacaacgggaagctc

SEQ ID NO: 231334 - DNA, 412 bp, Glycine max
gcactgtggcagaagtcttaggagtgtaaaacagagacgcaaaatgaagacgattctatcgtccgagaccatgaatattcccgacggcgtgagcatcaaggttcacgctaaggttatcgaggttgagggccctcgtggaaaactcgtgcgagacttccaccatctgaacttggacttccaacttattaccgacgatggcggtaaaaggaagctcaagattgattcttggtttggttctcgtaaaacctccgccgccatccgcaccgccctcagccacgttgagaatttgatcaccggcgtcaccaagggataccgatacaaaatgagattcgtgtacgctcattttccgattaacgctagcattggcaacaacagcaagtccatcgagatcagaaatttcctcggcgagaag

SEQ ID NO: 231335 - DNA, 386 bp, Glycine max
tttgagagtaaaaaggactacaagtctgctctaaaggcatttgaagaagtcctactatttgatcctaacaacaaggttgcccggcctaggagagattctttgaagggacttgttgatgcaaccaaaggagttactgtcatcaagtcaacagagaagaagtgagtgtcattgtatcaactcactatgaatatggcattgttaaatacatagttttcaataacttggttgtgttggaaggaattttggctctattggtgtagttactgcttactagctgaggcatactagtgctgcgaaatgtagttgaaattgaaacttgaaagtgctcgattctccaatgggttaccaaagctttgctctggtgctgatggtgtattcacttgtga

SEQ ID NO: 231336 - DNA, 402 bp, Glycine max
ctctgcgtcaaaagcgtgcaggttttttgtgttcttatttgttagtccttcctgagagctgaatttcccggcaaacacaaacaggtttttgtggtgttgaagatgttcaagaacacattccaatctggatttctttccattttatacagccttgggagtaaacctttgcagatatgggacaaagaagttgttgatggccacattaaacgactacaggatgaagacatacagtccaatgtactagaaataattggatcaaatattcagtccacatacattacttgcccagctgacccagcgacaacgcttggtataaagcttccattcttggttattattgtcaagaatctaaagaagtatttcacatttgagattcaagttttggatgataagaatgtcaga

SEQ ID NO: 231337 - DNA, 410 bp, Glycine max
caattataagcatgggtttgtggaacacaacgaatgcagtgtcatgccgctttcacaagtttggtgatgaccaaaagaatctggtcgtccaaggtgatgccacgtcttcttccaggggcatagaactcacaaagttagacggtggaggaaaaccagtgggtggcagtgtggggagagtgttatactcttctccagtgcacctttgggaaaactctacactggtcgcaagctttgaaaccgacttcaccttttccatctcatcagactctactactccaggtgatggccttgccttcttcattgcaccatttgacactaagatccctccaaactctggtgggagcaaccttggactcttaccatcagacaatgttgttgctgtcgagtttgacacttaccctaatcgtgat

SEQ ID NO: 231338 - DNA, 393 bp, Glycine max
attggaaggaacaccaaaataaggaactgcataattgacaagaatgcaaagatcgggaaagatgtcatcatcatgaacaaagatggcgttcaagaagcagatagaccagaagatggattttacattcgatcaggaatcacagtcatattggcgaaggcaacaagagaagatggcactgtcatataaaggggtgaaagtacttatttcatggactggtgaggtggccagcagtagctcgaagaagcattccaaggaactttggggacagaaggttacaattgaaaaatcagcacccccttttgctatatatgcaaaatagaaggctctcccactgcatataaaaatatagaatgaatagtgtatgaaatcaaaatgcataaacgtaaataaaat

SEQ ID NO: 231339 - DNA, 375 bp, Glycine max
cgtcgatgtacacgtggagacgcaaagcttgtctgagccattcaaagtcatcatggagcaaagtacaagatctcattgaagacacagactgtaaggacaaatactacaccttatccgatagagctgagtccatattgctttgcctgaagcaaagatgtcctgaactttcacagacttctttggacacatgcaagatctaatacaatcgggatgtggggaaggcagtactagagagttattcaagagttttgggaggcctagcattcaacatggttgcatggattgaagatgttctttatgtagataaatcaatgatgaaccgagatgtctagacacctcaacttggtaatcgcatcctaacagtgttgctttcca

SEQ ID NO: 231340 - DNA, 385 bp, Glycine max
cttggtttgatccagaaaggcttatttttctttgttctgaggaaaaaaattctgcttttcaatttctgggttttcaagcttcgtgtagaaggaaatggcacaacgttctcatgtacccaaatttggcaattgggatagtggagagaatgttccttatacagcatattttgacaaggcacggaaaggtcgaactggcacaaggataataaatccaaatgaccccgaggaaaatgctgatttaagttttgataatccatcatctgataacctacctcctaccagacctagaactaattcagaggatcaatccggaaaaggatcactgcatttggaagatgatcccaagaattttatcgaatctccagctcgtcatgacaatgtaagc

SEQ ID NO: 231341 - DNA, 324 bp, Glycine max
ctctcggcatcaagattgtattcttatcagaaagaccactgagtctaggggatgtaacagccaagaacttaaaggaggttggattcaacacatgggagaagttaattctcaaggatccatctgagtactctggtaagttatcatttgaatacaaatcagctgagagagagaagctggagaaggagggatacagaatcattggaaacgttggagaccaatggagtgacctcctgggaagcaacaaagggactaggacttttaagctgcctaatcccttgtaccatgattaagctctcaaatcaaacctctaagttgcccctaaat

SEQ ID NO: 231342 - DNA, 191 bp, Glycine max
ggaaatgaagtagggtaccgtttggttccaaatgcagcatctcatccccttctcagagaggatgattaccctcaaagacgtggtgctttcaccaattacaatgtttgggttacaccttacaataagactgagaaatgggctggtggactttttgttgatcaaagtcatggaaatgaaactttggctgtttg

SEQ ID NO: 231343 - DNA, 394 bp, Glycine max
ggagcatacaacggaagaaactccatggtgcaggttaacgacgaatgttaagttgcctaagggtttgttgatggaggtgagaatccgaggaaccctattgtgattggagggtatcaattggaggatgtgttggtgcagattgattttgatacttccatggtgggattcagtccttcgcttctgacgaagcatgctacttgctctcatttcaaaccctagttttcggtgaatcgtgatgattatagtttattattatccataccacatagtttttctttagattaagaagagttttgaggagtttaacacgttctgtaataacccttttattttttttttctttcttttttgctctcctgcggtattatctgtataaactgcttaagtggcctat

SEQ ID NO: 231344 - DNA, 320 bp, Glycine max
  unsure (1)..(320): unsure at all n locations
gaagcgtcttaataaacgctaacctctgtacccttcgctaaaatgagagagtgcatttccatccacattggccaggccggaattcaggtcggaaatgcttgctgggagctctattgcctcgagcatggcattcaggctgatgggcaaatgccaggtgataagacaattgttggaggtgcgatgctttcaacaccttcttcagcgagaacggtgcagganagcacgtgcctcgtgcaattttcgtagatcntgagcccactgtcaatgatgaagtcagaactggcacataccgccaactcttccatcctgagcagctcatc

SEQ ID NO: 231345 - DNA, 405 bp, Glycine max
ggaaaattaatctccctttcattttctctgcatctgtactctccaaaatgccgtccttagaggaggagctcttcccttcaaccccaggcaagttcaagatcgagcgggcccaccacatgaaccgccagctctaccgctgcttcgcctccaccagcaccatgttcctgtgggccctctttttaatcgccctcaccgcttcatatctcagcttccaaggcttcgtcggctcccacgtctccctctcgttaaaacgacgcggagacggcgtcgtcggactcgacaacttcaacgactactacgatccgtctctgaaaaaagcccgcaagtccctcctcgccaagcatgacgtcttcatcgtccatggcgacctcaacgacgccaagctcttgggaaagctcttcgatg

SEQ ID NO: 231346 - DNA, 366 bp, Glycine max
ctttaccagttgccacactagaccgagattccccctaaacccgtttgcgttgttgtttgcgaagaaatggcgactaagaggagcgtgggaacgttgaaggagggtgatttgaaagggaagagggtgttcgtgagggtcgatctgaacgtgcctttggatgacaaccttaacatcaccgatgacactagagtccgtgctgctgttcccaccatcaagtacttaactggtcatggagccaaagtgatcctttctagccacttgggacgttctaaaggtgtaacacctaaatacagtttgaagcctcttgtgccaaggctgtctcaacttctcggaattgaagttacgatggcaaatgactctattggg

SEQ ID NO: 231347 - DNA, 393 bp, Glycine max
gtcatttctctctccggcgagaaagaaaaatgcagcatttcatggatttgcaagcgaattcggagttgggtgagtcgaattcatggctttcagtgaaagagcagtccggtgcggcacccaacaccaatttggatcgcgtcctcttcaacgacctcgtcgagattgtccctctcgttcagtcactcatcgatcgtaaagcaagccgttcattcacgcggcgtggttccatgatctacaccaagacacccaccagagaatcattgtccaaaagagtaacagattcaaaaagtaggaatgttgccccatctattcctgccaaaaagaaaagggaccacggagaaaaagaacaaggaaaaaatggcagcaatgatgctgataactattccatgtttt

SEQ ID NO: 231348 - DNA, 375 bp, Glycine max
gaagaaagaaagaaagccatgcaagcatgttcctcctcagacgctccactctccaagaggttagatggcaaagtagcactcataaccggcggagccagtggcatcggtgaagccaccgccaagcttttccttcgccacggtgccaaggtcgtcatcgccgacatccaagataacctcggacactccctatgccaaagtctcaattcctccgacaaaaacaacaacgacgacatttcctatgttcactgcgacgtcaccaacgacaaagacgtcgaaaccgccgtcaacgctgccgtctcgcgacacggcaagctcgacatcctcttcagcaacgccggcatcacgggccgttccgactgttctaactccatcacg

SEQ ID NO: 231349 - DNA, 388 bp, Glycine max
ctctgatccaaacgaagtaacgaaccaaccaatcaccctgtctttctgacccaaaaacatagtcccaaatcgaacaaaatcaatcaactaactcctccaacgttgttgttattatgcagacaacaagttccaacacctccggcgccacctcgatccgttccggcatggagctcttccaccgcgcgaaggcggtgcgcctccgcagccaccacgacaagtacctcctggccgacgaggacgaggagtccgtcacgcaagaccgcaacggatcctcccgcaacgccaagtggacggtggagctcatcccggagttcgacaacatcatcagactcaagagctgttacggaaaatacttgacggcgtccaaccagccgttactgctcggcgt

SEQ ID NO: 231350 - DNA, 354 bp, Glycine max
attcttcaagattcaggtactgcgtttcggaagcagacacagatggctcgtacgaagcaaaccgctcgtaagtccacaggaggaaaggctcctaggaagcagcttgcaaccaaggctgcacgtaagtctgcaccaactactggtggtgtgaagaagccccaccgttatcgtcctggtaccgttgctcttcgtgagattaggaaataccagaagagtaccgagcttttgatccggaagctccccttccagaggctggttcgtgaaattgctcaggacttcaagactgatctgcgtttccagagccacgccgtgcttgcattgcaagaagctgctgaggcataccttgttgggctc

SEQ ID NO: 231351 - DNA, 315 bp, Glycine max
caggaccaagtgggtggacttcaagccaccagggacaatggcaaaacatggatcaccgttcagcctgtggaggctgccttcgtcgtcaatcttggagatcatgctcattatctgagcaatggaaggttcaagaatgctgatcaccaagcggtggtgaactcaaaccatagccgtttgtccatagccacttttcaaaacccagcaccaaatgcaactgtttaccctctgaagataagagaaggagagaagcctgtgatggaggaaacaatcacttttgctgaaatgtacaggaggaagatgagcaaggacattgag

SEQ ID NO: 231352 - DNA, 355 bp, Glycine max
cgtcaacaactgctcttggaaactaaactttctgccgtttgcgaaagagtactagatcaatgtttggcaccaacaattactgttggtgatggatgtgataacatgaccatgattttggtgcagttcaaaaaactggcccaatcaagtgcaccggcataacataagagctatcatcttcaaatgaaataagctacatctgaactaagactagagagcagtgaaagttagtaaattttgagcagcaacactacacacatgtagacacatgagtctagatgatcattttcacttcaactagcatttgtttccaaatttctgtgtttattttcacacctagaatctgttttgcttgttc

SEQ ID NO: 231353 - DNA, 304 bp, Glycine max
  unsure (1)..(304): unsure at all n locations
aaacaacacactgaactctcttcactgaaacgacacacacaaaaaaaagctttagtttaggatgacccaagtgaggaacaagcaagtggttctaagagattatgtcaccggattccctaaagaatccgacatgaacattgttgaaggcaccataatattgaaggttccagaaagttccaatgatgtccttctaaaaaatctctacttgtcatgtgatccatacatgcgactcctcatggccaaggaccgttctttcagggatggggccttcacccttgcctctccattgaaaagatatngtgtg

SEQ ID NO: 231354 - DNA, 356 bp, Glycine max
agcaaatattgcctattcggcaatatggcggaaaatggttcaattgagctgaacaagtttgtgttgttttgtttgttgttgctaatacaagtggcagtttctgaaatcatttttgaagagcgatttgatgatggatggcgaagtaggtgggtgaaatcagactggaaaagcagtgagggcaaagcaggttcattcaagcacacagctggaaaatgggctggtgatccagatgacagaggtattcaaacatccagtgatgccaaacactttgccatctctgcaaaaataccagaattcacaaacaagaacagaacattggtccttcagtaatctgtaaaatttgagcaagagattga

SEQ ID NO: 231355 - DNA, 338 bp, Glycine max
gtatgcgcgatatctatcacagctacttatataaattcggcatagataacaccgtactctctaatatcccataccatgaaatacatggatatggggtggacgaacttaatggcagcttatctgaagagagggttagtcatggcgacgcagcagcattgccaaagacacttaaaagttacaacacgctgttgtcacatggcatcaacattgtgaacttagtcagaagatatcttgacagataggtcgttccatagatcaatctacataaggctggcatccacacatcggagcagttaattctcaaagatccacatcttatcactccaaatgcactttca

SEQ ID NO: 231356 - DNA, 306 bp, Glycine max
tcgagatgagagccagggttgctgattttggactttcaagacatgacatggtggatagacatgcagctattccgggtacctttggctatcatgaccccgagtataaaccctccggaacattcactaagataagtgacgtatacagttttgaggtgttgctcgtcgaaattacagctggcacgaatcatcagcaaggtcatatggaagacgttgagcttgcagcaatgaacacagacggaaaacttgggtgcgaggaaaacgtggaatctcgctatcaacgaaacgttgatgtcaaggaattgcatt

SEQ ID NO: 231357 - DNA, 386 bp, Glycine max
ctcattaattgcaagaatggcacttcgttgcttggtgatgtccctttctgttctcttcactcttggtcttgcgagagaaagccatgccagagacgaagatttttggcatgctgtttggccaaacactcccattccaagttcattgcgagatcttctaaagcctggccctgcaagtgttgaaatcgatgatcaccctatgcaaattgaagaaacacagtacccgaaaaccttcttctataaagaagaccttcatccaggcaaaacaatgaaagtacaattcagcaagcctccctttcaacaaccatggggtgttggtacatggttaaaggaaattaaagacactactaaagaacgatatagttttgaagagctatgcatcaagaaag

SEQ ID NO: 231358 - DNA, 339 bp, Glycine max
aaaacaacagggaaagaaatttctgaccctaaccgcgtgtcgttgaaatcctcaaacgcagagtagacatagaattatcaaaaagcggggaaagggagattgaattcgatcctgggacgttaacgtggtttcaattcaattgtggtcctgtcggtgccctatctgcgacgacgatgtcatctttatatagaggggaatccaggaggtacaacaataaaccaagaggacgtcagaagttgacaacgcagaggaagcacgagattaaggaggccgttgagttatttgatacggatggctcaggtacaagtgaggccaaggagctgaatgttgcaatgaggg

SEQ ID NO: 231359 - DNA, 386 bp, Glycine max
  unsure (1)..(386): unsure at all n locations
cacaattcacacccaccattggattcaccaatctccaaccttcttctccactgttccgtttctctctccaacggagagtcttttgttttttgtggcgagtttgttgcacgtttaagaagcaatggcacgcaagaagatcagagagtatgactccaagaggttgttgaaggagcactttaagagaatctctggccaggagttgcccatcaagtctgcacaggttacagaatccaccaatttcagtgagctagcagagaaggaaccctggcttttatcttcaaaattggttgtgaaaccagacatgttatttggaaagcgtggcanaagtggtttggttgccttgaatctagatttggcagaagttgattcttttgtgaaagggcgtc

SEQ ID NO: 231360 - DNA, 235 bp, Glycine max
gctagagctgccggagccttttagtttcagtttcacttggtgtgctgctgttcccctcattgtgtggatagctctgtcactgacaaatgccattgtaaaagactttgtgattttaaagggtccttgtcggaactgcggtactgaaaacacctctttctttgggactatggtttcaagttcaaatggtggttccaccaacactgtcaaatgctccaactgtggcactgcaatggaa

SEQ ID NO: 231361 - DNA, 358 bp, Glycine max
acattactagaaagttagaaaacatggtagcggtggccggagcatcctcgtccgtgattaaggtggctgcactttccggatctttaaggaaaggctcttacaacagagccctcattcgttctgcgattgagctaagccaaggtagagttgaaggccttcaaatcgagtacgttgatatttcgcctttgccccttctcaacaccgatcttgaggtgaatgggacctaccccccacaagttgaagcctttcgccagaacattctcgcagctggagagtatcctctttggcttcgcctgagtacaattactctgtcgcaagtcctttaaagaatgcacttgactgggcatcaagggcacca

SEQ ID NO: 231362 - DNA, 389 bp, Glycine max
atttgatttgttgaacaagcttctaacttatgaccctgaaaagcggatcacagctgaagaagctctaaaccatgagtggtttcgtgaagttccccttccgaagtcgaaagaatttatgcctacattccctgctcaaaatgctcaagacaggcgaatgaggagaatattaaagagtccagatccattagctgagcagcattggaaggagatgcagcagggtgaatcatggactggtggtacttttggttaagaatggtgcaatttaattttttgttcacaataatcattctaacatgctcagctgaatggttgcacacttgaggtgagagtaagcgctggatggatgctgctaattttgattgttagagaatcacctatgtggttttttt

SEQ ID NO: 231363 - DNA, 385 bp, Glycine max
gctagagaatgatgatgaagtctgctatgtgtgcagtggtggttgtagcacttcttcttctggcggaggtggggcccatggctgaggctgtgacatgcaccccaacagagttgagtccgtgtcttccagcaatcacttccggtgctaaaccttccaatgcttgttgcacgaagctgaagcagcaaaaaccatgcttatgtggctacctcaaaaacgctagcttgaagcagtatgttaactctcctaatgcccgaaaaaccgttgcttcttgtgggattccctttccaacttgttaattaattaagccttcttaaaattaaagtgtgggatatatatatatatatagataaacagtttaatttatacacactttgatcctacaaag

SEQ ID NO: 231364 - DNA, 356 bp, Glycine max
gcaacgcgtgtgatgacgcattcagcaagatgtgcagtggaggctgtaccacttcttcggcaggaggaggtcgagcacaggcgtgaagctgtgaaatgcacccccacagcattgggtcagtttcttccaggactcatttacagtgctgagacttccaacgcctgatgcacggtcctgatgtatcacatatcatgcctgtgtggctacctcaaagaggctagcgtgacgcagtatgttaactctccgaacgcccgattcaccgttgcttcttgtgggattcccattccaacgtgttacttcattaagccttcgtacaattaacgtgtgcgagatatctagatctatagatccacagt

SEQ ID NO: 231365 - DNA, 396 bp, Glycine max
cataagtggcaaccccattttcccaggtggcacatattacattatgccatcaacttggggcgctgccggtggtggattgaaactaggccggacaggaaactcaaactgcccagttactgttttgcaagattactcagaaatcttccgtggcacaccagtcaaattcagcatacctgggataagccctggaatcatctttacaggtactccacttgaaatcgagttcgcagagaaaccttattgtgctgaatcctccaaatgggtggcgtttgtggacaatgaaatccaaaaggcatgtgtgggtattggtggtcctgaaggtcatcctggtcaacaaacatttagtggcacatttagcattcagaaatataaatttggatacaaacttgtgttctg

SEQ ID NO: 231366 - DNA, 343 bp, Glycine max
gtaaagaaagaaagagaagagaagaatccaagacgaagatggaggacgcatcagcatcaaagttcattccacaccaaatcggaggggtccaaaacgacgcgcttcgattcggtctccagggagtcaagagggacatcgttggttctcaccctcttcaatcttcactccaggctacaaggagaatggatgaagcgatgaagaggcaatgcaaagttaacctgtacggaactgcttttcccatgaaggaggagcttgacaggcagatcctgtccaggttcccgcggcctcctggaccaattccttcttcaatgctgggtttggagactgttacaggaagtgttga

SEQ ID NO: 231367 - DNA, 362 bp, Glycine max
gttgagttgtttggtgtggggggaagcccttttgccagaagggtgcagattgccctggaactgaagggagtccaatacacttactttgaagaagatcttaggaacaagagtgatcttcttatcagatacaaccctattcacaagaaggtacctgtgcttgtccacaatggaagaccattggctgagtcccttgtgatccttgaatacattgatgagacatgggagaaccaccaccccatcttgcctcaacaaccttatgatagagccttggctcgattctggtcaaggttcattgatgacaaatgcatgccgtgcaatatcaaaggcagcatttactgcagacaaggaggaacgttgacaag

SEQ ID NO: 231368 - DNA, 325 bp, Glycine max
ttcttcgtctcaaacctcttcgtttcttcgattcattccatttcgtccaaaatggccaaagacccagttcgcgttctcgtcactggagccgcagggcaaattggatatgctcttgtccctatgagtgctaggggagtgatgctgggtcctgaccagcccgtgatcctccacatgcttgacattcctccagcagcagagtcgttgaatggggttaaaatggaattggtggatgctggattccctcttcttaaaggtgttgttgctacaagcgaggtggttgaggcatgcactggggtcaatattgcagtgatggttggtggattcc

SEQ ID NO: 231369 - DNA, 363 bp, Glycine max
gtttctgatggtatcaaagaactttttaatgcgtattctatctgttcaactatgattgatcaaggctcagccttgcctggcagcagtttacctagtacttgtggttccagagatatgctaaaaggctttgacagattccttcatgagacatcacagagtcagtctatcatatcagacttagacaagtacttagaagaaccaatctttccacgcaattccgattttaacatactgaactggtggaaagtccacatgccaaggtacccaattttgtccatgatggcacgtgatgttcttgggactccagtgtcaagtctggcgccagaattggcacttagccctgggggcatagtgctagattcg

SEQ ID NO: 231370 - DNA, 357 bp, Glycine max
caaaactggaaacactctctcctctacatcactttcctcctcgcaattctccacctcacgcagaaccatttctgccacaagctcttcttcgccaacgaaacggtgcgcgtcaagaagaaccccgacctccccctccggttccgttccgacggtaccttcaagatcctccaggtggctgatatgcactacggcactggaactagcgtgacacggtgcatggacgtgttggcctccgagttcgagttttgttccgatcttaacaccactcgttttttaaagcgtatcattctagcagagaatcctgaatttcctgcctttactggagataatattttcggatcaagttcacccgatgct

SEQ ID NO: 231371 - DNA, 394 bp, Glycine max
ctagtttattggcattgggatcagtaactgcaattcccaatgcaaattttcatcgggcgccaaggagcactagtgtgcttctggttgttgtctgtgttttttgtggtaacaggattcaacaatgaagagcacaggacagtggaggtagttggcctatgagaatgcgcagactgcaggcagaacaatattaagaataaccacgctttctcagggttacgtgtgacggtagattgcaagtcacgacatggacacttcagaacgagaggggcaggtgcgcttgatgaatatggaaacttcaaagtatcacttccacaggacatggttgaagatggtgagctaaaagaagattgctatgcccagttgcatattgcatctgctgaaccttgcccttccc

SEQ ID NO: 231372 - DNA, 308 bp, Glycine max
gaaaagtacgacgtgagtggatttcctaccttgaagttcttcccaaagggcaacaaagctggtgaagactacggaggtggaagagacttggatgactttgtggcttttatcaatgagaaatctggagcgggtcgagatggaaaaggacaacttacttcccaagctggtatagtagaaagcttggatgtcttggtaaaggagtttgtagctgccagctatgaagagaagaaatccgtgtttaccccattggaagaggaagttgtgaagcttaggggttccgcctcaaggtacgggaagatttacttgaa

SEQ ID NO: 231373 - DNA, 305 bp, Glycine max
gccgtggtagcaaagtatggtgacaagagtgtgtactttgatttggaggatctgggcaacactacagggcagtgggacttgtatggctcagatgcaccttcaccctacaaccctcttcagagcaagttcgtcgagacatttgctgctccattcacaaagaggggattgttactcaagtttctgatattgggaggtggttccacccttgcatacttcagtgcaactgcctcacgtgacattctacgaatcaggaggggaccagaactcccaccgaagctcggtcctcgtggcgagatctaatttga

SEQ ID NO: 231374 - DNA, 201 bp, Glycine max
gttggtacaaataggtatgatgctcactcaggtggagaacgtgagattcaagggaccatgttagagttgctgaaccagttagagggttttgattctagaggagatgtagaggtgattctggcaagggggacaagtgaaagtcttgatcgagctttgctacgggggggtcgaagtgagaggaagatagaagttccgcttcct

SEQ ID NO: 231375 - DNA, 360 bp, Glycine max
ctgaaccaaatcatcacacacacatactaagaagcaacaattcttctacaatggatctcctccttctggaaaagaccctcataggtctcttcctcgctgcggtggtcgccatcgccgtctccaccctccgcggccggaaattcaagctcccaccgggcccactccccgtcccaatcttcggcaactggctccaagtcggcgacgacctcaaccaccgcaacctcaccgatttggccaaaaaattcggtgacatcttcctcctccgcatggggcagcgcaacctcgtcgtggtttcttcccctgagctcgccaaagaggttctccacacgcagggcgtggagttcggctcccgcacccgca

SEQ ID NO: 231376 - DNA, 353 bp, Glycine max
gtagaactgaacaagggtttctctttctctttctctgtctgcttcttcactttctctcgtttcaatcgaaaaaaatcatgggcagaaaattcttcgtcggtggcaactggaaatgcaatgggacgactgaggaggtgaagaagattgttactactttaaatgaagctaaagtccctggagaagatgttgtagaagttgttgtgagccctccttttgtgttccttccttttgtaaaaagtttgctgcgccctgatttccatgtctcgggggagaattgttgggttcgcagaggtggtgcttatactggagaggttagtgctgaaatgcttgttaatttaggaattccttgggtt

SEQ ID NO: 231377 - DNA, 342 bp, Glycine max
ctcctcatgtgattaatgcagtgatggaagcaattgaagggatgagggtagcgttgggagccgctgttgttcttaattattgtctacaaggactgttccaccctgcacgaaaagttagggaggtatattggaagatctacaactctctctatattggagcccaggatgctcttgtagcagcataccctgccttggaggatgagcatagcaatgtttacagtaggccagagttaatgatgttcatctagtgtggattttgattacttagtttatttctatctccagtgtatttggcagtattctgtacttcctcgcatcaatgtaaagctcagttgttggaac

SEQ ID NO: 231378 - DNA, 391 bp, Glycine max
cagacattgcaaatgtctgcatatgaattgccaatttggcaggatctatcgtttcaatgggtttgatggataagcttggaaggaaggttctacttttctggagtttctttggcatggcaatagcaatgatccttcaagccacaggagcaacttcacttgtatcaaacatgggagctcagtacttttctgttggtggcatgttcctgtttgtcttaacatttgctctcggagctggcccagttccaggtctccttctaccagaaatctttcctagtcgaataagagccaaagccatggcagtctgtatgtcagtgcattgggtgataaatttctttgttggactactgttcttgcgtttgctggagaaacttggtccacagctgctttactc

SEQ ID NO: 231379 - DNA, 323 bp, Glycine max
gatctatcgtttcaatgggtatgatggataagcttggaaagaaggttcgacttttctggagtttctttggcatggcaataacattgatccttcaagcgacatgagcaacttcacttgtatcaaacatgggagctcagtacttttctgttggtggcatgttcctgtttgtcttaacatttgctctcggagctggcacagttccaggtctccttctaccagaaatctttccgagtcgaataagagccaaagccatgggcagtctgtatgtcagtgcattgggtgataaatttcgttgttggaggactgttcctgcgtttgctgga

SEQ ID NO: 231380 - DNA, 208 bp, Glycine max
tgactcgctaacttttcattctccaagtcaccacgcgcttcatatgcaggcacagttgttaagacaaacttgacacaagcgcaccatataatcaacatcttgaagagcttgctgtgtggttcctgtgggcccccttcaacgaaactgtactaattagataagatttgtgagttgctgttcagattaaaatctccatggaaggtcgaca

SEQ ID NO: 231381 - DNA, 348 bp, Glycine max
atcacaaccctcaatgtgttgcaagcctacacattgaagcggatccgtgatcctgactaccatgtgaagttgaggccacacttgtcaaaggactacatggaatcaagcaagccagcagcagagcttgttaaacttaaccccaaaagcgagtatgctcctggtcttgaggacacccttattttgacaatgaagggtattgctgctggcatgcaaaatacaggttaagatgccatagcagtggtgtttttcttgttatacgatgtgtgttgtgattgtgacatggatgtataagcattataacctattatgtctactagagagatttccaacaatatcaaataactgttc

SEQ ID NO: 231382 - DNA, 389 bp, Glycine max
ctgatattttctgggatgctctcggtggaaaggcagagtatccaaagggcaaagaaattcaaggattcatagatgatccacatttgtttgcattaaaaatagcgagagggaaaccatgtctaattgatgattctgtttctcacgctcatttgttggagttttaactcaggagacttcaaggtgaaagagatatacaattatacacaggatgacttaataactgaagacatcttattgcttgattgccaaagagagatttatgtttgggttggcttacattcggctatcaaatcaaaacaagaagttcttcatcttggcctgaaatttctggaaatggatgtccttgttgaaggcctatcaatgaacatccctatttatattgtaacgga

SEQ ID NO: 231383 - DNA, 329 bp, Glycine max
tacttgatcacttttttaccgagctaagcaaaatggagatcaagcgtctgtcctcgttactgaatgaggatcctgcaattatggaacgacgtagtgcgctcgcaaagagactagagttataccggagtgcacaagctgaaatagatgcagttgcttggtctaagtagagatatgtatgtcaaatcacgtttatacgagagccagcagtgtcattatcattgttcactattttcttattcagactcatttttcagtgtcatcgtattctgttgcattgtcctcttgaatagatgagacgattctgaaaaaggaaaaaaaatgattttttg

SEQ ID NO: 231384 - DNA, 359 bp, Glycine max
cggctcgagcttctgctaaagtcaacaacaccgcgttttggctcgcactaacacaactgttcctttcttcctttcctcaacttgtttcctacttaacgcgtttacgtgagccaatcgctgatatcgcgctttctataaggcgcgagtcacaaccagtggaactcaccgaactgaactcgtaagtttagtcttctctcggcgtcgccatggacgaagaagacgtgcgcaggatcttcagcaagttcgacaagaacggcgacggcaagatctcgtgcgcggagctgaaggagatgatggcggcgctgggatccaaaacgacgtcggacgaggtgaatcgcatgatggcggagctggaccgg

SEQ ID NO: 231385 - DNA, 346 bp, Glycine max
ttcggctcgagctacaacgcctcgaatccacacagttctacgctacgctctaaaccctcgctctctctctctctcgatctatcatggctttgcccaatcagcaaaccgtggattaccctagtttcaaactcgtcatcgtcggtgacggcggtacaggaaagacaacgttcgtgaaaaggcatcttaccggtgaattcgagaaaaaatacgaaccgaccattggagtggaggttcacccattggatttcttcacaaactgcggaaagattcgcttctactgttgggatactgctggacaagagaagtttggtggcctcagagatggatattatatccatgggcaatg

SEQ ID NO: 231386 - DNA, 361 bp, Glycine max
gccaaagttcatattaagagagaaagagagagagagatagaagggaaaaaagcatcaaagatcatgaaacccaacttttcctttttatctaagcttttgatactgcaatatctatcagttttatgcatttctcaggaatttgatttcttctactttgttcagcagtggccaggagcatactgtgacacaaagcagagctgctgctatcctaagactgggaaacctgctgctgatttcagcattcatggactctggcctaacttcaaggatggctcatggccctcaaactgtgaccctgacagtgtctttgataaatctcagatctcagacctcattagcaacatggagaaggattggccat

SEQ ID NO: 231387 - DNA, 392 bp, Glycine max
tttggacagtatccatatggaggtttaatcctaaacaggccaaccattagcaggagattcatgcctgagaaagggtctgctgagtatgcagctttggctaagaaccctgagaaggagtttttgaagactattactggcaagaaggagaccctcattgaccttacaattatagaaatcttgtcaaggcacacatctgatgagttctaccttggggagagagatggtggtgactattggacttctgatgctggtccactagaggccttcaagaggtttggaaagaagcttcaagagattgaacaaaagcttatacagaagaacaaggacgagacgttgagaaaccgcagtgggccggctaaaatgccttacactttgctctatccttctagtga

SEQ ID NO: 231388 - DNA, 358 bp, Glycine max
acgcgtacatcaaatctcggctcaagattgaattgacaatgaggcctgatcttgctttgcttcctcttctatttgctttcttgttagctgccactacagaatcaagaaaagatacaggggaatattggaaaatgatcatgaaagatcaggaaatgccagaaggacttcaaggtcttgtttcatttcaatctgaaaataaccctaagactcaagagcagcttggtaaaggttccaaaaaccattgtgaagagtctctagttacaaatacacaagttaatagtgacttcgaacccataccaagtgttaccaaatatgatgatttggaattcaagtcaagcattatcaagaacgaagattt

SEQ ID NO: 231389 - DNA, 307 bp, Glycine max
ggctaatctctcactcttgttcttcggtctcctcctattctccgctgccgtagccaccgtcgaacgaatcgacgatgaagacaaccttctgatccgtcaagtggtgccggacgcggaggaccaccacctgctcaacgcggagcaccacttctccgccttcaagacaaagttcgccaagacctacgccacgcaggaggagcacgagcaccgcttccgtatcttcaagaacaacttgctccgcgccaagtcgcaccagaaattggacccctccgccgtccacggcgtcaccaggttctccgatttcact

SEQ ID NO: 231390 - DNA, 355 bp, Glycine max
cagtgattaagaatacaatggatcccaaacacttgtaccaggttgctgctgtggctgtgctgtgcgtgcaaccagaacctagttaccgtccactgataacagatgttcttcattcactcatccctcttgttccgattgagcttggaggaacactaagagtttcacaagtaaagtgatacacgctaaactgtgttaaacaaggatatgatttgagattatgatgctctgccaaaacagattggttttgccaaatactcgaaattgcaaatagacccacgtcaaacgtactataaggagattcattcgggaaggatgtttagcttaaatagagaagagcattagattgttaataaca

SEQ ID NO: 231391 - DNA, 454 bp, Glycine max
  unsure (1)..(454): unsure at all n locations
taacgattcangtgccatataaaagagatatgacgtcgcatgcacgcgtacgtaagctcggaattcggctcgaggattcatactatggctctcacgtgatgcagtatggtgatgtagggcttagcagagatgttctcttccattatttgggtacagatcctgctaatgataatttcacttttgtggatgaaaactccttatggtcaccttcaaaaccagtcaaccaacgtgatgctgatctcatccatttttgggataagttccgcaaagctcctgagggttctctcaggaaaaatacagctcagaaacaagttttggaagcactcggtcgttcggctgcggcgagcggtatcagctcactcaaaggcggtaatacggttatccacagaatcaggggataacgcaggaaagaacatgtgagcgaaaaggcaacanaaagcaagaaaccttaaaa

SEQ ID NO: 231392 - DNA, 348 bp, Glycine max
gtgccaatgtgcacattagtgagggtgcccaaataacgttgcaatatgtgaaaaacatcatcattcacggtctgcacattcatgacattaagaaatgtagtggtggcctcatcagagactccatggatcactatggagtccgtgccatgagtgatggggatgccatttcggtgtttggatccacatatgtttggatagatcatgtttcctttaccaactgcgatgacggcctcatcgatgtcgttagcgcttcaactgctgttaccatctccaactgccatcttaccaaacataacgatgtattattatttggtgcgagtgatagctactcgggggataaaatcatgc

SEQ ID NO: 231393 - DNA, 340 bp, Glycine max
gcagatacggcctgatgtgtatatcgtattagatgttcctgatgaaattctgatcgacagatgtgttggtagaaggctagacccagtgacagggaagatatatcatctaaagttttttccaccggatacagaagaaattaaagcaaggctgataactcggcctgatgacactgaggagaaggtcaaatctcgcctaaacatatacaagcaaaatgcagaagcagcatcttcctcttactccagcataacacataagattgatggaagtcattcaaaagaagcagttttcaaagaaattgaatctttattatctcaattgcaacaggataaagtgaaaata

SEQ ID NO: 231394 - DNA, 352 bp, Glycine max
ggttgatgaatccaccccagagtttctctctctcaatcatattcctcttagtcctgatacccttttagaggtgaacggtgttaggagaagcatttactctgatggagaagagtcttcagttctgagaagggatagagtggataagaaatccgaggaagctacctttgtgaacactgatagtatacgttttaccgggagcatgaaatttgaggtttatgataaagagcattgcattctctctggggttctggagatgtctaatagcaatggttttgttggtggatcaagaagttgtgtgaagagatggagtatgatttgtcaaacagaaatgtcacctggttgtggctttttc

SEQ ID NO: 231395 - DNA, 368 bp, Glycine max
gtacgtaagctcggaaatcggttcgaagataaaaaccatggcaataacactcaacaatggcttcaggatgcctatcattggattgggcgtgtggcgcatggaaggaaacgaaatcagggacctaattctcaattccatcaaaattggttatcgccattttgattgtgctgctgactacaaaaacgaagcagaagttggagatgcgcttaaggaggcttttgatagtggccttgtgaagagagaggatctcttcattaccaccaagctttggaattctgatcaaggccacgttcttgaggcgtgtaaagacagtctcaagaagcttcagttaacgtatctagatttatatcttgttcactttcctgttg

SEQ ID NO: 231396 - DNA, 303 bp, Glycine max
actggctacaagttcaagccagaggctcacaatccgtattttgtcatcgatgacgaagaggaagaggctgccgcagaggccttgaagcttgaagatgaatttgaattgtaatttctttcaaaatacaaaattagttgttgaacaagttggtaccatgctcagcaatgctctcaggtttcatctcaacagccagtagaaatttgcatgttacattttatgggtatagtcattattcataaatcattgtgctatattttgtgttctggactcatgccagtttttgcattagtgttataatatcct

SEQ ID NO: 231397 - DNA, 383 bp, Glycine max
gccgaagaggaggacaacctgctgaacgccgagcaccacttcgcgagcttcaaggccaagttcgccaagacctacgccaccaaggaggagcacgatcatcgcttcggcgtcttcaagtccaacctccgcagagccaggctgcacgccaagctcgacccctccgccgtccacggcgtcaccaaattctccgatctaactccggccgagttccgccgccagttcctcggcctcaagccgctccgcttcccggcgcacgcccagaaggcgcccatcctccccaccaaggatctccccaaggatttcgattggcgagacaaaggagccgtcactaacgtcaaggaccaaggggcgtgtggttcgtgttggtctttcagtacgaccgg

SEQ ID NO: 231398 - DNA, 396 bp, Glycine max
gtgtggtgtaggtgaagtgcaatctgtgttgatgcgttccacgttttgctgtcacttgaacctttcacccgtcatgattatgaagggcttctctgctcccatttcatcatatgtttcgcctcgagctcaagccgtcactgagccaccggcgcggattggctttttgggcctcggaatcatgggctccccaatggcccacaatctccttaaagctggtgttgatctcactgtttggaataggaccaagagcaagtgtgaccctctaatcagcctcggagcaaaatataaaccatctcctgaggaagtagcagcatcttgtgatgtcacctttgccatgctcgctgatcctcaaagtgcagtggatgtcgcttgcgggaagcatggggctgcaaatgg

SEQ ID NO: 231399 - DNA, 355 bp, Glycine max
aagcccggaattcggctcaaggtaggcccttccgagacccgaagcagccagggggatcgatttcaaggccggaggtaagagcaaaaagaccaaaagaacagcacccaagtccaatgatatctatctcaagctcttggtcaagctttatcgcttccttgttcggagaactggcagcaacttcaatgctgttatacttaagagattgttcatgagcaaggttaacaaacccccattgtccttgtcaaggttgattaagtatacgaaggggaaggaagataagattgcagtggtggtggggtctataagcgatgatattcgtgtttatgaagttccaccattgaaaattacagcactc

SEQ ID NO: 231400 - DNA, 374 bp, Glycine max
aggagctagagaatgatgatgaagtctgctatgtgtgcagtggtggttgtagcacttcttcttctggcggaggtggggcccatggctgaggctgtgacatgcaccccaacagagttaagtccgtgtcttccagcaatcacttccggtgctaaaccttccaatgcttgttgcacgaagctgaagcagcaaaaaccatgcttatgtggctacctcaaaaacgctagcttgaagcagtatgttaactctcctaatgcccgaaaaaccgttgcttcttgtgggattccctttccaacttgttaattaattaagccttcttataattaaagtgtgggatatatatatatatatagataaacagtttaatttatacacac

SEQ ID NO: 231401 - DNA, 376 bp, Glycine max
tcggggaattccaattccacattttcaagaaataaggaggcaaaaatgttcatatatgaattggaattatttgttttcttattaggcctatcctgaagccaaaggaaatgagatcggaattcctcggggaattccaattccacattttcaagaaataaggaggcaaaaatgttcatatatgaattggaattatttgttttcttattaggcctatcctgaagccaaaggaaatgagatcggaattcctcggggaattccaattccacattttcaagaaataaggaggcaaaaatgttcatatatgaattggaattatttgttttcttattaggcctatcctgaagccaaagggaatgagattgggaattcttcgggg

SEQ ID NO: 231402 - DNA, 339 bp, Glycine max
ctcaactccacgatatcgatgccctggctaaaatggttgatcctacattggaaggattataccctgtgaagtccctttctcgatttgcggatgttattgctctgtgtgttcagccggagccggaattccgaccacctatgtcagaagtggttcaagcgctggttcggttagtgcagcgtactaacatgagcaagaggacgtttggaactgatcaaggaggatccaacagagggggtgatgaccaagatacacaagacatgtaaatgggaacaaaaaaggcttgtgttgatagaatggcagaaaaggaaatgatagtcttcagatttttatcacttcttt

SEQ ID NO: 231403 - DNA, 370 bp, Glycine max
ttgggagttaggttctgcacgctctgcttccagcgagtgttctttcttcgtttcaacaccttaatttgcacacgctgcttcttcagcttgagaaatggcacaagaaacctttctattcacatctgaatctgtaaacgagggtcaccccgacaagctgtgcgaccagatctctgatgcagtgctcgatgcgtgccttgaacaggaccctgacagcaaggttgcctgtgagacatgcaccaagaccaacatggtcatggtctttggagagatcacaaccaaggccaacgtagactatgagaagattgtccgtgacacatgccgcgaaattggattcatctctgatgatgttggtcttgatgctgacaaatgc

SEQ ID NO: 231404 - DNA, 365 bp, Glycine max
ggctaatcctgaagaatatccaaatttgtttgaagattggcaagttgcactagctgtcgaatctaaagctgtggaaacaaggaatgtgtaccctcctgcggagcagtacgtcaaccatgctgacaaatcacacattacccttgttgaagcttttagaagcatgcagattgaggaaggagaggagcatctggagaatggggactctactcatgagttgactgaacgaaatggagaagagcactacacagaggagcaggaggaacagaatggagaggaaggaagccaagatgaggcagttgtagtggatgcagattctacagatggtgcagtactcgttaatggtaacgacgctgacgaagagtggg

SEQ ID NO: 231405 - DNA, 402 bp, Glycine max
ctacttctttgctaaaatccatggtggctggggatggagattgagtttgggaggtgctatggtccctgcccttataatcacaataggatcactagtccttccggacactcccaattccatgattgaaaggggtgatcgtgaaaaggccaaggctcagcttcggagagttcgcggcatcgacgatgtggaagaagagttcaatgaccttgttgcagctagtgaatcctccagaaaagtggagcacccgtggaggaacttgttgcaaagaaagtacagaccccacctcaccatggctgtgctgattccattcttccagcaactcactggaatcaatgtcatcatgttttacgcgccggtgttgttcagctccatcgggtttaaggatgattctgctctaatgtc

SEQ ID NO: 231406 - DNA, 392 bp, Glycine max
ggggtgcaaggattggtaccatcctgcttgcgtgggcatgactattgaagaagcaaagaaattggaacattttgtttgttcagaatgttcatctgatgatgacatgaagaaaccccatgctacattttctgtatcaccaggatctgatgtcaaggttgagccaaagcggcggaagagatgaccatcacgaagaattaactcatcttgcgaatgcaactcttgctgaatttcgcgggctatgtggtagctgttgtgtgtgtattgtacagcttctaccagaggctataaaaacatcattttatgtatttgactcaggctatgtatgtattggtcttagatttatgacagacattgatctgtttcccttgtgtccagaaagagtaactcctgtc

SEQ ID NO: 231407 - DNA, 339 bp, Glycine max
gaggaaatgcagaggccaggtaccccactatacaacatcaaggcatacctccctgtcatcgagtcctttggtttctcgagcacattgagggctgcaacatcaggccaggccttcccacaatgtgtgtttgatcactgggacatgatgtcttctgacccattggaggctggatcacaagctgcacagcttgtcactgacattcgcaagaggaagggcttgaaggaacagatgactcctctctccgagtttgaagacaagctttaaatttgtttcatgaattattttactttgaacttagtcgaatttattttctcttgtgaacaatgctactttagattt

SEQ ID NO: 231408 - DNA, 353 bp, Glycine max
cttagtctccccagacggttacatctccatttgcggctacggttccctcctctccgagacaagtgccagaaccactttccccgacctcgtcaacttccgaatcgcccggttaactggtttccgccgtctcttcaactccgtcggacgcatctttttcactcaccgtgttgccaatatcaaaactcaggaaattgctggcctttctgttgaaccatgtgatggtgaattcgttgttgtagctgtttttgagataaagaacacagagattccagcatttattgaaagggagcgcgaatatcgttttttagctgttgtccctgaaacactagatgggaagccctttatcaatccag

SEQ ID NO: 231409 - DNA, 377 bp, Glycine max
gaccgtctgaaccaagtgcttcgatgggctttaggttcggtggaaattctttttagtcgacactgtcccatctggtatggttatagtggaaggctaaagtggctcgagaggttcgcatatgtgaacaccacaatctatccagtcacttccattccccttctcatgtattgtaccttacctgctgtctgtctcctgactaacaagttcattattccacagattagtaacattgcaagtatatggtttatctctctctttctttccatctttgcaaccggtatccttgagatgaggtggagtggtgttggaattgatgagtggtggagaaatgaacaattttgggttaatggtggtgtttcgggccatccttttgccgg

SEQ ID NO: 231410 - DNA, 281 bp, Glycine max
gatggaagcacttgcaattccacaatcaaagtgttttcaaagcgctatccagtttgccatgtctaaaaggttgatagcagctcctgaaccaattcatgctatagctacactcatttgggaacctattcattgattagaggctggagaagccaaagttattctgacagcaatgtgtgaacatggacattttgatctgccagcttacgaaaagtccttgcagagtaactcgtttgacctctcattcacaaacgaccaaatgaagccttcattggccattattc

SEQ ID NO: 231411 - DNA, 363 bp, Glycine max
atttaccagctatacttgttccttttgaaggttagaagtgctacaatacaaacaatggcagctactcaggaagatgtgaagcttttgggtattgtgggaagcccatttgtgtgcagggtccagattgcccttaagttgaagggagttgaatacaaatttttggaagaaaatttgggcaacaagagtgatttgcttctcaaatacaaccctgttcacaagaaggttccagtgtttgttcacaatgagcagcccatagcagagtctcttgtgattgttgaatacattgatgagacatggaagaacaaccccatcttaccttcggatccttaccaaagagccttgggtcgtttccgggccaaattc

SEQ ID NO: 231412 - DNA, 391 bp, Glycine max
ggctgggcctggtctcttaaccagttccgctccttccgttggaaccttaccgccagcgctgcaaggcccaaccctcagggctcataccactacggtcagattaacatcacccgcaccatcaagttggtcggcacccgaagcaagatcggcggcaagctccgttacgcactcaacggtgtctcccacgtcgaccccgaaacccctctcaagctcgccgagtactacggtgtcgccgacaaggtcttcaagtacaacctcatctctgacgccccagacgccgccatcgcctcccgcgaccccatcatcgcccccaacgtcatcaacgccaccttccgcaacttcatcgaagtcatcctcgagaaccccaccaaggtcacccagtcctacaacc

SEQ ID NO: 231413 - DNA, 402 bp, Glycine max
gatagctagaagcaataagatgaaaatgaaagtgcttgttttgtttgttgctacagttttggtagcatatgaatgccatggctcagactaccagaagttccctctccaaatgaaaactgggtttggtgggcaatacagcaatgaggtggcatgtgccagttggaggcttggcgtggaagcaaacaacgtagtcaagtggcaaactgttcctgcagcttgcggagagtacatagctgactacgttctaggagaccaatatagatcagattccaaaacagttaaccaacaagcttatttctatgctaaatccctcaaactcaccaacaaagatgtctttgtcttggacgttgacgacactactctctctaatctccagtattttgctaaccatggatttggtgt

SEQ ID NO: 231414 - DNA, 396 bp, Glycine max
ctcaatcttcattgtcctgttcttcccctaggtgacacacacacgcagagatcatagcttgtgttagtgaggttagaagataaagaaagaatggcatttgcaggaacaacccagaagtgtatggcctgcgacaaaacggtttatctggttgataagttgaccgcggataaccgagtgttccacaaagcttgcttcagatgccatcactgcaaaggaaccctcaagctgagcaactacaactcttttgagggagttctttactgcaagccacattttgaccaactgttcaaaagaactgggagccttgacaaaagctttgaagggacaccaaaaattgccaagccagagaaaaatttggaagagaaacctgcagcagccaaagtctcaagtatgttt

SEQ ID NO: 231415 - DNA, 376 bp, Glycine max
gaaaaagaggcaaaagtgtaacatctcaaccattatgcttgagatggatcggatgctaagaccgggaggacgagtgtatatacgcgacaccacacttgttataggtgagcttcaagaaattgcaactgcattgggatggtcaactaccataaatgatgtacgagagggtcgctattcaagctggaagatattaacgtctgataaacggttctgaattgctcaattgcgtcagtaacttatggaacaccatatatggtactcccaactgaaatctcattttgtgccagaaatgttggccaaaactaacccataatttgccagaaacggtagtcgtaattacaatgttcaatcccaactaacaagttttcctctaaaa

SEQ ID NO: 231416 - DNA, 367 bp, Glycine max
acattacaggcatggttaacttatttctggagaagagctttgtttcatggtgtggaagaagatattgcagaagaacgccttcagttttggattgcccgcagtggacagtcaccaagttcacatgatgctgttgatgttgagcgaggcttgttggagttgaggaagctgagtatagaacagcaactttgggaagcatcacggaagggaattgatcagcttcaggggtcagcagatgctaatcataagcatgcctctgactctgatgcctcatcctgattgtctgagcccccattagttcttaatcgattctttgtcctatatgtatacttttgtttttgttttgttttccacacaagttttccaaacc

SEQ ID NO: 231417 - DNA, 358 bp, Glycine max
ggacactggtggaaagatcaagaagggcgccggaggaagaaagggcggcggcccaaagaagaagccggtttcaaggtccgtcaaggccggtctccaattccccgtcggaagaattggccgttatttgaagaaaggaaggtacgcccagcgtgtcggtaccggtgctcccgtttacttggccgcagttctcgagtacctagctgctgaggtgcttgagttggctgggaatgctgcacgtgacaacaagaagaacaggattattccgagacatgtgctattggctgtgaggaacgatgaggagttggggaaattgcttgctggtgtcaccattgctcatggtggtgttcttccgaacatt

SEQ ID NO: 231418 - DNA, 350 bp, Glycine max
ttcaagggttcatttaccaagggaagggttttgtgatgattgatgagtcagtttatgaataaaggctgttggagtgaggatgtagtcattcattgtgggaagggagtgacaaccatcattggaggaggtgactccgttgccgctgtggagaaggttggacttgcagacaagatgagccacatctccactggtggtggtgccagcttagagcttcttgagggaaagcaactccctggtgtccttgctcttgatgatgcttgagcaaaaatcattcgttcctttgaagtttgtgctttatattattattatggttgggtttcagccaacagtggattaaggtacaatgagag

SEQ ID NO: 231419 - DNA, 348 bp, Glycine max
atgaagacgagttgagtcacttcgttaatactggcgcacttgatgagctcattcttgccttctctcgagagggacccaccaaggagtatgtacaacataaaatgatggagaaggcttcagaaatttggagcatgatatcacaaggagcttacatttatgtgtgtggtgatgccaagggcatggccagggatgtacaccgcgccctgcacacaattttgcaagagcagggttctctcgatagttccaaggctgagagcatggtaaagaatctacaaactactggcagatatttgcgcgatgtatggtgatgatatctgaatgcaagccgtggggggtgacaagatatta

SEQ ID NO: 231420 - DNA, 373 bp, Glycine max
cttcttcttctcttaaaagttattaagagcttttgcttttctttctgcgcgcttttcccaattaagtagttcttccttttctcaaagcaaaaaaaatgttcatcgagagtttcaaggttgagagtcctaacgtgaagtacacagagactgagattcagtccgtgtacaactatgaaaccactgaacttgttcacgagaacaataatggcacttatcagtgggttgtcaagcccaaaactgtcaaatatgaatttaaaaccaacacccatgtccctaaactaggggtaatgcttgtggggtgggggggaaacaatggctcaaccctcactggtggtgttattgctaaccgagagggtagttcatggggaagaaa

SEQ ID NO: 231421 - DNA, 401 bp, Glycine max
gcttctcactgatctccattcccattccatggcttccactgaatcatcccctttcaagaaaattcagattcaaagggatgacactacatttgacgcatatgtggttggaaaagaggatgctcctggaattgttgtgattcaggagtggtggggtgtggattacgaaattaagaaccatgccgtgaagatttctcagcttggtagtgggtttaaagctcttattccagatttatacagaggaaaggttggtctggatgttgctgaagctcagcatttgatggatggtcttgattggcaaggtgctgtgaaggatattgctgcttcggttaactggcttaaagcaaatggctcaaagaatgctggtgtaactggattttgtatgggaggtgctctctctattg

SEQ ID NO: 231422 - DNA, 342 bp, Glycine max
ttaagactggagctccatgcaggtcagagcgtcttgctaaatataaccagctcttgagaattgaggaggagcttggtgcggaagcagtgtatgctggagctaacttccgtacccctgttgagccctactaaagttttcaagtggaaaaaacctggagatccccacgagtttgagcaatgagatttggatgcgcggttttagttgtgatcaataagtcgatagttagaacaatagtcttggtataaggaccttgccaataattttttagttctgattcacagagctaagacagttccgtcttagactttaaaagttttgatatttagctttaatacttgaagt

SEQ ID NO: 231423 - DNA, 360 bp, Glycine max
gaatactcttcttcaatcaagcgaaggtggtctcacttgactcgattgcaagtgatccacgacacactgttcgcttcacaaaagcttcgaatccaattcctcagtaacatctgcaagaagtcttctccttcaccatgccaccaaagcctttagactatgggtcaataaatgaaaacgtgaagaagagtcaatatgctgtcagaggtgaattataccttcgagcttctgagcttcagaaagagggcaaaaagattatatttactaatgttggcaacccacatgcattgggacagaaaccactgagcttccctcgtcaggttgttgctttgtgccaagctccattcctacttgatgatccta

SEQ ID NO: 231424 - DNA, 361 bp, Glycine max
ctctttcttcctcttcctcagtagtgcgattttcgattctcttctctgcaactatgcctaaccctaaggtcttcttcgacatgaccatcggcggtcaacctgccggccgcatcgtgatggagctctacgccgacgtgactccgagcaccgccgagaacttccgcgcgctctgcaccggcgagaagggcgccgggcggagcggcaagcccctccactacaaaggctcgtccttccaccgcgtgatcccgaacttcatgtgccagggcggcgacttcaccgccggaaacggcaccggaggcgagtcgatctacggcgccaagttcgccgacgagaacttcgtgaagaagcacactggtcccgg

SEQ ID NO: 231425 - DNA, 344 bp, Glycine max
agacagagcagcactcacattcacaacgaaggtttcctattcatcagacatggtgaaggcaatcagagttcacgaactcggtggccctcaagttctgaagtgggaggatgtggaaattggagatccaaaagaaggcgaggtccgtgtgaggaacaaagccattggggttaatttcattgatgtctactttcgcaaaggagtttacaaagccccttcttttcccttcactccaggtatggaagctgttggggttgtgacagctgtgggtgctggactcactggtaggcaggttggagatcttgtagcttatgcaggtcaaccaatgggttcatatgcctaagagc

SEQ ID NO: 231426 - DNA, 363 bp, Glycine max
ctccgatggctaatccctcactcttgttcttcagtctcctcctattatccgccaccgtagccgccgccgaacggatcgacgatgaacacgaccttctgatccgtcaagtggtgccggatgcggaggaccaccacctgctcaacgcggagcaccacttctccgccttcaagacaaagttcggcaagacctacgccacgcaggaggagcacgaccaccgcttccgtatcttcaagaacaacttgctccgcgccaagtcacaccagaaattggatccctccgccgtccacggcgtcaccaggttctccgatctcactccggcggagtttcgccgccagttcctcggcctgaagccgctccgccttc

SEQ ID NO: 231427 - DNA, 399 bp, Glycine max
gtgaattttgcatacgctggttcaactgcacttgataaggattttttagtacaaaaaagaatcaatatagaggaagctactttttcattgagtgctcaatttgattggtttaaaggactcaaatcctccctttgtacaagcaaagaagagtgcgataattacttcaaaaactcattgtttctagtaggagagattggtgggaatgacatcaatgcactcatcccatataaaaatattacagaacttcgagaaatggttccatcaattgttgaaacaattgccaataccacctctaaattaatagaagaaggagcggtagaactagtggtaccagggaacttcccaattgggtgtaattctgctgttttggcaatagtgaatagcgaaaagaaagaagac

SEQ ID NO: 231428 - DNA, 400 bp, Glycine max
attattagtgcagtgctcaccagcagggcaattttccaaaggatgaagaattatactatctatgctgtgtcaatcaccattcgtatagtgtttggtttcatgtttattgcattgatttggaaatttgattttgcacccttcatggtgttgattattgccatactaaacgatggtaccatcatgacaatatccaaggatcgagtgaaaccatctccaatgccagacagctggaagctgagggagatatttgccactggtgttgtgctaggagcttacatggcactaatgacagtagtatttttctggctcatgaaggataccgacttcttctcggacaagttcggtgtgaggtctataaggaacagccccggagaaatgatggcagccctgtacctacaag

SEQ ID NO: 231429 - DNA, 361 bp, Glycine max
gttttcttcagaaatttgccatcgttgagagaagcgtgagagccttagtcgttcaagatgagagctaagtggaagaagaagcgcatgaggaggttgaagaggaagcgccgaaagatgagacaaagatctaagtaggtgcttgagcaggagttgagatgagctttccatctgctaccagcctcatgacattttaggctgttatggctcttatgatcttgaggtctagtcgctaggggagcttcactcttgacttagtttgctttactggtcctggtcctggtccaagactattgagtgtgggttaagttgtgatgtttagtgttttgtggtatctaattaagtaccgggttttaaacctttt

SEQ ID NO: 231430 - DNA, 356 bp, Glycine max
ctctttcttcctcttcctcagtagtgcgattttcgattctcttctctgcaactatgcctaaccctaaggtcttcttcgacatgaccatcggcggtcaacctgccggccgcatcgtgatggagctctacgccgacgtgactccgagcaccgccgagaacttccgcgcgctctgcaccggcgagaagggcgccgggcggagcggcaagcccctccactacaaaggctcgtccttccaccgcgtgatcccgaacttcatgtgccagggcggcgacttcaccgccggaaacggcaccggaggcgagtcgatctacggcgccaagttcgccgacgagaacttcgtgaagaagcacactggt

SEQ ID NO: 231431 - DNA, 356 bp, Glycine max
gctggcttttccattcctgaaccggcagtgcagccagacaccaagtcagagaagtctgttcctatgaataacagcactattgatccctttgctgctgttcctcttaataattttgatggatctgatatttttggtgactttacttctcaatctgattctgtgtcttcccagccctccaataatgttttcagtgatggcaagcatgataatgtgactggtaaatctttagcagactctaaagtttcacctaaaaaggataatttccaggtgaagtctggcgtctgggctgactcactaagccgtggattgattgatctcaatataactgctcctaaaaaagtatccctttgcgacgt

SEQ ID NO: 231432 - DNA, 348 bp, Glycine max
ggctgaatattgcctcgagcttagacatctatgttccaagggatgaaagatttggtcacttgaaaatggcggattttcttgcctatgcactgaaatccatagttcaagttctcaaaccggagtttgaatctctattcgacagcacccctaatgagtttgacaaatttgaagatgtacttaaactctatgaaggtgggattgaggtgcctgagggtatacttacggaagttagggataacatccctgcagagatgcttaaggaaattttccgatctgacgggcaaaggcttctcaaatttccggtgcctcaagtgattgcagtggataaatcggcatggcaaactgatg

SEQ ID NO: 231433 - DNA, 362 bp, Glycine max
cttcaaaacactcataacacaaagcacaaagcaaagctcatccttgagttaaaaaatggcagcagcttcttccatggctctctcatccccatccttggctggcaaggccgtgaagctgggcccatcagccccagaagtgggaagggtgagcatgaggaagaccgtcaccaagcaggtctcctcaggaagcccatggtacggcccagaccgagtcaagtacttgggcccattctctggcgagcccccgtcctacctaaccggtgagttcccaggcgactacggctgggacactgctgggctttccgcagacccagaaaccttcgccaagaaccgtgaactcgaagtgatccactccaagtggg

SEQ ID NO: 231434 - DNA, 354 bp, Glycine max
ggcgcttaatctttacaggaagaagactggcagtgacaagtacttttggattcatcttgataaacgggtgcctactggggcagggcttggcggtggaagtagcaacgctgcaactacactatgggcagccaatcaatttagtggctgtcctgcctctgagaaagaactccaagaatggtcaagtgagattggatcagatattcccttctttttctctcagggagcagcctattgcactggtcgaggagaggttgttcagaatattcctccaccagtatctctagatgttccaatggttctcataaagcccccagaagcatgttcaactgccgaagtctacaagcgtctatgttt

SEQ ID NO: 231435 - DNA, 366 bp, Glycine max
atcatatctccatttccatttcctctctctcagtttccaagaatcttaagctatgggaaagtcttacccaaccgtgagcgctgattaccagaaggccgttgagaaggcgaagaagaagctcagaggcttcatcgctgagaagagatgcgctcctctaatgctccgtttggcatggcactctgctggaacttacgacgtgagctcgaagaccggtggtcccttcggaaccataaagcacccctccgaactcgctcacggcgctaacaacggtcttgacatcgctgttaggcttttggagccactcaaagcggagtttcctattttgagctacgccgatttctaccagttggctggcgttgttgccgt

SEQ ID NO: 231436 - DNA, 361 bp, Glycine max
  unsure (1)..(361): unsure at all n locations
ggagttcaacgagatggagcanataaagcacagaatagttgaagtgaatggcataaaaatgcatgttgcagagaaaggagagggtccagtggtgttgttcctccacggcttccctgagctctggtactcatggcgccaccagattctctctctcagctccctcggctaccgcgccgtcgctcccgatctccgtggctacggtgacaccgaggcaccaccttcaatcagcagctacaactgcttccacatagtgggtgatctcgttgcgcttattgactctctgggtgtccaacaagtgttccttgtggctcatgactggggagccatcataggttggtatctctgcatgtttcgccctgac

SEQ ID NO: 231437 - DNA, 373 bp, Glycine max
cgaaaatgtggaagagaacgggttttgaagaagaagcagttcaattgatcaactcagatttcagggacctaagtctagctgctaatagactcgcccatcatgccatcaaacttggtggcattggctttggagcctcttttttcggattgtttgctgccattgctgctatttatctgttgattttggatcgtacaaactggaaaacaaatattctcacagcactactcattccatacattttcttcagcttgccttcattaattttcgacgtcttcaggggagagcttggaaaatggattgctgcagttgctgttgtattacgccttttccttccaagacacttccctgattggctggaattgcctggtgctct

SEQ ID NO: 231438 - DNA, 263 bp, Glycine max
ctggtgctggggcagccgaggatgattatgctgctccttctggtggaagtggtgctggccccaagattgaggaagtggactaaatgtgtagttgctttcatccatttatctgtttaaaacttatttgatgcttttttattgaattttaacttttatgatttttgttggatgggatactaattgttttgcccgtgtgatatgaacgttgctttacgcattatgtcatttgctttatttcattagatgagaatactcattgtttt

SEQ ID NO: 231439 - DNA, 404 bp, Glycine max
gggaatcttttgctgtgtttgtcaaggaggaagaaatccctaatttgaggaacatactgctgtccatctcagaagaaagatacttagagatgcataagagggcgaaaaaggtgcaagagcattttctctggcatgctgaacctgtaaagtatgatttgtttcatatgcttcttcattcaatttggtacaatagacttttccatataagccggacatgacgatatgaattttggagacaagtcactgtgattgatagcttgatgatgtatagattgtttgagttaacaaatgaagcaagaacaatatggttagagaaaaagttcattgattctagagaaaatgttattgtttgattcatatccctagagaataattgattcataataatgttagtgtttgatcat

SEQ ID NO: 231440 - DNA, 394 bp, Glycine max
tggctaaccaaccctgacactccttcttctccgcttcctcttcgatcatcgcttcagaatgccgccgaagttcgacccctcccagatcgtcgacgtcttcgtacgcgtcaccggcggtgaggtcggcgcggcgagttccctcgccccgaagatcggtcccctcggtctctcccccaagaagatcggagaagatatcgccaaggaaaccgccaaggactggaagggcctccgcgtcaccgtcaagctcaccgtgcagaaccgtcaggccaaggtcacggtggtcccatccgccgccgcgctcgtcatcaaggccctcaaggagcccgagcgtgaccgcaagaaaacgaagaacatcaagcacaacggcaacatctcgctagacgacgtcatcgag

SEQ ID NO: 231441 - DNA, 368 bp, Glycine max
gttttctcaacatactctgacaaccagcctggtgtgcttatccaggtctttgagggtgaaagagcaaggaccagagataacaatttgttgggcaaatttgagctatctggcattcctcctgcacccaggggtgttcctcagattacagtgtgctttgacattgatgccaatggtatcttgaatgtctctgccgaagataaaaccactggccagaaaaataagatcactatcaccaatgacaagggtagattgtcaaaggaagatattgagaagatggttcaagaggctgagaagtacaagtctgaggatgaagagcacaagaagaaggttgaggccaaaaacgctttggaaaactatgcatacaacat

SEQ ID NO: 231442 - DNA, 367 bp, Glycine max
ggaagaagaagaaaatggaggaggaacaaaacggcggtcgtttcgacctcataatcctgggcgcctcaggcttcacaggcaaatacgtcctccgcgaagccctcaaattcctcaacaccccatcctcccccctcaaatccatagccatagcgggccgaagcccacaaaaactaacccaggcccttcagtgggcctccaggcccaaccctcccccctccctccccatcctcaccgcggacaccgccgacccctcctccctccgttccctctgcgcccgcacgggcctcctcctcaactgcgtgggccccttccgcctccacggcgagcccgtcgtggccgcctgcgccgcagcgggctgcgactacct

SEQ ID NO: 231443 - DNA, 344 bp, Glycine max
aaattcttcattctcttctcatcgatggggcagaagtctctgatctacgcgttcgtgtcgcggggaacagtgattctcgcggagtacaccgaattcagcggaaacttcaactccatcgccttccagtgccttcagaagctccctgccaccaacaacaagttcacctacaattgcgacgcacacaccttcaattacctcgtcgacaatggctacacatattgtgttgttgcagatgaatcaattggaagacagttacccatggcttttctagagcgtgtcaaagatgaatttgtgtcaaaatatggtggtggaaaggctgccacagctcctgcaaacagccttaa

SEQ ID NO: 231444 - DNA, 451 bp, Glycine max
agtatgaatgcggtggcactataaaagagatatgacgtcgcatgcacgcgtacgtaagctcggaattcggctcgagcggctcgagcagtgggaggaggctcgggactctgaccgcgtgcctgttgaagaatgagccggcgactcataggcagtggcttggttaagggaaaccaccggagccgtagcgaaagcgagtcttcacagggcaattgtcactgcttatggacccgaacctgggtgatctatccatgaccaggatgaagcttgggtgaaactaagtggaggtccgaaccgactgatgttgaagaatcagcggatgagttgtggttaggggtgaaatgccactcgaacccagagctagctggttctccccgaaatgcgttgaggcgcagcagttgactagacatctaagggtaaagcaatgtttccgttgcgggccgcaaaaccggta

SEQ ID NO: 231445 - DNA, 375 bp, Glycine max
aaaacatgcagttgcatttgttcggccagttagtgtggcctgtcaggtggtgaatgggttccatttctacgagaatggagttttcactagtgacacttgtggtagcacttcccaggatgtgaaccatgccgttcttgctgttggatatggagttgaaaatggtgtcccatattggctcataaaaaattcatggggagaaagctggggtgaaaatggctacttcaagatggaattggggaagaacatgtgtggtgttgcaacttgtgcatcttatccaattgtggcataaattgcataacaatatggtccctggtgactaccaccttgtcatgcttcagagtttagagcgtattgctgatgccagtattgatgaat

SEQ ID NO: 231446 - DNA, 375 bp, Glycine max
gaaacagtgtgatgaaaatgaaggtccttgttttcttcgttgctacaattttggtagcatggcaatgccatgcgtacgatatgttccctctccgaatgaacactggctatggtgcccgtactccggaggtgaaatgcgcaagttggaggcttgctgtggaagcacacaacatctttggctttgagaccattcctgaagagtgcgttgaagcaacaaaggaatacatccatggcgaacaatatagatcagactccaaaacagttaaccaacaagcttacttttatgccagagacctcgaagtccatcccaaggacacatttgtgttcagtatagatggcaccgtactctctaatattccatactacaaaaaacatg

SEQ ID NO: 231447 - DNA, 396 bp, Glycine max
aaaaccaagtactacaagggaagaagaacttagctacaagctaaggaaggatcaaagagaatggctcaagcaatggcatcaatgactagcttacgtggttcctctcaggctgtgttggaaggtagccttggctccacacgcttgaatgtggggagtggaagcagggtggcctcagtcacacgtgcagggttcacagttagagcacagcaacaacaagtgaatggtggtgaggtacaaagtagccgtagggcagtgctttcacttgttgctgctggtttgaccactggctcttttgttcaagctgtgcttgctgatgccaaacctatcaaagttggaccacctcccccaccttctggcggattacctggaacattgaactcagatgaaccaagagac

SEQ ID NO: 231448 - DNA, 398 bp, Glycine max
gggatgtgtcttcacatatgatgctgttggttcctatgagagggttggatatagctctcagggttctggatccacacttattatgccatttcttgataaccagctgaagtctcctagcccactcctgttacctgcgcaggatgctgttactccattgtctgaagcagaagcagttgatctggtcaaaactgtttttgcatctgcaactgagagagatatatacactggagataaggttgaaatcgtcgtcctaaatgccagtggtattcgtcgtgaatacatggacctaaggaaagattaatgctttacagaaatttactgttggagataccagacttggattgagaatgtttgaaatgcttctagaattttaaatgacatagtgggtttttcacatg

SEQ ID NO: 231449 - DNA, 409 bp, Glycine max
ggaatggtgaatcatcccgaggtagcacaattaaattgagcatagagatttgtttctattccacgacccatcccttctaagatgacaagatctgcatcgctggcaaggtaagcaagctcctgtgacactcttgtaagatcaatgacaggtaaatcattgccagagttcgcaattaagagatttgaagtactgacacccacaagctgtccatcttcatcctaatgctgcagacctgcaatttttctactgttaatccttcatcttgatacaccattacatgcctgtagtttggatactctttaaaatgtcattttagtattataaaggtgataaaaccaaaacatcttacttgtaataagaagttattctacatacatgacttggtctcactctaacgaaaaggtaatat

SEQ ID NO: 231450 - DNA, 393 bp, Glycine max
ctgaaagaaagttgctaacacttggcaccacttatcaacttatcatagttgataacatcaaaggcacaacattgagggaatgagggttgttatatcagcagtatgtgctattgtgctattctcttatgctgctgcgtacgatcctttggatccaaacggaaacataacgatcaaatgggatgttgtgtcatggacaccagatggctatgtagctgtggtaacaatgagcaatttccaaatgtttcggcacatcatgaatcctggatggaccttgggatggacatgggcaaagaaggaagttatatggtccatggtacgagctcaaaccacagaacaatgagactgttctaagttcaaagggaatgtacctcactgctgcaagaaaactcccac

SEQ ID NO: 231451 - DNA, 351 bp, Glycine max
tcttctcctccaaatgaacccggttcacaagaagattccggttctcatccacaatggcaaacccatttgtgaatccctcattgctgttcagtacattgaggaggtttggaatgacagaaatcccttggtgccttctgacccttaccagagagctcaggctagattctgggctgattatgttgataagacgatatatgatcttggaaggaagatttggacatcaacaggagaagaaaaagaatctgccaagaaggagttcatagaagcccttaaattgttggaggaacagctgggagacaagacttattttggaggagacaatctacgttttgtggatatagcgcttgttcc

SEQ ID NO: 231452 - DNA, 289 bp, Glycine max
gcaaaggcatatgaaaaatcttcaatcaatgagtccatgcagcttggaaaatgggtagcaagtggcgacaacactcttgttaaagatagtatcatctcccttgaagaggggaaggtcaaacaggagatctcagtgagacttcaacatgttgaaagaggagtgttagagattgaactcgaatgtgttcctctaactcaatagttgagatagatgttaagggtcaaaacttagcataacacaatttggagcattatcactatagatgtcctttctctgttctcctttgtac

SEQ ID NO: 231453 - DNA, 373 bp, Glycine max
gactaaactccgacgacgcctcccgtcgctcctcgatccggtgatgccatattcgccaacgtcgaacgcgtcaatgcggagctgtttactttggcgtatggcgcaattgtgcgtcaattgctcacggatgtggaagaggctgacgaggttaacacgcagcttgatcaaatgggttacaatattgggatccgtttgattgatgagtttttggccaagtcgaaggtctccagatgcatctacttcagagagacgactgatgttattgcaaacgatggttttaagatgttcctcggtgttactgcatctgtgaccaattgggatgctgatggaacatgttgtagtaatgttttggaggataaacctttggtagatt

SEQ ID NO: 231454 - DNA, 337 bp, Glycine max
aaaaactatccaagaatcaaaactattgttaataaagttggaaccattacaaatgaatttcgtgtgccagagtttgaaattttagcaggagagcataatatgattacagaagtgaagcaatatggtgccacttttaggcttgattacagattggtttattggaactcgagattggaacatgaacacaaaaggttagtctcaatgttccaagctggacagaccatttgtgacatgtttactggtataggcccttttgccattcctgctgcacaaaaaggatgcatagtctatgcaaatgatttaaatccggatagcattcactatctgaggattaatg

SEQ ID NO: 231455 - DNA, 326 bp, Glycine max
gggtgattaccacaagtaccttgccgagttcatgactgtggcacataggaaagaggcattagagagtactttgcttgcttacaaatctgctcaggatattgctcttgctgacttggcccccactcaccccattatgctggtacttgctctcaacttttctgtcatccaatattagatccttaactcgccaggttaggcttgttatcctgccatacaggaatttgttgaggcatgttcagagcttgacacattgttgtgattagtcatagaacgatagtacgttgatcactgcaacttctccgtgacaatctgactttgtggacatc

SEQ ID NO: 231456 - DNA, 254 bp, Glycine max
agattattggagcagtgggaattccagtggaacatttatgtagtggaacaagagttgagggctttttccccatccttggtgctaatgggaaaccatgtaagggtggatcagtgttgagtttatccattcagtaaacccctgttgaaaaggtgcctctttatagccatggagtaggtgctggccctgattatgaaggggtccctggaaccaactttcgccttagaaaaggtggaaaagttacactttatcaggat

SEQ ID NO: 231457 - DNA, 376 bp, Glycine max
cgccggatctgctaaaatacgcttgatccatatgggcctcctcgaccacttgtgggacgacaccgtcgccggcccaaggccggaaaacggtctcggcaagctccgaaaacaccacaccttcactttccgacctagctccggcaaggaaacggagggcgggagcgtgagatcgtacggagacgaatcgtcggaggaagcgacgagagtgacgcgtagtatcatgatcgtgaaaccgcccgggtaccagagtggatcgcctccggtttctcccgccggttctactactccgatttctccgttttccggaggaaaagattcgtttcggtttcgaagaaggtcggcatcagatgcgtacgagaagagagggcagaacaga

SEQ ID NO: 231458 - DNA, 374 bp, Glycine max
gttgtaactccgttcttcttcttttgttgttctgtgtctgtgtttgttttttctctcacctgaaaatgtcttgctgcggtggtaactgtggttgcggaagctcctgcaagtgcggcaacggctgctgaggctgcaagatgtacccagacttgagctacactgagtcaaccagcaccgagaccttggtcatgggagtggcacctgttaacgctcaatttgagggtgctgaaatgggtgtgcccgctgagaacgatggctgcaaatgtggaccaaactgctcctgcaacccctgcacttgcaagtgatgtgttgggagagcaagcttcaagcatagatagcccttaattatgaataatgataaactattaatgtgt

SEQ ID NO: 231459 - DNA, 290 bp, Glycine max
cccaattcgaaacccttaatcctctcacactcacatgttgattgatcttttgggtaccatttggacacaatctgccaccgttcaagattcccgcgggggacacattttcgacggcgggagacaaagttccttcggccattttcccaaaggcccgtttgaagcttccgaatgatggatcgcttcggcggtcatcggacaacaaccacaagttccctcatcaccgttgagacatacaggatctatatcttcaaggttctgaagtatgtccatcctgatattggtatctcaag

SEQ ID NO: 231460 - DNA, 378 bp, Glycine max
  unsure (1)..(378): unsure at all n locations
agcattttcagaggaacaatggcgggtagggtttcgacgtgcttcttcttcgtgtttgctctttctctccttcttccttttcagatctccgctgaggaatcatcggagaaagagttcgtactcacattggatcactctaactttcacgacactgtcagcaagcacgatttcatcgtcgtcgagttctacgctccatggtgtggccactgtaagaagcttgctcccgagtatgagaaagctgcttctatcttgagtagtcatgatcctccggttgttttggctaaaattgatgccaatgaggagaagaacanagaccttgcatctcaatatgatgttaggggatacccancaattaagattctgagaaatgggggaaag

SEQ ID NO: 231461 - DNA, 381 bp, Glycine max
cgccaatgctgcgtacattggcactcctggaaagggtattcttgctgctgatgagtcaacagggacaattggcaagcgtttggccagcatcagtgtagagaacattgaatccaacaggcgagctcttagggagctgcttttcactgctcctggtgttcttcaatatctcagtggtgtcatcctctttgaggaaaccctctaccagagcacagctgcaggcaagccctttgtgaatgtcttgaaggaagctggtgtgcttcctggcatcaaggttgacaagggcacagtcgagcttgctggaactaatggagaaaccaccactcagggtctagatggccttggtcagcgttgtgccaagtactacgaagctggtgcacgttt

SEQ ID NO: 231462 - DNA, 384 bp, Glycine max
cctctgcccctaacaccaataaagatggaaaagccatcgataaggctagtgcgataagatcgaaacattctgtgactgagcagcggagaaggagcaagataaatgagagattccagatattgagggatctcatacctcatagtgatcaaaagagggacacggcatcatttttattagaggtgataaagtatgttcagtacttacaggagaaggtacaaaagtatgaaggttcatatcaaggttggggtcaagaaccctcgaagttgatgccatggagaaatagtcattggcgtgtccagagctttgccggtcaacccacggctgtaaagaatggtttgggtccagtatcaccttttcctggaaagtttgatgaaagcaatgtta

SEQ ID NO: 231463 - DNA, 381 bp, Glycine max
ggcacacattcacctgaagcttccaaagcaatggcttcccttgcagcatccactgctgctgcttcccttggcatgtcagaaatgcttggaaaccccatcaacttcagtggtgccacaaggccagctccatctgcttctagtcctgcctccttcaagactgtggctcttttctccaaaaagaaggctacaccaacacctccaaaaaaagctgctgctgctgctcctgccaatgatgagcttgccaagtggtatggtcctgacagaaggatcttcttgcctgagggtctcttggaccgatccgaaatcccagagtacttgaccggagaagtccctggagactatggttatgacccatttggtcttagcaagaagccagaagac

SEQ ID NO: 231464 - DNA, 347 bp, Glycine max
gatggaatgtccaagcagagcttgtgcactgcagatgggccatgttgggagctgctggcattttcatcccagaattcctcacaaagattggtatcctgaacatcccttcatggtacactgctggagagttggagtacttcacagacactaccacactcttcgtagttgagctctttttcattggttgggccgagggtagaaggtgggctgatatcatcaagccaggctgtgtcaacactgaccctatctttcccaacaacaagctcacaggaactgatgttgggtacccaggtgggctttggtttgatccacttggctgggggaagtggttctcctgagaagatcaa

SEQ ID NO: 231465 - DNA, 347 bp, Glycine max
gatgaaatatccatgaatcccatgtcaaatgggttctgcacatgttgagacctgcaggcactttcatcggaaatgtcctcaaaagcagtggcctccttctggaccgctgatgatgtagagctggcgcatgagcttagttcataggcaatactacactcttgggagctccgctccttttcaatggttgggccgatcggtaccaggtgggctggtatcatcagagcaggctgtgtcagcagtgtccctatctttctcaacatcacgctcgcaggaactgatgttgggtacccaggtggggtttggtttgatccacttagctggggaagtggctctcctgagacgatcac

SEQ ID NO: 231466 - DNA, 380 bp, Glycine max
gtgatattggggcagcgcagcaatacgtaacaagttctatcattgaggaagtttccggtctccgaaaatgaacgacgcagatgtctcgaagcaaatccagcagatggtgcggttcatccgccaggaagctgaggaaaaggccaacgagatctctgtctccgccgaagaggaattcaatatcgagaagctgcagttggtcgaagccgacaagaagaagatcaggcaagaatacgaacgcaaagagcgccaagtcgaaattcgcaagaagattgggtactcgatgcagctgaatgcttctcggatcaaagttcttcaagctcaagatgacgtgatcagttccatgaaagaagctgcatccaaggaactgttgaatgtgagtc

SEQ ID NO: 231467 - DNA, 363 bp, Glycine max
atggtgggtcttagtgtagtcctggaagcccagaagagttgcatcaacaaaaagacacctcaagtcattaacaaatccaccatgctgatgcttagcagcatccacaacaaaccctcccctcaaccttcttctctttttcagccacccacttttcttgaccaatgctttctttgtgggaagagactcttgccagggaaagacatctacatgtacaaaggggacagggcattttgtaacgtggattgcaggtgcaagcagattttcagcgacgaggaagaagctattcagaaagagaagtgttctttggctgccatgatgcccacatcgtcgagttcttccatctcaacggcacctcatcaccgg

SEQ ID NO: 231468 - DNA, 326 bp, Glycine max
atcacatacagcagaaaacagttgacatgaatggcatacagctgcatgttgcagagtaaggagatggtccaatggtgttgttcctctacggcctctctgatctctggtactcagggcgccatcaaattctcatctctcagctccctcggataccgcgccgtctctcgcgatctccgtggctactgtgataccgattcaccacgttcaatcttcagctacaggagcttccacatagtggatgatcacgttgagcttaatgactcactggtggtcgactaaatgttccttgaggatcaggactgcagaagcatcataggttggtatct

SEQ ID NO: 231469 - DNA, 344 bp, Glycine max
  unsure (1)..(344): unsure at all n locations
ccggttcacggagtcactgcactattattcaaccctattcgactcgctggagggttcgcctgtgaaccctaacgataaggccatgtcggaggtttacttagggaagcaaatctgcaacgtggtggcgtgcgagggaatggaccgcgtggaaaggcacgagacgctgaaccagtggcggaaccggttcgtttcgaccggattttcttcggttcacttgggttcgaacgcgtacaagcaggccagcatgttgctcgcgctttttgcgggtggggatgggtatagggtggaagagaacaatggttgtctcatgttgggatggcacactangcccttgattgccacct

SEQ ID NO: 231470 - DNA, 383 bp, Glycine max
ctccaaatggaatagaaaaacgcactaaagattccatccatttggaacttgggagagtagagtaccattgctccactgtcgccggccaccatgtctttctcggagttccgaccactcgacgacacgtccctcatcgaatacataaagtccgtccccgccctctcctccaaactcgccgacaacctcgacgacttatcagtcaaagaagtcggagatggcaatcttaacttcgtcttcattgtttccaaccccgcaggttcttttgtcatcaaacaggctctgccgtacgttcgttgcataggggaatcgtggcctatgacgaaggagagagcgtattttgagtcgctggcactgaaagaagagggtcgtttaatccccgaaca

SEQ ID NO: 231471 - DNA, 324 bp, Glycine max
tcggggaattccaattccacattttcaagaaataaggaggcaaaaatgttcatatatgaattgggattatttgttttcttaataaggctatcctgaaaccaaaggaaatgagattgggaatcctccgggaaatccaattccacattttcaagaaataaggaggcaaaaatgttcatatatgaattgggattaattggtttcctaataagcctatcctgaagccaaaggaaatgagatctggattcctcggggaattccaattccacattttcaagaaataaggaggcaaaaatgttcatatatgaattgggattatttggtttc

SEQ ID NO: 231472 - DNA, 344 bp, Glycine max
ccaatatattccattctctctgtgtatttccctacctctcccttcaagatgcagatcttcgtcaagaccctcaccggcaagaccatcacccttgaggtggaaagctctgacaccatcgacaacgtcaaggccaagatccaggacaaggaaggaatccccccggaccagcaacgtctcattttcgccggaaagcaacttgaggacggccgtacccttgctgactacaacattcagaaggagagtactcttcacctcgtcctccgtctccgtggtggcatgcagatcttcgttaagacactcaccggcaagaccataaccctagaggttgaaaactccgacaccat

SEQ ID NO: 231473 - DNA, 337 bp, Glycine max
ctgaacaagggtttctctttctctttctctgtctgcttcttcactttctctcgtttcaatcgaaaaaaatcatgggcagaaaattcttcgtcggtggcaactggaaatgcaatgggaccactgaggaggtgaagaagattgttactactttaaatgaagctaaagtccctggagaagatgttgtagaagttgttgtgagccctccttttgtgttccttccttttgtaaaaagtttgctgcgccctgatttccatgtctcggcccaaaattgttgggttcgcaaaggtggtgcttatactggagaggttagtgctgaaatgcttgttaattttggaat

SEQ ID NO: 231474 - DNA, 376 bp, Glycine max
gtgatttcagtgagtgatcggtgttcacttgatctcatcataatcgtcagcgtcaattgaagaagatgccgatcagaaacatcgccgtcggaaggcgtgaagaggcgactcaccccgacacgttgaaggcggctttggctgagttcatctcaaccttcatcttcgtgttcgccggctcaggctccggcatcgcctacaacaagctcaccgacaacggcgctgccacccctgccggcctcatctccgcctccatcgcccatgcattcgccctcttcgtcgccgtctccgtcggcgccaacatctccggcggccacgtcaaccccgccgtcaccttcggcgccttcgtcggcggcaacatcaccttcctccgcggcat

SEQ ID NO: 231475 - DNA, 350 bp, Glycine max
atttgatgctctattggaattcttaactgtccgagaacatcttgagctttatgctagaataaaaggtgttccagattttgcaatagacaatgttgttatggaaaagttgacagaatttgacttattgaagcatgctaataaaccatcattttcacttagtggagggaataaacgaaaactgtctgttgcaattgcaatgattggagatcctcctattgtcattcttgatgagccatccacaggtatggatcccattgccaaaaggttcatgtgggatgtaatatctacgatctcaacaaggcgacgaaagactgcagtaattcttactactcacagcatgaatgaaactc

SEQ ID NO: 231476 - DNA, 291 bp, Glycine max
atttgatgctctactggaattcttaactgtccgcaaacatcttgaactttatgcatagaataaaaggtgttccacatttagcaatagacagtgtcgttatgggaaagttgacatcatttgacatattgaagcatgctaataaaccagcattttcacttaatggagggaatagacgatgactgtcagttgcaattgcaatgagtggagatccacctattgtcaatcttgatcatccatccacatgtatggatcacattgccaaaaggttcatgtgggaagtttgatctacga

SEQ ID NO: 231477 - DNA, 364 bp, Glycine max
aaggtaaaggtccttgttgttccggtgtgctgctagagaatctggtgaaggatgtcaattgttccaatcaaccaaggtcactcccaggactcttgggatcaattcatcgattttcctctccctccttccatctccagcttcttccccggcttcgaattcggattcggctcatcggtggttaacacacgtgtggactggagggagactcccagagcccacgtgtggaaggtcgtgcttcctggcttcacaatcgaggacgtgctggttgagctacaagaccatagggtgctccatgtcaacgtggagagtggtaacttcctgacgaggtttaagattcccgacaacgggtacctcgaacaactca

SEQ ID NO: 231478 - DNA, 367 bp, Glycine max
caccaataagggagttcaagaatttggagacaaaaggggttcctttcccaaagaaccaacccatgagaatatactctagcctttggaacgctgaggattgggccacaaggggtgggcttgtgaaaacggattggagcaaggccccattcacagcctcatacagaaacttcaatgccctaacctcttcctccactggccaatcactggacgccacggggctggccaagatccattgggtgcaaaagaattacatgatttacaactattgcactgatattagacgtttcccacaaggcctccctccagaatgttccattgcttgagaatgttcattattcaattcaatgttgcatattattatatatat

SEQ ID NO: 231479 - DNA, 370 bp, Glycine max
gtttttggctctattgttcctgttctgactcttggctcattttctaagagatggatagttcctggatggaggcttggttggtttgtgacaaatgatccatctggcacttttagaaatccaaaggtagatgagcgctttaaaaagtactttgatcgtttgggaggtccagccaccttcatccaggcagctgtacctcagataattgagcatactgaaaaggttttcttcaagaaaaccattgataatttgaggcatgttgcacatatatgttgtaaagagttgaaggatattccatacattatatgcccttataaaccagaaaggtccatggctatgatggtgaaactaaacctttcacttctggaggata

SEQ ID NO: 231480 - DNA, 370 bp, Glycine max
ctgacctttgacaggtaaaaggcgaaccaaatatatcatacatatgttctagatactatagagcacctgagctcatatttggcgcaactgaatatacttcagccattgacatctggtctgttggatgtgttttagctgagctgctgcttggacagcctctgttccctggtgagagtggagttgatcaacttgttgagatcatcaaggttctgggcactccaacaagggaagagattaagtgcatgaaccctaattatacagaatttaaattcccacagattaaagcacatccatggcacaagatcttccataagcgcatgcctccagaggctgttgatttggtatcaagactactacaatactcccctaa

SEQ ID NO: 231481 - DNA, 349 bp, Glycine max
gttctatgctttcaagtactaccaattgggcactttgtttactgtcatcattattttttcagcatcacaagattgtccccttattcaacagttagctggctaaccaaattatctattaattaggcaaattatgggaaattcagaatccaagttgccaaccggttttaggttccaaccaaccgattaggagctcattcttcactaccttagtaaaaaggtatcatccatacccttgtccgtttccatcattgcagaggttgatatctacaacttagatccatgggacttaccagctgaggcaatctttggtgagaaagaatggtactcttttagtctcagagaccgaaag

SEQ ID NO: 231482 - DNA, 379 bp, Glycine max
catcaattgtattgctagaggtcaaaagatccctctattctcagcagctggtctcccccataatgaaattgctgcacagatctgtcgtcaggctggcttagtcaagcgactagagaaatctgataatcttcttgagggtggagaagaggacaattttgctattgtgtttgcagctatgggagttaacatggagactgcacagtttttcaagcgtgactttgaggagaatggatcaatggagagagtgactcttttccttaatttggcaaatgatcctacaattgagcgtattatcactcctcgtattgctcttactactgctgaatatttggcttatgaatgtggcaagcacgttcttgtgatactcacagacatgagt

SEQ ID NO: 231483 - DNA, 359 bp, Glycine max
gttcgagatgttgcttgggcacccaatttagggctccctaaatctaccattgctagtgcatcgcaggacggtaaagtgattatatggaccgtggcaaaagatggggatcagtgggaaggcaaggttttgaatgatttcaagacacctgtttggagggtctcatggtctttgacaggaaacatactggctgtggctgatgggaacaacaatgtgacattgtggaaggaagcagtagacggggaatggcaacaggtgacaacagtggagccttagaatgtgatttgaaaatggttagaattttcgttttgaaatatagttgatatcttgttctttgcatattatacagttgattaattgtg

SEQ ID NO: 231484 - DNA, 342 bp, Glycine max
acctactctccgctcccaagagcacgcaccaccactattgcacttcttcctcgttctccctctttttcttcttcttcgctaaacccttttttcgatctcactaacacaacaatgggagacgagaagaagggcaagcctgctgcttccggcgtgtggtccaccatcaagcctttcgtcaatggtggagcctccggcatgctcgccacctgcgtcattcaacccatcgatatgatcaaggtgaggattcaacttgggcaaggatcagctgcgcaggtcacttccaccatgcttaagaatgagggttttgctgccttctataagggtctatctgctggattactc

SEQ ID NO: 231485 - DNA, 370 bp, Glycine max
ctcaaaggagggtcacaataaggtggccttctttagctacttctacctagcttttaacattggccaactcttctcgaacaccattctggtctattttgaggacgaaggaatgtgggctcttggtttctggctgtctgcaggctccgcctttgctgcattggtcttgtttcttgtatgcaccccaaggtatagacacttcaagcctagtggcaaccctctctccaggttcagccaagtccttgtggctgcatcaaggaaatccaaagttcaaatgtcatcaaacggagaggacttattcaacatggatgcaaaggaggcttccaacaatgccaatagaaagattctccacactcacgggttcaagttcttg

SEQ ID NO: 231486 - DNA, 378 bp, Glycine max
tagttagcctcttcttgtttctcctgcaatcaacgacacccccccaaaaatgacaggagagacagtgaacccaaaagcttaccctttggccgatgcgcaactcgcaataacaatactggatcttgtgcaacaagctgccaactacaagcaactcaaaaagggtgctaatgaagcgaccaagacactgaacagaggcatctctgagttcgttgtgatggccgcggacactgagcctcttgagattcttctccatcttcctcgcctagctgaggataagaatgttccctatgtattcgtcccatcaaagcaagcccttgggcgagcatgtggagtcacacggccagtgattgcatgttctgtaacaactaatgaaggaag

SEQ ID NO: 231487 - DNA, 355 bp, Glycine max
tggacatggttctcggttagcttttccgtccttaattcaggaaaatcgtgtaatatatgttctccatgtaaatgaggatggaagccttttaaacacaatttctgatgaagagtgctctctagttgattgggtccttgtagatagtgcaaagggtggcagtggtaaagcattcaattgggaccagttgaaactgccaaacattaaaagcaagtatggttggctcttagcaggagggatccatcctgagaatgtttctgaggctctatctactctcaggcctgaaggggtggatgtcagcagtggcatttgtgcatcagatggtatccgtaaggatcaatcaagaatagcttctttc

SEQ ID NO: 231488 - DNA, 366 bp, Glycine max
ctttcttatttacaagttcctctcttctcttctcccttcacacacccattttccctttcactcacccctcattcaaatcatggatttcttgcaagcaccagaaaatcagatacttgtgggtgtggccgtggccgttgtagccattgggcttggtgctgtctatctctattcatctaagaagcgcaaaggttgcttggacccattgaactttaaggtgttcaaacttgttaagcgtgcacagctgagccataatgttgctaagttcacatttgcacttccaacacctacatctgttttgggtcttccaattgggcaacacataagttgcaggggtaaagatgctcaaggtgaagaacttatcaaacc

SEQ ID NO: 231489 - DNA, 349 bp, Glycine max
atggccaccaccactacccagcctccctcgaatatctgttttttccttctgttgttgcttctagcacactttcatttgggcataagccaacttgagctgaattactactctaaaagctgcccaaaagctgaagagatcatcaaggaacaagtcacacaactatataacaagcatggaaacactgccgtttcgtgggtcagaaatctcttccacgattgcgtggttaagtcatgcgatgcatcattactgttagcgacggtgagcgatgtagtgtcggagcagacatcggatagaagttttgggatgagaaacttcaagtacgtaaacactaatcaaagcaacggttgag

SEQ ID NO: 231490 - DNA, 377 bp, Glycine max
attaattgcacgaatggcacttcgttgcttggtgatgtccctttctgttctcttcacacttggtcttgcgagagaaagccatgccagagacgaagatttttggcatgctgtttggccaaacactcccattccaagttcaatgcgagatcttctaaagcctggccctgcaagtgttgaaatcgatgatcaccctatgcaaattgaagaaacacagtacccgaaaaccttcttctataaagaagaccttcatccaggcaaaacaatgaaagtacaattcagcaagcctccctttcaacaaccatggggtgttggtacatgggtaaaggaaattaaagacactactatagaatgatataattttgaagagctatgcatca

SEQ ID NO: 231491 - DNA, 370 bp, Glycine max
cgacgtgaaagcgaagaaaaatgaagaattctaagaaaacttgcgcgcggaagtaccacaaatcgggaaatccacgcttgcggtggacacctgaactccatgaatactttgttgaaattgtggaaggtcttggcggaaaaaacaaggcaaccccaaagagcattctgcatatgatgcatgtgaaaggactgaggatctctcacattaaaagccatcttcaaatgtacaggaacatgaagggaggtacgattctcacatcaatgcaacaggaaatgggagaaaatgtgcatgttaaggatcatcaaccaatctgctccaactgttcatcccaaagcataatcttcagattacaaggggacaaatttaaatt

SEQ ID NO: 231492 - DNA, 367 bp, Glycine max
gaaggaaccctggctttcatcttctaaattggttgttaaacctgacatgttatttggaaagcgtggcaaaagtggtttggttgccttgaatttggattttgcacaagttgtttcatttgtgaaggagcgtcttggaaaagaggttgagatgagtggatgcaaaggacccataacaactttcattgttgaacctttcatcccacacaatgaagagttttaccttaacattgtctccgagagacttgggaacagtataagcttttcagaatgtggaggaattgaaattgaagacaactgggataaggttaagactgcatttgttccaactggaatgtctcttacgtcagaaatcgttgccccacttgtt

SEQ ID NO: 231493 - DNA, 344 bp, Glycine max
gaaaacacagttctcaccatttccctctcgattgtgaaacctgttgttgttaactgaacttttctgaacaagaatgtctgggcctggaaagggaggcaagggtttgggaaatggatgagcgaaacgacaccgtaaggtgctgcgccataacattcagggaatcaacagtcccacgattctccctttggccctcacgggtggcgttaaccgtcacagtggtctcatctacgaagagacacgtggcgtgctcaagatctttttggagaacgtgattcgtgacaccgttacctacactgagcatgctaggacaaataccgttaccgcaatggacgtggtttatgctc

SEQ ID NO: 231494 - DNA, 386 bp, Glycine max
aagagagagggagagagatggagttgagcatgaaagtgttggtgaaagttgcttcgttgcttttcctattggaattcactgcaacagttgttgatgctcgcttcgatccaagttcattcatcactcagtttctccccaatgctgaagccaacaattactatgttaaatccacaacaaaagcgtgctgtaacagctgtccttgcacaaaatcaatccctccacagtgtcgttgttcagatattggagaaacatgtcactctgcatgcaaaacttgtatttgcactcgctcaattcctccacagtgtcattgcagtgacataaccaacttctgttatgaaccttgcaactcctctgaaaccgaagctcactaggaatattgagcatgt

SEQ ID NO: 231495 - DNA, 366 bp, Glycine max
tggcggtattaacattgatggcatttccactaagccttcttggaggaacttcagttacgctgaccttgccgttgccacggacgatttcagccctgagaacttgcttggaaaaggtggtcatgctgaagtctacaaaggatacttagcagatggtcaagttgtagcagtaaagaggataatgaggaatgaaaaagaagccgaggacagagctggtgatttcttgacagaacttggaatcattgctcacattaaccaccccaatgcaacacgcttgattgggtttgggatcgacaatggtctctactttgttctacaattggccccacatggcagcctttcctctttgctctttggttctgaatgttt

SEQ ID NO: 231496 - DNA, 406 bp, Glycine max
gcttacttaaactcggaattcggtccaagggaaccaaccaacaattttcaaaaaaaggatttggaattggaaaggcgagggattgcgctgcgtctcttcctcttctctttcgattcatccctcattcataatcttccaatccaacaacctcagcctcacactcacacatacacacatctgaacgcgtatcgtccctcccatggcttcaaagcgcatcctcaaggagctcaaggacttgcagaaagacccaccaacttcttgcagcgctggtccagtagctgaggacatgttccattggcaagcaacgattatgggtcctgctgatagtccttatgctggaggtgtattcctagtcactattcactttcctccggattatcctttcaaacctcccaaggttgccttt

SEQ ID NO: 231497 - DNA, 381 bp, Glycine max
gaactttgcagcataccagcatgagcatgaagctcttccagctcttctccctactcccattcttcctctacttctacacaatagaagcagccgttggcccattgcaactgacacacccactggaccccttaactcagcaagaaatcaccctcgtcaaaaccatagtcctaaaaaaagtaccccaagccagccaaccgcgtcttcttccactacgtcggcctcgacgatcctgacaaggccgccgtcctcaaatggctctcctccggcgcccggacgccgcgcaacgccttttccatcgccctcatcaatggccaaatccacgagctcaccgtcaaccttctctccccgcgaaacgttgtcttgggacaaatccacacaagg

SEQ ID NO: 231498 - DNA, 367 bp, Glycine max
cataacgcacaaagcaagctcatcctacagttttaaaaatggcatcatcctcctccatggctctctctgctccatccttggctggcaatggcgtcaatctgagcccatcagcccacgaactctggagggtcagcattgagaacaacgtcatcaagcaggcctcctaccggatacccatggaagcgcccaaaccgcgtcaagtacatgggcccaatctctggcaagcccccgtactacctcataggctagttcccatgtgactactgctgagacactgctgggctttcggtagaaccagaaaccttcgccataaactctgagctcgagctgatccactccacttgggccatgcacggggtcttgggct

SEQ ID NO: 231499 - DNA, 358 bp, Glycine max
  unsure (1)..(358): unsure at all n locations
ggtggtaatggcagcgtcactacaagcagcagctactttcatgcaacccaccaagttgagcaggagcaacactttgcagcaaaagtctactcagtccatttccaaggcttttggtttggaacctgttggagctaaaaaggtcacatgctcccttcaggctgatcttaaggacttggctcacaagtgtgttgatgctaccaaaattgcaggattcgcccttgccacctctgccctcgttgtctctggggcaagtgctgaaggtgttccaaagaggctaaccttcgacgaaatccagagcaagacctacttggaagtgaaggggacaggaacagcanaccagtgcccaacaattgatggt

SEQ ID NO: 231500 - DNA, 361 bp, Glycine max
ccaaaatctgacatttatgcttttggaatggtgatcttacagttattgacagcaaaaccagcaatagcacttgctcataaggttgaaacagctattgatagcgggaatttaacagacatactggatccagaggctggagcttggccatatcaagagacactagacttggctttgctaggattgagctgtgcagaacttcggcgaagagaccggcctgatttacaagatcatgtccttccaacactagagagattgaaagaagttgttgatagggcccaatgctcagcttcaattgttactattaaatccaaacctcctaatcactttatctgtccaatacttcaggatgtgatggatgacc

SEQ ID NO: 231501 - DNA, 381 bp, Glycine max
ttttgctttcaaaagatgagatagtacaaaagtgcttgtgagtatcgtatctatccagtgtgtttcttcttcttctctttcaagggtagatttctgaagaagaagaaaacccttacaaatctaactccgattgaaatttgaaagcgttaaaccctaaacccccaaattgattcattccgctcgttggtgtcatggcttcttcatcgagtagcggattgacgttcaagctgcaccctctggtgatcgtgaacatctccgaccactacaccagggtcaagtctcagatgaacccaacccacgcgccaccgcacaccaccaccaacaacaacaacgccaacggcggcgacggcgtcgtttcgccgccgctccacccgcgggtct

SEQ ID NO: 231502 - DNA, 378 bp, Glycine max
gattgaaatacattggctatcaaattttgcctagagagagcactttgtatgagaaatatgataaaaatgatcctattctgagagaccctacaagcattaacaagaaggggtgggaatacacaaagaagatctatcttgacagccaaaatgtcatgttagacctcagaagattcagaaaaaggttgcatcgagcgtatgagtatacactctccaaatcaaaactgagtctccaacatcaaccaatgtgaatttcaatggtttcttttggttctccgtattcattgatgtgaaaaaaaattaaaattttcttaaaatctagaacattcttatatgcatataaaggcgcacctgaaaagttcttagtgcgatatgttgttg

SEQ ID NO: 231503 - DNA, 401 bp, Glycine max
actacctaagcgcaccggcgagtccatctaggatgtctgaattatacaccgaatttgaatattattcttcggcttcaccctcttcattcgaagcaggcaacaaaattgatgatgacgatgaagacgaaaacaacaacgattacagctttgcgttttacgtgaatcgcgatcaatcagacaagtcgtctcgctccgccgaagagctcttcgacggtggcaaaatcaagcccttgaacgagtcatcacgtgcgacttctgttgctgaacaaaaaagaggcagagaaagagagagaagttcttcttcaacaagaacaacaaagttgtcgtcctcgaactcgggtgttcgtacggtggcacgatcactttctccttatagaaaatcatgggaagttgaacaacag

SEQ ID NO: 231504 - DNA, 393 bp, Glycine max
atcactctagctgttgcaaatttctactagttttcaatggcttctgcagatgttgagttccgttgcattgttggtgggcttgcttgggtcaccgggaacgatgccctcgagaaagccttttcaatctacggcgacatcgttgaatcgaaggttatcaacgaccgtgagattggcaggtccagaggattcggctttgtgaccttcgcctcagagcagtcaatgcaagatgcgatcgcaggaatgaacggccaggaccttgacggtcgtaacatcactgtcaacgaagctcagagccgcgccagccgtggtggtggtggaggcggtggtttcggaagtggtggtggatacaaccgcggtagcagtggatatggtggtggtggtggcggcggcgga

SEQ ID NO: 231505 - DNA, 398 bp, Glycine max
cggctcgagggaaaagaaaaaccagctttcttcaagcacctagatttcctctctctctaaatggcgttctcttcttttctcggcagagtcctcttcgcctccgttttcatcctctccgcttaccaagaatttaattcttatggagttgatgggggacccgcagcaaaagcactcagaccgaagtttgatgcctttgcacatcaagtacattctaaagttggctttcaacttccagatattgatatgaaatttttagtggctggggctattgctctcaagggccttggagggattcttttcatactcagcagctcttttggagctttccttttgcttttgcatcaagtgatcactactccaatactgtatgatttctacaattatcacagtgaggacaa

SEQ ID NO: 231506 - DNA, 393 bp, Glycine max
aagctagccaatcctaattcctattcctatccttattactacataactctaaagtaagtaagaaaaatagagcaatttcacaacacaagacaactcttataattgtgtgagttattaattgagtatgggaaggtccccttgctgtgagaaagctcagacaaacaaaggtgcatggactaaagaagaagatgacagactcatatcttatattcgagctcacggcgaaggctgctggcgttcactccccaaagccgccggtcttctccggtgcggcaaaagctgccgtctccggtggatcaactacctccgccccgaccttaaaagaggtaactttaccgaagaagaagacgagctcatcatcaaactccacagtctcctcggtaacaagtggtc

SEQ ID NO: 231507 - DNA, 380 bp, Glycine max
caaaaaatggcagatattcctcgggtgaagcttggaagccaaggcctggaggtttccaagttaggatttggttgtatgggcctaagtggagtgtacaacgatcctgttcccgaagaggttggcatctctttgatcaaacacgcattcaccaaaggggtcactttctttgattctgcagatttttatggagcacgtgccaatgaagttttggtcggaaaggctctcagggactttcctcgagatcaatttcagattgccacaaagtttgggattgtcaaaatggaaaatggtaatgtgatagtgaacggttcccctgaatatgttcggtcctgttgcgagggtagcctccaacgccttggtgtcagctacattgatctcta

SEQ ID NO: 231508 - DNA, 380 bp, Glycine max
ctctctcgacctcctttaaattacatatataattatgactcataggttctggatgaatttgctttgcgttgcattattaacattgatcctattacatggggcatcaagaggacatgatgatgtcgtcaaaatcggtgccatattcacattaaaaaccataaacggacgagtttccaaaattgccatccaagctgctgagaaagatgtgaattccgatcctcgcatccttgggggtcgtaaattgtccataaccatccatgattccaacttcagtggttttcttggctttattggggccctcaagttcttggtgaccgacacagtagctataattggtccacaaagttcagtaatggcccatgtgctttcgcatcttgcaa

SEQ ID NO: 231509 - DNA, 399 bp, Glycine max
caatcctcagtttctttcttcaacgtttccatcatacacagatcccaatcctctctcaagccctaatttcccctcatttccatggccacagaagagcccactgtcgcggtggaacccgctcccgaacctgcctccgccgatcctcccccggaggagaaggaggagaccaaacctgaagccaaggctaagaaaaccaaggagcccaaacctaaaaaggtttccagacctcgcaaccctcccactcatccttcctacgaagagatggttaaagatgcaattacctcgctgaaggagaaaaccggttcgagccaatacgcgattgcgaagttcatcgaggagaagcacaagcagcttccaccgaacttcaagaagcttcttctctaccatttgaagaagctc

SEQ ID NO: 231510 - DNA, 394 bp, Glycine max
agcaaatattgcctattcggcaatatggcggaaaatggttcaattgagctgaacaagtttgtgttgttttgtttgttgttgctaatacaagtggcagtttctgaaatcatttttgaagagcgatttgatgatggatggcgaagtaggtgggtgaaatcagactggaaaagcagtgagggcaaagcaggttcattcaagcacacagctggaaaatgggctggtgatccagatgacaaaggtattcaaacatccagtgatgccaaacactttgccatctctgcaaaaataccagaattcacaaacaagaacagaacattggtccttcagtattctgtaaaatttgagcaagagattgaatgtggtggagggtacatcaagcttctctctggatttg

SEQ ID NO: 231511 - DNA, 397 bp, Glycine max
atttttcctctgcgcctttgcatttcagcagcacaccacaatggccaccaatgcattcactggcacatctctctccatgcgatctgtcattcctcaaacacaggcatttgcctcaatttctggcccgacatctgcttcaatttccagctttgggagaaagaatgtttcttttagcttgcagccacgcttaattcgccttaaaatttcctgtgctgccgctaaaccagagacagtagagaaggtgtgcaaaatagtaaagaagcagctggctatgcctgaaactgatgtggtgactggggagtcaaaatttgcaactcttggtgctgattcccttgacacggttgagatcgtgatggcacttgaggaagcatttggtattgccattgaagaggacagt

SEQ ID NO: 231512 - DNA, 392 bp, Glycine max
cagtgttgcctcaaagaacaatgatgtgcaattggcagattttattgaaagcgagtttttgggtgaacaggtggaagccataaaaaaaatctctgaatacgttgctcaactcagaagagttggcaaaggacatggtgtgtggcactttgatcagatgctactccatgaggaaggagttgctgcttgattaacattttttttctacctctcgttcgtgcatctagttagttattcggattagtattttcaggtcttttaatgctagagatgaacaaagtggatatggagtaatattggtcatttgtatgtcgtgttttttttagtaatattggagtaatatggaatttgcgtattggactaatatggaattgacgtattgttggagtaatatg

SEQ ID NO: 231513 - DNA, 266 bp, Glycine max
ggagttgtccactaagagcatggctgtacaagctcttgtatcatcagcatctctgaccttcgcagccgaggttacaagacaaagtcttggctcaacatcactcgaatctcccattggcgtctcaagatgagccacctttcgtgtcatcgcagctgggccacgccatgtcaaacaaggatcagctagacccttgtggtttgcctcaatctcgagtctgtctcacgtgcatgggagccttccgggtgcctacggctttgagcctccgg

SEQ ID NO: 231514 - DNA, 241 bp, Glycine max
gctagcaaaaggacacatcgcacatgctctgttttgatgcatacatttccatttctctatttaacacttgttaccaaattctcgctacatccgccttcttttttctctctccatccaacatcgaaacgaggtcgttttgtgttccgccgaaggcaccggaggttgtagcaggctagcagcgatggctttggcatccaatctcggtggcaagattgacaccgccgaagttctctctgccgtt

SEQ ID NO: 231515 - DNA, 394 bp, Glycine max
agagcatcactgaactaacaaagcaaccctatgtcgaaggtggtttgtgtcaccggagccagcggcgccatcggatcatgggtggtcctactcctcctccagcgtggttacaccgtccatgccaccgtccaagatatcaaggatgaaaatgagacgaaacatttggaggaaatggaaggagcaaagagtcatctccatttttttgaaatggatcttcttgacatcgactccattgccgctgccataaagggttgttccggcgtaatccaccttgcatgtcctaacatcattggtcaagtcgaagatcccgagaaacagatattggaaccggcgataaaaggaacggttaatgtgttgaaggcggcgaaggaagcacgggtggagcgcgtggtgg

SEQ ID NO: 231516 - DNA, 381 bp, Glycine max
agaaaatggaaagtggggttgtggctgtgaacaacaacatcaacaactatgaatccaaggcaacttccaccatcaccattaagggcattctcagccttctaatggaaagcattgatgatgagaattgtgatggtggtggaagcaagaagagagttatttctcttggtatgggtgacccaactctcaccacattgttccacacaccaaaggttgttgaagaggctgtcgctgatgctcttcaatctcgcaagtttcatggctatgctcccactgctggacttctccaggctagaattgcaattgctgaatatctatctcgtgaccttccttatcaattatcacgagatgatgtcttcatcacttgtggatgcacacaagcca

SEQ ID NO: 231517 - DNA, 320 bp, Glycine max
  unsure (1)..(320): unsure at all n locations
gagcgttttaacagaagtaaggctgaacatgagaagcgggaaggcgaggaggagggtgctggtggaggaaatgaacctggaggcagggatggtgaacaggaaaaggttggggagaaaaacacggttcgcatatttgtgcatagcggaaccgtggccgaaggtgtcgggggtggcgaaggtggacctggagagtggggaagtgaagaggcacgagtacggagagagaaggttcggtggagagccattcttcttgccaacacgtggagggaatgggaatgaggatgaanggtacgtgatggcttttgtgcatgacgagatga

SEQ ID NO: 231518 - DNA, 386 bp, Glycine max
gggttttagcgcagcttcttctagatttaaggaagatgggtaaggaaaaggttcacatcagtattgtggtcattggccatgtcgactctgggaaatccactaccactggtcacctgatttacaagcttggaggcattgacaagcgtgttattgagaggtttgagaaggaagctgctgagatgaacaagaggtcgttcaagtatgcctgggtgctggacaaacttaaggctgagcgtgaaagaggaatcaccattgatattgctttgtgggagtttggaacaacacagtattattgcacagttattgatgcgcctggacatagggatttcattacgaatatgattactgggacatctcaagctgactgtgctgttcttatcattgat

SEQ ID NO: 231519 - DNA, 396 bp, Glycine max
gtaatgcagcaaagagggaaaggtaacaaccgtagatccaggagtttctcaaggtcccgtctcgctgttgaaggcacttagccacacacacacacccaccgctttcagctatggatgagcgtcacattcagaaatcttactggcttcagcattccgccgatctctccgtcgaggcaatgatgctcgattccaaagccgctcatctcgacaaagaagagagacccgaggtgctttccctattacctccattcgaaggcaagtccgttattgagcttggtgctggtattggtcgatttactggtgaattggctctgaaagctggtcaattgcttgctgtggacttcattgacactgctatcaagaagaatgaaaccatcaatggacaccacaaccatg

SEQ ID NO: 231520 - DNA, 302 bp, Glycine max
gttgaaaagagaaaagaaagagaatgggttctgctctgtggacctgtctgagtttgttaacacttgcgtctgcatccttcgccgccaaaccaataacatgaattaaggtaccaattgccagaaacaagatgccgacctgtgcctttgattacatcaggaaccggaatggtggtacggaaatgcagcgtcagctggacacatagccacgtactggcatccagtcatcacggtcctacctagtaggtcagctcagcatgtacatacaataggtagctggagaatcagctggcacagtcatcgcc

SEQ ID NO: 231521 - DNA, 251 bp, Glycine max
gtacactcaaaacagaaagcagaaagcatagctcatccttgagttaacagatggcatcagcttcttccatggccctcccatccccatccttggctggcaaagccgtgatgctgggcccatcagccccagaagtgcgaagggtgagcatgaggaagaccgtcacggaacaggtctccgcaggaagcgcatcgtatggactagatcgagtcacgtacctgggcccaatctctggccagcctacgtccgtacct

SEQ ID NO: 231522 - DNA, 394 bp, Glycine max
tgccatttcaatccccagtttcttcttcaacgtcctcttacgagcagatcccaattctccttcccagtttcaaaccctaattccctcattcccatggcctcagaagagcccactgtcgcggtggaacccgctcccgaacctgccaccgccgagcctcccccggaggagaaggaggagcccaaacctgaagccaaggctaagaaaaccaaggaacccaaacctaaaaaggtttccagacgacgcaaccctcccactcatccttcctacgaggagatgattaaagacgcaattacctcgctgaaggagaaaaccggttcgagccaacacgcgattgcgaagttcatcgaggagaagcacaagcagcttcgaccgaacttcaggaagcttcttctct

SEQ ID NO: 231523 - DNA, 372 bp, Glycine max
ggcttctttgaagtgagttgatcatttcatcagagcgaggcttccatgttcaccacagccatgccagaatccaatgattccgtttccgttgacatggagaagatctacctcggtggaaaggagcatcatattcgaactggctgtggtactgtgtctgtcatagtctatggcgatcctgacaagccagctctgatcacttatccagatttggctctaaactatatgtcatgcttccaaagactatttttctgtccagaagcagcttctttactgcttcacaacttttgcagatatcatatcagtcctcctggacatgagagttcttgcagttgggagcagctgcaatttgtgtcaaagaatctgttccttctg

SEQ ID NO: 231524 - DNA, 385 bp, Glycine max
ggtaaagattcatgggaatacgcccagaattgcgagtcagccaatgacggttcatgcgccaggaatccaagcaacctttatttcagcggaaacagcaacttggctgtacagactatcagatcagtgaatcccaaaggcgttcacatattcgttacaaaatgtataaacgtcaggttgagaaaacttaagctggttgcaccgggaaccagccccaatactgatggcattcatgtcagccactctgacactgtgataatgtccagaaataccattgcaactggggatgactgtgtctctctgataccaggactcagaaacattttcatcaacaaactcacgtgtggccctggagatggtatcagtatccgtagccttgggaagtatg

SEQ ID NO: 231525 - DNA, 398 bp, Glycine max
cactaaccaacttcgttctttgttccgttctactttcacttcccaacaacaacaagaagatgccttctgcagaagcttcctctgaaaccatttgtgtcaccggcgctggtggcttcatcgcctcttggatggtcaaactcctcttggaaaaaggctacactgtccgaggaaccctcagaaatccagatgatcccaagaacgggcacttgaacgagtttgaaggaacctccgagaggttaactctgcataaggttgacctccttcatcttgactccgttagatcagttattaacggttgccatggtgtctttcacactgcttctcccgtcaccgataaccccgaagaaatggtggagccagcggtgagtggagctaagaatgtgatcatagctgctgca

SEQ ID NO: 231526 - DNA, 387 bp, Glycine max
gacgccaacacctggcatgccagtaagtcatatatggactcagaaatcatctcttgcagctgatcatgcagctgctggaaattttgagactgcactgaggttgctgaaccggcaacttgggataacaaattttgcccccctgaaaaccatgtgtctggatcttcatactggcagtcattcctaactccgggcattttcttctgctccgatcatatcacttgcagttgaaagaggttggactgagtcatctagtgcaaatgtgagaggcgcaccggcacttcctttcaaattgtctcaattggatgaaaagcgtaaagctggttataagtgtactactgctgggaaattcactgaggctcttaagacatttgttactactcttcatac

SEQ ID NO: 231527 - DNA, 347 bp, Glycine max
gaccccaacacctggcatgccagtaagtcatatatggactcagaaatcatctcttgcggctgatcatgcaactgctggaaattttgatactgcaatgaggttgcggaagcggtaccttgggataacaacttttgcccccctgaaaaccatgtttctggatcttcatactggcagtcattcctaactccgggcattttcttctgctccgatcagatcacttgcagttgaaagaggttggactgagtcatctagtgcacatctgagacgggcaatggtacttccattcaaattgtctcaattggacaaaaaccgtaaagctgggtagaagtttagtactgctgggaaat

SEQ ID NO: 231528 - DNA, 386 bp, Glycine max
cttcttcttcccccagaccggaggagagaaaaccaaaatcactcttcactgttagggttagggtttcgattttccccttatccaatctcgcagcagcgagatgggcgccaattcgttgccatcggcggaatcaaacttcgatctcgacgagcagatctcgcagctcatgcaatgcaagccactttccgagcaccaggttagagttttatgtgagaaggctaaggagattttgatggaagaaagtaatgtccagcctgtgaaaagccctgtgacaatttgtggtgatattcatgggcagtttcatgaccttgctgaactatttcgaattggagggaactgtccagatacgaattacttgtttatgggtgattatgtggaccggggtt

SEQ ID NO: 231529 - DNA, 393 bp, Glycine max
atgctacagatgctgctagaagcgcttctgatattgtcctcactgaacctggtctgagtgtcattattagtgcagtgctcaccagcagggcaattttccagaggatgaagaactatactatctatgctgtgtcaatcaccattcgtattgtgtttggtttcttgtttattgcgttgatctggaagtttgattttgcacccttcatggttttgattattgccatactcaatgatggtaccattatgactatatccaaggatagagtgaaaccatcagcacttcctgatagctggaaactgagggagatatttgctactggcgttgtgctaggaagttacatggcactaatgacagtagtagttttctgggcaatgaaggataccaacttcttcg

SEQ ID NO: 231530 - DNA, 471 bp, Glycine max
cacgcctgcctgtcactatgtaggagagtggcctcggacgcacgcgtacgtaagctcggaattcggcgctagatccggaagaaacatctaagcacactgccaacaaaatgctaagaaccgtctactcgccgtgttgctagcatttttctatacgctccgcgcccctgatgagcaacactaaagtcgacgctcaactcagaggtggcgatccccgttacgactagtatgagctcacgtgtttcccccggtaatctccatcgtgcgctctcctgtcctcaccctgttgcatagtggcacccgtctccaccttgccacgtctgagcgctcgaccgtttcgccggcctcttttgtttgtcaccacagtcgggtatcgaccggagacgcctccctctgccgttttccctcggccttgcttcggcgtgcatgccaccccatatctccggagcaccgacccgggccatcccctcccgg

SEQ ID NO: 231531 - DNA, 378 bp, Glycine max
cctggaaagccgcctgttgattaccaaggagcaagagatgtcaaaccaattgctgaatttgcacttcaacaggtaaaggctcttttgaaggatcggttaagtggaaaagcaacaggaggatctagtgaaaagacagaaaccagttcttcagtagaattaaactctggcaactttgatgaattggtgatcaaaagcaaagaactctggattgtggaatttttcgcaccttggtgtggacattgtaaaaaattagctccagagtggaagaaagcatccaataatttgaaagggaaggttaaactgggccatgttgactgtgatgctgaaaagtctctaatgagcaggttcaaagttcaaggattccctacaatcttggta

SEQ ID NO: 231532 - DNA, 362 bp, Glycine max
ggaaagtatagtcaaagcttgtgcttgttttggtcaaaaaaaaaaaaaaaaaaaaaaaaaaaaaaaaaaaaaaaaaaaaaaaaaaaaaaaaaaaaaaaaaaaaaaaaaaaaaaaacaaaaaaaaaaaaaaaaaaaaaaaaaaaaaaaaaaaaaaaaaaagggggggccccccataaataaccccgccaacccggaaattaattccggcccggtacttgcaggggtacaagttttcccaaaaggaatcctaataaaaccttggggcaaacagggcaaaaccggttccctgtggaaaattgttacccgcacaaatttcaacacaacataagacccggaaccaaaaattttaaaccctgggggcc

SEQ ID NO: 231533 - DNA, 371 bp, Glycine max
ctccctgcccctgcctagattattactaccgagaaagaaagagaataaagaaaagagagaaagagagagagtgatcttgcaagttctgttccagcaagccatggcaatttcagggtcagagactcagagtcctttagtgaaaagcgtttttcaggtggaagttgagtgtgtgaaatgcgacttgtgcgggttcacagaggaatgcacccctgcgtacatcacgagggtgcgtcagaggtaccagggtcgctggctttgtgggctgtgcgtggaggctgtgaagcacgacgtggtgagatcagacagtgtcatcaccacggaagaagcgctggaccgtcacatcagcttctgcagagagttcagatcatcga

SEQ ID NO: 231534 - DNA, 398 bp, Glycine max
gacagagcctgttcccgcggaatcagcgacgaggaagacgctgaaaccgcaaggaaaaaacttagactctccaaagacgaatccgctatactcgaagaaagcttcaaagaacacaacaccctcaaccccaagcaaaaattggcactggcgaaacagctaggacttcgacctagacaagtggaggtgtggttccagaacagaagagcaaggacgaagctgaagcaaaccgaggtggactgcgaagtattgaaaaggtgctgcgagaatctgacggaggaaaatagaaggttgcagaaggaggttcaggagcttagagcactgaaactttccccacagttttacatgcaaatgagcccacccacgacgctcaccatgtgcccctcttgcgagcgtgtggc

SEQ ID NO: 231535 - DNA, 230 bp, Glycine max
gcagatatcactaaaacctctacaagaactaactgatatatgatcattatgtggctctttcacttgttgttttagcaaggtatatacagtgcttgagtttgttacttttaacagcactaacaggcaactgcctgatattgtatttgttaccaccaacaacgtcactttaccctgcgtcatacaaccttttcgactggaaacatgcccctccaattttgacgggcaatttc

SEQ ID NO: 231536 - DNA, 391 bp, Glycine max
agcccaagccctatacaaccaaaccctaacacacacccatttgattcactttccatggctagcctcaaggttgcatttttggctgcagtgctctgcatggttgtggtgagtgcacccatggcacatgcagctatcacgtgcgggcaggtgacgaatagcctgatcaattgcatcggttacctccagaacggaggaacgccgccgtcgggatgctgcaacggagtgaagagcctcaatgccgccgccaagaccaccgccgaccgccagacggcgtgcaactgcctcaagtcggccgccagccagatctccggcttcaaagccaataacgccgcctcgctccccggcagatgccgaatctccatcccctacaagatcagcatctccaccaact

SEQ ID NO: 231537 - DNA, 385 bp, Glycine max
tcggggaattccaattccacattttcaagaaataaggaggcaaaaatgttcatatatgaattggaattatttgttttcttattaggcctatcctgaagccaaaggaaatgagatcggaattcctcggggaattccaattccacattttcaagaaataaggaggcaaaaatgttcatatatgaattggaattatttgttttcttattaggcctatcctgaagccaaaggaaatgagatcggaattcctcggggaattccaattccacattttcaagaaataaggaggcaaaaatgttcatatatgaattggaattatttgttttcttattaggcctatcctgaagccaaaggaaatgagatcggaattcctcgggggtaccgagct

SEQ ID NO: 231538 - DNA, 389 bp, Glycine max
atgtgttttatgtattgcaaagttgcctgcggagggctatatccacttccaatatcagttctgttgtcgcagttttgagtggtgctagtagtttgcttggtactgaatatcatgaagccttgcagcacaaaactagagagccaaaccttggtgcaaagttgttctttggtggtgttggcgtgcaaaagacggggacagaaattgcaacagctttgaataatatggatgttagcagtgaagatgttctgaagctaaaacatgaaattgaagaacagtgtgctgaggtatttcctgcaccggctgatcgagaaaaggtaaaatcttgtttgactgagttggcagatagcagcaatgctttcaagcaagctttgaatgctggcatagaacaa

SEQ ID NO: 231539 - DNA, 395 bp, Glycine max
ggatagatagagtgatacacatcacattttctcaaagtaatttattaattaataaataaatggcggcggcggcggcagtgacggtgctactcccacctaggattccgaccgccaccaacgttacccgctgctctgctttgccttctctgcctcctcgcggcaccaacactaaaaccactttgctcttatcttccctcaagcacttctcagtgtcccgaaaatcttctctgcttcagaccagagcttcttcagaggaatcatcctcagtagatgccaatgaggtgttcacacatttgaaggaaaagtgggatgctcttgaaaacaagtccacagtacctttttatcgtggtggggccttacttgctgtttggctatcgtcgattcgtgtgagcgcc

SEQ ID NO: 231540 - DNA, 393 bp, Glycine max
gttgaaaacacataagaaaaaaaatgggttcttctctgtggacctgtctgattttgttatcacttgcttctgcttccttcgccgcgaaaccaagagcaccaattgatgtggcatttggcagaaactatgtgcctacctgggcctttgatcacatcaaatacctcaatggtggttctgagattcagcttcatcttgataaatacatcaggtactggcttccaatcaaaagggtcctacttgtttggtcacttcagcatgtacataaaattggttgctggtgattcagctggcacagtcactgctttctagttatcatcgacaaactcagaacatgatgaaatagacgttgagttcttgggaaacagaatcgggcaaccttatattttgcaaaca

SEQ ID NO: 231541 - DNA, 391 bp, Glycine max
atttcaatcaacggttatacccttttctatttgagcatcatcatgtccaccgcagcgcagcccaaggccaagaaaacggcgtcgtccaagaagcccctctcccatcctaccttcgccgcgatgatagcggaggcgatagcgagtctgaaggagagaaccggttcgagccaatacgcgataagcaaattcatcgaaggcaagcacaaggagttgcctccaacctacaagaagcttgttctcgttcatctcaagaagtctgttgctgctggcaagctcgttaaggtcaaaaactctttcaagctcgcagcgactaagtctgctcctgttaaagccgctgctgctcccaagaagcccaccaaagctgcggctaagcccgccgccaagccgcctt

SEQ ID NO: 231542 - DNA, 381 bp, Glycine max
agaaaaatgaagtctttccatctcacagtgacagctttgtgctgtgtagtggttgtgcttggagtgcttccactctccctagatgcacaactagatccctccttttacagagacacttgtcccagggttcactccattgttcgtgaagtcgtcaggaacgtttcaaagaaagatccccgtatgcttgctagtctcattagacttcactttcatgactgctttgttcaaggatgtgatgcatcagttttgttgaacaacactgccaccatagagagcgagcaacaagctctgccaaacaacaactcactaagaggtttggatgttgtgaacgacattaagacagcagtggaaaaggcttgtcccgggcgtgggttcttgtgc

SEQ ID NO: 231543 - DNA, 377 bp, Glycine max
aaataaactagtattaaggagctagaggcaatgggaaagagcaaggttcttgttgtgggtggaactgggtatgttgggaggagaatagtgaaggcaagtttagaacaaggccatgaaacctatgttcttcaacgtccagagattggtcttgacattgagaaggtgcagatgctgctttcattcaagaagcaaggtgctcaccttgtggaggcttctgtttctgatcaccagagcttagtggaagcagtgaagcttgtggatgttgtgatttgcaccatgtctggtgttcattttcgctctcacaacttgttggtgcagctcaaacttgtggaggccatcaaagctgcaagaaacgttaagcctttcctgccttcaaa

SEQ ID NO: 231544 - DNA, 371 bp, Glycine max
agccaagtgaatgtgagagaacataaagctcaaagagcataatgtcgatggatcattcacatgattggggatacccttcatgtaggagggcacaagaaggatgaggagcatgacggtgagcaccatgctggagaatacaaaggggagcaccatggtgaacacagtagtgagtacaacggagagcatcatggtgaagacaacactggatagtagcatggtgagcataatccagagcacatagaggggttcctagaccatgtcaatgacaagatccatggtgagggcggcgccgccgatggcgagaagaagaatattgagaagaagaagaatgagcatggccatgagcatggccatgacagcttcagcatcac

SEQ ID NO: 231545 - DNA, 384 bp, Glycine max
gagcatattccgttatgagggggatgaggtgaacatgacattggcaaaatctgaggctaaactgcttcacgagaagattgcagagaaggcctacaatgatgaggagctgatcaggattttgtcaacaaggagtaaagcacagttaacagcaacactaaatcagtacaacaatgagttcgggaatgccataaacaaggatctgaaaaccgatccaaaagatgaatatctgcaattattgagggcagccattaagtgcttgacttaccctgagaaatattttgcgaaagtcttgaggatggctataaacaagctgggaactgatgaaggggcccttactagagtggtgaccaccagagctgaagttgatttgcagcgaaatgctga

SEQ ID NO: 231546 - DNA, 470 bp, Glycine max
cctgactacgctgcactagcgaagagatgtggagtcggacgcacgcgtacgtaagctcggaattcggatcgaggttttgtgtgtcaccttggtgtgcatacgagatggaggagcaaaatggtagtggtaagttgagccaagggcttcgcaaagtgaagccttaccttgctatattgtcccttcactttggctactcacggatgtatatcatcactatggtttccttcaagcatggaatgagtcattggatactctcagtgtatcgtcatgtagttgccgctattataatagtcccttttgcacttgtccttgaaagaaaaataagaccaaagatgactcttcccatcttcctgaggatagtggcacttggtttccttgagccagtgctagatcagaacttgtacaacatggggatgaaaatgacctcaacaacgtgtgcatccgccactgttaatgtcctcccggccatt

SEQ ID NO: 231547 - DNA, 375 bp, Glycine max
gcggaatcagctagaattttctaataatggccaaagacgttgagcaggttacagagcacggtgaatactccgcgaaggattaccatgacccacctccggcgccgttgatcgacccagatgagctcactaagtggtccttgtacagagccgccatagctgagttcatagcaacactccttttcctttacatcaccgtgttgaccattattggctacaagagacagagtgacaccaaaatccccggtaacaccgagtgcgacggcgttggcattttgggcatcgcttgggccttcggtggcatgatcttcatccttgtttactgcaccgccggcatctctgggggacacatcaaccctgcggtgacattcgggttgt

SEQ ID NO: 231548 - DNA, 395 bp, Glycine max
caagatatgagttggacggtttgggatagatggattctcggagacaatcctaccctcagggaacttctagagtggctgaaggcaaagggcttgaatgcttacagtatttcttgtgggagttgcctgctctataatagcatgttccctcggcataaagatcgaatggacaaaaaggttgcagatctggcaagggaagtagccaagtttgaaattcttgcgtaccgtcgccatttggacgttgttgtggcatgcgaggatgatgaggataatgacatcgacatccctcagatatccatttatttccgttagtaggttgctttcatcttgatagaggtgtgtttgagacttaggtgaaaaacgacagcatgtttgactctcatgcttcatattcataa

SEQ ID NO: 231549 - DNA, 388 bp, Glycine max
ctcgagccgattcggctcgagaagtttttacagctgatcaaatatgtaagtggctcttatgattctgaggatggatttcgcttgttggataaagagatttcagagcatgaatatttgaaaaagagtgttgagggtttatctcggaggcttttctatcttgctcttccaccttcagtatatccatctgtttgcaagatgatcaagacttgttgcatgaataaatctgatcttggtggatggacacgtgttgttgtcgagaagccttttggtaaggatctagaatctgcagaggaactcagtactgagattggaaagttgtttgaggaagcacagatttatcgtagtgattactacttgggaaaggaactagtgcagaacttgttggtac

SEQ ID NO: 231550 - DNA, 390 bp, Glycine max
cagcagtactaccattagccgcgtttttcaaaagtgattttcgagaattagcgatgggaattgaaagaggaggcttcaagggattcaggagcgcctggagcgtgccgcccaagccgtgcgattcctgcaagctggcctcggcggcgcttttctgccgccccgattccgcgtttctctgcatcgcctgcgattccaacattcactgctcgaacaaactcgcgtcgcgccacgagcgcgtgtggatgtgtgaggtgtgcgagcaggcacccgctgctgtcacgtgcaaggccgacgccgccgccctctgcgtcacgtgtgactccgacatccactccgcgacaccccctcgcgcaacgccacgagcgcgtcaccgtggaacctttccttgac

SEQ ID NO: 231551 - DNA, 361 bp, Glycine max
gaagaaaagagaagagaagaagaagatggaggtgagtttatcctcaacatcatgtatacccttaagctcgaagttgaagcataagcatggccttttccactctcaaattcccattcacacagcttcaaccaataccagaagaaccaaacctttgtccgttgttaacgcctccagacaaaccttgtcttccaattggctcgtttctccacacgatttttctgcatccaccgcttcgccatggcttcccatattcgaagagctcgacgccaccaacatgcttctccgtcaaagaattatctttttgggttctcaagtggatgatatgactgcagattttatcattagtcagcttttgtttttg

SEQ ID NO: 231552 - DNA, 373 bp, Glycine max
gctttggatgatgagagggtcaaggttgctaatcaggtgggaagtattccgcttgattgggctttgggagcttttattctgcaaacagcagctgatgcagatataccgaaccataactggattggcaccattttcagcgatgaatcacataccctcctctcaattattggaatttttataatattgttaacggcatggtctatatctaggtggaggaaacctcagttgaagacataatacattctaaaaaagggccaattaataacacgccagttgggaaattatacctgatgggagaaggaattatgggtcctgggttaatcatgtggaagcactgctgtgattaagatgaaaatatttaacccttaaaact

SEQ ID NO: 231553 - DNA, 337 bp, Glycine max
ataagctttacttaattagcaaatccaaatatggcactttcttcttcatcatcttcaacatccatatttgctttagctttgttcactcttttgcttataggaagttcttcagctcaactctctgagaacttctatgatagtaaatgtcccaaggttttctatgccgtaaaatccgttcttcaatctgctttgggtaaagaacctcgccagggaacatctaacgttcggctcctccttcaagactggtttggccatgggtgttatggattaattataactgatgggccttcctcaaaaaagaatggaacttccaacaattactccttgagaaggtaag

SEQ ID NO: 231554 - DNA, 360 bp, Glycine max
gggattcaaacaaaccgcattcgcactgtgcatccctttcttccttcctcgtcttattctccaaccctctccaaaacctccttctcactcttcttctttctgctactctccctctaaacaacgtcgtttctcgtcgtacagccatgtcatacgactacctcttcaagtacatcatcatcggcgacacaggtgtagggaaatcgtgcctgctcctgcaattcaccgataagaggttccaaccggttcatgatctcaccattggtgtcgagttcggcgctcgcatggtctccatcgattctcgacccattaagcttcagatatgggataccgctgggcaagagtcttttagatccatcacta

SEQ ID NO: 231555 - DNA, 278 bp, Glycine max
cggcccgagggctgagcgatgttttccctcctctaaggtcccaattttttcttaaaccctagaacacacactctctctcacagaagaagaagctgctgcagaagagaatttccaaaatgtcgatgtccaagagttccaagatgcttcagtacatcaactaccgtatgcgtgtcaccattcaggacggtcgccagctcgtcggaaaattcatgggcttcgaccgccacatgaacctcgtcctcggcgactgtgaggagttccgcaagcttcctccgggc

SEQ ID NO: 231556 - DNA, 407 bp, Glycine max
  unsure (1)..(407): unsure at all n locations
cacaagccaagtgaaagtgagaaaaaataaaaatcaaagagcataatgtcagggatcattcacaagattggggagacccttcatgtgggagggcacaagaaggaggaggagcataagggtgagcaccatgctggagaatacaaaggggagcaccatggtgaacacagtagtgagtacaaaggagagcatcatggtgaacacaaagctggagagtaccatggtgagcacaagccagagcacaaagaggggttcctagacaaagtcaaggacaagatccatggtganggctgcgccgccgaaggcgagaagaagaagaaagagaagaagaagaaagagcatggccatgagcatggccatgacagcagcagcagcagtgacagtgattaaactgctgcatcacctatata

SEQ ID NO: 231557 - DNA, 301 bp, Glycine max
  unsure (1)..(301): unsure at all n locations
gcttttgatccggaagctccccttccagaggctggttcgtgaaattgctcaggacttcaagactgatctgcgtttccagagccacgccgtgcttgcattgcaagaagctgctgaggcataccttgttgggctctttgaggacactaacctgtgtgccattcacgccaagcgtgtaaccattatgcccaaggatattcagctggcaagaaggattcgtggtgagcgtgcttgagttggtggttggaaagatgaagatgattggtggctgcggttggtgtttttgtttttcagantccttttt

SEQ ID NO: 231558 - DNA, 414 bp, Glycine max
ccaaccttcaacgtctcttcactctcttccttttttccctaattgcaccctctttggctcaacaatccttcagacccagagccctcgttgtcccagttaaaaaagacgcttccaccctccagtatattactcaaatcaaacaaagaacaccactcgtcccagaaaacctagtacttgacatcggtggccaattcctgtgggtcgattgcgacaacaactacgtctcctccacttaccgccccgcacggtgtggctccgcccagtgctccctcgccagatccgacagctgcggaaactgcttctccgccccaaaacccggctgcaacaacaacacgtgcggcgtcacgccagacaacaccgtcaccggcaccgccaccagcggcgagctcgcgcaggacgtcgtctccctccaat

SEQ ID NO: 231559 - DNA, 339 bp, Glycine max
ctctgcttcaacttgctccctcagaagcgaagaagaagccacagagaaccagtctcctactctctctcacccacaagaaaaatggcatctcacatcgttggatacccccgcatgggtcccaagagagagctcaagttcgctctcgagtctttctgggatggcaagagcagcgccgaggatttgcagaaagtggctgctgatctcaggtcatccatctggaagcagatggctggtgctgggatcaagtacatccccagcaacactttctcgttctatgaccagctgctcgacgccaccgccaccctcggtgccgtcccccccaggtacggctggaccggc

SEQ ID NO: 231560 - DNA, 366 bp, Glycine max
gacgtcggacgcacgcgtacgtaaacactcgggttcgacggaagcttggcgtggaagcaaacgtagtcaagtggcaaactgttcctgcagcttgcggagagtacatagctgactacgttctaggagaccaatatagatcagattccaaaacagttaaccaacaagcttatttctatgctaaatccctcaaactcaccaacaaagatgtctttgtcttggacgttgacgacactactctctctaatctccagtattttgctaaccatggatttggtgtggaaccacacaatacgacggcgtttaagaactgggttcttgatggcgaggcattcgcactgccagagactcctaaaatgtacaacaaac

SEQ ID NO: 231561 - DNA, 331 bp, Glycine max
gcatgagactcgcatgttcccgtgttgggaccacttccaattgggtttgcggtgttcatggctcacttggacaccatccctatcagcggcactggcatcattccagctagaagccttgggcctgctgtcatattcatcaacgaaaaggcttgggatgaccagtggatcttctgggttgggcccttcatcggtgctgctcatgctgcattctaccaccagtccgtgttgacggcccaagcatcaaaagctctacggtctttcaggagctcctcaaacctgtgattctggccgagctaattgagctaacagagacatgcttcatttaattgtg

SEQ ID NO: 231562 - DNA, 357 bp, Glycine max
taaaaccgccacaaatttctccatagttatgggcacttccattctcgacgccctgaacgttcgcgtggaaggttccggcgacaagtaccttgtcctggcccacggcttcggcacggaccaatccgcgtggcagcgcgtgctcccttacttcacccgcaactacagcgtcattctctacgacctcgtctgcgccggcagcgtcaaccccgaccacttcgactaccgccgttataccaccctcgacgcctacgtcgacgacctcctcaacatcctcgacgccctccgcgtcccccgctgcgcctacgtcggccactccatctccgccatgatcggcatgctcgcctccatccgccgccc

SEQ ID NO: 231563 - DNA, 348 bp, Glycine max
cgaaattcggctcaagacttcatcttcggcgacgcctccgcggtgttccagaactgcaccatggtggtaaaaaagccactggagaaccaccagaacatcgtgacagcacaagggaggctcgacaagcaggagaacaccggcttcgtcctccagaaatgcgtgatcaaggccgacaccgacttggtacccctcaaagacacaatcaagaactacctcggaaggccgtggaatgagtattcacgaaccatcatcatggagactcacattgatgacctaattcaccctgatgggtttcttccttgggaaaggaactttgccccaatcacactttactatggtgagttcaac

SEQ ID NO: 231564 - DNA, 323 bp, Glycine max
cttccatggctatgctgcagcaccaacaattgcagcacttttctgctttctatacttcttccacaggagactatgttgcagacacccccttttgacagactaccccatcctcggcatgctgccacaattactcttcaacctgtggcgtgcccatgattttttcactgagatattgaaacggcatggaccaacaggtgagttcactggaccttggtttaccagcatggactatttggtcacttgtgaccccatcaacgtccaccacatgctgagcaagaatttccacaactacgtcaagggacccgagtttcgtcacatttttc

SEQ ID NO: 231565 - DNA, 389 bp, Glycine max
caagaagaagaacaccaccaacaacaccaacaacaagaagcatggggacaacactaataataatgatggcacaaagactggtgctgagaagaaattcaaaacacttccaccatcagagtctctgcctaagaatgaaaccattggaggctacatctttgtttgcaacaatgataccatggcagagaatctccaaagacagctctttggtctgcctccacgatacagagattcagtaagaacaataactccagggttgcccatttttctgtacaactactccactcaccaactccatggtatctttgaggctgcaagttttggaggatccaatattgatccaacggcttgggaggacaagaagtgccctggtgaatctcgtttccctgctc

SEQ ID NO: 231566 - DNA, 370 bp, Glycine max
ctcctctgtctctctctctccaccattgccatggatccttacaagctccggccatccagcgccttcaattctcccttctggactacaaattctggtgctcctgtttggaacaacaactcctctttaaccgttggagctagaggtccaattctgcttgaggattatcatcttgtggagaagcttgcaaactttgacagggaacgtatcccagaacgtgttgtccatgccaggggagctagtgcaaacggtttctttgaagtcacacatgacatttctcacctgacatgtgcagatttccttcgagcgcctgaagttcagacgcctgtaattgttcgtttctcaactgtcattcatgaacgtggtagccctg

SEQ ID NO: 231567 - DNA, 357 bp, Glycine max
atccattgcacctttctcttcctccgatggctaatctctcactcttgttcttcggtctcctcctattctccgctgccgtagccaccgtcgaacgaatcgacgatgaagacaaccttctgatccgtcaagtggtgccggacgcggaggaccaccacctgctcaacgcggagcaccacttctccgccttcaagacaaagttcgccaagacctacgccacgcaggaggagcacgaccaccgcttccgtatcttcaagaacaacttgctccgcgccaagtcgcaccagaaattggacccctccgccgtccacggcgtcaccaggttctccgatctcactccgtccgagtttcgccggcagt

SEQ ID NO: 231568 - DNA, 376 bp, Glycine max
cagacagatgcggcagcaaataataatggcttcaaatcccaaacctttgacttttgaggaggtggctaatcacaacaacacaaaggattgctggattattatcaatggcaaggtgtatgatatcacgccatttctggatgagcatcctggaggagatgaagttttggtaacgtcaacacggaaggatgccaccattgattttgaagatgtgggccacagtgattctgccatacatatgatggaaaaatacttcgtcgggaaggttgacacttccactcttccagcgaaagttaaccatagtctgccacaacctacacaagcaggtggcgctgggaatcaatcttctggatttgttgttaaaatcttgcaattcctg

SEQ ID NO: 231569 - DNA, 356 bp, Glycine max
caacactgatggattatacagcgcaaagcgttcagctgttattagggcatcagatgatttctggccaagagaccctgcatcccacacgattcacattgcatcagtggcttacaatactattttccttggtgaatttatgcagccagactgggatatgtttcataacctacatccgatggctgaatatcatggtgcagcacgagctgtatggggatgtccaatttatgtcagtgacaagcccggacaccatgactttgatcttttgaagaagcttgcactacctgatggttctatattaagggctaaacttccaggacgaccaacaaaggattgcttatttactgatcctgccagag

SEQ ID NO: 231570 - DNA, 381 bp, Glycine max
  unsure (1)..(381): unsure at all n locations
tgcaaactagttttgttttgggaacatcatcacattacattagattggtggtaatggcagcgtcactacaagcagcagctactttcatgcaacccaccaagttgagcaggagcaacactttgcagcaaaagtctactcagtccatttccaaggcttttggtttggcacctgttggagctaaaaaggtcacatgctcccttcaggctgatcttaaggacttggctcacaagtgtgttgatgctaccaaaattgcaggattcgcccttgccacctctgccctcgttgtctctggggcaagtgctgaaggtgttccaagaggctaaccttcgacganatccagagcaagacctacttggaagtgaaggggacacgaacagcaaa

SEQ ID NO: 231571 - DNA, 405 bp, Glycine max
gaaattcggtccaaccaattttccagttaccttaaggttcaaacccaaggaatttggaagccagggaacaacaatggaggcaagcaacaacaagttccggtactcttaaagcaactcctttccttggccaatgcaagggtgccaatgccaatgctcttagggatgttgtctccatgggaactgggaagtacaccatgggcaatgatttgtggtatggaccagacagagtgaaatacttgggacccttctcagctcagaccccttcatacttgaaaggagaattccctgaggattatggatgggacactgctggcttatctgctgacccagaagcatttgccaagaacaaggctcttgaagtgaatcatgggcgatgggccatgcttggagcactaagatgcatca

SEQ ID NO: 231572 - DNA, 325 bp, Glycine max
cttacttaaactcagaattcggtccaaggaaagaccactgattctaggggatgtaacagccaagaacttaaaggaggttggattcaacacatgggagaagttaattctcagggatccatctgagtactctggtaagttatcatttgaatacaaatcagctgaaagagacaagctggataaggagggatacagaatcattggaaacgttggggaccaatggagtgacctcctgggaaccaccaaagggactaggaattttaagctgcctaaacccttgtacaatgattaagctctcaaatcaagcctcaaagttgcgccttaattt

SEQ ID NO: 231573 - DNA, 400 bp, Glycine max
acaaggcagaaagcaagctcatcctagagttttaaaaatggcagcagcctcctccatggctctctcttccccatccttggctggcaaggccgtgaagctgggcccatcagcccccgaagtcgggagggtcagcatgaggaagaccgtcaccaagcaggcctcctccggaagcccatggtacggcccagaccgcgtcaagtacttgggcccattctctggcgagcccccgtcctacctcactggcgagttcccaagtgactacggctgggacactgctgggctttcggccgacccagaaaccttcgccagaaaccgtgagctcgaagtgatccactccaggtgggccatgctcggggccttgggctgcgtcttccccgaactgttgtcccgcaacggggtc

SEQ ID NO: 231574 - DNA, 213 bp, Glycine max
caaacatggtcacccccggatccaattctgctaaggtttcccctcaggtggttgcggagcacactgttagagcccttcagagaaccgtgcctgctgcagttcctgctatcgttttcttgtctggtgggcagagtgaggaggaggcatccgttaacctcaatgccattaaccaggtcaatggaaagaagccatggtcactctctttctcctttg

SEQ ID NO: 231575 - DNA, 393 bp, Glycine max
  unsure (1)..(393): unsure at all n locations
ctctagcacacaaaacttgctatagcagtaagctataactcatttgaggctctgtgagaattgagaaatggctaaagatgttgaggttcaagagcaaggaggagagtactctgccaaagactaccatgaccctcctccagcacctttgttcgacccagaggagctcacacagtggtccttctatagagccctcatcgctgagttcatagcaacccttctcttcctttatgtcactgtgctcaccattattggctacaaaaggcagactgatacaacggtaggtggcaccgactgtgatggggttggcattttgggcatcgcttgggcctttggtggcatgatcttcatccttgtttactgcaccgccggtatttcaggangacacataaaccc

SEQ ID NO: 231576 - DNA, 381 bp, Glycine max
  unsure (1)..(381): unsure at all n locations
aaaaaaaataaacaatggggatangggtactatttgttgggtttttcttgctatcttgtgttgtgtgtgtgaagggtgtggagccaaaagcctcacccacttgtacatttccggcagtttacaactttggggactcaaactcagacactggaggcatatcagcttcatttgtgccaattcctgcaccttatggcgagggcttctttcacaagccttctggaagggactgtgatggccgtctcattgtagatttcatagctgagaagctaaacttgccatacttaagtgcttatctgaattcccttgggaccaattaccggcatggggcaaattttgccactgggggatccaccatttagaagcaaaatgaaaccatatttc

SEQ ID NO: 231577 - DNA, 354 bp, Glycine max
  unsure (1)..(354): unsure at all n locations
acgtaagatcgaaattcggctcnaggagaaaaaangaagaaacagaacaacacagaaactcaaaaccaaaataaaattattatggatcacattcataggttacgttgttttgggacaatacccaaaattccttttctaatgctactttccctgcttctcttcagtttcgttaacgcatccttcgacctcgctactatacccttcaacgacggctaatctccgctcttcggagctagcaaagttgttcgctccgaagatggataccgcgtacaactccgcctcgatcgctaaacaagttcgggtttcaattcctccagtatgtaccagtatggattcttcaccgcgagaatcaag

SEQ ID NO: 231578 - DNA, 368 bp, Glycine max
gcaatttcgtcacatcaaaaatatccaatatgagtacggcaccggcagattggagaaccgctcgtcgttggaggcggacatagcggctgtgaagcccagccacgtgttcaacgccgcgggtgtcacgggtagacccaatgtggactggtgcgaatctcacaaagttgaaaccatccgaaccaacgtcgtcggcactctcaccctcgccgacgtctgccatcataaaggcctcatcctcatcaactacgccaccggctgcatcttcgagtacgattcttcccacactctcggatccggcatcgccttcaaggaacacgacactcccaatttcaccggatccttctactccaagaccaaagccatggtgg

SEQ ID NO: 231579 - DNA, 391 bp, Glycine max
  unsure (1)..(391): unsure at all n locations
aattaacactgctagtgttgctggaacctttagtggaggggcttcacatgcctacacaagttcaaagcacgcactaattggactgatgaaaaacactgcggtggagcttggacagtttggtattagggtaaattgcttgtccccttatgtggttgccacaccattgactaagaaatgtttcaatcttgatgaagaccgaaatggtgagatttattccaacctaaaaggtgttcatcttgtgccaaacgatgtggccgaagctgctctatatttggcaggtgatgagtcaaagtatgttagtggtcacaatcttgtgttagatggagggttcaccaatctaaatgtaggattttctgtgtttgggcagtctgagtaaaanatgtcttttaat

SEQ ID NO: 231580 - DNA, 145 bp, Glycine max
ggtccaagggccttgaatccaggtcccaacgggttggaaattttttgggaaccttatggttgctgggaatttgtccgtttccggggaacacaattttggaagaggttctgataacatccgtgacaaacatggcatctgggcggtc

SEQ ID NO: 231581 - DNA, 375 bp, Glycine max
tttccctctctagaaccttcctttttcctctttccgtgtctgtctgtctgtctctctctcccccatggcttccgatctcgaagcaaaagccaaagaggccttcgtcgaagaccacttcgaactcgccgtggaccttctttctcaggccattcacctcgaacccaacaaagccgaactctacgccgaccgagcccaagccaacatcaaactcaacaacttcactgaggctgttgctgatgctaacagagcaattgaattgaattcttctctaccaaaagcatatttgcggaaaggtactgcgtgcatgaagcttgaggaatatgagactgctaaggctgctctagaggtgggtgcatcaatgtctccagacaactc

SEQ ID NO: 231582 - DNA, 358 bp, Glycine max
ctcgaaccgttcttgtcaggaagatatcatgacaaaatggccgtaacagaaacagtcctaaaggatgctggcttccacacatgggagcagttaattctcaacgatccacatcttatcactccaaatgcactttcatacaaatcagcaatgagagagaatctgttgaggcatggatacacaattgttggcatcattggagaccaatggagcgatctgcttggagaccacagaggcgaaaacaggacctttaaacttcctaatcccatgtactacattgagtagtaccttcacctctctcaacagtctaactagagtttgctcctatctatatgtaacaaggtatgctgatatgcactat

SEQ ID NO: 231583 - DNA, 387 bp, Glycine max
gaagaatttcaagcttcgtgtggttttatgccatgttgatgtggaagatgtaataaagcctcttcttgaagttacaaaaacagctatgcttcatgactgtacactcctttgtggatggagcctggaggaatgtggccgttacttggagaccataaaagtctatgaaaacaagcctgcagacattattcaaggccaaatggatacagattatctatcacggcttactcattcccttacaactgtccgacatgttaacaagactgatgtagtcacccttggtaccacatttgggtctctttctaacattatgggtgcatctatggaagatcttgctcgttgccctggcataggagagcgcaaggtcaagcgcttgtttgacacttttca

SEQ ID NO: 231584 - DNA, 402 bp, Glycine max
cataaatgctcaaactctatcagaaatggagatccctgaaagctatattgaatccctacccaagaatggaagatcaagtcttggggacttgatctacaggagcattacagatgattttttcgatcctgatcagctcctatcagccatggacatgtcatcagaacataaaatcgtagatctcaaggacagaattgaggcatccattgtgatttggagacggaagatgaaccaaaaagatagcagcaaatcagcttggggttctgctgtgagtatggagaaaagagaaatctttgaagacagggccgaaaccatcttacttctcctaaagcatcgttttcccgggactccccaatctgcattggatataagtaaaatccaattcaatcgggatgttgggcacgc

SEQ ID NO: 231585 - DNA, 184 bp, Glycine max
gagccaaattccattttccaattcaaaaccctaactccgttcgaagcaccaaatcgtgatggcaccaaaggcagataagaagccaccagagaagaagcctgtggaggagaagaaatcgacggtgggagacaaggctccggcggataagaagccaaaaggcggaaagaagcttccgaaagaagga

SEQ ID NO: 231586 - DNA, 299 bp, Glycine max
aaacccgaaattcggcccaagcaaaatccctatccagtaaattaactataaagccaacccaacaattatccctttccttccggccccgctttgctttcctggccctttcaaaaaatgttgaacaatttgtggacaaaattggaaacccaattttcccaggtggcacatattacattaggccacaaccttggggggctgccggtgttgaattgaaactaggccggaaaggaaaaccaaatggcccatttaaggttttgcaaaataagccacaaacttcccttggaaaacaattcaaatca

SEQ ID NO: 231587 - DNA, 401 bp, Glycine max
  unsure (1)..(401): unsure at all n locations
gttgaaacacaaagaagaaaaaatgggttcctctttgtggacttgtctgattttgttatcacttgcttctgcttccttcgccgccaacccaagaacaccaattgatgtgccatttggcagaaactatgtgcctacttgggcctttgatcacatcaaatacctcaatggtggttctgagattcagcttcatcttgataagtacactggtactggcttccaatccaaaggatcctacctgtttggtcacttcagcatgtacataaaattggttcctggtgattcagctggcacagtcactgctttctatttatcatccacanactcagaacatgatgaaatagactttgagttcttgggaaacagaaccgggcaaccttacattttgcaaactaatgtgttca

SEQ ID NO: 231588 - DNA, 384 bp, Glycine max
cttcacttgagtccatggttgatttcgccactaccaagctcgggagcaacgatgttgatgctgtttccacagaagtgacaaaaaaagataatgagttacaacagtatacaatggcaccaggggttaagaggttgggtgaggacaaggctagtgttgtgtgtcacaaggagaattacccttatgcagtgttttattgccacaaatcagaaaccacaaaagcctattctgtcccattggagggtgctgatggaagcagggtcaaagcagttgcagtgtgccatactgacacatcaaagtggaatcccaagcatttggcgtttcaagtgcttaaggttcatccaggaactgttcctatctgccacttcctgcctcaagatcatgttg

SEQ ID NO: 231589 - DNA, 434 bp, Glycine max
aggcgtacgtaaactcggaattcggctcaagtggtcacatgaaacttcagacacaggtcttctttgcttcaattgatcagcgcagtgaacgtgcagcgggtgagagtgcgtgtaccgctcttgttgcggtaatggctgattggttccaaaacaatcgtgatctcatgccaataaagtcccagtttgatagtcttattcgggaaggctcgttagaatggaggaacttgtgtgaaaatcagacctatagggagcgattccctgacaaacattttgatcttgaaacagtcatccaagccaaaatacgccccctttctgtggttcctggcaagtccttcattggatttttccacccagaaggaatggatgaagggagattcgattttctgcatggggccatgtctttcgataacatctgggatgagattagtcatgct

SEQ ID NO: 231590 - DNA, 403 bp, Glycine max
  unsure (1)..(403): unsure at all n locations
gtatttatttaattggcaaaagacggtgtttgggtttcacagacagacacacactcggttctgccttcacaaaaaaattatcgagatcccctttttctcctaagaaaagccatggctaagggtcccggtctctactctgacatcggcaagaaagccagggatctgctgttcaaggactaccacagtgaccagaagttcaccatcaccacctactcacccactggagttgctataacagcatcaggaaccaggaaaagtgaactgtttgtggctgatgtcaacacccagttgaagaacanaaacatcactactgatatcaaagttgatacagattctaatctcttcacaactatcactgttaatgaacctgctcctggtctgaaggctatttttaacttcaaag

SEQ ID NO: 231591 - DNA, 402 bp, Glycine max
cacgttccgagttttctgatcgctcatagagagttcgacgcggcggttgcagaagaagattgcaagatgaagttcaacatcgcgagtcccaccactggatgccagaagaagctcgagatcgacgacgatcagaaactacgagcattttgggacaagaggatctcacaggaggtcagcggagatgcacttggtgaggaatttaagggctatgtcttcaaaattactggaggttgtgacaaacaaggattcccgatgaaacagggagtgcttactcctggtcgtgttcgacttttgcttcacaggggaactccttgcttccgtggatatggaaggcgtaatggagaacgtaggagaaagtctgttcgtgggtgcattgtcagcccagacctctctgttttgaac

SEQ ID NO: 231592 - DNA, 390 bp, Glycine max
  unsure (1)..(390): unsure at all n locations
aatggcatgacagcagggcacaccattgctgtgtttgaatgtgttggtaggagcccatatgattattgttcgagatacttcacagttgagaattatcgattaacatatgcagaatctattcaccctgtgccaaatgttgacaaaccaccagtccagggtgaatctacttctttagttatggtaacccctccaccaacaaagcgccctccaggtcggccaaaaatgaagcaagttgaatcaatagacataattaaacgtcagcttcagtgcagtaagtgcaagggacttggccacaataggaagacatgcanactatcatagtatcacaattaacaacataggaatcgttttttaatcaaaatgcacatctctgagctatttccaacaaca

SEQ ID NO: 231593 - DNA, 403 bp, Glycine max
gttcttcttttgtggcacaagaagaagcatgcatcaacagggtgataagtgatgaatctcgtattgctctctcttctgacagtacacaaaagggagataaagatgagttcctcctacctgaatttaatgatcttgttaaggacatggactttggagccatcattgtcagaaattcttttaaagaagatatggaagcaccatggttaaaagtaggatcttctatagcatatgctagtcccgagaaggacgactatgagcaagagataagtcaactcaggagcatgattagaatgcttcaagacagggggcgaagtcttgaggttcaactgcttgagtactgtcgtcttagagagcaagaaacagcagtgatagagctccaaaatagattgaaagcaagtaccat

SEQ ID NO: 231594 - DNA, 390 bp, Glycine max
tacttaagctcggaattcggctcaaggtgggttttcactgatcaagcccttcctgcggatcttatcaagagaggaatggcagtggaggatccatcctctccctatggccttcgccttgtgatagatgactacccttatgctgttgatggactagagatatggagtgctatccagacatgggttaaggactacgtctccttgtactatgccacggatgatgcagttaagaaagactcagaactccaagcttggtggaaggaagctgttgagaagggtcacggtgacttgaaagacaagccatggtggcctaagttgaacactcttcaagatctgattcacatttgctgcattattatatggactgcttcagcactccatgcagctgtgaat

SEQ ID NO: 231595 - DNA, 493 bp, Glycine max
cgaatgaatcacgtggcatatagaagacaatgacgtcgcatgcacgcgtacgtaagctcggaattcggctcgagagctggtgctagcgtcctgaaaattcctctttacaagcatattgctaatatcgcgggtaacaaaaagttggttttgcctgttcctgctttcaatgtcattaatggtggatcacatgctggaaacaaacttgctatgcaggagtttatggttcttcctgtgggagcttcctcgttcaaggaagccatgaagatgggtgtagaagtgtatcacaatttgaagtctgtgattaagaagaaatatggtcaagatgcaataaatgttggtgacgaaggtggctttgcccctaacatccaggaaaacaaggaaggcttggaattgctgaaaactgccatcgccaaagctggttacacaggcaaagttgtcattggaatggatgttgcaacttccgaatttcacaagggagaccaaacattccaat

SEQ ID NO: 231596 - DNA, 511 bp, Glycine max
  unsure (1)..(511): unsure at all n locations
cgctcacttacggatgaaatacgattgcctgggcctatagaagagctatgacgtcgcatgcacgcgtacgtaagctcggaattcggctcgagcgttaacacactctccgtcgtttcaccctaatcaacccttcaaggcgccccaaggaaccagcctcgttccttccgggctggctccggcggtaacaacaaccaaaacattcctacctaatatatcaatcaataatcaacctcaacaaaaaaaggtttaatttatttcccagccatttttacaaccctagatacatacatacatacatacattgatattatatgtgtatatattgagtgatcacgtgtgtgtatatatatatatatatatatatatatatatatatatatatatatatatatatatatgtatatatatgggggaagtagagcaacatgtacggttccagcagcaggtagaaacggagtttcagcatttgtcactgaagaaaaggaagcgctgtttgtcgaaacaacaatcn

SEQ ID NO: 231597 - DNA, 395 bp, Glycine max
gctctagcttttctcgaaagcttcctttttgggctatatgttcacaaacaccatttcccctgaacacccaattcctgtctaaaacacacttctcaatatctatctctagaatggctaaccatgatgcaaaagaagaacaaaggccactcaaccaatggagaagaagcaaagggggattcatggcttccatgttcatttttgtcttgtcagcattggacaacatgggttttgtggcaaacatggtgagcatagtcctatacttttatggagtgatgcactttgatttggccagttcagccaacaccctcacaaacttcatggcttcaacctacctgctttcccttgttggaggcttcatctcagatacttacttgaacagatttacacatgcttgc

SEQ ID NO: 231598 - DNA, 353 bp, Glycine max
cgcgtacgtaaactcggaaatcggctcgaaggaccaatgggaaaaggagaaagaagaaaaaaaaagggaatgggatggttgcaattgcagagaatcgtgaccaagggaagtgctaatttgatctcaccactcccactttcacgattcttctcgaaatcttcttccccctatgttgtgaaagttgggattccagagtttctaaacgggattgggaaaggggttgagtcccacgttcctaagcttgaatccgaaatccgggaattccaaaaaccttccctcactcgcaaccctcaacctcaagaagcttggcattccttgcaaacacaggaagttaatattgaaatacacacaca

SEQ ID NO: 231599 - DNA, 400 bp, Glycine max
gtccgtcgttttgctcaatacaaatggcttgcaacaagaggagtcaatgaagaagccatacttctttcactacctttggatcttcgtcgagaaattcaacatcacttgtgtctttctcttgtgcgccgtgtacccttcttctcacaaatggatgatcaacttcttgatgctatatgtgaacggcttgcgtcatcactgagcaccgaaggaacctacctatttcgagagggtgatccagtggatgaaatgttgtttatcattagaagtcaattggaaagctccacaaccaacggaaggaaggtctggattcttcaattccatctcactccggcctggtgacttttgtggggaagaattgttgacatggggcttaatgccaaactcaaacctcaacctacct

SEQ ID NO: 231600 - DNA, 318 bp, Glycine max
aaaaagaggaagatactgctttggtcaacccattgctttgtatagtttccacactttttttcacctggttcaagtcaaagaaattattgtggtttgtgatccttcatacaaggacatttttgaagatgcaaagggagattaccaagcagaactcaaatttgcactgcctggaaaagaaagacaggattctgtttataatggctttcaggctgttgatcctaactctgaacttgtttgcattcatgattctgcaagacctttggtattatcagcagatgtgaaaaaggtccttaaagatggtttattgaatggagctgc

SEQ ID NO: 231601 - DNA, 504 bp, Glycine max
  unsure (1)..(504): unsure at all n locations
aggccnttcctgaattgaatgaattcgctagtcaanactatgcaatcgcatccaggcctacgtaaactcgaaattcggctcaagaaaagtttgatcctggctcagaaggaacgctagctatatgcttaacacatgcaagtcgaacgttgttttcggggagctgggcagaatgaaaagatgctcctagcgtgaaagttgcttgtctcgcccaggaggtgggaacagttgaaaacaaagtggcgaacgggtgcgtaatgcgtgggaatctgccgaacagttcgggccaaatcctgaagaaagctaaaaagcgctgtttgatgagcctgcgtagtattaggtagttggtcaggtaaaggctgaccaagccaatgatgcttagctggtcttttcggatgatcagccacactgggactgagacacggcccggactcccacggggggcagcagtggggaatcttggacaatgggcgaaaacccgattcagcaataacgcgttagtgaaaa

SEQ ID NO: 231602 - DNA, 376 bp, Glycine max
cttcgtctcaaatctcttcgttccttcgattcgttccatttcttccaaaatggccaaagacccagttcgcgttctcgtcactggagctgcagggcaaattgggtatgctcttgtccctatgattgctatgggagtgatgttgggtcctgaccagcccgtgatcctccacatgcttgacattcctccggcagcagagtcattgaatggggttaaaatggaattggtggatgctgcattccctcttcttaaaggtgttgttgccacaactgatgtggttgaggcatgcactggggtcaatattgccgtgatggttggtggattcccaagaaaagaaggtatggagaggaacgatgtgatgactaagaacgtctccatt

SEQ ID NO: 231603 - DNA, 391 bp, Glycine max
aaaaaaactatggctagattctgctggagaccagctgcggtgggtgatgatggagatgtgaatggtccacttgaacggctgctatggtacaaggatttggggaaccatccttatggggatttctcaatggctgtgattcaagctaatagttcattggatgatcgtagacaacttgaatctggaccattgacttcggactatttgggtcctcaaggaaccttcataggtgtatatgatggtcatggtggcaccgcagcctcgcaatttgtcagtgacaatcgtttctgcaatttcaagaattttgcaggtgaacatcaaagcatatcggagaatgttatacaaaaagccttttcagcaacagaagagggttttctgtccgttgtgaagaaac

SEQ ID NO: 231604 - DNA, 502 bp, Glycine max
gggtgttggtgaatgaattaatcagctgtctatagaagagactgacgtcggatccacgcgtacgtaaactcggaattcggctcgagggtttctagggtaaggtccgtttttatggaatgacgactcgcgcttttttcattctcttttttttttcggtatgccgctccgccagcaaggagtgccgcgcacgagcggagcgaaagaaccaagtggtttgtggtaatgttagaatttgcacctatttgtctctcattcgtgatcagtctgctagtttctttgatcttcctcggtcttctttttgttaatccatcacaaactacacgaaagttgtccccttattttctctttgtttttcttatggctctcgcctgtagcattccgattgccttttgtgccaagggcgacgacggtgccgtaccttccccttcgggattattaacgtatacatccgacatgcccgaagactcggcaggttccgggcgtagtaataatacctcaacgg

SEQ ID NO: 231605 - DNA, 375 bp, Glycine max
caccaagcggtggctgtccgttccggcgccgaccagtcggtgttctaccggtgcagctttaagggttaccaagacaccttatacgtttacgccaaccgtcaattctaccgtgactgtgacatatacggaaccatagacttcattttcggtgacgcagtgacggtgcttcaaaactgcaacatctatgtgaggaaaccgatgagcaaccagctgaacacggtgacggcacaaggaagaaccgaccctaacgagaacacagggataatcatccataactgtcgtataactgcagctggggatttgaaagcagtgcagggctctttcagaacctttctaggtcgcccatggcaaaagtactcaaagactgttttcatg

SEQ ID NO: 231606 - DNA, 342 bp, Glycine max
cgtacgtaaactcggaattcggctcaaggacaaacctcgtgtttacatgggatgcatgaaatcaggggaagttttctctgagctgaaccataaatggtatgaaccagagtggtggaaatttggtgacaaaaaatcatactttcgtcatgcatcaggagagatgtatgtgatatcacaagctttggctaaatttatatcaataaacagatctattctccgtacctatgcccacgatgatgtgagtgctgggatctggtttatcgggcttgatgtgaagcatgttgattagggcaagttttgttgctcatcttggtcgacaggagcaatctgtgctggtgtttg

SEQ ID NO: 231607 - DNA, 333 bp, Glycine max
aaaatactgcaggagttctccaagctctttggcgcgtttaatactgcggattttataccctatctcgggtgcgtggatccacaaggtttgaactcgagactcgctagggcacgtggcgcgctcgatagcttcactgatcagatcatcgatgagcacgtgcataagatgaagaatgatcagagcagtgaaattgtcgatggagaaactgacatggtcgatgagttgctggcgtcctacagcgaggaggcgaacttgcacaattcatcggacgatttgcacaactctctcagactcactaacgataagatcaaggctatcaatatggacctgatg

SEQ ID NO: 231608 - DNA, 389 bp, Glycine max
cacttgcgtgctgtctccacagacgatgccaaggcatttgccgagagagaaaatacgtttttcatggaaacatctgctcttgagtccttgaatgtcgataatgccttcaccgaagtgctcactcagatataccgcgttgttagtaggaagactcttgagattggggatgaccctgcagccttgcccaaggggcagaccatcaatgttggcagtagggatgatgtctcagctgttaaaaagtctggatgctgctctgcttagtttcacaagccttttgcagcagaatagaataatatctacatgtgcatgattcaaccaattctcaacattttggagtccaagtgaaatcttttaaaaactacactttcctttttaggtagtttttccca

SEQ ID NO: 231609 - DNA, 358 bp, Glycine max
  unsure (1)..(358): unsure at all n locations
atgcgatgtggtgagtgaattgcagagtcggcaatggtatgtgtatgagcgtagtcacacttgaattgaattgaagctctgttccttcatgtgacgacaatctccaacgtcatctgagctctcgtatattccccagccatggccgaaaaggtcaccataatgaggctcaaggttgatcttcagtgccacaaatgctacaagaaggtcaagaagattctctgcaaattccctcaaatccgagaccaggtgtacgacgagaagaataacatcgtgaccatcgcggtggtttgctgtaaccctgagaagctcagggacaaaatttgctgcanaggttgtggtacgatcannagcattgaaa

SEQ ID NO: 231610 - DNA, 357 bp, Glycine max
ctgagacctgataaagattccatcttgccacttgggtatgtcccattctgaaattttcccccaatccccaatagcatgtgctttgttacattagtatcaatcaagtacaggaccaaaccaatttagttgaagcatattgataaatatagctctagccctcaaaagcaactgggcaagcctgttttggacgttgaggcatatgacttcgtcagcaccacctataagttgttgtccaatgaacactgctggtacagttgggcggcaaccaacctgaatcagtgccctctctatttgctgaccatttgtcattttgtcaatctcgataaccgtatggttggcaccaaagctgcatatgag

SEQ ID NO: 231611 - DNA, 369 bp, Glycine max
ggcttcttcaccttcctcagaaaacaaaaacctagagggagtagctggtggtgccggagagaaacccattccacttggtgagaacgttctgcagaagcatgctgcattctttgacttgaataaagatggtgtcatctacccatgggagacttttaaagggttgcgtgaaatcgggactggggttttgctgtccgttggaggtgctattttcatcaatgtgtttctcagtcagagtactcgtcccggaaagtttccatctatactttttccaattgaaattaaaaatatccaacgcggcaaacacggcagtgacactggagtctacgatactgaatgaaggtttgtaccttcaaaatttgaagaaatttt

SEQ ID NO: 231612 - DNA, 395 bp, Glycine max
ctccggaatccccgccgtctcccttggtccctctcccggcccttctctctccgccaccggcaaccgcctctctgacttcgccaggctcctcgacttgaacttcgtgttcacgcccattctcactcccattcaccagctcgaccacaacagcttctgcattgacccaaacgaggtcttggccgttaacttcatgcttcagttgtataacctcttggacgagcctccctccgcggttgacactgcgctcaggttggccaagtctctcaaccctagaattgtcacccttggcgagtatgaagcaagtgtcacacgtgtcggggtttgtcaaccggttcaggactgcgttcaagtacttctctgcggtgtttgagtctctggagcctaatttggccgcg

SEQ ID NO: 231613 - DNA, 395 bp, Glycine max
ctgccattccagctgccatcattgccgagtgctatggctttggaagaccttggatttttatattgagcttacttggacttacaccacttgctgaacgtgtgagcttcatcacagaacaagttgccttttacactggtcccacagtcggaggacttctgaatgctacatgtgggaatgttactgagctcataatagcaatatttgcccttagcagtaacaaaattgctgtggtcaagtattctctgttgggttctattctttcaaaccttcttctggttcttgggacctctctattatgtggtggcattgcaaaccttaaagtggaacagaaatatgacagaagacaagcagatgtgaactcacttatgctgttggtgggattgttgtgctacctg

SEQ ID NO: 231614 - DNA, 354 bp, Glycine max
gagagagacaaaagcgtgaatcatgtcggacgaagagcatcacttcgattctcaggcggatgcgggagcgtccaagacgtatcctcagcaggctggtaccattcgcaagactggctacatcgtcatcaaatccaggccttgcaaggttgtagaggtctctacgtcaaagacaggcaagcatggacatgcaaagtgtcactttgttgcaattgatatttttaatgggaaaaagcttgaagatattgttccatcatcccacaactgtgatgttccacatgtgaatcgcactgactatcagcttattgatatctctgaagacggctttgtgagtctgttgactgataatggaaatac

SEQ ID NO: 231615 - DNA, 373 bp, Glycine max
ataatgttggagcattaattatggaaccagttatccaaagtgctggtggaatgcatatggttgatccactttttcagcgtgtgcttgttaaagaatgtcggagtagaaaaattccagtaatctttgatgaggtttttactggcttttggcgtttgggagtagagactgcagtggagctaatccattgtgtaccagatatagcttgctttggtaagctgttgactggcggaattataccattggctgtcaccttggcaacaaatgctgtttttgattcaattattggagactcaaagctcacaacccttttgcatggacattcttactctgcacatgctatgggctgcgctgctgctgttaaatcaatccaatg

SEQ ID NO: 231616 - DNA, 351 bp, Glycine max
caaaaaccatggtgtcaccaatctcacttattgtcctcttgttatcagtttcttgagcagattcagcttcagttcaagaaagttttgtccaatgtctcaacttgaattcggacaaaacatttccattttactcatcaatctacactgcaagcaacccttcattcaccagcatccttgactcctccgcacagaacctaaggcttttggtgccttcagtgccaaaacccgagttcatattcacaccctctcgtgattcccatgttcaagcagcagtaatctgctccaagaaacttgggattcacattagagtgcgaagtggcggccatgactatgagggaatttcgtacgtct

SEQ ID NO: 231617 - DNA, 371 bp, Glycine max
  unsure (1)..(371): unsure at all n locations
gaacaagtcctcaagtttccaccacctcatgtcatcaaagttagtaagtctgcatggatgactgatgaagaatttggaagagagatgcttgctggtgttaatccatgcctaattgagtgccttcaagtgttccctccaaagagcaagctagatcccacagtgtatggtgatcaaactagtacaataaccaaagaacacttagagatcaaccttggtggactctctgtggaacaggcactgagtggtaacagattgttcatattagatcaccatgatgcattcatcgcatatctgaggaagatcaatgaccttcccactgcanagttctatgccacaaggaccatccttttcttgaaagatgatggcacctt

SEQ ID NO: 231618 - DNA, 364 bp, Glycine max
gttcttcaattcattctagttctggattccgactagccgcgttgactcggttccgtttttcattctcgcggatctaatattaaggaatagcttaagggcacattacaatgaaggcattgattctggttgggggatttggaacaaggctgaggccactgacactcagtttccctaagcctcttgttgattttgctaacaagcctatgattttgcatcagatagaagcccttaaggccattggagtgactgaggtagtgctagccatcaattaccaaccagaggttatgttgaatttcttgaaggattttgaatcaaagctcggcatcaagatcacatgttctcaggaaactgaaccactgggaac

SEQ ID NO: 231619 - DNA, 396 bp, Glycine max
gtgatttttgcttaattactaaaccaaaccatttcttattccctcatcgaaaccttttctttctatatatttcccttttcaatatcatggcacctaacatcaccaccgttgttgccaatgccaccactgagcaattacccaaagctcatggaggaagtagtgggcgtgcctttgtgacttttcttgctggaaacggtgattatgtaaagggtgttgtgggtttggccaaaggactgagaaaggccaaaagcatgtaccctttggtggttgctgtgttaccagatgttcctgaagaacatcgtgcgattctcaaatcccaaggttgcattgtcagggagattgaacctgtgtaccctcctaagaaccagacccagttcgccatggcctattatgtca

SEQ ID NO: 231620 - DNA, 363 bp, Glycine max
cagacatacctacgtgggttcggtcagtgcgcgaagaagagaccgagtccggggatgatcctgcctcaggcaatgaagtatctgaagagaagcttcaggctcttttgaacattgcaatggcatgtgtttcactagtaccagagaacaggcctacaatgagagaggttttaaagatgattagagatgcaagaggggaggctcatgtctcatctaacagtagtgatcactcccctggtagatggtcagatactgttcaaagctttccaagggaagaacaccagagcatatgattggtaactttttttgacagcgtaatagttgaaactatgcattctgatttttcctgaattggttattgatatg

SEQ ID NO: 231621 - DNA, 294 bp, Glycine max
aatctcttctcttcgctcctgcacttgttgtttctttgcccttcatggcatctcaggctagccttctccttcaaaagcagctcaaagatctttgcaaaaaccccgtcgacggcttctctgccggtttggtcgatgaaaccaacatttttgaatggagtgtcaccataattgggccgcccgatactctctacgaggggggatttttcaatgctattatgagtttcccatccaattacccaaatagtccaccttcagtgaagttcaactcagagatatgggaccccaatgtatatc

SEQ ID NO: 231622 - DNA, 343 bp, Glycine max
ctcaatttgtatgccaatgtccgaccttgcaacagtcttcgacgctacatgactcgaaatgataatgtcaatcgaaatacaattcgtgaaaatagggaatgcgagtacagtgggcttgaacatcacgttgtgaaaggtgttgtataaagtctcaaaatcattacacgtcaagcaagtttaaaggtatctgagtaagcctttcactatgccaaggctcatggcaaagagagggtttctgccatacacatagccaatattatgcaaaagactgatggccatttccacaagtgttgccgttaggttgcagagaaatatcctgacattacttatgaagaagttgtca

SEQ ID NO: 231623 - DNA, 389 bp, Glycine max
ggccaggcaagccccactcaaccaccacacctctcctcgttcacgctacccctttctgctcttcttctacctttcaagttttaaaagtataaagatggcagagacattcctatttacctcagagtcggtgaacgagggacaccctgacaagctctgcgaccaaatctccgatgctgtcctcgacgcttgcctcgagcaggacccagacagcacagttgcctgcgaaacatgcagcaaaaccaacttggtcatggtcttcggagaaatcacgaaccaagccaacgttgactacgacaagatagtgcgtgacacctgcaggaacatcggcttcgtctcagatgatgtgggactggatgccgacaactgcaaggtcctcgtcaacattgagc

SEQ ID NO: 231624 - DNA, 352 bp, Glycine max
cggctcgagaaagaagggtggcttaagtggctcaactccaaagcagagagctctgttttgtatgtgagttttgggagcatgaacaagttcccttactctcagctcgttgaaatagcacgtgcgcttgaagattcggggcatgattttatctgggtggtgaggaaaaacgatgggggtgaaggagataactttttggaggagtttgagaagagaatgaaggaaagtaacaaaggatatttaatatggggttgggccccacagttgttgatactggagaatcctgcgattggagggttggttactcactgtggttggaacacggtggtggaaagcgtgaacgcggggttgccga

SEQ ID NO: 231625 - DNA, 394 bp, Glycine max
ccttatttaaacacatagcttctgtacttcggaaatgacaataattgcaaacacaaattctagtcatatcatatatccttcaacctctcatcattaggcattcagcaagcaagaggaaaaaatgggcaaaatgggcaaaattatgcttgttttgggtagcctcattggattatgctgtttttcaatcaatacctatgccttctcaccttctggatggaccaatgcccatgccactttttacgggggtagtgatgcttcaggaactatggggggagcttgtgggtatgggaatctgtatgcaactgggtatggaactagaactgcagctttaagcactgccttatttaatgatggagcttcctgtggtcagtgctacaaaattatatgtgattac

SEQ ID NO: 231626 - DNA, 375 bp, Glycine max
gttgagaactaagaaggagaagcaaatggcttcctcaatgatctcttccccagctgttaccactgtcaaccgtgccggtgccggcatggttgctccattcactggcctcaagtccatggctggcttccccaccaggaagaccaacaatgacattacctccattgctagcaacggtggaagagtgcaatgcatgcaggtgtggccaccagttggcaagaagaagtttgagactctttcctacctgccagaccttgatgatgcacaattggcaaaggaagtagaataccttcttacgaagggatggattccttgcttggaattcgagttggagcacggtttcgtgtaacgtgagcacaacaggtcaccaagatacta

SEQ ID NO: 231627 - DNA, 387 bp, Glycine max
tttggtaatgtgattgaagggtagttcaagtctgttacgctgtgagacccttaaccattactcgcacagtcacaaatgttggaccaccagccacatacactgcaaatgtccactcgcctgctggatataccattgtcgttgtgccaagatccttgactttcacgaaaattggggaaaagaagaaattccaagttattgtgcaggcaagcagtgtaactacgcggagaaagtatcaattcggggatttgcgttggacagatggaaagcatatagtaaggagtcctattacagttaagcgcagatgaaaattccccaatggatttggtttttttgtattgtgtggatgcatgtttagatataagctagttagactctatatatatacct

SEQ ID NO: 231628 - DNA, 387 bp, Glycine max
cacgttagcacaaactatcatggccacggcaacagcagctgccacctcgtcctttatggggacgcgtctcctggaggctcactccggagcggggcgagtgcacgcccgattcggcttcggcaagaaaaaggctcccgccccaaagaaagcctccaggggattgggccgagacaccgacagacccctttggtatccgggcgccaaagcgcccgaatacctcgatgggagtcctgtcggagactactggttcgatccgtttgggctaaggaagcccgcggactatctgcacttcgagctggactcgctggaccagaaccttgccaagaacgttgccggggacatcactggaaccaggacccaactccccgaactttagttccagccctt

SEQ ID NO: 231629 - DNA, 384 bp, Glycine max
ctccttcaccaccctcaggtggtggtggaagttacaatccaactccatcaactcccccaggtggtggaagctatgatccaaccccatcaccacccacagatggtggaagttacaatccaaccccatcaccaccctcaggcagcaactgtggcacaccaccacatgacccctctactccaacaccctcagtcccaacaacaccatcaaccccaacaacaccatcaaccccatcaacaccatcacaccctccctcaggaggaggtgggtactataactcaccaccaacttatggaggtggtagccccccaacaccaatcactgtgagcccaccttcaaccccaattgaccccggcacccccactatcccctccacaccccccttac

SEQ ID NO: 231630 - DNA, 388 bp, Glycine max
ggaggagtgacagtgtggaaggtcttctcttgtcttgctcgcgatcggagactttgaaaccctcccttccttctcctttcacctattcatcccaagcattcgacaatgtctccgttctcgaagctcttgtttctgatactgatggtgttcgtctcatccgcgatcgcctccgacgacgaaagagtgagcgaattggtgtccctgcaatcgagatccaaatcgggcctaatccggctgaacgaccaatccctggcccgcttcctcaccgccgtgaaaacccctcgcccttactccatcctcctcttcttcgacgcggcgcagctccacgacaagccggagctccgcctcacggagctccgcaacgaaatctccatcggctcctcctcct

SEQ ID NO: 231631 - DNA, 370 bp, Glycine max
tcttactgcaagagaaagagaagagacaaggtctatggaaataatgttgagatccaagccatgtgtgaaatgtataatcgtccaattcacatatactcctacaccacagaacctatcaatatctttcatggaagctacaacactgacatgccaccaatacgattgagttatcatcatgggaatcattacaactcccttgttgatccacggcgcttgacaattggtgctgggcttgggttcagcagtcttcgtggaacaaatgttgacaaagatcaagtcaaggctgctattaaagctcaacaagacaaacagatcaataatgcactgttagccgagggtcggttttactctgatctcgagctcacagaaa

SEQ ID NO: 231632 - DNA, 395 bp, Glycine max
ctgttcttgcgcgtgaacaagcctcaggtaagccaaaaccatggttaagcataacaatgttatcccaaacggacacttccgtaagcactggcagaactatgtgaagacttggttcaatcagccagcacggaagacaaggagacgattggctcgtcagaagaaagctgtgaagatattccccagacctacggctggacctctcaggcccattgtacatggtcaaactttgaaatacaacatgaaagtgagaggtggaaggggattttctcttgaagaactcaaggcagcagggattcccaaaaagcttgcaccaaccataggtattgctgttgatcatcgtcgcaagaaccgttctttggaaagtctgcaagctaatgtgcagaggctgaaaacat

SEQ ID NO: 231633 - DNA, 392 bp, Glycine max
tctatctcttgtttcaatttcaacaacggttactcctttttcgttttgagtttcaatcaagccatcatcatgtctaccgcatcgcaacccaaggccaagaaaacggcgtcgtccaagaagcccctctcccaccctcccttcgccgtgatgatagcagaggcgattgcgagtctgaaagagagaaccggttcgagccaatacgcgataaccaaatacatcgaagggaagcacaaggagttgcctgcaacctacaagaagcttgtcctcgttcatctcaagaaatctgttgctgctggcaagcttgttaaggtgaaaaactcctttaagctcgcaccgactaagcctgctccggttaaggccgctgctcccaaaaagccaaccaaagctgccac

SEQ ID NO: 231634 - DNA, 314 bp, Glycine max
agaatggattggatacttctattaatggggctgaggtgaagcatgtgatgaaagtgagcctggatgatgatagacatgattactattcaattgggacttatgatgagaagaatgttctgttcacaccagatgatgctaagaatgatgttggcgttggattgaggtatgactatgggatattctatgcatccaagacgttttatgatcagaataaggagaggagagttttgtggggttggattggggagtctgacagtgaatatgctgatgtggccaaaagttgggcttcaattcaaagtattcctaaaactgtg

SEQ ID NO: 231635 - DNA, 401 bp, Glycine max
aaaaagggttgccttggacacttctcaccttgttttctgagttatgttaatttgaaagaagctacgtggcatcaagaatgggttcaggtgattggtttaagacaataattagctcaagaaaatcaaaagaaggaagatcaaagaaattaaagactaagatttatacaagaaaaaagtccaatggtttagcaaatggaatgaaaagcgaaaatctagagtcagatggggtatcagttgaaactattgctgcaacaaggatccaaacagcattccgagcttataaggctagaaaatatttacaccgcttgagaggattcacaaaactgaagatccagactcaaggttcctctgctaaaaaacaagccgttaccactataacttatcttcattcatggagcaag

SEQ ID NO: 231636 - DNA, 408 bp, Glycine max
tacgtaaactcagacttcggcccgagagagctgttcgtgcgcatgcacttcactcaagtttgcctgagtcatggttaaggcataccaatgttatcccaaacggacacttcgatgagcactggcagaactatgtgaagacgtggttcaatcagccagcacggaagacaaggagacgattggctcgtcagaagaaagctgtgaagatattccccagacctacggctggacctctcaggcccattgtacatggtcaaactttgaaatacaacatgaaagtgagaggtggaaggggattttctcttgaagaactcaaggcagcagggattcccaaaaagcttgcaccaaccataggtattgctgttgatcatcgtcgcatgaaccgttctttggaaagtccgcaagctaatg

SEQ ID NO: 231637 - DNA, 366 bp, Glycine max
acgagaaaggagagcgatggagcggagcgatgacaaatctgacggagatggcctccaatctcgactctctccagaagcttctcctcaccaaagccgtcttcgtcgacgacgacaccttctccaaagcctccctcgccgccgaccaggcccgcaccatcaagctcctccagcaacgagtccagaccttggagagagaggtcgacgccgccatcaccaccgccgcccgcgctcgctccgagaagcgccaggccgaggctgctcagaaatccgccgaatcgcgcgctcatcagctcaccgccgaactcgaaaacaccacaaaggtgtttgagctgcacatggaagagctgcgagcgaaacaagaagaga

SEQ ID NO: 231638 - DNA, 348 bp, Glycine max
ggccaacgttgactacgagaagatagtgcgtgacacctgcaggaacatcggcttcgtctcaaatgatgtgggactggatgccgacaactgcaaggtcctcgtcaacattgagcagcagagccctgatattgctcagggtgtacacggccaccttaccaaaaaacctgaagaaattggtgctggtgaccagggtcacatgtttggctatgccactgatgaaacccctgaattgatgccattgagccatgttcttgcaacaaaactcggtgctcgtctcaccgacgttcgcacgaacggtacctgcccctggctgaggcctgatgggaagaccgatgttaccgttgagta

SEQ ID NO: 231639 - DNA, 390 bp, Glycine max
gcaaaactcaaacgaatacgttttctctttctcttcaatttcacccttattagcatagcatattcatttccctttcttgaatcgttcttaactgcgagaggggatatcagagaagttgattgggctcccattaataacagatctgaatgatctgatggagtctaaaggtgggaagaagaagtcgtctagtagtaagtcctttttgtacgaagctcctctcgattacatcattgaagacgttcgaccacacggtggaatcaagaagttcagatctgctgcttactccaactgcatccgcaagccatcctgagattccctaggtcctgttaagacctaccccccttagtcctgcatctgctatatttttctagtctcttctcgtctcctttt

SEQ ID NO: 231640 - DNA, 367 bp, Glycine max
tgtcacttttctttcttacctcttgggcatcactgtgactctgtgcatgcttgctgtgcttgaaattaaatggtctggcattgagctggaagaatggtggagaaatgagcagttttggctgattggagggaccagtgcccatctagctgcggtgcttcaaggtttgctcaaagtcatagcagggattgaaatatcattcaccttgacttcagaatctggtggtgatgatgtagatgatgagtttgctgatctctatattgtgaaatggacatcccttatgataccacctatcacaattatgatggttaacttaatagctatagcagttggagttagcagaaccatatacagtgtcatagcacagtgg

SEQ ID NO: 231641 - DNA, 361 bp, Glycine max
gaagagtgccaccgaattacccaacttgggttttttggtgtcctttttaactgtggtgcaaaattgaaggctatctctttggtgagctgctacgggatcaaagatctgaacttggtgttgccaacagtatctccatgtgaatcacttcggtctttatctatcagtaattgccctggatttggcaatgcctcactctctgtattgggaaagctgtgccctcagcttcagcatgttgaattgagtggactcgatggagtgacagatgcagggcttcttccactccttgagagttccgaggctggtttggataaagtgaaccttaatggttgcacaaacgttaccaataaagtagtttcgtcct

SEQ ID NO: 231642 - DNA, 396 bp, Glycine max
tgaaatatctaacaaccttaaagatctgatacataaccttagttataaaaggttaaatattctccttttaaaaggtaatcactttatgggggatataccaaagcaactatgccagttgatagatttaaacatgctagacctttctcataacaatttctctggtgttatccccaaatgcttaggtaaaatgccttttgagaataagaacccgaaggacttgttagcaagattttctatctttgatccagatctccatatccatgccgctgctctgtcgccatcaaatgtgcaagagaaagtgaatttcactacaaaggaaagaactgacacttacatcgggagagtccttgtttatatgtctggaattgacttatctcacaataaactgaagggaaa

SEQ ID NO: 231643 - DNA, 293 bp, Glycine max
ctagcgtgcacacaaaataatggacaaaaaaccatgcgactcatctcatgatccagaggtgagaaagggaccatgggtgatggaagaagacttgatcttgataaactatattgcaaatcacggtgaaggtgtttggaattcgttaggcaaagcttctggtcttaagcgaaggggaaagaattgtcggctccgttggcgacagtaccttcgtcctgacgtgaggagaggaagcattacacccgaggaacagcttttgatcagagaacttcatgcaaagtggggcaatacgtggt

SEQ ID NO: 231644 - DNA, 162 bp, Glycine max
  unsure (1)..(162): unsure at all n locations
ggaagttcatgaataagccagtgagaatcctggtagagcgtgatgaactgagcctgnagggtataaagcagttttatgtcagtggtggcaangaagacggggagctggagacattatgtgacctttgtgagactctggctagcacgcagagtgtcatttttg

SEQ ID NO: 231645 - DNA, 294 bp, Glycine max
  unsure (1)..(294): unsure at all n locations
gtcgtgtctactgtgacccttgccgtgctgggtttgagacctcagcggcgagctacattgctggtgctgagattagggtgcgatgcaagagcagggttggcaacgaggttgtgtacacgaagaaggggtacaccgactcaagcgggncatacacaatgtacgtgcgaggaggatcacgcagatcaggtgtgcgcggggaggcgtgggggcagccctcacccggaatgcagggaggtcagcccacgccgcggaggagccgtggggattctcacccgctacaacggaattgcctcc

SEQ ID NO: 231646 - DNA, 361 bp, Glycine max
catcaagctccgctccaacacaggggaaaatgagggagatccttcacgtgcagggagggcaatgcgggaaccagatcggttccaagttctgggaagtggtgtgcgacgagcacggcatagatccgacggggaagtacgtcggaaactcagatctgcaactcgagcgcgtgaacgtctactacaatgaagcctcgtgcgggcgcttcgtgccacgcgcggtgctgatggacctggagcccggaaccatggacagcgtgcggaccgggccgtacgggcagatcttccgccccgacaacttcgtgttcgggcagtccggcgccggcaacaactgggctaaggggcactacaccgggggcgccga

SEQ ID NO: 231647 - DNA, 362 bp, Glycine max
tgctgccataacagtgggtgattttgacaccatggattgcacacagcacttactctttcctagtgagtgatgcaaaggagagggaccttggttacttcctcatcttcccttatatgatggtgaggatgctgcatgaccaagttcggatcacactctctcgccatcgaactgccaaaggcaaaaacagaattgttgacaagggcattgagtttgaacaagttgatcgagaaagcaattgggatgaccagatcttgttcaatgggatcatattttatataggttatatgttagttccagagagttctcacatgcccttgtggagaacagatggtgtacttatcactgctcttttacatgctgga

SEQ ID NO: 231648 - DNA, 391 bp, Glycine max
gaactcatgaccaagattgacaggcgatacggcaaagagcttgagaaagagcccaagtttttgaagaacggtgatgctggttttgttaagatgattccaagcaaacccatggttgttgaaactttctccgagtatcctccacttggtaagtttgctgttacggacatgcgtcaaactgttgctgtgggagtcatcaagaacgttgagaagaaggatcctaccggagccaaagtcaccaaggctgcccagaagaagaagtgaatcgtgcgggctggttcatcaagggatgttggttacaataaatgttggtttcttttctgtactcttgtgtcgtcttttctaggtagcttgtttttcggacaaagtttgaagtctccagcatcatctcgca

SEQ ID NO: 231649 - DNA, 373 bp, Glycine max
gcttgatgctgcaaacaaagctgtgtccaagattggagagcacatgtcaggtggttctagtggcggttcctcagctggtggttctcagggtggggatcaggctcctgaggcagaatatgaggaggtgaagaagtaagtcggggaggagtttgtatccactttttactgatttatttgtctagatcacaagttagagatgaatcatcttttttcatttagcatataatataaggttttttgtactaaaagatggagttcattttttaccttaaggccttttaaacttgtagtacttctggagaaccaaattatgcctgtttgaataacgatattcaaaattttgcctagtgactagtgacacattttttactct

SEQ ID NO: 231650 - DNA, 293 bp, Glycine max
ctcctcttcttactccttacaagatgggcaaattcaatctgtcccagggagttgttttggcaccgctgaccagacagaggtcttacgacaacgtcgcagaaccccatgccatcctctactactcccagagaacttccaagggaggcgttctcattactgaatgcactggcgtctcggacacggcgcaaggctaggcggagggcccggggatatggactacggagcatgttcaagcttggaaacccattgtcgatgccgtcgacgccaaaggcggtgttttcgtctgtcagatt

SEQ ID NO: 231651 - DNA, 292 bp, Glycine max
ctacacgcaagtttcatttgaaggtgtactcactgagacatgtggcacagcacgatatcatggtgtcgtggatgttggggacggtacagctaatggtcatgattattggatcctcaagaattcatggggtcctacctggggagaacatcgctacatcaaggtagaaggaaatcctgctaacagcagatcaggcaggtgtggaattgcaattgagccatcttagcaccttaagaatggtccagatcgagctaatcctggagcatcaaccccttcacctgtgaagccaccaaat

SEQ ID NO: 231652 - DNA, 393 bp, Glycine max
ggataactgaaggtgatcatcattttagatattattataagaagttcatcaaataattgatcagaaatattcgatggggagctttgaaactgagctgaatcttaaggccacagagttgaggttgggattacccggctgtgatgaaactcatgacaaaagttcatccagtagtggatctgttgttagaagcaacaagagatcttcaccagaacccagtgtggaagagtccaggtgcaactctaatggttcttcagattctaccaccacaagtgatcatgatgaagacagtgtccaacctgcaaaggtacaagtagtggggtggccaccaattagatcttttaggaagaacagtctgcaacaacagaagaaggtggagcagcagggtgatggaag

SEQ ID NO: 231653 - DNA, 395 bp, Glycine max
aatatgaaaaacgccaagaaatggctgcagctgctttggcatataaatgcttggaggtggtatacatgagactggtttactgtaaacattctagcataaacagggatcggcatgagttgcaatcaactctacaaatggtttctcaaggtgaatctccttcgtcttctgcatctgatattgataatttaaataacctggcggtagcggacaaggctactttgacaaggggttctaatactcatgttcctagcaatcaagtcatatctgctcggaatcgcccaaatattgtcaggcttcttgattttactcaagacataaatcttgcaatggaggcttctagaaaatgcaagaccacttacatggctgctagtttgaacatggaagattcatggaat

SEQ ID NO: 231654 - DNA, 280 bp, Glycine max
caacaagccccaatgcttggggcaaaggactactacagtggttggaattttccaagttagggggaattaccatccaagggggtggcagcattgatggaggaggctcagtgtggtggcaagacaatccatatgatgatcctagtgaggagcaagaaaagctcattggcccgttgaaccacacagtatggaggcccggccggcgagggcgcgattcaaagtgagatgggaggaaagatgccagccgtcaagccaactgcattgcgggtctatgggagtttta

SEQ ID NO: 231655 - DNA, 294 bp, Glycine max
cccaattcttccccctccacccacccagcatagctctctattcctaggtagtagcacgcctcacattaccttgtgtcagcagctactttgactccgttaccataccattacaataattatcaaacctaaccagtaaaaatcgtgaccgtggaggaaatccggaacgcgcagcgttgccatggacgcgccacgagcgggggcggtcggcaccgccacgccgtcgaactgcgtgtgggaagccgattacgcggactactagtgtgggcagtaccaacagcgagcacatgactgatc

SEQ ID NO: 231656 - DNA, 401 bp, Glycine max
caaaacactcataacacaaagcacaaagcaaagctcatccttgagttaaaaaatggcagcagcttcttccatggctctctcatccccatccttggctggcaaggccgtgaagctgggcccatcagccccagaagtgggaagggtgagcatgaggaagaccgtcaccaagcaggtctcctcaggaagcccatggtacggcccagaccgagtcaagtacttgggcccattctctggcgagcccccgtcctacctaaccggtgagttcccaggcgactacggctgggacactgctgggctttccgcagacccagaaaccttcgccaagaaccgtgaactcgaagtgatccactccaggtgggccatgctcggagccttgggctgcgtcttcccggagttgctgt

SEQ ID NO: 231657 - DNA, 280 bp, Glycine max
gtcctcccacctcagtgattcatgtagccagcgattcctctccaattatttcttcgatataggttcatgaatgcaggcatttagggcaacagaagtgagtcagatcctaaagcatttgaagttcaaaagcttgcatcttattgagaagtgtttccttacaatattcgcgtgcgaagtcgcgacgcatgggggaacggtggggtgtgcgcgtagctggcatcaagaagacatcaattgctggaaagcaggcagcgtccaaagcggtggaggttccaaaggg

SEQ ID NO: 231658 - DNA, 291 bp, Glycine max
aaaggaaggggctttttggttaagtcatgggctccgcagccacaggttctggcccagcaatcaacgggaggattcttgaggcagtgcggctggagctctatactggagagcgtggtgaacggggtgcctttaatagcctggcctctgttcgcggagcagaggacgaacgcgttgatgctcatgcgtgaagtcaaggtggggctgaagcccaaagttgccgaggacactggacttgtccagagccagggagtagccgcggtggtcaagtgcctcatggaaggcgatgaaggg

SEQ ID NO: 231659 - DNA, 345 bp, Glycine max
gtgaatgcaagcttgatatcacgccattggccacggggatcagcagcacctggtgccaatggcgtgaatgcaagcttgatatcaaaaactgctcacctaatcaactcagtgtaatgcaaggattcaggacagatttcttaagggcatttagtgtggttggcaacgccgcatctaaagggcattttatagatggttgctatgcacactgccaaactggaatacaagagacatggctgagaaatgactccccagtggtggccaagacatcaattgcaaaggcagtgggtgattggttttatgatcgaaggcccttccgtgagatagattgtgcctacccttgcaacc

SEQ ID NO: 231660 - DNA, 343 bp, Glycine max
agaggttttgacgcaacacactttcactgagaaaggatctctatcgaccaaggagcagaataaaacccttctctctggtaagtgaataagagaagggcgtcagatcggaaacttcacactttcgaggaggtggcaaaggaggaggagaccaaggattgctgggtcagcagttctggcaaggtgtagggtgtgacgggagtgatgggagatcatcccggaggtgatgagggtgtgtgatctgcaacagggaaagatggagcgagtgattttgaagatgttggagacagtgattctgctagagagagggtggaaagagaggacattggtgagattgagggagcaa

SEQ ID NO: 231661 - DNA, 343 bp, Glycine max
cgcgttggtgcaaagcatccttcgtttcaatttctctctctcagcgctttctgcaatcgaacctttcatctccaaagggatccacaggccgaaggagaaatggggctgacattcacaaagcttttcagtcggcttttcgcgaagaaggaaatgcgaattctgatgggtggtcttgatgctgctggtaagacgactagcctgtagaagctcaagctcggagagatcgttaccagaattcctaccatcgggttcaatgttgagactgtggaatacaagaacattagcttcactgtttgggatgttggtggccaggacaagggtcgtcccttgtggaggcactact

SEQ ID NO: 231662 - DNA, 395 bp, Glycine max
cggctcgagcaacagtcctccatctacaatcatacaaacctttattctaagttctgatggctctgcgatcattctcttacgatgtgttcctcagcttccgaggggaagatactcgttatggtttcactggctatctctacaatgtccttcgggaaaggggaattcacaccttcattgatgacgacgagccccaggaaggggacgaaatcacgacagcacttgaggcggctattgagaagtccaagattttcatcatcgtgctctctgaaaactacgcatcttcctccttttgtttaaactcactcactcacatccttaactttactaaggagaataatgatgtgttggttttgcccgttttttatagagtgaatccttcagatgtcccgacacac

SEQ ID NO: 231663 - DNA, 375 bp, Glycine max
cgtgcctctagggttatcatatctccatttccatttcctctctctcagtttccaagaatcttaagctatgggaaagtcttacccaaccgtgagcgctgattaccagaaggccgttgagaaggcgaagaagaagctcagaggcttcatcgctgagaagagatgcgctcctctaatgctccgtttggcatggcactctgctggaacttacgacgtgagctcgaagaccggtggtcccttcggaaccataaagcacccctccgaactcgctcacggcgctaacaacggtcttgacatcgctgttaggcttttggagccactcaaagcggagtttcctaatttgagctacgccgatttctaccaatttgctggcgttgt

SEQ ID NO: 231664 - DNA, 348 bp, Glycine max
attttcctttcgtttcctttcattttccctcactttctcgctccccaaacggcccctctctctcctccaatggccgaccagctcagcgacgaccagatcgccgggttcaaggaggccttcagcctcttcgacaaggacggcgatggttgcattactaccaaggaacttgggactgttatgaggtcacgtggtcaagacccaagtgaggcagaactgcaggatatgataaacgaggttgatgctgatggcagcgggaccatcggtttcccagagttcctcaacctgatggctcgcaagatgagagacagcgactcagagggtgagcttaaggaggctttccgtgtgttt

SEQ ID NO: 231665 - DNA, 271 bp, Glycine max
cggctcgagcttaaaaatccgttttttatttcccgtgcatggctttttctgaaattaattcttacccagatgaataagtgctttggaatttgtttctaagaaccccttgttttgtgggtaacttcctactttgtggtggaattggggtaatcgatctggggaagtgaagatgtcgactccggcgtaggagggacggaggagggattttaaaagattgcaacaagatcctccggctggcatcagtggggctccccaagagaagaagattatg

SEQ ID NO: 231666 - DNA, 432 bp, Glycine max
gtcgcacgcacgcgtacgtaaactcagaattcggctcgaagctactttggcttggctttctgaattttgggttttcagtgctgagagctgaacaagaagatggggggtggaaatcaagaggcagtcaagcagctgcagaccctgatggaaaatgtggatgatgagcagctgaagaatacattccagattatgcaccagggttatcaaacggaaacgttaatacggtttctcaaagctagggactggagtgttgccaaagcccataaaatgttaattgattgtttgaactggagggtggaaaatgagattgacaatgttttaaggaagcctatccctacggatttgtacaaagccatacgggattctcaacttataggaatgtctggttactcaaaggaggatctacctgtcattgctgttggtgttgggctc

SEQ ID NO: 231667 - DNA, 343 bp, Glycine max
  unsure (1)..(343): unsure at all n locations
gcanaatgcaatatagaaccaattccagcacttctccaaggtgtcattgatcatcttattcagtggcaattacttcccgagtacaaaagaccaaatggttgtatcatcaacttctttgaagagggggagttttctcagccatttctgaaaccaccacatttggatcaacctgtgtcgactcttcttctctctgaatcaactatggcttttgggcgtatacttatgagtgaaaatgatgggaactacaaggggccactcacgctctcattgaagcaggggtctcttttagtgatgagaggaaacagtgccgacatggcgaggcacgtaatgtgtccatccccta

SEQ ID NO: 231668 - DNA, 420 bp, Glycine max
  unsure (1)..(420): unsure at all n locations
gtacgtaaaatcggaatttcgtccaaggccggttgcaaaagttatgagttgcatggtttaacccccaaacggggaactttttgaatgttaaatggagcacctgtggggactgcgggctgggaattgggccgtaacccggtgttaaacccgtttctttataaacccaacaagcgggtcgggatgagatttgaggtccagaacccgtctcatattccgaggatgtaccactccggtgccgttttgcttcgcgatgggcgagttcttctcgctgggagcaaccctcacacgtattacaatttcaccaaagtgttgtttccaacggaactgcggttagaagcgttttctccttggtatcttgagcccggattctctaacgtgcgtcccgcaatagtatctcctgcgtcncaaacaaaactcaag

SEQ ID NO: 231669 - DNA, 402 bp, Glycine max
caagccaaaagaacaacatggacattgatctttctcctcagttgcccaagaaagtttacggtgccaatggtggctcctactacgcatggtccccctccgaccttcccatgctccaccaaggcaacattggtgccgctaagcttgctctcaacaaaaacgcctttgctcttcctcgttactctgactcttccaaagtcgcttatgttcttcaaggtagtggagtggctggaatagtgttgcctgaatcagaagagaaggttgttgcaataaagaagggtgatgccttggcactcccctttggtgttgtgacctggtggtataacaaggaagaaactgagttggttgttctgttccttggggacacttccaaggctcacaaagctggtgaattcactgactttt

SEQ ID NO: 231670 - DNA, 352 bp, Glycine max
  unsure (1)..(352): unsure at all n locations
tccatgtacctggactatggtcacatgnttcttctgagaaacttggtcattgggcggggcactcctagtcaaagtttatctggggactctatctccaagcatggggaacttaaccaacctccagattgtgcttctacagaataacancataagtggaccaatcccttcagagctaggcaaacttcctaagcttcaaacgcttggtgtcgctgacaacttcttcaaaggggagattcctccctctcttgggcacctggagaagcctcgaagacctgaggctcaataataacagtcttgttggtgaatgcccagagtcactgggtggcatgacccagcttaagtttcgtgattt

SEQ ID NO: 231671 - DNA, 345 bp, Glycine max
attgatttctttggtgcactcagggctagagtatatgacgatgaagtgaggaagtggatttctggtgttggtgttgacttgattgggaagaagcttgtgaactccaaggaaggacctccaacctttgaccaaccgaagatgactttgagcaagctcttggagtagggtagcatgcttgtccaagaacaagagaatgtgaagagagtacaactggcagacaagtacttgaacgaggctgctcttggtgatgctaatcaagatgccatcaaaagaggaactttctatggcaaagcatcccagcaagtaagaattcccgttcctgaaggttgtactggtccaaatgcc

SEQ ID NO: 231672 - DNA, 343 bp, Glycine max
  unsure (1)..(343): unsure at all n locations
cgagaacaccgcaacgatgaaagagggtcgggccgaggcctccatgggaaggttcggagccctcgacgagctcttcgagaagacccgcgtccgacgaaaggacgtgggtgtcctagtagtaaactgcagcatcttcaacgcgagaggatcgctctcagcaatgatcagaagccactgcaagatgagagggaagagtcggggggacagcctcggaggaatcggttgcagcgcggggatgattggtgtggagctggccaatgagattcgtcaggcgaacccaaataactacgcggtggtggggaggagggggatgggggngtggaactggtaccaggggaaggat

SEQ ID NO: 231673 - DNA, 396 bp, Glycine max
gcatggaggtggttttacaatgtagttggagattcaaggtgccctatctctgacacttggtggcaaacagaaacgggtggcttcatgataactccactaccaggtgcttggccccagaaacctggttctgcaactctccctttctttggagttcagccagtcattgtggatgagaaaggtgttgaaatagaaggagagtgcaatggatatttgtgtgtgaagaaatcatggcccggggcattcagaactctgtatggtgatcatgaaagatatgaaacaacatatttcaagccattttccggatactatttcagtggtgatggttgcagcagggataaagatggataccattggctcactggaagagttgatgatgttatcaatgttagtgggcat

SEQ ID NO: 231674 - DNA, 402 bp, Glycine max
tagtagagtaaccaaaaggagagtgcaataactcgttgtacattcctagtgtgtgggagagacatggctaagatgtgtgttttggtgttggttcttgctctggctgtggccacaagtgccagaaacgttcccaaccccaaggatgctggtcttaaggaccagaagaacttcatcagctatggtggagttggtggttattccgggattgggaacaatggactgccttttggaggagctggtgccggaatacgtggtggttttggcggaggtggtggacttggtggtggcctcggcggtcctaccggtgggatcggagggtttggcggtaccggtagcggtgtcggtggcggtattggtggtggcgttggaactggcgttggtggtggcagcggtgttcttcct

SEQ ID NO: 231675 - DNA, 399 bp, Glycine max
cgcagaagcctcctctgcctcgcaatcatcggcattgtcgtcgccgccgtcggaggtcagtctccagcggcggctcccaccacttcctcggcatccccagccacagccccttctaaacctaaaccaaaatcacctgcgccagttgcttctcccacttcatctcctccagcttcatcccccaatgctgcaaccgcaacccctcccgtttcgtctcccacggtagcatctcctccgtctaaagctgctgctccagctccagcaaccactcctccggtggccacacctcccgcggccactcctcctgcggctacacctcctgctgtgacaccagtgagctcgccgccagcgccagttccggtgagttctccaccagcgcctgttccggtgagctctccccct

SEQ ID NO: 231676 - DNA, 339 bp, Glycine max
agttagtacacaaaagggttacttcagcttccacatatcttgaagaattgatcaatgggcaagtctgtcgttgagaagctactttggatggcaactgtgtgcttggcgctgggtgtaatttccattactcccaaagcccaagcagcagtgacatgcacccacgtggtgagcaacctcaccccatgcatttctcatgtgctcaatggtggcataaccgtgcctggcccttgctgcaatgggatcaagaccctctttaaactcgctcacgccacaccataccgccaaaccgtttgcaaatgcacaaagaacgctgttagcgcgttccattatggcaagtcc

SEQ ID NO: 231677 - DNA, 398 bp, Glycine max
atgcgtccacgtctactctagatgatcccctcggggaattccaattccacattttcaagaaataaggaggcaaaaatgttcatatatgaattggaattatttgttttcttattaggcctatcctgaatccaaaggaaatgagatcggaattcctcggggaattccaattccacattttcaagaaataaggaggcaaaaatgttcatatatgaattggaattatttgttttcttagtaggcctatcctgaagccaaaggaaatgagatcggaattcctcggggaattccaattccacattttcacgaaataaggaggcaaaaatgttcatatatgaattggaattatttgttttcttagtaagcctatcctgaagccaaaagaaatgagatctgaattc

SEQ ID NO: 231678 - DNA, 371 bp, Glycine max
ccactcttaatttctctctgccttgcccatttacacacctctccaacctttcactttcagctttatttgaatccctctctctcctttccaaatggccaacgttgaggttgcacatcaaacaccaacaacagttccagaaaatgaaacaaccgaggtaatcaagacccatgaaacaaccccgggaccagtaacaaccactgaaggtcctgcaacagaacaagcagcaactgaaggtcctgctcaagaagaacaacaagcaactgaagttcctgccccagaatcaatcaccgaagcaccaaaggaagaaaccaccgaagcaccaacaacagaaacagtagaaacaacaactacagaagaagccaagccagagg

SEQ ID NO: 231679 - DNA, 409 bp, Glycine max
acgtctactctaaatgatgactctcggggcaattccaattccacattttcaagaaataaggaggcaaaaatgttcatatatgaattggaattatttgttttcttagtaggcctatcctgatgccaaaggaaatgagatcggaattcctcggggaattccaattccacattttcaagaaataaggaggcaaaaatgttcatatatgaattggaattatttgttttcttattaggcctatcctgaagccaaaggaaatgagatcggaattcctcggggaattccaattccacattttcaagaaataaggaggcacaaatgttcatatatgaattggaattatttgttttcttattaggcctatcctgaagccaaaggaaatgagatcggaattcctcgggggtaccgagct

SEQ ID NO: 231680 - DNA, 348 bp, Glycine max
aattgaagaaactcttgaaaaggttgtcaagttgcttgcctatattagtgacaaagatttgtttgctgaattttataggaagaagcttgctcgaaagctcctttttgacaagagtgccaatgatgatcatgagagaagtattttgacaaaactgaagcaacaatgtggtggtcaatttacctcaaagatggaaggaatggttacagatttgacattggcaaaggagaaccaaacaagctttgaggagtatttaaccaataatcctaatgcagaccctggaatagacttgacggttacagttttgactactggcttctggcccagttacaaatcttttgatctcaatct

SEQ ID NO: 231681 - DNA, 350 bp, Glycine max
cgcaatttgcgcgcactccgtcgccgttgccgacacctcctccgcgtatccttccatccccggcacggaaaccggtgagtgctccctccgcggcgtgggcgtgggcgacggtgttctggttcctccacggcgagaagtatacgaggaggggcgaatcttcgacatcactcacagatatgtccccgagatgccggtgtgggactcgacggaggggctcgggcaacacttcctgtggctcgataagagcatgaagaatggctcgctcgctaacagctctaacatgaagctcggtgttcacaccggcacccatgtcgacgcgcccggtcacttttacgacaattactacgacg

SEQ ID NO: 231682 - DNA, 371 bp, Glycine max
actcataacacaaagcacaaagcaaagctcatccttgagttaaaaaatggcagcagcttcttccatggctctctcatccccatccttggctggcaaggccgtgaagctgggcccatcagccccagaagtgggaagggtgagcatgaggaagaccgtcaccaagcaggtctcctcaggaagcccatggtacggcccagaccgagtcaagtacttgggcccattctctggcgagcccccgtcctacctaaccggtgagttcccaggcgactacggctgggacactgctgggctttccgcagacccagaaaccttcgccaagaaccgtgaactcgaagtgatccactccaggtgggccatgctcggagccttgg

SEQ ID NO: 231683 - DNA, 360 bp, Glycine max
aaagcaactagaaaaaaaaaaaaagagaagaaaaaaaaacttggttttatcttctttgttattattatattcacttcttcaatatcttggttctttgatattattattcgattgagcaaaaaatgggagttccagagagagaccctcttgcacaattgagcttgcctcctggatttagattttatcccactgatgaggagcttttggttcagtacctttgccgcaaggttgctggccatcatttctctcttccaatcattgctgaagttgatttgtacaagtttgatccatgggttcttccaggtaaggcagcgtttggagagaaggagtggtacttcttcagtccaagagacaggaagt

SEQ ID NO: 231684 - DNA, 367 bp, Glycine max
ctatttgagttttgggagcatgaacaagttccctactcctcaacttgttgaaatagctcatgcccttgaggattcagaccatgatttcatttgggtggttaggaaaaagggtgaaagtgaagacggggaaggcaatgactttctccaagagtttgataagagagtgaaagcaagcaacaaggggtatctaatatggggttgggcaccacaacttctcatactagagcatcatgccattggagctgtggtgacacactgtggatggaacacaataatcgaaagtgttaatgctggtttgccaatggctacttggcctctgtttgctgagcagttttacaatgagaagttgctggctgaggtgctgaga

SEQ ID NO: 231685 - DNA, 394 bp, Glycine max
gttcgagaacacgagcagcgaggctggaaagaccatggctaaggttctgaacgcgtctttggagctcagcaacaacgcgttggacatagtcaacggtgtttcgagtctcttcaagggtcttaacttgagttccttcagcgtcaacagcaacaggaagcttctctcggaggaaacggctttggtggatgggttccctacgtgggtgagtgaaggacagaggaggcttcttcaggctgtggaccccaaacccgacgtggttgtggctcaggatgggagtggacaggtgaagacaatccacgaggctcttaaattggttcctaagaagaacaagaagccttttgtgatttacatcaaggccggtatctacaatgagtatattatcatgaacaagcac

SEQ ID NO: 231686 - DNA, 382 bp, Glycine max
gacgagtgcaaagttaaggacaacgcttttatgattgcttttgcctgcatccaaattcttctaagccaaataccaaacttccataagctctcttggctctctatcgtagcagctgttatgtcttttgcttattcttccattgggcttggcctttccataggcaaaatcataggtgggggacacgtgcgaacaaccttaacaggggtggaagtttcgggaacggaaaaggtttggaaaatgtttcaagctatcggtgacattgcctttgcttatgctttttctaatgtcctaattgagatccaggacacactgaaatcaagcccacctgagaacaaagtcatgaagagagcaagtttgattggcattatgactacaacattgt

SEQ ID NO: 231687 - DNA, 364 bp, Glycine max
aattcatatcatatcatatcttgttcgctatattctctctgacaccccccggaggattgtgttgaggacaaacacaacaacaaacatataacattccgacaggatggtctttcggagctccacctccctaattggcctcctgtccctcctcttcctcctctccgtctcctccgccattcgcctcggccttgtccgccgtccttccccggagctccctctcttccgggaggcccctgccttccgcaacggcgaggactgcggctcctcgccttccgccaccattaacgtagccatgaccctggatactaactatcttcgtggcaccatggccgcggtgctctccatgcttcaacattcaacgtgt

SEQ ID NO: 231688 - DNA, 364 bp, Glycine max
gcgagtgagtgagtcgtttctctgcagcaacaaggtttagccactccaaacagacgagaaatgggtcgtggggtcagtgctggtggtggtcagagttccttaggttatctctttggcagtggggtgcctgccagcagtgcaaacagtcagcctgcaaatggtgctcgcactcaaaatgctagtgctccttcaccaccagtcgataagcaaagtccagcaccagcaccagcaccagcaccagcacctgcatcatcaccaattgataagcaaattccagctggaattcctggaagtctcaaaaacaattaccatcgtgctgatgggcaaaactgtggcaactttcttactgatcggccatctacca

SEQ ID NO: 231689 - DNA, 364 bp, Glycine max
ggcgtcttcataaacgccgcccaaaacttctcatacccttttattcattccattcgtttctagggttttcttttctttgccgagaaaatgagagagtgcatttcgatccacattggccaggccggtatccaggttggaaacgcctgctgggaactctattgccttgaacacggcattcagcccgatggacagatgccgagtgacaagaccgttggcggaggagacgacgccttcaacacatttttcagcgagaccggcgccggaaagcacgtgccccgcgccgtcttcgtggatcttgaacccaccgtgatcgacgaagtccgaaccggtgcgtaccggcagctcttccacccggagcagctga

SEQ ID NO: 231690 - DNA, 390 bp, Glycine max
cacagttagtacaaaaaagggttacttcagcttccacatatcttgaagaattgatcaatgggcaagtctgtagttgagaagctactttggatggcaattgtgtgcttggtgctgggtgtaatttccattactcccaaggcccaagcagcagtgacatgcaaccaggtggtgagcaacctcaccccatgcatttcttatgtgctcaatggtggcaaaaccgtgcctggcccttgctgcaatgggattaagaacctccttaaactcgctcactccacaccagtattgttaaacccgtttgcaagtgcataaagaacgctgttagtgcgttccattatggcaagtccaatgtggaccgtgctgctgctcttcccaagcaatgtggggttaaca

SEQ ID NO: 231691 - DNA, 363 bp, Glycine max
ctcgcgttcaaagccggcacctccatctacacgcgcttcatcggcctctgcggcggcgaaaacggcgtcgttcccgaaacagttctcgcccttactccccaacagcttcggcagattggggtttcggggcggaaggccagttaccttcacgatttggccaggaagtaccagaacgggatactctccgattccgccattgtgaacatggatgacaagtcgctcttcaccatgcttaccatggtcaatggcattggctcttggtctgttcacatgttcatgattttctcactccacagacccgatgttctccccatcaatgaccttggggtcacgaaaggggttcagcgtctctacaacctcgag

SEQ ID NO: 231692 - DNA, 364 bp, Glycine max
ctttggcctggggtctttgttacaatcatgaaatgagtcctatgcagtcatactgtgatgactacttcaaactcacatacccctgtactcctggtgctgactactatggacgtggagccattcccattttttggaactacaactatggtgctgtcggagaagctttgaagattgacctactaagccatccagaatacatagagcagaatgccacccttgctttccaggctgcaatttggagatggatgacaccaatgaaaaagtcacagccctctgctcatgatgcttttgtcggcagctggaagcctaccaagaatgacactatggagaatcgggttcctggatttggcactacaatgaacat

SEQ ID NO: 231693 - DNA, 368 bp, Glycine max
gacgtccatggccactttcttcgcccaaacctccttcccctcccactctctctccaaaaccttcgatacccatttcgcccctgccccgaaagtcaacgtctttgtgaacttcagggcgaggaggcacgttggggtgcgagtttcgaacgcgctgatcgaaccagatggagggaagctcgtggagcttgtggtgacggattttgagagggatttgaagaagggtgaggctctttcgttgccgaggatcaagctctcaaggattgaccttgagtgggtccatgtcctcagcgaaggatgggccacacccctgaaaggcttcatgagagaagccgagttcctccaaacgcttcatttcaactcgctccgac

SEQ ID NO: 231694 - DNA, 360 bp, Glycine max
gcattgcagaagcgtctccattttctttcgcgatggccgcgcgagccctgttgaccagaaaaaccctagccaccgttctccgcaacgacgcgaagcccataatcggagctggcatagctgcagctactcattctcgtgggttgcacgtgtacacgctccccgatctggattacgactatggcgctctggagccagccatcagcggcgaaatcatgcagctgcaccaccagaagcaccaccagacttacatcaccaacttcaacaaggccctcgagcagctccaagactccgtcgccaagaaagattcctccgccgtcgttaagctccagggcgccatcaagttcaacggcggaagtcacg

SEQ ID NO: 231695 - DNA, 366 bp, Glycine max
gtttactgctaactctgatcggaagaaactcgcgccaaatgcttttgttcttgttcctactcgcgaactaagtcaacaggtatatgcggaagtgaagtctctggttgaattatgcagagttcagctgaaagttgtgcagttgaatagtaacatgcttgctaatgacttgcgggcagcattggctggacctcctgatattttgatctccactcctgcttgtgttgcgaagtgtttgtcctgtggcgtacttcaggcggcatccattaatgcatcgcttgaaactcttgttcttgatgaggcagatcttctattatcatatgggtatgaaaatgatattaaagctttaacacctcacgtacccagaag

SEQ ID NO: 231696 - DNA, 358 bp, Glycine max
tcggggaattccaattccacattttcaagaaataaggaggcaaaaatgttcatatatgaattggaattatttgttttcttattaggcctatcctgaagccaaaggaaatgagatcggaattcctcggggaattccaattccacattttcaagaaataaggaggcaaaaatgttcatatatgaattggaattatttgttttcttattaggcctatcctgaagccaaaggaaatgagatcggaattcctcggggaattccaattccacattttcaagaaataaagaggcaaaaatgttcatatatgaattgggattatttgttttcttattatgcctatcctgaagccaaaggaaatgag

SEQ ID NO: 231697 - DNA, 382 bp, Glycine max
attccgaattcagagatagcacgcaccaggagaagccatggctactcaatccccttcacctcagaacctaggtggtgaaattgagcaaacagaaaatgtagatcagcataataggggagaagagcttggtaaacagagttcagacacatcggtgtttgtgaactcagagccattgcgtgaggaacaaattcagaatgctgtgaaatttctgtcgcacccgaaagttagaggttctcctgtcatccacagacgatcgtttctggagaagaagggccttacgaatgatgagattgatgaagcctttcggcgtgtgcctgattcacctccaagtgtgcagacagctggcataaatcaagatggacaattgaagccatcatcaaac

SEQ ID NO: 231698 - DNA, 387 bp, Glycine max
agactggagaggtggaagagctgcttcatttaacatcattcctagcagcactggagctgccaaggctgttggaaaagtcctccctgctttgaatggaaaattgactggtatggcattccgtgttcccactgtggatgtctctgttgttgacctcacagtgaggctggagaaggaagcctcctacgatgaaattaaaaatgctatcaaggatgaatcagagggcaagttgaatggaattcttggttacactgaagatgatgtggtctccaccgactttgtgggcgatagcagatcaagtatttttgatgcaaaggctggaattgcattgaataagaactttgtgaagcttgtttcttggtacgacaactaatggggatacagctcacg

SEQ ID NO: 231699 - DNA, 343 bp, Glycine max
gaagattccacaacagtgggagggagatccaaaaagagagagtggaaaagatggcgcggttgatcacagtggtgtggtgcgcggtggcggtgctattatgcgccgcggccggtgcgtcgtgggtggaggaggcggcgaacccgatacgaatggtgtctggcgtggaggcggaggtggttcgggtgatcggggattgccggcgtgcgttgaagtttgctaggttcgtgagcaggttcgggaagagttaccaaagcgaggaagagatgaaggagaggtacgagatattctcgcagaatctcaggttcatccgctcccacaacaagaagcgtttgccctatactct

SEQ ID NO: 231700 - DNA, 377 bp, Glycine max
cattcggctcgagaatcagtgcaagagaatcgccctccatcttctttcttcttcaattcattccgatggcgattccgttgccctctctcgatctcactcaccactccgatttcgaacccttagtctccccagacggttacatctccatttgcggctacggttccctcctctccgagacaagtgccagaaccactttccccgacctcgtcaacttccgaatcgcccggttaactggtttccgccgtctcttcaactccgtcggacgcatctttttcactcaccgtgttgccaatatcttttctcaggagattgctggcctttctgttgaaacatgtgatggtgaattcattgttgtaactgtttttgagataaagaac

SEQ ID NO: 231701 - DNA, 363 bp, Glycine max
aatggttttgggtatggtgcccactggtcaattgctttagcagcagcttcagagctatttggcctaaaaaactttggaactctctacaattttctcaccatggctagcccagcaggctctctctttctatctggatttgtagcaagcacaatatacgactattacgcggagcagcaagtgaaacaccgaatgctcactggaaattacaatgacttgcttctttgtgagggaaacatttgcttctccatcacatttgggattttagctgtaatttgcttatgtgcagcatctttgagcttgatcgttgctcacagaacaaagaaattctatgcacagctttatgaacagtctcaaacttaaaaa

SEQ ID NO: 231702 - DNA, 363 bp, Glycine max
caagttattgtgagcaaagaaagatagtgagtgaagtaactgaagagaagaaaaaatgccgtgcctcaacctcagcaccaacgtgtccctcgaaggcgtcgacacctcttccatcctcgccgaagccacctcctccgtcgccagcataatcggcaaacccgaagcctatgtgatgattgtactgaaaggatcagtacccatagcttttggtgggaatgagcagccagcagcttatggagaattgggttccattggtggtcttaaacctagtgtaaacaaggaacttagtgctgcaattgcttcaattctggaaaccaaattgtcagtgccaaagtcgcggttcttcttgaaattctatgacac

SEQ ID NO: 231703 - DNA, 361 bp, Glycine max
gcagcaatggtgaacgttccgaagacaaagaagacctactgcaagagcaaggagtgcacgaagcacacgctccacaaggtcacccaatacaagaagggcaaggacagcatcgccgctcagggaaaacgccgttatgaccgcaaacagtccggttacggtggccagactaagcctgttttccacaaaaaggccaaaaccaccaagaaaattgtgttgaggctccagtgtcatggatgcaagcatgtctcgcagcacactatcaataggtgcaaacattttcagatccgtggtgacaacaatggaaaatgaaactctctgttctagatggaatattagaatttgccatttcacacactctctc

SEQ ID NO: 231704 - DNA, 339 bp, Glycine max
cttgctcaccatacaatcaacggttgcaaccttaggccaggcgatctccttggaactgggacagttagtggtcctgagccagagtcccgtgcatgcttgctagaattaacatggaatggacaaaacacagtgtcagtgaatgagttaaatcggaaatttcttgaagatggagacgaagtcatcttaactggatattgcgcaggaaatggttactctgttgggtttggtacttgctcaggcaagattgtacccgcagctccatgaggctagtatcattccatagtcttttccacttgtggtgggaggagttgtatcaagagcctgcttgtttaatttacg

SEQ ID NO: 231705 - DNA, 369 bp, Glycine max
  unsure (1)..(369): unsure at all n locations
cttgtgcaatttggccactatgaacacagggcttgctgcaggtgcagccttgcttgcactcttggctatcaccttctccttgttgagccctcaaaccctgttttctccgcctgagattccgggctcgaaggaccaccttcacgctgctcggttactccatgtcaccggagccgtcgggccggagagtcttgtcttcgacgctgacggcggagggccctacaccggcgtcgccgatggccggattctcaagtgggaaggggaagagcgaggttggactgaatttgctgtcaccagttccaataggtcggactgtgtacgcccatttgcaccagagttggagcacatttgtgggaggccattangactaag

SEQ ID NO: 231706 - DNA, 394 bp, Glycine max
caccctgaagatgatgaaggagaaatggttgttccccaggctcgttatccttgggaagggagtgatcgtaattatgaatatgaggagctgcttggcagggtgtttaacattctacgtgaaaataatcctgaacttgctggagatcggcgaaggacagttatgaggcctcctcaagttcttcgtgagggcacaaagaaaactgtgtttgtcaattttatggatctatgcaaaacgatgcatcggcagccagaccatgtcatggccttcttgcttgctgaattgggtacaagtggctcccttgatggacagcagagattggttgtaaagggaaggtttgcaccaaagaactttgaaggaattctgcgacgatatgtcaatgaatatgttatttgcc

SEQ ID NO: 231707 - DNA, 391 bp, Glycine max
gttggtgcaaagcatccttcgtttcaatttctctctctcagcgctttctgcaatcgaacctttcatctccacagggatccacaggccgaaggagaaatggggctgacattcacaaagcttttcagtcggcttttcgcgaagaatgaaatgcgaattctgatggttggtcttgatgctgctggtaagaccactatcctgtacaagctcaagctcggagagatcgttaccacaattcctaccatcgggttcaatgttgagactgtggcatacaagaacattatcttcactgtttgggatgttggtggccaggacaagattcgtcccttgtggaggcactacttccagaacacccagtgtcctatttctgttgtagacagcaatgatagggaca

SEQ ID NO: 231708 - DNA, 365 bp, Glycine max
aaaacactcataacacaaagcacaaagcaaagctcatccttgagttaaaaaatggcagcagcttcttccatggctctctcatccccatccttggctggcaaggccgtgaagctgggcccatcagccccagaagtgggaagggtgagcatgaggaagaccgtcaccaagcaggtctcctcaggaagcccatggtacggcccagaccgagtcaagtacttgggcccattctctggcgagcccccgtcctacctaaccggtgagttcccaggcgactacggctgggacactgctgggctttccgcagacccagaaaccttcgccaagaaccgtgaactcgaagtgatccactccaggtgggccatgct

SEQ ID NO: 231709 - DNA, 362 bp, Glycine max
atctattcaagtgagtcacttgagcatgaccttcctggtcacctgctccgatatcctattggggtttccaacgaaggagttgtcactgagcttccaggatttgaattcttccctgacaccaaggctcgtgttcttggcgacaaagttgattaccttccaccgatccttactacttaagtttcattttataagcttgttaataaaatatagtacttatgttgttagagtgagcaacaattgtaatggttctgtagagatggtttcattctgaagattgccttccagattttaacaatctgatgatgagaaggcaatcagcttgtatgactctatctgcattatgatacatgtttatcgggttt

SEQ ID NO: 231710 - DNA, 283 bp, Glycine max
attctctctatgtatttccctaagtctcccttcactattcatttcttcctcaagattctcaccggtacataccactcaaccttgatgtggtcatctctgacagcatcctcaacgtaaaagccaatagtcatgtcaaagaatgaatcaccccggacgatcattgtctcattttcgccttaacgcaacttgttagacggtcgttcttcttgctagttacaagattcataatgtgagtactcttcagctcgtcctccgtctccgtggagtgattcacatcttcgtt

SEQ ID NO: 231711 - DNA, 393 bp, Glycine max
gcccgaggacgagaggaagtcgccggacatagaaattccccttgacgcgccgacgatgacgcacgacttcgcgatcacggagaatttcgtggtgatcccggaccagcaggtggtgttcaagctcggcgaaatgatcaaaggaggatcgccggtgatctacgacggcgagaagaaatcgcggttcggaatactgccaaagtacgcttccgacgcgtccagcatcgtgtgggtggactcgccagacacgttcttcttccacttctggaacgcgtgggaggaacgcgacaaagacgaagtggtggtaataggttcgtgcatgacaccaccagattcaatattcaatgacagagaagagagactgaagagcgttttaacagaagtaaggctgaacat

SEQ ID NO: 231712 - DNA, 387 bp, Glycine max
agaacttatcaaaattttcttcaacatcaccattacaaaaattggtgataaactcaaagaaactaatattttgcatgaggttgaggaggaacccagagccaagatggcacttgaaacatgcaagcaactcatggatctttctattggggaattaacaaggtcacttgatggaataggtgagtttaacctcataaatgttgacaaaatcctcatgaatttaaaagtttggcttagtggcgcggttacataccaagatacttgcttggatgggtttgagaacaccactagtgatgctggcaaaaagatgaaggatttgttgacgataggcatgcatatgagcagcaacgcccttgccattgtaacagatttagctgacactgttaatga

SEQ ID NO: 231713 - DNA, 360 bp, Glycine max
  unsure (1)..(360): unsure at all n locations
caaaaacacaaacaatatgaagttcactataatcacaatatttttttctttatttcaagtcgactttggttttgcacaacaaggggatcttgacatatcaagatttggaggaaaaccgaattcagatataagccaggctttcttaagtgcctggactcaagcatgtgcatcaacaactgctgtcaaaattgtgattccagctggcacatatcaaatgggtgcagttgatgtaaaaggtccttgcaaggctcctattgaggttcaagttgatggaacaattcaagcacctacanacgtagttaaccttaagggggcagaccaatggttaaaggttcaacatgttaactctttcaccctgtc

SEQ ID NO: 231714 - DNA, 361 bp, Glycine max
caagaagcaatcttctgtctggaaacttcaagcacaaccaaaagaggctgttaccgttgaaaattctgcacctgtacaggtcaatggtcctaaaattgctccaccagaagagaaggatgaccataatggaaaaccctctggtcctagcacttctgctgatgcatcttcaatttctgcatttatgaaccaagtttcagatcttgttaaacttgtggactctaaagatattatggagctgcaactcaagcaagcaaactgtgaactcgtgataagaaagaatgaagctttgctgcctccaccagctacatttgtagctccagtgtcacaaccatttccatatcccacaaattctcttccagca

SEQ ID NO: 231715 - DNA, 279 bp, Glycine max
aaaaaaaaaaacccttagccaacacaaccatcatggccacctctgctattcagcaatcagcattcactggtcaaactgctctgaagcagctcaatgagttcgtccgcaagaccggtggcgccggcaaaggtcgcactaacatgcgccgcaccgtcaagagtgctcctcagagcatttggtatggccctgaccgtcccaagtacttgggtccattctcggagcagattccatcatacctgaccggagaattcactgctgaccaaggatgggacactgctg

SEQ ID NO: 231716 - DNA, 398 bp, Glycine max
  unsure (1)..(398): unsure at all n locations
ctttcttcctcttcctcagtagtgcgattttcgattctcttctctgcaactatgcctaaccctaaggtcttcttcgacatgaccatcggcggtcaacctgccggccgcatcgtgatggagctctacgccgacgtgactccgagcaccgccgagaacttccgcgcgctctgcaccggcgagaagggcgccgggcggagcggcaagcccctccactacaaaggctcgtccttccaccgcgtgatcccgaacttcatgtgccagggcggcgacttcaccgccggaaacggcaccggaggcgagtcgatctacggcgccaagttcgccgacgagaacttcgtgaagaagcacactggtcncggcatcctctccatggcgaacgccggtcccggaaccaacgg

SEQ ID NO: 231717 - DNA, 338 bp, Glycine max
aattagttcattctctttgcgcagttccctacctctcctttcaagatgcagatcttcgtcaagaccctcaccggaaagaccatcacccttgaggtggaaagctctgacaccatcgacaacgtcaaggccaggatccaggacaaggaaggaattcccccggatcagcaacgtctcatcttcgccggaaagcagctcgaagacggccgtaccctcgccgactacaacatccagaaggagtcaacccttcaccttgtccttcgtctccgtggtggcatgcagatcttcgtcaagactctcactggaaaaaccataaccctagaagtcgaaagctctgacac

SEQ ID NO: 231718 - DNA, 281 bp, Glycine max
ggttgcagcaacaatggcagccatggctgcgcttcagagctcaatggtcggtctctccctctcctccaactctttcttaggccaacgcctttctcccatcaccctcccctctcttcttccgggtaagtcaacagagaagcaatgtcctattgtaatgaggcttaaacgatgggaacggaaggagtgtaaaccaaacagccttcctatcttgcacaaaatgcatgttaaacttggagatacggtgcaagtcataactgggacttaaaagggttaaatttggg

SEQ ID NO: 231719 - DNA, 383 bp, Glycine max
  unsure (1)..(383): unsure at all n locations
aagctgttcaagctacactctcttctctgccagacgaggttgtagatactgtgggggtgacaactttgccatctgaagattctgtttcagaaaggaagaggaagttggaatatcttgaaatgcaagaggagctgatcaaggaggaggaaaagaaagaggaggcagagcaggccaaaatggtagaatctgttggtagtgaaggggatttgggtattatgaaagagagggcttctgtggcgccgtttgaggtgtgcttcagtanggagaacgtgctcgccacgcggttgggggcggcggtgccaactattgagcttgtgctgcagaaccagaagacggtttggaggatttttggagcgaactcgatggttagtgtgagcgatgat

SEQ ID NO: 231720 - DNA, 389 bp, Glycine max
ctatcttttgttctgctcagctcgatctacctaccttggttcttctctgttctgttatttcagtgcagcagcagagaatgaccatcctcattgagcaacctgcccttgagttacaagttgaaggcaacaatgtgcatgctgaagaagccaatgagcttgtattggatggtggatttccattgccaaaggatggatatatggccccagaaatcaattcatttggccactccttcagagaatatgatgctgaaagtgagaggcaaaaaggtgtggcggaattttataggttgcaacacatcaaccagacatatgactttgtgaagagaatgcgggaggaatatgggaaattggacaaagctgaaatgggcatttgggaatgttgtgagctg

SEQ ID NO: 231721 - DNA, 373 bp, Glycine max
cttcttcctcctgagaattgtatatcaaagctcattactcgatcagatgatactgaagcagtggtcaaagaaaggcttcgaatatacaatgaaatgactcagcctgtggaggaattttaccgttcaagaggaaaattattggagtttaacctgcctggaggaatcccggagtcttggcctaagttgctacatgctcttaatcttgatgattatgaggacaaacgatctgctgcagcataacgatataataatgtatcataacagtaagtatttcattctttgcgtgcatatattgcatgcttggcaattttgcaggacagagagccaaagaaagggaacttccctgctagtattaatttggaccaataatgat

SEQ ID NO: 231722 - DNA, 401 bp, Glycine max
cttccatcagattcaccctttcgtttaacgcaaactcataacttgaaggttaatggctgctccaccggcaagggctcgtgccgattacgattatctcataaagcttctcttgatcggtgacagcggtgttgggaaaagttgcctccttctgcgtttctccgatggttctttcaccactagtttcatcacaactataggcattgattttaagataagaaccattgatcttgatggcaaacggatcaagctccaaatttgggatactgcatggcaagagcggtttcggacaattacaactgcttactaccgtggtgctatgggcatattgctagtctatgatgttacagatgaagcatcatttaacaatatcaggaattggattcgcaatattgagcaacatg

SEQ ID NO: 231723 - DNA, 400 bp, Glycine max
ttcacattttagaagaataccccctcttttgctgcatcagaggagttgtaaattaagagcatggctgcacaagctcttgtatcatcatcttctcttaacttctcagcggaggctgcaagacaaagtcttggaccaagatcactccaatctccatttggcttctccataaaagcctcctttcttgttaaggcagctgctaacccccctgtcaagcaaggatcagacagacctttgtggtttgcatcaaagcaaagtctttcttacttggatggcagccttccgggtgactatggatttgaccctctgggactttcagaccctgaatgaacatgatggttcattgagccgatatggcataccatatggtgagataagcaatggtcgttatgcaatgttgggt

SEQ ID NO: 231724 - DNA, 375 bp, Glycine max
  unsure (1)..(375): unsure at all n locations
gctttcttcaagattagtggagttgttctgcttcagcttggtacgggtgctttacttcatgatgctggctggctgaagatatttttagtagcatacttttttggttcttttctcaaccacaatctctttttggctatccacgagttgagtcacaacctggccttctcaaccccagtctacaaccgttggttggggatttttgctaacctccctatangtgtgcccatgtctgttaccttccaaaagtatcacttggagcaccaccgcttccaaggtgtaaatggcattgatatggatgtccctagcctcactgaagtccgtcttgtgaaaaatattattgcaaaaaccatttgggtccttttacagctccttttt

SEQ ID NO: 231725 - DNA, 388 bp, Glycine max
gctcaacttcttaaatatggtcgtaaaggaaagcccaagttttgtccatttagactttcccatgatgaatcatccttaatctggattacaagtagtggagaaagaaatctgaagctatcttctgtctctagaattattcctggacaaagaactgctgttttccaacgttacttgcgtcctgagaaggactatttgtcgttttcacttatttacagtaacggaaagcgatcgcttgatttgatttgcagagataaagttgaggcagaagtgtggattgctggcctcaaagcactgatagcttctggtcaaggtggtcggtccaaaattgatggatggagtgatgggggtctcattcttaatgatagcagagacttaacatcaaataatc

SEQ ID NO: 231726 - DNA, 391 bp, Glycine max
caaaaccctcttttttctctctcttgcaaaacctaattttcatttcttccctcaaatttcaaaatgcgtgagatccttcacatccagggtggccaatgcggcaaccagatcggcgccaagttctgggaggtggtttgcgcggagcacgggatcgaccctaccggaaggtacggtggggactcggagttgcagctcgagaggatcaatgtctactacaacgaggccagttgcggtcggttcgtgccgcgcgcggttctcatggacctcgaaccgggcaccatggacagcgtccggtccgggccgtacgggcagatcttcaggcccgacaactttgtgtttgggcagtccggggcaaggaacaactgggccaaggggcattacactgaaggtg

SEQ ID NO: 231727 - DNA, 360 bp, Glycine max
atttcagtgagtgatcggtgttcacttgatctcatcataatcgtcagcgtcaattgaagaagatgccgatcagaaacatcgccgtcggaaggcctgaagaggcgactcaccccgacacgttgaaggcggctttggctgagttcatctcaaccttcatcttcgtgttcgccggctcaggctccggcatcgcctacaacaagctcaccgacaacggcgctgccacccctgccggcctcatctccgcctccatcgcccatgcattcgccctcttcgtcgccgtctccgtcggcgccaacatctccggcggccacgtcaaccccgccgtcaccttcggcgccttcgtcggcggcaacatcacct

SEQ ID NO: 231728 - DNA, 406 bp, Glycine max
gccgcaaggggattacatagagcgtcacagaagagactatggctaccgtctcgatcacttcgagcggaagcgcaagaaagaggcgcgtcaagttcacaaacgctctgcaattgcccagaaggctctgggtattaagggcaaaatgattgccaagaaaaattatgctgaaaaggcacagatgaagaagactttggctatgcatgaagaatcaacttctaggcgcaagactgatgataatgttcaggatggagctgttcctgcttatctccttgatcgtgataacacgaccagagcaaaggttcttagcaacaccattaagcaaaagaggaaggagaaggcgggaaaatgggatgttcctctacctaaggtacgtccggtggctgaagatgaaatgttcaaaatgggc

SEQ ID NO: 231729 - DNA, 385 bp, Glycine max
aaatgcatgaatgatggcctctgggaatacatctgtgggactgatattgtcagaggcgctttcttattcgttttatgatactgatgcattggtggtgaacgacgttggtggaatatctgtaattgatatattcaagcactatggagagcctttttttcgtaataaagagattgacgtgttgcaaaacgtgtcaataatgcatagacatcttatttctactggtggaggtgctgtcgtgaggcccatcaatttgaaatatatgcagcatgggattagtgtttggttggatgtacctgtagaagtcttgactcagagaataacagctgaaggaactgattctcgcccacttcgatattatgaacgaggagatgcatacaccaagact

SEQ ID NO: 231730 - DNA, 380 bp, Glycine max
  unsure (1)..(380): unsure at all n locations
aaaggatctcaatcgaccttgggaagaccctatgccagagtcaggtgaaaggcatcttgcccaggagcttaggggtgttggtttatcagcctatgatatgccggaatggaagaaggatgcctatgggaaaaccattacctttgggcaaaggtcaaagctttctattcaggagcagaggcagagtttgccaatttacaagttaaaaaaggaattgattcaggctgtgcatgataatcaggtcttggtggttattggagaaactggttcaggtaagactactcaagtcacacagtatcttgctgaagcgggctacaccacaagaggcaaaattggatgtactcaaccccgtanggtggctgcaatgtcagttgcaaagagag

SEQ ID NO: 231731 - DNA, 356 bp, Glycine max
attgaacattggctttcaattgtcaatcacagttggtatcctcgtggccaatgtgttgaactacttctttgctaaaatccatggtggctggggatggagattgagtttgggaggtgctatggtccctgcccttataatcacaataggatcactagtccttccggacactcccaattccatgattgaaaggggtgatcgtgaaaaggccaaggctcagcttcggagagttcgcggcatcgacgatgtggaagaagagttcaatgaccttgttgcagctagtgaatcctccataaaagtggagcacccgtggaggaacttgttgcaaagaaagtacagaccccacctcaccatggctg

SEQ ID NO: 231732 - DNA, 395 bp, Glycine max
cccagttcaaaggtaaggtaggttaacactcttcttcatcgtcgtcgcaatgggacgtgtgatccgtgcgcagcgtaagggagcaggctcggtcttcaagtcccacacgcaccaccgcaagggccctgcacgcttccggagcctggacttcggggagcgcaacggctacctcaagggcgtggtcaccgacgtcatccatgaccctggccgcggcgcgccgctcgccaaggtcgccttccgccaccctttcagatacaagaagcagaacgagctcttcattgccgccgagggcctctacaccggtcagttcatctactgcggcaagaaggccacccttgttgtcgggaacgttctacccctgaggtccatcccccaaggagccgtcatctgcaacg

SEQ ID NO: 231733 - DNA, 404 bp, Glycine max
  unsure (1)..(404): unsure at all n locations
gaatttcttaacatgcgtcgtcaggctgttaaaattcaagctgcattccggtgctttcaagttcggaagcattatcgcaaaattctttggtctgttggtgtggttgagaaagcagtgctgcgttggcgtttgaagagaaggggcttccgtggtctccaggtcaaaactgtcgatgcgggaaccggagatcaggatcagcaaagtgatgtagaggaggaattcttccggactggtangaagcaagccgaagaacgtgttgagagatctgtagtacgtgtgcaggctatgttccgttcgaagaaagcacaagaagagtacaagaggatgaaattggcccttaatcaagcaaagctggagcgggaatacgaacaacttcttagtactgaagtggacatgcaactgta

SEQ ID NO: 231734 - DNA, 375 bp, Glycine max
tggatggtgatgaaccaccatcaagatatgtagttaatggaaatagctttggatctaaagattcttctgtacagtttccaatacccatcattgatgtgcgtctcctctcatcagaagatgagctagagaagcttagatctgctctaagttcagctggatgcttccaggcaattggtcatggaatgtcaagttcatatcttgacaatatacgagaaactgcaaaacaattttttgcactcccagaagaggaaaagcagaagtatgctcgagctgttaatgaatctgaaaggtatggaaatgacagagtagtttcagacaaacaggtccttgactggtcctatcgccctaaacttcgagttttttcagaaacaaaac

SEQ ID NO: 231735 - DNA, 398 bp, Glycine max
gccgtcgtcgtcgatttcgcacgccccgaggacttttataaatcagttacctgactggagcatgcttctggccgccatcaccaccgtgttcctcgcggcggagaagcagtggatgatgctggattggaagccgcgccgccccgacatgctcattgacccctttgggattgggaagatcgtgcatgacgggctcgtgttcaggcagaacttccccataaggtcttacgaaattggcgcagacaaaactgcgtcaatagagaccttaatgaatcatttgcaggagactgctcttaatcatgttaagaccgctgggcttctacgtgatggatttggttccacgcctgaaatgtgtaagaagaacctgatatgggtggtgacaaagatccccgttgtgggtg

SEQ ID NO: 231736 - DNA, 389 bp, Glycine max
gccaaaaccctagcagccggcgagaatggcagacgttgaggttgatgcggcggcagcggcaggggcagcgcagccgaagaagagaacgttcaagaaattcagcttcaggggcgtggatctggacgcgcttctggacatgtccaccgacgaactggtgaagatgttcagtgcgcgtgcacgtagaaggttccagagaggtctgacgaggaagcccatggccttgattaagaagctccgcaaagctaaaagggaagcaccagcaggtgagaagccagaaccagtgcgcacccatctccgcaacatgattattgtgcctgagatgattggtagcatcattggagtctacaacggcaagactttcaatcaggttgaaatcaaacccgagatga

SEQ ID NO: 231737 - DNA, 391 bp, Glycine max
gcacaattctctcttatcatctttgttattacctctttccaaagtccaaattttctagttccaccaaaccaaaccaaaccaaaatggcagcagcctcagcctcatccatgatatcaacaccagccttatctccaaccatccaaaagcaccatcatttgaagccatccaacgtgtgcttccaaggtcttagacccctcgcaaggttcaccagagcctcatcaaccaaagtgagcaccaccaccaaaagggttattccaaagggtggtgttagagctgaactcaactcattctttgtgataagcctcagcactggcctctcgctcttcttgggaaggtttgtgttcttcaacttccagaaggagaacgtggcagagcaagtgcctgagcagaa

SEQ ID NO: 231738 - DNA, 331 bp, Glycine max
caactgatccaccatgtctttacataactttaacttatatttaaaaggatacaaagtacagagggaaagatagaggaacaagggttttacggcagggtctagtgcttatacataccctgcattagccactacatttcacaaactgaggcacacacaaaacatgggttcttcttcttctatgtggacggtgtgtgtgattttggcatcactggcctctgcagcactctgtgccaacccacgcaggccagtggatgtacaatttggccgtaactacgtggccacatgggcctttgatcacatcaaatatttcaatggtggttccgacattcag

SEQ ID NO: 231739 - DNA, 395 bp, Glycine max
aggggatccaccaagacccttggcaacttcgttaaggctacttttgattgcttgatgaaaacctatggattcctgacaccagaattctggaaggagactcgcttctccaaatctccattccaagagtacacagatctattggcaaaaccaacagggaagactctaatcttggaggaggaaagggtggatgcttgatttgctagttttggttttatggatgttttagagacattgttatttacctttgttggttctgtgctttacttttggttttgatagacggtggtatgtctctgtatggattttgattgtttcaagttttaatttaattgactgtagttttgaataaaaagactaaaagaaaagggcggccgccgactagtgagctcgtcgac

SEQ ID NO: 231740 - DNA, 396 bp, Glycine max
ctaagagcacttatggcacaggtgctttcatactactaaatactggtgaagggataattcaatcgaagcacggtcttttatccactatagctttcaggcttggcccaaaagctccaaccaattatgcattggaaggatcagttgctattgctggagctgcagtgcagtggcttagagacggtcttggcatcatttctagtgctgcagagatagaggagatggcattacaggttgaatccactggtggggtttactttgttcctgcttttaatggattgtttgccccatggtggcgtgaagatgctcgccgcgtttgtattgggataacaaggtttacaagcacaggtcacattggccgagctgtgcctgagaacatgtgtttccacgtgaaagatg

SEQ ID NO: 231741 - DNA, 385 bp, Glycine max
  unsure (1)..(385): unsure at all n locations
ggctctctcacgcagtcgcagtgagtgaaaaggaaaaccctaattgcggtattctcagtgccttcgagagaaagaaaaaatggcagataatcttgttctccgtggcaccatgcgcgcccacaccgacgttgtgacggcgattgccactcccatcgacaactccgacatgatcgtcaccgcctcacgcgacaaatccatcatcctctggcatcttaccaaggaggacaagacttacggtgtctcccgccgccgcctcaccggccattctcattttgtccaggacgtcgtcctctcttctgacggccagtttgccctatccggctcctgggacngcgagctccgcctctgggaacttgctgctggcacctccgctcgccgcttttgt

SEQ ID NO: 231742 - DNA, 364 bp, Glycine max
aacaacgttgatgatttaccagttcttggccacgactttgaccttcccgaatgggttgatgatcgcgttggtgttcgcaaactcctacgtatgactggacggaaacgcatggcgcatgtggttgttgcaaaggatggcagtggaaatttctcgaccatcaatgaagctttgaaatatgtgcccaagaaaaacctaaggccattcgttatctatgtcaaggaaggagtttacaacgagtacgtcgaggtttccaaaaatatgacccatgttgttatgattggtgatggtggtaagaagtcaaggatcactggtagcaaaaacttcatcgatggggttgggacctacagaaccgccagtgctgcca

SEQ ID NO: 231743 - DNA, 398 bp, Glycine max
  unsure (1)..(398): unsure at all n locations
ctatactctatttttcgcgtcacataaacaaataaaataaactggggagaagcatgttgttgatgttgggactatgcttcctattgttctctgcatttccacttgcgttctctgagagatgccacccacaagacaagaaagcgttgctccaactccagaaggacctcggcaacccttatcacatcatatcctggaacgcaaaggaggattgctgcgagtggttctgctgcgttaagtgtgacgagaaaacaaaccgcgtcattagcgttgccttatcatccccttttccagacaccaatctctcggcccaaatacctccctctgtgggtgacctcccttacctcgagtcnctcgtcttccacaaattccccaaactcgtgggcccaatccagcccgca

SEQ ID NO: 231744 - DNA, 387 bp, Glycine max
gggcaatctcagagctattgagaaggccagagattttcaagaaggcaacagaggagctagacagggtgataggtagagagagatgggttgaagagaaggacattgtgaatttgccttatgttaatgccattgtcaaggaagcaatgaggctgcacccagtggcaccaatgttggttccaacactatccatagaggactgcaatcttggagggtatgacatccccaaagggacacatgtgcttgtgaatgtgtggactattgggagagacccttcagtttgggacaaccctaatgagttccaaccagagaggtttcttaataatgagattgatgtgaatgggcatgactatgagctagtgccatttggtgctgggagaaggatgtgcc

SEQ ID NO: 231745 - DNA, 363 bp, Glycine max
ctcccggattaaacatccttgcagcatggtctccagcctcagctggaatgaagttcaatattatatcaagaacttcgatgtcttgtcctcacataactggaattgcaaccttggtcaaagctgtgcatccttcatggtctccgtctgctatcaaatctgccatcatgacaactgcaacacttttggataagcaccaccaacccattagagcggatcctgatagaagacgggctaatgcttttgcttatggatcagggtttgtgaacccttcaagagttctggatcctggtcccgtctacgaatcacatccagactattttgttgcattcctaagttcacttggctatgactagaggtcactcc

SEQ ID NO: 231746 - DNA, 389 bp, Glycine max
atcgccgaagaaggtattgacgtcgatgatgaaaatgaaattggtgaaaacattactgcttctcctttgtgtgaaactcttctgttatgcagtgattggtgctcctcaaacttgtcctgctaacaatgaggataaatgcggcgattcagatgaatggaaaggggagtttttccctgacattcccaaaattaaatatgagggtccgtcaagtaagaatgtgctttcatttaaatggtataatgcagaggaggaaattcttgggaagaagatgaaggattggttaagatttagtgttgcattttggcatacattccgtggaacaggtgctgacccatttggtgcacctaccaaatactggctatgggaagatggtaccaattcattaaaca

SEQ ID NO: 231747 - DNA, 175 bp, Glycine max
  unsure (1)..(175): unsure at all n locations
gctcatgttattgtgaatgactctggttatcatcagctcgtgagccattggttaaatactcatgcagtgatggaaccatttgccatagcaaccaataggcatctcagtgtgctccaccctatttataaacttctttatcctcactaccgcgacaccatanatatcaatggacttg

SEQ ID NO: 231748 - DNA, 357 bp, Glycine max
atcagcctggcggaacatcttggtacccgaatatctgatcatattccagatacaccaaataggctttctgaggatatggtcaaatgtatatcagctatatattgcaaactcgcggatccatctatgacaaatccaggcctttcatctcccagttcatccttgtcttcaactagtgccttttctattggagatcaaggagacatgtggagtccaggtttgaggaataattcctcattcgatgtacggttagacaatcctttccatgtggaaggactcaaggagtttagtggaccatacagcaccatggttgaggtatcatggatttacagagaaaatcagaaattgggtgatactgag

SEQ ID NO: 231749 - DNA, 340 bp, Glycine max
ggagattcatatatcatcaatgggacaaaatggtggacaagtggtgctatggatccaagatgtagaattctgatagtcatggggaaaactgacttcaatgcagtgaagcataaacagcaatctatgatcttagtggatgtccagactcctggcgttcacataaagagaccattgacagtgtttggctttgatgatgcaccgcatgggcatgcagaagtaacatttgaaaatgtttgtgtgcccgcaaaaaacatcatacttggcgaaggaagtggatttgagattgcccattgtatgcttgggcctggaaagctccaccattgttatagactgataagtg

SEQ ID NO: 231750 - DNA, 393 bp, Glycine max
gatggatctaagtccctcgccgatacactggcgaaatggaaagaatataatgcttggctggagtctaacaatgaagctgagaagccggctaggaaggtccctgccaagggatcaaagaaagggtgtatgaaaggaaaaggagggcccgagaactcacgctgtaactacagaggagttaggcaaaggacttggggaaaatgggttgctgaaatccgagagccaaacagaggaagtaggctctggttgggtacttttcccactgccattagcgctgctctcgcttatgatgaagcagcaagggcaatgtatggttcctgtgcgcgcctcaactttcccaacgttcaagtttcaactttgtctgaggaaacgtcgagagattctccagctgctgct

SEQ ID NO: 231751 - DNA, 399 bp, Glycine max
caattttcaaccttaacctctaagaatgtcttacgcttatctcttcaaatacatcatcatcggtgacaccggagttggaaagtcttgtcttctacttcaattcacggacaagcgctttcagcccgtccatgacttgaccatcggtgttgaatttggtgccaggatgatcacaattgataacaagccaatcaagttgcaaatatgggatacggctggtcaagaatcattcagatctattacaaggtcttattacagaggggctgcaggtgcattgcttgtttatgatataaccaggagggagacatttaatcatttggctagctggttggaagatgcaagacagcatgcaaatgcaaatatgactattatgctgattggcaacaagtgtgatcttgctca

SEQ ID NO: 231752 - DNA, 395 bp, Glycine max
tgcttcctacccaaaggataacaaaggtagatacattatctacgttaaggctggtgtctatgacgagtacatcaccgttcccaagagttcaaagaacattctcatgtacggtgatggccctgctaagaccatcatcaccggtcgcaagaacttcgtcgatggtgtcaagaccatgcaaactgccactttcgccaacactgcagaagggttcattgccaaggcaatgacattccagaacactgccggtgctgagggacaccaagccgttgcattcaggaaccaaggagacatgtccgctctcgttggttgccacatcttgggttaccaagacaccttgtacgtccagaccaacaggcaattctaccgcaactgcgtcatctccggcacagtcgact

SEQ ID NO: 231753 - DNA, 398 bp, Glycine max
gttcgggctcgctacctccgcgccatcgctgccaagatcaccgagaaaaagcctgaactagcaaaactcgaagctattgactgtggaaaaccgctcgatgaagccgcctgggacatcgacgatgttgctggttgctttgagttctatgctgaccttgctgaaaaattggacgcacagcaaaaggctcatgtgtctcttcccatggacacattcaagagttatgttcttaaggagccgattggagtcgttgctttaataactccttggaattatcctctgttgatggctacgtggaaggttgctcctgctctggcggccggctgtgctgcaatattgaagccctctgagttggcatctgtgacatgtttggagctcgctgaaatttgcaaagaagtcgg

SEQ ID NO: 231754 - DNA, 390 bp, Glycine max
  unsure (1)..(390): unsure at all n locations
cttaagagtttgagaactgagaagagatgggtggtgttgcatggacagaagaagaagatcacttgctcaagaaatgcatacaacaatatggagaaggaaagtggcatcgtgttcctttactggctggtttaaacaggtgccggaagagttgtaggctaagatggctgaactatctccgtcctaacatcaagagaggaaattttgcggaggaagaagtggaaatgataatcaaactccataaattactaggcaacagatggtcgttgattgcacgaaggctaccaggaaggactgccaatgatgtgaaaaactattggaactgtcatctgagcanaaaactaaatgtaatagaagctgaagatagaccaataacaagagatgttcaagtca

SEQ ID NO: 231755 - DNA, 268 bp, Glycine max
attctctctgtgtatttccctacctctcccttcaagatgcagatcttcgtcaagaccctcaccggcaagaccatcacccttgaagtggaaagctctgacaccatcgacaacgtcaaggccaagatccaggacaaggaaggaatccccccggaccagcaacgtctcattttcgccggaaagcaacttgaggacggccgtacccttgctgactacaacattcagaaggagagtactcttcaactcgtcctccgtctccgtggtggcatgc

SEQ ID NO: 231756 - DNA, 403 bp, Glycine max
cctacctctttttcttctctctcaacaacttcaccttcttcctcctcgatcatgtctcacttcaagggcaagtaccatgatgagcttatcgccaatgctgcgtacattggcactcctggaaagggtattcttgctgctgatgagtcaacagggacaattggcaagcgtttggccagcatcagtgtagagaacattgaatccaacaggcgagctcttagggagctgcttttcactgctcctggtgttcttcaatatctcagtggtgtcatcctctttgaggaaaccctctaccagagcacagctgcaggcaagccctttgtgaatgtcttgaaggaagctggtgtgcttcctggcatcaaggttgacaagggcacagtcgagcttgctggaactaatggagaaa

SEQ ID NO: 231757 - DNA, 145 bp, Glycine max
tttcaacccttgtattttatgacacctaaactagtttttgtattatgagtagttttgtaatttcacatgcattaagtgaatatttgatgtgtgtgttgtgaaataaatttaattgaattgggagaagcccaatccaattaaattt

SEQ ID NO: 231758 - DNA, 290 bp, Glycine max
attcagctcgagggatattcggcaagacgaccctttggtgtttggatcttcaaaaaaaaatacccttgggatttcgtcacaagaagtctcatcggcactgtggaagcaggtgaccgactaatcatttcggtcaaagcaagaattggccctccaggaattaagggtgctcaacttcaaaaacacatcgatgccacgttgggtactgggaacttgagggaggctgttaaactgcctcccggtgagaatattaatgaatggctaccggtaaaaacgttggactccttaaacca

SEQ ID NO: 231759 - DNA, 367 bp, Glycine max
tttgatcgaaacatgaacattaaacttcacgcggagctcatgctaacggataataagaccatagatgcacgtggtgccaatgtgcacattagtgagggtgcccaaataacgttgcaatatgtgaaaaacatcatcattcacggtctgcacattcatgacattaagaaatgtagtggtggcctcatcagagactccatggatcactatggattccgtgccatgagtgatggggatgccatttcggtgtttggatccacatatgtttggatagatcatgtttcctttaccaactgcgatgacggcctcatcgatgtcgttagcgcttcaactgctgttaccatctccaactgccatcttaccaaacata

SEQ ID NO: 231760 - DNA, 317 bp, Glycine max
tttttgtgatattgagaggacgaccctttggcgtatggatcatcaagaaagagagacccttgggatttcggcgcatgaatcgcttcgttcatggccacaaggtgaggactacattacatctcaagccctatgcaccatctagatgtaacggtgatccatctcaggcacacatcgagtctagggtaaggtaatgcgaacttgaaggacgtggtcagattggtacatcgctagggtaccccaaggctagcataagcacgtttgtgtcgttagtgagcaattggaattacctgggacgggttctttcagggtttgtatct

SEQ ID NO: 231761 - DNA, 398 bp, Glycine max
atttctcacctaaccttctcttcctctcagtctcagatcagaaacctcagccagccatggcagcgttccagaagatcaaggtcgtcaaccccatcgtcgagatggacggagatgaaatgactagggttatctggaagtcaatcaaggacaagctcattttgcccttcttggagttggacatcaagtattatgacttaggccttccttaccgtgatgagaccgatgataaagttacaattgaaagtgcagaagcaactctcaagtacaatgtagcaatcaagtgtgcaactatcactccagatgaagctcgtgtgaaggagtttggcctgaagtcaatgtggaagagtccaaatgggactattaggaacattttgaatggaactgtcttcagagaacca

SEQ ID NO: 231762 - DNA, 337 bp, Glycine max
gcttgggataatcttttggagaacaagactgccttcactacaaagaaagactatggcaaagaagagagagaagcacagtgggcaactgctcagaggactcttcatggtcttcagccacctgaaacaaccaaccttttcaatgacaagaacagttacagggagctttcagagattgctgagcaagctaagagacgtgccgaggttgcaaggctcaaggagcttcatactctgaaaggacatgttgaatcagtagtgaagctgaagggacttgacattgatacaatccaacagcattatacagtttaaggaatttggacaaacttcaagcagaacacac

SEQ ID NO: 231763 - DNA, 406 bp, Glycine max
cacaccctcaccctccctacgtttacccctccccaccacctcctcctaagaagccatacaagtacccatctccgccacctcctgtccatcactaccctcagcctcaccctcccttcgtccattactctcctccaccatctcctaagaagccatacaagtacccatcacctccaccaccagtacaccctccttacactccccacccagtttatcactctcctccaccacctcctaccaacaagccttacatctatgcgtcacctccccctccttaccactattagctagcatagctctatggatatgaagaatatgtgcaacgaataaaagaaagcgatagaaaaggaagaagaagcgcttcgcgatgcacgatagagaagaattggaagcaaagtttcggcgtttt

SEQ ID NO: 231764 - DNA, 390 bp, Glycine max
  unsure (1)..(390): unsure at all n locations
gttagcggcggcgggaagatcaccgatgagttcaccgggaagggctcgatcgggcaggtctgccaggtcatcggtgccgtcgtcgatgtcagattcgacgagggtttgcctccgatcatgaccgcgctggaggttctggatcactcctcgaggctcgtgttggaggtggctcagcatttgggtgagggcgttgtccgaaccattgccatggatgccaccgaaggggtcgttagagggtggcgcgtcctcaacactggctcccctattaccgttccagttggtanggctacccttggccgtatcataaatgtcattggagagcctattgatgacaagggagaaatcaataccgagcattatttgcccattcatagagaagctcctgctttt

SEQ ID NO: 231765 - DNA, 220 bp, Glycine max
attgaagtctaaagaaaacatagaacgaagaagaagaacagatcagaaaaatggcgtccaaagttccaaagaaggccaatctcctggatcaccactccatcaagcacatccttgacgagtctgtctccgaggtcgtaacgagtcgtgggtatttggaagacgtgagattgagcattgcaaggcttttcattggggcattcatcatcgtcattgctttatt

SEQ ID NO: 231766 - DNA, 325 bp, Glycine max
ccaagttcactttggtggcagttgaacgagtttgcaaccccacacacaaaaaccaaacccttaaaaatgtcatccccctcgccggtggccacggtggtctccgccgccgcgctgtacgaccgcgccaaagccgtgaaagaattcgacgaaaccaaggtcggagtcaaaggtttgatcgattcgggaatcagaaccatcccccctttcttcgtccacccgcccgaaaccctagcggacctcaagcgcggaaccaaacccgggtccgcgccggagatccccacggtggacctcgccgccgaggagagctcccgcgccgccgtggtgg

SEQ ID NO: 231767 - DNA, 362 bp, Glycine max
cagacttaacaacagcacaaagcgggttactgtctgttcaagctaccatctctctctctctttcttagtgcctccttgccagaagttaaaatggcccaagaaactttcctattcacatctgaatcagtgaacgaggggcaccctgacaagctctgtgaccagatctccgatgctgtgctcgatgcatgcttggagcaggaccctgacagcaaggttgcctgtgaaacctgcaccaagaccaacatggtgatggttttcggagagatcacaaccaaggccaacgtggactatgagaagattgtgcgtgacacatgcaggaacattggttttgtctctgatgatgttggtcttgatgctgacaa

SEQ ID NO: 231768 - DNA, 391 bp, Glycine max
  unsure (1)..(391): unsure at all n locations
cagcaccttagtaccttgaatcattatcattcgggtaatggacacatcactagtgtttactgtgaggaggagtgaggcagagctgatagctccggcgaagcccacccctcgtgaagtgaagctactctcagacatagatgaccaagatgggttacgtttccaaattccggtgatacagttctatcgccacgacccatcaatggcagggaaagaccctgtcgatgtgataagaaaggctgtggccaaaacgcttgtgttttactatccttttgcaggtaggcttanggaaggacttggtcggaaactgatggtggattgtactggggaaggtgttttgttcattgaggctgatgcagatgtcactcttaagcaatttggtgatgctcttcaa

SEQ ID NO: 231769 - DNA, 362 bp, Glycine max
gttgtgaaagcagagaagtgagatacactaagttatcctcataaatacactctaattaggtggcaagataagtgtctaaccttagtaacattgccacatattgtgttcattttggaattgtgccactaaaattctattcaattcatctatggctgcctcttcttatgctatgcaatcaatcctggcaaaccctttgatccgcatttccagcgggtctagggtgaaccaatttggcgttcctgctttgcacatgagaaggaatgttggcctgagagttaggtccatggctaaggaagaacaaccaagtgagcctgcaaccccagttacaccgccaccatcagtagaacccaagccacagccag

SEQ ID NO: 231770 - DNA, 379 bp, Glycine max
cacacaccttgtgttctgcaccacttcaggcgtggacatgcccggagcagattaccagctcacgaagcttctcggcctgaggccctccgtgaagcgcctcatgatgtatcagcagggctgcttcgccggcggcaccgtactccgcctcgcgaaggacctcgccgagaacaacaagggtgcgagggtgctcgttgtctgctccgagataaccgccgtgacgttccgcggcccctcggacacgcacctcgactcgctcgtgggacaggcactgttcggagatggcgccgcagcgttgatcatcggatcagaccccgacccagacaatcctgcccgactctgacggtggtattagatgggcaccttcgggaggtgggactca

SEQ ID NO: 231771 - DNA, 343 bp, Glycine max
ctcgagccgctcgagccgcaggtatttcatctaaagaaatcgatgattctattgataggattgtggctggaatggaaggaacagttatgacagatgggaagagcaaaagcttagtggcatatcatgaagttgggcatgctatttgtggaactttgactcctggtcatgatgctgtgcaaaaggtaacactagttcctcgtggtcaagctcggggtcttacatggttcattcctaatgatgatccaactctgatctccaaacaacaactctttgcaagaattgttggaggactacgtggaagggctgcagaagaaattatttttggtgagcctgaagttacaac

SEQ ID NO: 231772 - DNA, 337 bp, Glycine max
gaaaatcctcaattttctgagcagccaaacactctctctctgtctctcgaaaattctcagtttgcagagaaaatctgaatcatgtcgtggcaagcgtatgtcgacgatcaccttctgtgtgacatcgaaggtaaccacctcactcacgctgctatcatcggccaagacggcagcgtttgggctcagagtaccgacttccctcagttcaaacctgaggagataactgccatcatgaatgactttaatgagcctggatcacttgctccaactggattgtatctcggtggcaccaaatatatggtcatccagggtgaacccggtgctgtcaatccaaggg

SEQ ID NO: 231773 - DNA, 382 bp, Glycine max
  unsure (1)..(382): unsure at all n locations
aactaactaaattaaggagagtccaagtgtgtgggagacaaagagagacatggctaagtggtgtatgttggtgttggttcttgctctggctgtggctacaagtgccagagatgttcccaatcccaaggatgctggtctcaatgaccagaagaacttcatcagctatggtggagttggtggctattctggaattggaagcaatggactaccttttggaggtgtcggaataggtggtggtattggcggtggtggacttggtggcggcctcggcggcaccaccgggataggtgggttgggaggattcggaggtcncattggtggcggtggtgttggtggtggtagcatacctcatcctaccccttgatatgaacatgcatgcata

SEQ ID NO: 231774 - DNA, 350 bp, Glycine max
attcaacttaagagatgaatatggacatcaccactacacagcctcactctaatatctgttttttccttctgttgttgcttctaccacacttgcagttgggcataagccaacttgagctgaactactagtcgaaaagctgaccaaaagctgaagagatcatcactgaacaggtcacacagctatatcacaagcatggaaacactgccgtttcgtgggtcagaactctcttcgacgattgcgtggttaagtcatgcgatgcatcattactgttagcgacggtgagcaatgtagtgttcggacaaacatcgggtcacagttttgggatgagaaacttcaagtacatcaacact

SEQ ID NO: 231775 - DNA, 368 bp, Glycine max
ggaactctatcttcaggatcgcacatcccggtggtcccgcgatcctcgatcaagtcgatgagaagctccggctcaagccggagaaactccagtccacccggcatgtgctgagtgagtacggcaacatgtcaagcgcgtgtgttttgttcattctggatgaaatgaggaagaagtctaaggaggaagggaagagtaccactggagaagggttatagtggggggtgctattcggattcgggccgggtctaaccgttgagaccgttgttctgcacagtgttcccttggagggataaatcatgctgatgcggtgactagtgatttaagagtgatcaataaggaaccctcggaaataccagggaaagtttgtt

SEQ ID NO: 231776 - DNA, 385 bp, Glycine max
ctcgagccgactcgggtctagcctcagtagtgtcatttacgcttctcttctctgtagcagctatgcctaagcctaaggtcttcttcgacatgaccatcggcggtcaatctgctggccgcatcgtgatggagctctacgccgacgtcactccccgcaccgccgagaagttccgcgcgctttgcaccggcgagaagggcgtacggcggagcggcaagcccctcgagtacaacggctcgtccttcgatcgcgtgatcccgagtttcatgtgtcagggtggcgacttcaccgccggaaacggaaccagcggcgagtcgatttatggcgccaagttcgccgacgagaacttcgtgaagaagcagacgtgtccgagcatcctctccatggc

SEQ ID NO: 231777 - DNA, 313 bp, Glycine max
aaggaactcaagaacggtcgcttggctatgttctccatgtttggtttctttgttcaggctattgtcactggcaagggccctattcagaacctttacgaccacgttgctgatcctgttgccaacaatgcttgggcttatgccactaactttgtccctggacaatgaggatgcctacatgcaatgcaatcttctgctcccttttgcagttcccttgtgtttaactccattttcactaatgtaactacacctgtgtagcagaaaaatctgtatgagaaccattatatttttatatattagaaatttgggtccccag

SEQ ID NO: 231778 - DNA, 326 bp, Glycine max
agaaagagcagcttcaacaaaacgcgtttgtggttggatcctatttgaaagaaaggctcactgccctcaaggacaaatatgaattaattggtgatgtgaggggaagaggcctaatgctaggagttgaacttgtcactgatcgtgaacttaaaactccagcaaaaggtgaaacgctgcatgtaatggaccaaatgaaagaattaggagtacttattggtaagggtggttactatggaaatgtcttcagaattacacccccgttgtgtttcaccaaagaagatgcagactttgtagcagacgcaatggacttgaccttgtctagaatg

SEQ ID NO: 231779 - DNA, 354 bp, Glycine max
ctcgagccgaatcggctcgagtgttgaacaagggtttctctgtctgcttcttcactttctctcgtttcaatcgaaaccaaaacaaaaacatgggcagaaaattcttcgtcggtggcaactggaaatgcaatgggaccactgaggaggtaaagaagattgttactactttgaatgaggctaaagtccctggagaagatgtcgtagaagttgttgtgagccctccttttgtgttccttcctgttgtaaaaagtttgctgcgccctgatttccatgtttcggcacaaaactgttgggttcgcaaaggtggtgcttataccggtgaggttagtgctgaaatgcttgttaatttgggaa

SEQ ID NO: 231780 - DNA, 379 bp, Glycine max
ggcactcaaagtaacatgaatgctaacgaggttattgcaaaccgagcagcagagattcttggccataagcgtggtgagaagtttgtgcacccaaatgaccatgtcaatagatcacagtcttctaatgatacattcccaactgtaatgcacattgcagccgcaacggaaataaactcaagactgatccccagccttaaaacgttacacgatactctaaactcaaagtcagttgaatttaaagatattgtcaagattggacgcactcatactcaagatgcaacacctttgactcttggacaagagtttagtggatatactacacaagtgaagtacggtattgatagagtaattgacactttgccacgcatgtatcagcttg

SEQ ID NO: 231781 - DNA, 351 bp, Glycine max
  unsure (1)..(351): unsure at all n locations
ctcgagccgattcggctcgaggaacagttgaagtgaatggcataaaaatgcatgttgcagagaaaggagagggtccagtggtgttgttcctccacggcttccctgagctctggtactcatggcgccatcagattctctctctcagctccctcggctaccgcgccgtcgctcccgatctccgtggctacggtgacaccgaagcaccaccttcaatcagcagctacaactgcttccacatagtgggtgatctcgttgcgcttattgactctctgggtgtccaacaagtgttccttgtggctcatgactggggagccatcatangttggtatctatgcatgtttcgccctgaca

SEQ ID NO: 231782 - DNA, 367 bp, Glycine max
  unsure (1)..(367): unsure at all n locations
ggcctcaaaggggaagacttaggtctgtctagtggaagttctggacagtggaattcacaatctaccttccctaagaaccaaccattgatttggtacaagacaacctttgctgctccatccggcagtgatccagttgcaattgacttcacggggatgggaaaaggtgaggcttgggtgaatgggcaaagcatcggacgatactggcctacatatgtggcttcagatgctggttgcacggactcatgcaattatagaggaccttacagtgcatccaaatgtcgcaggaattgtggaaagccatcacagacactataccatgtaccgcgatcgtggttaaaaccaagtggcaacattcttgtantgtttg

SEQ ID NO: 231783 - DNA, 353 bp, Glycine max
taagagttgctgcatcttcaaccactccgcacctcgcagcctctgtgccctcaacaaccatggatgatatcgaaactaccgttccagatcccacccaaatcgacgtcaaactcttcaatcgctggtgcttcaatgatgttgaggttaatgatatgtctctggctgattacattggtgtgtccccatcaaagcatgctacatatgttcctcacactgctggcaggtactcagtgaacaggttcatgaaagcgcagtggcccattgatgagaggctcatcaactctctgatgatgcacgggaggaacaatggcaagaagctcatggctgtcatgattatcaagcatgccatggag

SEQ ID NO: 231784 - DNA, 323 bp, Glycine max
cgcgcgcttcactcctcttataaaaaaccccaagctcgacaccttctactacctcgagctcctcgggatcagcgtcggcggctcgccggtgcgcggcctctccgcctcgctcttccgcctcgacgcagcgggaaacggcggcgtcatcatcgactcgggcacctccgtgacccggctcacccgacccgcctacattgccctccgagacgccttccgcgtcggggcctcgcatctgaagcgtgcagcggagttctcgctcttcgacacgtgtttcgacctgtccgggctcacggaggtgaaggtgcccacggtggtgctgcatt

SEQ ID NO: 231785 - DNA, 381 bp, Glycine max
ttgggccacaaggggtgggcttgtgaaaacggattggagcaaggccccattcacagcctcatacagaaacttcaatgccctaacctcttcctccactggccaatcactggacgccacggggctggccaagatccattgggtgcaaaagaattacatgatttacaactattgcactgatattagacgtttcccacaaggcctccctccagaatgttccattgcttgagaatgttcattattcaattcaatgttgcatattattatatatataaaaaaaatggtccccatatacgtgacacgtgtatgcctattacgttgatttactttcttgtataaactaatggtactaaaacctatgattattgttggttggtttgtgct

SEQ ID NO: 231786 - DNA, 373 bp, Glycine max
  unsure (1)..(373): unsure at all n locations
atctcgtgggaatgaatgggaggttgtatctctcacagcatcaacatatgcagctgctcctggtcctgatgaagttgagatgaaggatgatgggaaagaagatgtatatgggcaggatgaaggagaaacgtcacatgctttattcatgtctagacactttgtctttccacccagtcagcatgaaaacttgcccgtggaacctgactatggtgagattcatgatgattttggagacaaagatgttgcctctgaagagactcctgaagaagtgaccatacctagtggaaaggatgaagaaaacttgacattaccaggattagaagttgcagangagtttganggcatgcggtattttgacgagaaaatcaacaga

SEQ ID NO: 231787 - DNA, 402 bp, Glycine max
gcacaaagggcgtaggagaagagggtttcgttccgtttcaatggggagcgaagagcagaacggcgaattctacctgcgttactacgtcggtcacaagggcaagtttggtcacgagttcctggagttcgagttccgcccagacggcaagctccgctacgccaacaactccaactacaaaaacgacaccatcatccgcaaggaggtttacctaacccccgccgttctccgcgagtgccgtcgcatcatcgccgagagcgagattatgaaggaagatgataacaactggcccgaaccggatcgggtggggcggcaggagctcgagattgttatggggaacgagcacatttcgttcaacacgtcgaagattgggtctcctgttgatgttcagagcaatgctgaccc

SEQ ID NO: 231788 - DNA, 384 bp, Glycine max
  unsure (1)..(384): unsure at all n locations
cttttcttcaagcttggtttcggaaaaaaaaaacgtaaaagaaacaaaaaaaaaaacccctagaagcgaagaagctgaaaaaaggctccaaagatggatttcaaaaactcttctcttctatgcctagctcttttccttgcatgctcttcggctattcgtgcatttgacatcacacaattgctaggtcaatatccagagttttccacattcaacanatacctaaccgaaaccaagcttgcagaccaaataaacagccgcaacaccatcactgtcctcgccgttgaagactcagccatgcattccattgctgccaagtccccagaagccattaaggccatcattggcacccatgtcatccttgacttccttgatgagaagaaactc

SEQ ID NO: 231789 - DNA, 401 bp, Glycine max
aaactttctctgagtatcctccccttggtcgttttgctgtgagggacatgcgtcagaccgtagctgttggagtcatcaagagtgttgagaagaaagaccccaccggagccaaggtcacaaaggctgccgccaagaagaagtgattgcattttggcaattttgctagcacatgtgatcatcaacgtggtttcaaaaaaacttgttcctttacagtagtttatctttgcagagtcttaggtgtttgttttaccagttatattttgaagtgtccgccgatttcatgtagcccgtagcttcaaaacggggttcttgatcggcggtaacattttcgttgctgtttgtttttgatgagtactgttttttgttttgatggtaaaagtctgagatttcaaattcacaag

SEQ ID NO: 231790 - DNA, 375 bp, Glycine max
gcagtgcaacatctcgccttattgtgcatgaaagtatagcaacagaatttgtgaatagacttgtgcaatgggccaaaaacatcaaaatttcagatccctttgaagaaggttgtaggctaggtcctattgttagtgaaggacagtataaaaaagtgttgaattgtatctcaactgctaagagtgagggtgcaacaattttgattggagggtctcgcccagagcatttgaaaaaggggtactttgttgaaccaaccatcataactgatgtgactacctcgatgcaaatttggagagaagaagtttgtggacctgtgctatgtgtgaaaacattcagtaccgaagaagaagctattgaactagcaaatgacacacact

SEQ ID NO: 231791 - DNA, 379 bp, Glycine max
ctcaatttttctctcaaccggcccaatttagcataagcccagcatggccaccgcaacagcagcagccacctcgtccttcatggggacgcgcctcctggaggcccactccggggcggggcgggtgcaggcccggttcgggtttggcaagaagaaagccgccgccccgaagaaagtttccagggggtcgggctctagctccgataggcccctgtggtatccgggcgccaaggcgcccgagtacctggatgggagccttgtcggagactacggattcgacccatttgggctagggaagcccgccgagtacctgcagttcgagttggactcgctggaccagaacctttccaagaaccttgcctggggacatcattgggaccag

SEQ ID NO: 231792 - DNA, 376 bp, Glycine max
attgaatttgtctacgaatcggttgacaggaaacatgcctgattctatgatgaactgcaccaagctcttggctcttgacataagccacaatcacttggcaggccatgttccttcatggatttttaagatgggtgtgcaaagtatctctctttctggggatggcttcagcaagggcaattatccttcactgaagcccacacctgcatcttatcatggtcttgaggttttggatttgtcatccaatgcattttctggtgtgcttccatctggcattgggggacttggtagcctccaagtcttgaatttttccaccaacaatatctctggttctattcctgtgggtataggagaactcaagtctttgtacattgttgac

SEQ ID NO: 231793 - DNA, 342 bp, Glycine max
gattcaattttggatttggtgctagcatcccttcccgaagaaacacgaagcaacgggacagacacacaactgcagttaaagcagaagtttgatgccttaaaaggtagtgtaagacacttcagcttcttcccaccatgagggggaggtatgttggcacattctttggcacatctagcatcctggttgaaggttagggaagacgatcaatcaagtgatgggatcgaatctgtgatcaataaagttgaagtttatttggcataaggaaaacttgctgaagcagcagattgtctacaagaaagtgtgagatgcacacaagctgcagaaattgttgcaagttgggtg

SEQ ID NO: 231794 - DNA, 347 bp, Glycine max
gagaaagaaacatttgagcaaaaatggttcaagcacagcctctacaacatgttggtaatggtgcagggaaagaagatcaagcttattttgatccaagtgctccaccacccttcaagattgcaaatatcagagcagcaattccaaaacattgctgggagaagaacacattgagatctctgagttatgttctgagggatgtgttggtagtgactgcattggtagctgcagcaatcggcttcaatagctggttcttctggccactctattggcctgcacaaggcacaatgttttgggcactttttgttcttggacatgattgtggtcatggaagtttttcaaacagtcct

SEQ ID NO: 231795 - DNA, 325 bp, Glycine max
ctcaaaaactcgttctccttcttctataaactgtaactgttttcatctctcacagatcttcggagcagaatgaaggttctcgaatttcatcgcttcctcctttcgcgatgatgctatagtagaataagaagacaaagagagagaagtatatggacgatataggtagctcattcatcaatgttaggagaattctccacggggaaatctgccattcaaattcagctgatgttgtggtaaggtcagccgcatggcttgggcgaagtctgtcctgtgtctgtgatcaaagtatagatagtgatgcttctaacactttcgatttaaacct

SEQ ID NO: 231796 - DNA, 384 bp, Glycine max
  unsure (1)..(384): unsure at all n locations
ggaatcagaggctccccctaacttctggggccacaccccggcagaagaatactacacctcccaaggcgttcgcaacaccaagtcccacttcgaaacccccaacggcagaatcttcacccagtccttcctccctctcaacctccaaccccaccaagtcaaagccaccgtctttatgacccacggctacggctccgacaccggctggctcttccagaaaatctgcatcaacttcgccacctgcggctacgccgtcttcgccgccgacctcctcggccacggccgctccgacggtctccagtgctacctcggcgacatggacaaaatcgccgccacctcnctctccttcttcctccaagtccgcaatagccacccctactaaaacct

SEQ ID NO: 231797 - DNA, 401 bp, Glycine max
caaaagtcctaggagtgtaaaacacagacgcaaaatgaagacgatcttgtcgtctgagaccatgagtattcccgacggcgtgagcatcatggttcacgctaaggttatcgaggttgagggccctcgtggaaaactcgtgcgagacttccaccatctgaacttggacttccaacttattaccgacgatggcggtaaaaggaagctcacgattgattcttggtttggttctcgtaaaacctccgccgccatctgcaccgccctcagccacgttgagaatttgatcaccggcgtcaccaatggataccgatacaaaatgagattcgtgtacgcacattttccgatcaacgctagcattggcaacaacagcaagtccatcgagattagaaatttcctcggcgaga

SEQ ID NO: 231798 - DNA, 378 bp, Glycine max
  unsure (1)..(378): unsure at all n locations
atcacagtcacgcagcaaagcaacgctctctttttctccgtcactgccacttctcttctctagggtttatcgtcatttgatctcaacctctcttcctcccaaaatgccgtctccaccgcttccacaatcggaccgctagtgcccctgctttttccgatgtgcaatgtatattttgttcgctgctgcggttctggaaatgttgaattctgaactgagataagatgagtaggattgaattatcgagggcgaagtcagcgccggttccattggggactctgattggccgtgagcttcgaaatggaaaagttgaaaaaccttttgtgaagtatggacaatctggatttggcaangaaaggagaagattactttctgatcaag

SEQ ID NO: 231799 - DNA, 348 bp, Glycine max
cctcacgcatttcctcgtttttttcttcccttttctctttctccggcgacgatctcagattccggccactcctctcgccggcgagcccttactcttccctcctccgtcgagccctctccgattcgaatcgttcccagcctcgcaccaccatgaatcccgaatacgattatttgttcaagcttttgctgattggagattctggtgtacgcaagtcatgtcttctcctgaggtttgctgatgattcataccttgacagctatatcagtaccattggagtggactttaaaatccgcactgtggagcaggatgggaagactattaaacttcaaatttgggacactgcgggtc

SEQ ID NO: 231800 - DNA, 332 bp, Glycine max
ctctggggctgatttcatcaaggaaaactcatgaggctattgagatcctcaagctcatgtcctccactttcctggtcgccctttgccaagccattgacttgaggcatttggaggagaatttgaagaacacggtcaagaacgttgtgagtcaagttgctaagaggactctcaccacaggtgtcaatggagagcttcacccttcaaggttttgtgagaaggacttgctcaaggttgttgatacggagtacacatttgcatacattgatgacccctgcagtggaacataccctttgatgcaaaagctaaggcaagtgcttgtggactatgcattg

SEQ ID NO: 231801 - DNA, 343 bp, Glycine max
tgctttcagataactgatagttgtgtgcaattatttgaattcaagaatgtctcaacccgactcgttggtggctgagattgaggtgaaaacctctgctgatcacttttacgacaccttgaagggtaagaaacagcatcgtattcatgatgttgcccctcatcatatccataaggtggaagttcatgaaggtgagtgggataaatctggcaatatcaaggtgcttacattcgctgatggggacactgttgagaccttaaaggagagagttgattttgatgatgaaaacaagaagataacctacaccatattggagggtgtcatgttgaagtactataagagctac

SEQ ID NO: 231802 - DNA, 352 bp, Glycine max
  unsure (1)..(352): unsure at all n locations
gaagaagacttgatcttgataaactagattgcaaatcacggtgaacgtgtttggcattctttagccaaagcttctggtcataaacgacagggaaagagttgtcgactccgttggctaaactaccttcgtcctgatgttagaagaggaaacattacacccgaagaacagcttttgatcatagaacttcatgcaaagtggggcaatatgtggtccaaaattgcaaagcatcttccaggaagaactgacaatgacattaagaacttctggagaactatgatccanaagcacattaagcaagctgagacttcacagcatcatggtaattcatcagagaatactaataatgatcatc

SEQ ID NO: 231803 - DNA, 398 bp, Glycine max
cggctcgagctactgtaaaaccttgggcaacaggattaagtggacagcttcagaaggcatttgtaacaggtgtgccaaagctaaagagatcagagcttgaagcagcatgtgaagattttagtaatgtaattggcacttcatccattggtacagtttacaaagggactttatctagtggtgtcgaaattgctgtggcatctgttgcagcgacatcatccaaagattggtcaaagactctagaagcccaatttaggaacaagatagatacattatcaaaagtgaaccacaggaattttgtaaatcttcttggacattgtgaagaagatgagcctttcacaagaatggtggtttttgagtatgccccagatggaacactctttgagcatttacacataaaa

SEQ ID NO: 231804 - DNA, 357 bp, Glycine max
  unsure (1)..(357): unsure at all n locations
gtttaaacctaattctcatttcttcatcgttcgattcttctcctcctaaagatgcagatcttcgtgaaaactttgaccggtaagaccatcacccttgaggtggagtcctccgacaccatcgataacgtgaaagctaagattcaagacaaggaagggatcccacctgaccagcagagacttatctttgcgggtaaacagcttgaggatggtcgaacccttgccgactacaacatccaaaaggaatccactctccacctcgtgcttcgcctcaggggtggcatgcanatctttgtcaagactttgactggcaagnacatcaccctcgaggtcgaatcctcggacaacattgataatgtc

SEQ ID NO: 231805 - DNA, 342 bp, Glycine max
cttccataatattacagacactcatgtagctcatcacttgttctccacaatgccacattatcatgcaatggaggcgacaaaggcaataaagcccatcttgggagagtattatcggtttgatgggactccatttgtcaaggcaatgtggagagaggcaagagagtgtatttatgtggagccagatcaaagtactcagagcaaaggtgtattttggtacaacaataagttgtgatgattaatgtagccgggggcttcttgtccgtcaggtgggatggtttgaactttcctttgtgactgtttagtatcatgcgtgcttattgggaataattttgttgaaccctg

SEQ ID NO: 231806 - DNA, 447 bp, Glycine max
aatgtttagtgcatgcgaagacaatgacgtcggacgcacgcgtacgtaagctcggaattcgctcgagttgtaactttgtcttttgcttgcgaatctgaatcgaataataatcaatcaatcatcatgtcgtcggcgaagaagatcacactgaagagttcggacggcgaggctttcgaggtggacgaggcggtggcgctggagtctcagacgataaagcacatgatcgaggacgactgcgccgacagcggcatccctctgccgaacgtgacgagcaagatcctggcgaaggtgatcgagtactgcaagaagcacgtcgaggccgcgaatcccgaagacaaaccctccgaggacgatctcaaagcctgggacgccgatttcgtcaaggtcgaccaggccacgctcttcgatcttaacctggctggcaacctacttgaccatcaagagctg

SEQ ID NO: 231807 - DNA, 394 bp, Glycine max
gatgatttgctgctgtaacaaaatggatgctactacacccaagtattccaaggccaggtatgatgaaattgtgaaggaagtctcttcctacttgaagaaagtaggatacaaccctgacaagattccttttgttcctatctctggttttgagggagacaacatgattgagaggtccacaaaccttgactggtacaagggtccaactctgcttgatgcacttgaccagattagtgagcccaagaggccctctgacaagcccctcaggcttccccttcaggatgtgtacaagattggaggtattggaactgtgccagtgggacgtgttgagaccggtgtcttgaagcctggaatggtggtgacttttgcaccaactggactgacaactgaagtcaag

SEQ ID NO: 231808 - DNA, 388 bp, Glycine max
atcaattataagcatgggtttgtggaacacaacgaatgcagtgtcttgccgctttcacaagtttggtgatgaccaaaagaatctggtcttccaaggtgatgccacgtcttcttccaggggcatagaactcacaaagttagacggtggaggaaaaccagtgggtggcagtgtggggagagtgttatactcttctccagtgcacctttgggaaagctctacagtggtcgcaagctttgaaaccgacttcaccttttccatctcatcagactctactactccaggtgatggccttgccttcttcattgcaccatttgacactaaaatccctccaaactctggtgggagcaaccttggactcctcccatcaaacaatggtgttgctgtccaa

SEQ ID NO: 231809 - DNA, 374 bp, Glycine max
  unsure (1)..(374): unsure at all n locations
cagaagtctgagcattctaggggttcaaaaccagctgatggtctgctgattgatgaccacgaaaaggtgttacaaacttctcagccacatctgaaagatgtacaagcaaaatctcatagtggttctgctagaagttgcactaaagttcacaagaagggtattgcacttggtaggtcagtggacctcacaaaattcagtgattatggggaattaattactgaattggatcaactattcgaatttggaggtgaattaacttctccacaaaaggattggcttattgtctacactgataatgagggagatatgatgcttgttggtgatgattcgtggcaagaatttgttgcaatggttcgcanaatttatatctaacc

SEQ ID NO: 231810 - DNA, 380 bp, Glycine max
ctttgctattacctctttttccaaactctaaaaatttttagttccacaaaaccaaaccaaaatggcagcagcctcggcctcatccaccatgatatcaacaccagccttatctccaagcacaagcatccaaaagcaccatcatttgaagccatccaacgtgtgctttcaaggccttagacccctcacaaggttcacaaccaaagtgagcagcaccaccaaaagggttattccaaagggtggtgtcggtgttagagctgaactcaactcagcacttgtcataagcctcagcactgggctctccctcttcttggggaggtttgtgttcttcaactttcaaaagggaaaccttggcaaaccaggtgcctgagcagaacggactc

SEQ ID NO: 231811 - DNA, 358 bp, Glycine max
ccaatgtcaaatttattttcatgtctttggttcaacgaagttgatcgatttacatctcgtgatcaactaagctttgcttatacctatttgaaacttaggagaatgaatccagagagaccaattcagctatatatgttcaaggattgtgaacgtagagcattactgaagctattccggcatagggaacttccatctccacgagagactgcttgatcagttccagatatataagggatgcacactacactaatggcacaggtcatcatatttgacatcccttccagcttgattagcctgacaagacatgcatgatatgttttaagctggaccaaacagagggaaactcaatccctggttc

SEQ ID NO: 231812 - DNA, 347 bp, Glycine max
tgatgttaccatggtctatccggagccttggtgtatgccacgactttttacggctggtataactgaattctatgagggatattacgcaaataagggtgtaaatatcattaaaggaactgttgctgttggattcacttctaagtctgatggagaggtaaaagaagtcaaactaaaggatggcagggtcctggaagctgatattgttgttgttggtgttggaggaaggcctcaaacagtcttagtcaaagggcaggttgaagaagagaagggtggaatcaagaccgatgctttcttcaaaactaatctctccgatgtatatgctgttggtgatgttgctactttcccct

SEQ ID NO: 231813 - DNA, 373 bp, Glycine max
atcaactctttcaaaagggagaagaaaaggaaaggaaacaaaacgcacaaaggattattatagcaatggcagaacaaaaccaaaaccagacaactgaagctggaaggcaccaagaggttggccacaagagccttctccagagtgatgctctttaccagtatattctggagaccagtgtctacccaagagaacctgaatccatgaaagaactgagagagttgacagcaaaacacccatggaacatcatgacaacctctgcagacgaagggcaattcttgaacatgctccttaagctcatcaatgccaagaacaccatggaaattggtgtctacactggatattcacttcttgccaccgctctcgctcttcctga

SEQ ID NO: 231814 - DNA, 379 bp, Glycine max
ggtctccagcctcagctggaatgaagttcaatattatatcaggaacttctatgtcttgtcctcacataactggaattgcaaccttggtcaaagctgtgcatccttcatggtctccgtctgctatcaaatctgccatcatgacaactggtattacatgagtgtttggtttcacatcttgctctgaatgtattacatgagaaattaataactatagcttctacatccaaacatgatttcttattttttgacaaatttccaaacatgttttacatatatatagaggcatatattacccaatgcagtttgtctgagattcttcttaacagacattaaattttatgtcacttattgcctagatatacatactgaacaccaccac

SEQ ID NO: 231815 - DNA, 364 bp, Glycine max
tgttggtgagggtatggaagaaggagagttctctgaagctcgtgaggatcttgctgctcttgagaaggactatgaggaggttggggctgaaggagcggaagatgatgaggaaggagaggactattcataaatgaaggttttattatcaatgtaattgtttcgagtaaaaagggtatatgcttcgttacattaccctgaaccagtattgttcgttcctttttgtttttactcctgtgtgatatagttctccattattcaaactgtgaagtgatatcatcattatgcttctattttggtggtttaaaaaaaaaatttttttttttttttttttttttttgtatataagaattttgttttttttttt

SEQ ID NO: 231816 - DNA, 402 bp, Glycine max
ctagaagcaataagatgaaaatgaaagtgcttgttttgtttgttgctacagttttggtagcatatgaatgccatggctcagactaccagaagttccctctccaaatgaaaactgggtttggtgggcaatacagcaatgaggtggcatgtgccagttggaggcttggcgtggaagcaaacaacgtagtcaagtggcaaactgttcctgcagcttgcggagagtacatagctgactacgttctaggagaccaatatagatcagattccaaaacagttaaccaacaagcttatttctatgctaaatccctcaaactcaccaacaaagatgtctttgtcttggacgttgacgacactactctctctaatctccagtattttgctaaccatgggatttggtgtggaa

SEQ ID NO: 231817 - DNA, 376 bp, Glycine max
ccaaaccaaacctttatcatcatcccagataaaataaatacataaagcgacattttataagtgcagataataaaattacaggaagaagaagaagaaaaataaaagctagccactagtagagatggtggttttgttggtccacttgagaaccaaattggagatatggtcggtggaggaaccatttggagagagagagcacaaagaggggttcctagacaagatcaaggacaagatccacggcgaggagggtggcgccaccgccgagggcgagaagaagaagaagaagaaggagaagaagaagcatgaacatggccatgacagcagcagcagcagtgacagtgattagattatctcccactgctgcattcactatata

SEQ ID NO: 231818 - DNA, 403 bp, Glycine max
ggcactcaaagtaacatgaatgctaacgaggttattgcaaaccgagcagcagagattcttggccataagcgtggtgagaagtttgtgcacccaaatgaccatgtcaatagatcacagtcttctaatgatacattcccaactgtaatgcacattgcagccgcaacggaaataaactcaagactgatccccagccttaaaacgttacacgatactctaaactcaaagtcagttgaatttaaagatattgtcaagattggacgcactcatactcaagatgcaacacctttgactcttggacaagagtttagtggatatactacacaagtgaagtacggtattgatagagtaattgacactttgccacgcatgtatcagcttgcccacggtggtacacctgtatgga

SEQ ID NO: 231819 - DNA, 373 bp, Glycine max
tgataataaggcattagaagctttcaaaaggtttggaaacaaactgactggaattgaaggaaaaatcaatgcaaggaacagtgatccaagtctgagaaaccggactgggccagttcagctgccatacactttgctccatcgttcaagtgaggaagggttgactttcaaaggaattcccaacagtatctctatctaattaaaaagagtttgtggtttccctatctatgttgtacttctgaataacatagactttatgcatgtctatgcgtaattattgcctgaacttctgcactattgtatttggatgctctcggttttcatataataaagtgtgttctcactttcactttggaattagctcaacctaagttta

SEQ ID NO: 231820 - DNA, 368 bp, Glycine max
gctcttcctccctttctcacagcaatggccgccgcagcacgccctctcgtcaccgtgcaggccctcgacggtgacatggcaaccgatgcctccgccaccgttcccatccctgacgtcatgaaggcctctatccgccccgacatcgtcaatttcgtacactcgaacatctccaagaacagccgccagccatacgccgtcagtcgtcgcgctggtcaccagacctccgccgaatcctggggtaccggccgagccgtctcccgtatcccccgtgttcccggcggcggaacccaccgcgccggccaaggagcctttggaaacatgtgccgcggcggacgcatgttcgccccgaccaagatctggcgccgctg

SEQ ID NO: 231821 - DNA, 385 bp, Glycine max
cagaacttttgaagtagcaaaaaaggtctgggcagaggttttcttctaccttgctgagaacaatgtcctttttgagggtattcttcttaagcctagcatggttacacctggagctgagtccaaggacaaggccagtcctcagacagttgctgattacaccctcaagctccttcacaggagaattccccctgctgtccctggaattatgtttttgtctggtggacagtctgaggttgaagctaccctcaacttgaatgccatgaaccaatctccaaacccgtggcacgtgtcgttctcgtatgccagagccctccaaaacactgccttgaagacatggggaggccgcccagagaatgtgaaggcggcacaagatgcacttcttttc

SEQ ID NO: 231822 - DNA, 396 bp, Glycine max
gtggaagccctgcttatcttagattgagccagaaaactgtcaattcccttggtgatctagtccccttcagcaacaagttgtattctggatgtttgcaaaagagggtggggataacagctggaatctgtgtcttgatccaaaacaaagccgagaagaagggagataggtatgaggcaatctacagcttctactttggggactacggtcacatttcagtgcagggttcatacctgacctatgaggacacttatcttgctgtgactggtggatctggcatctttgaaggggcttatggtcaggtcaagctgcatcaaattgtgttcccctttaaactattctacacattttatcttaagggcatcaaggacttgcctcaagagcttctttcccagcctg

SEQ ID NO: 231823 - DNA, 379 bp, Glycine max
ccaacgccaacgccaattccattcagatcacagtcccttcgattcctgctgcaacatactttcaaagccctaaaatggaggggactgtcttcactcctgcactgcaagaaattgagcatgtaaagtctgatcaaggagaaattctgagcaagcctttcttggatgcgtgcaaacacatattgcctgtaatagataagtttggagctgctatggcccttgttaaatctgacataggtggtaacatatcgagattggaaactatgtattcttccaatccaaccagatttaactacctgtacagtttggtacaggtagaggttgaaactaaaacagctaaatcatcatccagttgtaccaatggacttctttggctcacaag

SEQ ID NO: 231824 - DNA, 396 bp, Glycine max
gactctttctcttatctctaagtcaacatggctcaccttgaagattcaagtgcatggaattcgagtatacctcaccctaagctcaatgaaagaattctgtcttctctgtcacggagaactgttgctgctcacccctggcacgatttagagattgggccaggagctccagctgttttcaactgtgtggttgaaattggcaaaggcagtaaggttaagtatgagctggacaagacaagtggacttataaaggttgatcgtattctttactcatcagttgtctacccacacaactatggttttatcccaagaaccatttgtgaagacagtgatcctatggacgtgctggttctaatgcaggaacccgtgcttcctggttccttccctcgtgctcgtgct

SEQ ID NO: 231825 - DNA, 384 bp, Glycine max
tgataataagtctgaggcgcatttgacttctgccgctgcttttgtggagggtggaattcaggatgcttgtgatgatgcttgcagcatatgccttgaagctttctgtgatagtgatccctccacggtgacaagttgcaagcatgagtttcatcttcagtgcattctggaatggtgtcaaagaagctcccagtgccccatgtgttggcaacctatcagtctcaaagatccaacaagccaagaattacttgaggcagtggaaagagagcggaactttaggttcaatccatctagaaatgccaccatatttcatcatccaacactgggggattttgagttacaacatttgccagttggagctagtgatgctgatcttgaagagcgcat

SEQ ID NO: 231826 - DNA, 367 bp, Glycine max
ggatgagtacacttctgagatattcatgggtggaaagaacacaattgtgttgcacaacacatgtgaggattcactgttagctgctcctattatcttggacttggtccttcttgctgagctcagcactcgaatcgagtttaaagctgaaaatgagggaaaattccactcattccacccagttgcgaccatccttagttacctgaccaaggcccctctggttccaccgggtacaccagtggtgaatgcgttgtcaaagcagcgagctatgctggaaaacatcctgagggcttgtgttggattagctcctgagaacaacatgatcctagagtacaagtgaagttcaaagtcttaagagtaacggtttggg

SEQ ID NO: 231827 - DNA, 374 bp, Glycine max
ggagtttttcaataatatctatgaactagttggagttcctgtagtcacagtgcaactcagatacaatggttgggttacagagttgcaggatctagaaaagtcaaggcgactggggaaagctgttgggttggataaccttctctatacacccgatgcagatttttcttgctttgcagaccttgcactttcatctccagaggattattacattgagggacaaggatcattgctccaatgtgttctgacgccaggagatccatacatgcccttaccaaatgacgaaattattgcaagggtagcaaaacaggttttggcactgttcccatcatctcaaggtttggaagtgacttggtcttctgttgttaaaattgggc

SEQ ID NO: 231828 - DNA, 368 bp, Glycine max
gttctttctctcgcaatcttcactacattcaccgagcatttgcattcacattgaatatggctgagactacacaatctaatgctgagttgttggagtggcctaagaaagataagcgccgcttcctgcatgttgtgtatcgtgttggtgatcttgatcgcaccattaagttttatactgaatgttttgggatgaagcttttgaggaaaagagatattccagaggagaaatatgccaatgcttttcttggatttggccctgaacaatcccattttgttgtggaattaacatacaattatggggtgacctcatatgatattggaactggatttggacattttgctatcgcaactccagatgtttacaaattg

SEQ ID NO: 231829 - DNA, 381 bp, Glycine max
cacagttagtacaaaaaagggttacttcagcttccacatatcttgaagaattgatcaatgggcaagtctgtagttgagaagctactttggatggcaattgtgtgcttggtgctgggtgtaatttccattactcccaaggcccaagcagcagtgacatgcaaccaggtggtgagcaacctcaccccatgcatttcttatgtgctcaatggtggcaaaaccgtgcctggcccttgctgcaatgggatcaagaccctctttaacctcgctcactccacaccagaccgccaaaccgtttgcaagtgcataaagaacgctgttagtgcgttccattatggcaagtccaatgtggaccgtgctgctgctcctcctaagcaatgtggg

SEQ ID NO: 231830 - DNA, 373 bp, Glycine max
  unsure (1)..(373): unsure at all n locations
aagaaacttaatcgatcatcacttcacttcactaatacatcatggcagacgagacccagaacaagtatgagagctctgaggttgaggtccaggatcgtggtgtttttgactttctcggtaagaaaaaggatgaagaagacaagcctcatcctcaggaggaggtcatcgccaccgagtttcaaaaagtcactgtctcagaccaaggagagaacaagcacagcctcttagaaaagcttcaccgatctgacagcagctctagctcttcaagtgaggaggaaggagaagatggagagaaaaggaagaagaagaagaaggaaaagaaagggctgaaagagaagatcgaggagaaaatanagggtgatcatcatcatca

SEQ ID NO: 231831 - DNA, 324 bp, Glycine max
gttctacatagcatctcctttaccaccattctagatatcagagaactttgcagctctcttaagtttttaaaaaacaccacgcaaacagcaagatggccacttccgacagtaacatgctactaaattaagttccagtttaagtgatgctcccaatccgagttgtcaatgttgacaatggtttttgagacccaaatgggcttaaagaacagctcctgcaacttcgaactgccggtgttgacggggttaagggtgaagttttgtgggggattatagaactgaaaggggctaagcactaagaatggagaacctacaagaatttggttc

SEQ ID NO: 231832 - DNA, 383 bp, Glycine max
cagcacttgacactggttgtggggttgccagttggggtgcatatctttggagcagaaatgttgttgccatgtcatttgcaccaagggacaatcatgaagcacaagtacagtttgctcttgaaaggggtgtccctgctattattggtgttttggggtccataaagttgccttatccttctagagcctttgatatggctcattgttctcgctgtttgattccttggggagcaaataatggaatttatatgatggaagttgatcgagttctaaggcctggtggttattgggtgctttcgggtcctccaatcaattggaaggctaactacaaatcctggctgagacctaaggaagaacttgaggaagagcaaagaaagattgaagag

SEQ ID NO: 231833 - DNA, 381 bp, Glycine max
ggttatttgaggttaagaaaattggagatgagtactttgcatttattgttgattgcaaagaacccaaggcttgtactgttctactaaggggtgctagtaaggatctattaaatgaagttgaaagaaacctacaggatgccatgtctgttgcaaggaacattataaaaaatccaaaacttgttcctggaggtggtgctacagagttgacagtgtcagctgccttgaaacagaagagttcatctattgagggcatagagaagtggccttatgaagctgctgccctagcttttgaagccataccacgaactttggcacaaaattgtggagtaaatgtgatccggactatgactgctctacaaggaaaacatgcaaatggggaaa

SEQ ID NO: 231834 - DNA, 469 bp, Glycine max
  unsure (1)..(469): unsure at all n locations
gagcgcccgcgaatgaattactgtgccgacagaagacaataacgtcggatgcacgcgtacgtaaactcggaattcggctcgagagaaaatgcctcgagccaaagttcgagtaccaggcgctacagcgctgaagtaatccatgccatactcccaggaaaagctcgaacgaccttcaacaaatgggtacctgtacccgaaaccgacacaggtgggtaggtagagaatacctagaggcgcgagacaactctctctaaggaactcggcaaaatagccccgtaacttcgggagaaggggtgcctcctcaaaaaaaaaaaaaaaagggcggccgccgactagtgagctcgtcgacccgggaattaattccggaccggtacctgcaggcgtaccagctttccctatagtgagtcgtattagagcttggcgtaatcatggtcatagctgtttcctgtgtgaaattgttaaccgcccn

SEQ ID NO: 231835 - DNA, 375 bp, Glycine max
ggctctcacgtgatgcagtatggtgatgtacggcttagcagtgatgttctcttccattatttgggtacagatcctgctaatgataatttcacttttgtggacgaaaactccttatggtcaccttcaaaaccagtcaaccaacgtgatgctgatctcatccatttttgggataagttccgcaaagctcctgagggttctctcaggaaaaatgcagctcagaaacaagttttggaagcaatgtctcatagaatgcatgtagacaacagtgtaaaacttattgggaagcttttatttggtattgaaaagggtccagaagtactcaacgctgttagaccggcaggatcggcacttgttgatgattggcactgccttaaa

SEQ ID NO: 231836 - DNA, 358 bp, Glycine max
ctcattaattgcaagaatggcacttcgttgcttggtgatgtccctttctgttctcttcactcttggtcttgcgagagaaagccatgccagagacgaagatttttggcatgctgtttggccaaacactcccattccaagttcattgcgagatcttctaaagcctggacctgcaagtgttgaaatcgatgatcaccctatgcaaattgaagaaacacagtacccgaaaaccttcttctataaagaagaccttcatccaggcaaaacaatgaaagtacaattcagcaagcctccctttcaacaaccatggggtgttggtacatggttaaaggaaattaaagacactactaaagaaagatat

SEQ ID NO: 231837 - DNA, 239 bp, Glycine max
acggctgtgattgtgtaattttacatctttacatacaaaatttaaagtctttgtattttgtatgtaaagatgtaaaattatgattattaggtggtgcatgtgtcgcgtcatgggccaatgttatcctctgcttttaagttggaagaggcccaactcatgtgtgatgtacggctgtgattgtgtaatttaatttgcaaaatcaaaaataacaccagagtcatatatatgcatctcttaaa

SEQ ID NO: 231838 - DNA, 377 bp, Glycine max
cttttctcccttctccccatttgctcattctcctccccattctgctcagacaccgcacagcgaacaaatccaccattcattttcctttttcgcaacagcgcaatggctcgaagatccctcccgctcctgaagcacctcctctcgcggcggatcccggcccgatccgtgacgtacatgcaccggccgggcgatgggtcgccgcggccggtgacactgatcccgggcgacgggatcgggccgatggtgactggcgcggtggagcaggtcatggaggccatgcacgcgcccgtctacttcgagaagttcgaggtccacggcaacatgaaggccgtgccgccggaggtcctcgattcgattcggaagaacaaagtctgtct

SEQ ID NO: 231839 - DNA, 377 bp, Glycine max
gcattggcacccagcagcatgaagatcaaggttgtagcaccacctgagagaaaatacagtgtctggatcggtggttctatcttggcatctcttagcaccttccagcagatgtggattgcaaaggcagaatatgacgaatctggtccatcaattgtgcacagaaagtgcttctaaactgtttcgatagatagggttattgaagggaaagactactatcatcacgatttgtctggaagcaatgcattgcagattgtaaccctttgattctagcttttgttatcctttcattttattctcttgttggagtgatcatttatttgcagaaggtgaggagagttgttttttaaaatggtccagttcttttcttatactttgat

SEQ ID NO: 231840 - DNA, 394 bp, Glycine max
ccaattcttctcttttgctttctctctccaaattcatcacaacttctctcgtacctctgcagagaagtaaacatataggagtgagagggagggagagagaaggaaagcttggtagcgatggggaaggagcaagttcaggtgctgaatgccctggacgtggcaaagacacaatggtatcatttcacagcaatcatcattgctggaatgggcttcttcactgatgcttatgatctgttctgtatatcactagtcacaaagctacttggtcgcatttactaccacgttgatggggctgcaaagcctggttcattgcctcccaatgtgtcagctgcagttaatggtgtagcttttgttggaacactttcagggcaactcttctttggctggctcggcg

SEQ ID NO: 231841 - DNA, 395 bp, Glycine max
gccaaagaagagatcagctctcttgagaaggaattttcttcatacaaagttcgtgcacatgcacttcttcaaaagaaggatgctgagctggctgctgctaaagattctgaacaactcaaagctctagaggaaactctgagagtatatttgatcagtattttgtagaagacgttgtttgagtagtgtatataaattaatcaccaattgcatccttaattttctccaggaggtggaaaatgaagtattatcaataacagaagaaagggatagagttcttcaagatcttcaatctgctatggctaatcatgagaaagagattgcagaaagagacacagcccttgaaaatgtcaagcaacagataaggagctttgaaataaagcttgactcagctaatg

SEQ ID NO: 231842 - DNA, 399 bp, Glycine max
gtgaaagtgagaaaaaataaaaatcaaagagcataatgtcagggatcattcacaagattggggagacccttcatgtgggagggcacaagaaggaggaggagcataagggtgagcaccatgctggagaatacaaaggggagcaccatggtgaacacagtagtgagtacaaaggagagcatcatggtgaacacaaagctggagagtaccatggtgagcacaagccagagcacaaagaggggttcctagacaaagtcaaggacaagatccatggtgagggcggcgccgccgagggcgagaagaagaagaaggagaagaagaagaaggagcatggccatgagcatggccatgacagcagcagcagcagtgacagtgatttaactgctgcatcacctatatatt

SEQ ID NO: 231843 - DNA, 377 bp, Glycine max
cggctcgagccagagccaaggtaggttaaacactcttcttcatcgtcgtcgcaatgggacgtgtgatccgtgcgcagcgtaagggagcaggctcggtcttcaagtcccacacgcaccaccgcaagggccctgcccgcttccggagcctggatttcggagagcgcaacggctacctgaagggtgtcgtcactgacgtcatccacgatcctggccgtggcgcgcctctcgctaaggtcgccttccgccacccgttccgctacaagaagcagaacgagctcttcatcgccgccgagggtctctacaccggccagttcatctactgcggcaagaaggccaccctcgttgtcggcaatgtgttgcctcctcgattcaatcct

SEQ ID NO: 231844 - DNA, 379 bp, Glycine max
aaagcattgaattcaaaaacttaagttcattccttgtgttttgctttcttcctcaaaaccaaacatgtcgaacacatgcggcaactgcgactgcgctgacaagactagctgcaccaagggaaacagctatggtgttattgtagagactgagaagagttacatcgagactgttgtcatggatgttccagcagctgagcatgatgggaagtgcaagtgtggcactaactgcacttgcacggactgcacctgtggccattaaggaatatgtatgaaaatgtaattgccatgtgtttggcaatacaaatatccaaataatgtaatcttcgtatgaataaatgtgtgtgctgttatcctacttcaggtctgtgtaatcatgcag

SEQ ID NO: 231845 - DNA, 379 bp, Glycine max
aatccatttactttgtgttgaattcaatatgagtcttaagggatttttcgagggtggtgtcgcttccatcgtcgcaggctgcaccactcacccactcgacctcatcaaagttcgaatgcaacttcaagaaacccacactctccgcccagcctttgcctttcacgctcccactccaatgcctcctccgccgccctccggccccatctccgtcggcctccgcatcgttcagtcggagggactcgccgctcttttctccggcgtctccgccaccgtcctccgccagacgctctactccaccacccgcatgggcctctacgacgtcctcaagcgccactggaccgaccccgaccgcggaaccatgcccctcacaagaaaaatc

SEQ ID NO: 231846 - DNA, 403 bp, Glycine max
cttaaaatatagaacacactaccctcaacatagtaaagcagctggtgcaagtgaagcaatggctcaaaccatgttgctcatgtctagtgtctctagcagttattccgtggatttgaagaaagaccttttcctccaattgcagagtcaaagtttaaggcctaagttctctcaactctcattcaacccacttccaccatcaacttcttccttttcttcaccccgtacattcacaaccctggctctcttcaaatctaagacaaaagccgctcctgctaagactaaggttacaaagccaaagcaaaaggttgaagatggtatctttggcacttctggaggatttggttttactaagcagaacgagctctttgtgggtcgtgttgctatgcttggttttgcagcatca

SEQ ID NO: 231847 - DNA, 382 bp, Glycine max
atcctctcgttttaagacacacctttgagcaggcagtcataaaaagattgatgactgatgtgccttttggtgttctactctctggaggtttggactcttcattggttgcatccgtcacttctcgctacttggccaacacaaaggctgctgagcagtggggatcaaagttacattcattctgtgtaggccttgagggctcaccagatttgaaggctgcaaaagaagttgctgactatctaggcactgtccaccatgagtttaccttcactgttcaggatggaatagatgccattgaagatgttatctaccatgttgaaacatatgatgtgactacaattagagctagcacacccatgtttctcatgtctcggaagattaaatc

SEQ ID NO: 231848 - DNA, 368 bp, Glycine max
gccagactgagaggaagagagagggagattctttgtttgctaccttctctcggaaaaatggttacgttcaggtttcaccagtaccaggtggttgggagggctcttcccacggaagcagatcagcaccccaagatctaccgaatgaagctctgggccaccaacgaggttcgcgccaagtccaagttctggtattttctgaggaaactgaaaaaggtgaagaagagcaatggccaagtgcttgccatcaacgagatttttgagaagaacccaaccaaaattaagaactatggtatatggttgcggtatcagagtaggactggttaccacaacatgtacaaggagtaccgtgacaccactctaaacggtgc

SEQ ID NO: 231849 - DNA, 362 bp, Glycine max
gagaaagatcatggtggctgtggatgagagccaagagagcatgcatgcactctcctggtgcatcaccaatcttatttccgaaaccaacaagcttgttctgctttatgtcaggccaccttctgctttctactccttggatgccgcagggtataacttttcctccgatgttgttgatgctatggaaaagtacagtatgcacttggctaattcagtcatggaaagagctgaagctgtttgcagagacttgaacgctactaatatcaatatggagagagtggttggtgtaggacatgccaagaatgtaatatgcagtgctgtcaagaaactagaggctgacaccttggtcatgggaactcatggct

SEQ ID NO: 231850 - DNA, 378 bp, Glycine max
ctaatttcaaatggaaattgctctctcataacagaattcaagaggaggaagaacaagtatataaaaactatatctacatagttatatctctctcttgagatttcaaacgtagagatatggaatggaggaagtgctacttggatgtgatattggtgcccttgggatttctaacaagcattgggtaccatttctggctatggcacaaggttcgaactcagccacacacaaccatcattggcatcaatgctagtggccgtagaaattgggttaatggcatgatgaaggacaatgacaagaaaaacattctggctgttcaatcactaaggaacacaataatgggtgctactctaatggccacagcctccatcctactctgct

SEQ ID NO: 231851 - DNA, 360 bp, Glycine max
agacattgttgaaagaatatctgattaagttctagactttggtgtaaggtgcatggtttttgggtattctagctgagcatcaagtgtttttgaccttgcaaattttttcatgatgtttcattatgccaatttctatagagatgatataattatagtttgatcacacgcttgctgttaacagcaagcccgtgttatccaaaaaaaaaaaaaaaaaaaaaaaaaaaaaaaaaaaaaaaaaaaaagggaagaaaaaaaaaaaaaaaaaacatcaaaaaggaaattaattcaggaaaggaaaaattgcaagaatacaaactttggggaggcccgaatcatattacaccttggactgggaattgt

SEQ ID NO: 231852 - DNA, 398 bp, Glycine max
cttcacttgttaatgcttcctcctgaaagttctaaactcaacgcaatggagcttagcaaagtcacgttagagatcttttcaaaattggagcagcaatggctctcgcactacgaagcatcaaccaaaacgcgcattctcagcattgacggcggaggaaccaccgccattgtcgccggcgcctccctcgtccacctcgaagaccagatccgcgcccaaacctccgatcctcacacgcaaatcgccgattacttcgacattatcgccggaaccggcattggcgcaatcctcgcctccatgatcaccgccgacgacggtttcggccggcctctgtactccgccagagacgccgtcaacttcctcgccgaaaacaaccgcgaactctaacagccgaagcgcgc

SEQ ID NO: 231853 - DNA, 403 bp, Glycine max
gaaatatcatttctcatgccaatttactgctgatctttttgcaatgaaccacacagactttatcatcaccagcaccttccaagagattgctggaagcaaggacactgttggacagtatgagagtcacactgccttcacccttccaggactttaccgtgttgttcacggtattgatccatttgatccaaagttcaacattgtctctcccggtgcagacatgggtatatacttcccatacactgaaactgagcgtaggttaacagaattccactctgacattgaagagcttctttacagctcagtggagaatgaggaacacatatgcgtattgaaggaccgcaacaaaccaataatcttcaccatggcaaggcttgaccgtgtgaagaacaacacggggcttgtc

SEQ ID NO: 231854 - DNA, 375 bp, Glycine max
gcaccacgtatccctgagaaaagagaggaaccacactctctaagccaaagcaaaagcagcagcagcagcaatggttaaagacacaaagcctttagcctatgctgccaataatggataccaacaaaagggttcttcttttgattttgatcctagcgctcctccaccgtttaagattgcagaaatcagagcttcaataccaaaacattgctgggtcaagaatccatggagatccctcagttatgttctcagggatgtgcttgtaattgctgcattggtggctgcagcaattcacttcgacaactggcttctctggctaatctattgccccattcaaggcacaatgttctgggctctctttgttcttggacatgattg

SEQ ID NO: 231855 - DNA, 373 bp, Glycine max
gttcattgctcaattgtttccctcacaactcataacctctttcccatttaacctttgaaaaaattccatactgtaacaacagatcaccatggctctatcacgtttgtcccaccgcagcatcggatccactctcacaaaacccttctccgccgccgccgcctcctcccgttcgatctccacctcggacacccccttaacaatcgagacctctgtccccttcaccgcgcacaactgcgaccccccgtcacgcgcggtcgcgacctcctcctcggagctcctcaccttcttccgcgacatggccctgatgcggcgcatggagatcgccgctgactccctctacaaggccaagctcatccgcggcttctgccaactc

SEQ ID NO: 231856 - DNA, 352 bp, Glycine max
agtttaccgtatgttattatagtttccaaaggcacgcagcgagtttaggcgcggcgggatcatcacgagattgcaaaatgaagttcaacattgcaaatcccaccactgggtgccagaagaagctggaaatcgatgacgacctgaagcttcgggcattttgggacaagaggatctcccaggaggtccttggtgacgccctgggtgaggagtttaaaggatatgttttcaaaatcactggtgggtgtgacaaacaaggattcccaatgaagcagggagtgttgacccctggtcgtgttcgactcttgctccatagaggaactccttgtttccgtggatatggaaggcgcaatgg

SEQ ID NO: 231857 - DNA, 373 bp, Glycine max
tggtatcccccttaatgcaaccgattacaaggtggcctttctatgccttcttaggtggggccatgttctgcttgctagccagcagcacatgccacctccttacttgccactcacagcgcctttcctacatcatgctcagaattgactatgctgggattgctgcattgattgcaacttcattttaccctcctgtgtattactcatttatgtgcaacccctttttttgctacctctacttaggcttcataacattaatggggattgctactattgtcttctctcttctcccatttttccaaaagtccgagttcaggaagtaccgcgcttccctcttctttttaatgggattttctggtgtggcgcccataataca

SEQ ID NO: 231858 - DNA, 374 bp, Glycine max
gccggtgatcggaatcctgacccaccccggcgacggtgcctctggccggctcagcaacgccaccggggtttcttacatcgccgcctcctacgttaaattcgtggagtccggtggtgctagagttattccccttatctacaatgagtcacctgagaaccttaacaagaagctcgatttggtcaatggagtgctcttcactggtgggtgggctgtttctggtccatatttggatactcttggaaacatttttaagaaagctttagagaaaaatgatgctggagaccatttcccagtaattgccttcaacttaggtggaaacctcgtaataaggatcgtaagcgagcaaactgatattcttgaaccatttactgcgt

SEQ ID NO: 231859 - DNA, 391 bp, Glycine max
agcactcaccctcattaccaacacgaaagcatagccaaaaccttttttcgaagtctctgattttcctaatggctccggcaaaggcagagaagaagccggcggagaagaagccagcggcggagaaggcaccggcggagaagaagccgaaggcggagaagaagatctcgaaggaaggagggagcgagaagaagaagaagcgcacgaagaagagcgtggagacctacaagatctacatcttcaaggtcctcaagcaggttcaccccgacattggtatttccagcaaggccatgggcatcatgaacagcttcatcaacgacatcttcgagaagctcgcccaggaagcgtcgcgtttggctcgctacaacaagaagcccaccatcacctcgaggga

SEQ ID NO: 231860 - DNA, 368 bp, Glycine max
ggaaagcataatcaaatcaaccatggctaccctcattgctcccatcaccttttcgcctggtttagatgcagaagctcttagaaaagctttccaaggatgggggactgatgagaagaccgttatagcaatattgggtcacagaaatgttcatcagaggcaacaaatcagaaagatttatgaggaaatttaccaagaggacctcatcaaacgcctagagtctgagctctctggtgactttgagagagctgtgtaccgttggatgctggaacctgcagatcgtgatgctgttttggccaatgttgccatcaagaatggcagcaaaggttaccacgtgattgtggaaattgcttgtgtgctttcagctgaag

SEQ ID NO: 231861 - DNA, 404 bp, Glycine max
  unsure (1)..(404): unsure at all n locations
attcttctctatgtcactcaatgaaaaggaaaaagtaggacctcccaatccatttgggtatggtagcaagaaaattggacacaatggggacgttggttggattgagtaccttcttctcaacaccaatcaagaacacaacttctctgtttatggcaaaaaccctgagaaattcaggtgtctgttgaacagttacatgtcttctgtgaggaagatggcatgtgagattcttgagttgatggcagaagggttgaagattcagcaaaaggatgtgtttagcaagcttctaatggataaacaaagtgactctattttcagggtgaatcattacgctgcttgtcctgaaatgactctgaatgatcagaacttgattgggtttggagaacacacaganccacaaatcatct

SEQ ID NO: 231862 - DNA, 373 bp, Glycine max
aagaaaaaaggctccaccgaaatcaatttcccacagaatcaaacaaatcgttggagttggaaaacaaaacaagagaaaatgggtggacgcaagtgtttgttaacgttggtgttgagtttggtgttgatgatgagtatggcagaggcgcaatctggtactagcgcagactgcgcccaggagctaattccatgcctggactaccttaatggcacgatcaacccaccaagctcctgctgcgaccctctgaaacgaacagtccaaaacgaactcgcctgcctctgtaacatctacttctcccctggccttcttcaaagcgtcaatgtcactgtcgatgaggctctcggcctcagtcgccgctgcggcgtcactagcg

SEQ ID NO: 231863 - DNA, 365 bp, Glycine max
ctcgagccgctcgagccgattcggctcgagatttacagcaagtctttcaaagccgattatgcattccccgaatggatttcccctgcggccaaaaacttgatctccaatttactcgttgtggacccgcaaaagaggtattccattccagacatcatgaaggacccttggtttcaaattggcttcttgaggcccattgcgttttccatgaaggagtctgcgcttgaagataacattgatttcagcggggatgatgttcctagtcctggtagtgatgatggtaatagcagcagcaacaacgaggatggggagttgacgggggctaagcctgctcgtccgtcttacaacgcttttgagataatctcgtc

SEQ ID NO: 231864 - DNA, 371 bp, Glycine max
aatatatcatcaattataagcatgggtttgtggaacacaacgaatgcagtgtcttgccgctttcacaagtttggtgatgaccaaaagaatctggtcttccaaggtgatgccacgtcttcttccaggggcatagaactcacaaagttagacggtggaggaaaaccagtgggtggcagtgtggggagagtgttatactcttctccagtgcacctttgggaaagctctacagtggtcgcaagctttgaaaccgacttcaccttttccatctcatcagactctactactccaggtgatggccttgccttcttcattgcaccatttgacactaaaatccctccaaactctggtgggagcaaccttggactcttccc

SEQ ID NO: 231865 - DNA, 377 bp, Glycine max
caggcatcatgcaataacaaacatgttacgtgaagatactgcttggcaccctgtttggaaggacgagtttgaatctactccacttttgaggaaagcaataatagacggatatggtccacttcgatgttggatgtctatagctcactggttgatgtggcactttgatttgaagaagttcagaccaaatgaagtaccaagggtgaagataagtttggcttgtgtttttgcctttatagcaattggatggccattaaatatttacaagactggaatcatgggatggataaaattctggttgatgccatggctgggctaacacttctggatgagtacgtttaccatggtacatcatactgcatcgcatataccattcaaat

SEQ ID NO: 231866 - DNA, 364 bp, Glycine max
attaatgtgtgtttgtcacgagacccatagtgctgccaaattatagtaactctctttctctatctgaagaagaagaagttctgaagaagcatgtgtggaggtgctatcatctcagacttcattggtgtgaagcgtggccgcaacctcgccgcgcaggaactgtggtccgagcttgaccctttctctgacctccttggcttcgataccaccaccagcaccagcaaccaaccaccccttccagacaaaaaagtggtgtcatcatgtgagaagaagaagaagaaaagtgtgagtgcagaaaagaagagtggtgggcgagctcggaagaacgtgtatagatgaatcatgcaaaagccgtggggcaagt

SEQ ID NO: 231867 - DNA, 354 bp, Glycine max
tggcaacaggtgcggctgtggttcaaaaataatcagatattttcagcaggtcagaagatgagatatctttacccagtcaattataagcatgggtttgtggaacacaacgaatgcagtgtcttgccgctttcacaagtttggtgatgaccaaaagaatctggtcttccaaggtgatgccacgtcttcttccaggggcatagaactcacaaagttagacggtggaggaaaaccagtgggtggcagtgtggggagagtgttatactcttctccagtgcacctttgggaaagctctacagtggtcgcaagctttgaaaccgacttcaccttttccatctcatcagactctactactcc

SEQ ID NO: 231868 - DNA, 381 bp, Glycine max
ggtgtttcatttgtgaaactaacaacaacacaaggccatcatcatggcagctgcttccccaatggcaagccaactcaagtccaccttcactaggactcttgtagctcccaagggcctctctgcctcttcaccacttcacctcgtgccttctagaaggcaatttagcttcactgttaaggccatccaatcagagaagccaacctatcaagtgattcagccaatcaacggtgacccattcattggaagcctggaaaccccagttacatccagccctttgatcgcatggtacttgtccaacctgcccgcatacagaaccgcagtgagcccactactaagagggatcgaggtgggcctggcccacggataccttctggtgggccc

SEQ ID NO: 231869 - DNA, 373 bp, Glycine max
gcaaatgcgggtctttgcaccatctccatctgggtttcggaaggtgatattggcaactaatattgctgagacatcagtaacaattcccggaatcaagtatgtaattgatcctggatttgttaaagcacgttcttatgaccctggaaaaggcatggaatccttgattataatacctacatccaagtcccaagctctgcaaagaagtgggcgtgcagggcgtgaaggacctggaaaatgcttccgtctatatcctgaaagagaatttgagaaacttgaggactcaacaatgccagagattaagcgttgcaacctttctaatgtcattttgcagcttaaggctttgggtgttgatgacatactaaggtttgatttc

SEQ ID NO: 231870 - DNA, 368 bp, Glycine max
attctttctcaaaacacttgctccattattattttctcattcattcgttcatcatggttcggttcagcaacaacgtgatcggactcctgaacttcctgaccttcctcctctccatcccgatcctggtggccggagtgtggctgagcaagcagggcgccaccgagtgcgagcggtggctggagaagccggtgatcgcactcggcgtcttcctcatgctcgtctcactcgccggcctcgtcggcgcgtgctgtcgcgtgtcgtggctcctctggctctacctcctcgtcatgttcgtcctcatcgttcttctcttcgccttcaccatcttcgccttcgttgtcaccaacaagggcgctggcgaagttgtg

SEQ ID NO: 231871 - DNA, 378 bp, Glycine max
aaaggagagtgcaataactcgttgtacattcctagtgtgtgggagagacatggctaagatgtgtgttttggtgttggttcttgctctggctgtggccacaagtgccagaaacgttcccaaccccaaggatgctggtcttaaggaccagaagaacttcatcagctatggtggagttggtggttattccgggattgggaacaatggactgccttttggaggagctggtgccggaataggtggtggttttggcggaggtggtggacttggtggtggcctcggcggtcctaccggtgggatcggagggtttggcggtaccggtagcggtgtccgtggcggtattggtggtggcgttggaactggcgttggtggtggcaaccg

SEQ ID NO: 231872 - DNA, 369 bp, Glycine max
  unsure (1)..(369): unsure at all n locations
gagatttgaagtttaaaccttcaaattaatcaaaccattttaatttgcctatagattctgagtcactgctgctatggcgctacgcgtacttcttgtgttggggatgttgctgatgttgtgccttgttaaggtttcatctgatccaaagatagaagaagaaatactggaagcagaagaagaactgcagtttcccgataacgagccacttatcgtgagagacgcgaacagaaggctaatgcaagatatggattgtggtgggttgtgcaagacgaggtgcagtgcacattcgaggcccaacttgtgcactanggcgtgtggcacgtgctgtgtgaggtgcaagtgtgtcccaacttggtacatctggaaata

SEQ ID NO: 231873 - DNA, 378 bp, Glycine max
ttttgataggacgaccctttggtgtttggatcttcaagaaagagagacccttgggatttcgtcaccatgagtctcttcggtcttggaaacagaaaccaaaaaacatttcgtccaaaaaagagtgctccatctggaagtaagggtgctcaacttcaaaaacacatcgatgccacgttgggtagtgggaacttgagggaggctgttaaactgcctcccggtgaagatattaatgaatggctagctgtaaacaccgtggacttctttaatcaagtgaatatcctgtttggtactcttacagaattctgcacgccaagtaactgcccttcaatgactgcaagaccaaagtaatgaattaccaatgggctgatggtgttacaa

SEQ ID NO: 231874 - DNA, 342 bp, Glycine max
gtaaaatctacaaacatcttgttggatgaaaagttacaagcaaagttatctgattttggtctatccaaaattatcccaattgatgggggaactcatgtgtcaactgttgttgctggtactccaggttatctagatcctgagtactacatatccaatagattaacacagaaaagtgacatttatggctttggagttgttcttctagaaataatcacttgtcaaccagtaatagcatggaatgaagaaaggactcacataattcaatgggttagatccctgattgggataggggatatcaagggcattgttgactcaaggttagaaggagattttgacattaac

SEQ ID NO: 231875 - DNA, 324 bp, Glycine max
cttggtttcaatgaaccatgacactcaatcctgcatggaccccaatgtgatggaggcgaacgtggtggtgagttcttgtggccatgatggactcattggcgccacgtgggtgaagaggctcaagatcattgggttgattgatagtgtgccagggatgaaagcccttgacatgatcacggcagaggatgccattgtgaagctcactagggaggttgtgcctggcatgattgtgactgggatggatgttgctgacattgatggtgctccatcgattggtccaacatgtggagcgatgatgatgtcagggcagacatcaggccatct

SEQ ID NO: 231876 - DNA, 452 bp, Glycine max
cgatagaatggcgtgacactatataggagatatgagctcgcactgcacgcgtacgtaagctcggaattcggctcgagatcttcactcagaccaaccttctctgagaaggtggacaccaccccattcgggactgtagttgagaatttctatatgactgatgccattacaagggcatcaaagataatggcacaatgcactgccatgctgttgaagaagtgaaacatggattttttattttttggtttcaataaagaagattcacgtttttcccttcctggccatgcaagattgcttgccaaaaacttattggatgttggaagtatccaatacattaaaactaggatttatctgttccatttgtacaaaatcaataaaagggcggccgccgactaatgagctcgtcgacccgggaattaactcccgaacgggttcctcaggcgtacaacctttcc

SEQ ID NO: 231877 - DNA, 376 bp, Glycine max
ctcgagccgattcggctcgaggggagttgttgaatcgggaagcaaaaaaaatgagaatccatcacatagcatgcctccaagacaattattcctatctgatcgtagacgagagcacgaaggaagccgcggcggtggacccggtcgaaccggagaaggttcttgaagttgccagctcgcacggcctcactctcaaattcgtcctcaccacccaccatcactgggatcatgctggtggaaacgacaagataaagcagctggtgccaggaatcaaagtctatggtggttccattgaaaacgtcaagggttgcactgacaaagttgaaaacgggtgataagtctctcttggagctgaaatcactatattggcccttcacac

SEQ ID NO: 231878 - DNA, 355 bp, Glycine max
ggaggcgactatctgtttgcttttcgaatgataatggttctatttcgacgagaattctctttttgtgattcattgtacctttgggaggatgttgatgacaaatcagaggaatctaaaggaagattaaagtcattgcgccactatggaaagtacgagagagaaaatatgaaaaatggaggaaagaatggtgaagatcctccccttcccatatctgtttttcttgttgctagtgtgcttaaagacaaaagcacaatgttactccagcaagcgcgaggcttggatgatgttgtcaagatattgaatgatgtaaatggaaatcttgatgccaaaaaagcttgtgtggctgcattaaaac

SEQ ID NO: 231879 - DNA, 343 bp, Glycine max
ctcgaatcgagtttaaagctgaaaatgagggaaaattccactcattccacccagttgcgaccatccttagttacctgaccaaggcccctctggttccaccgggtacaccagtggtgaatgcgttgtcaaagcagcgagctatgctggaaaacatcctgagggcttgtgttggattagctcctgagaacaacatgatcctagagtacaagtgaagttcaaagtcttaagagtaacggtttgggatagtgtagttgaatgtgatcaaaacttaactcatatcccatacccctcttttctgttatatatttctggcaaatgtgaaatttgaagatcgttgaatctc

SEQ ID NO: 231880 - DNA, 379 bp, Glycine max
caatatattccattctctctgtgtatttccctacctctcccttcaagatgcagatcttcgtcaagaccctcaccggcaagaccatcacccttgaggtggaaagctctgacaccatcgacaacgtcaaggccaagatccaggacaaggaaggaatccccccggaccagcaacgtctcattttcgccggaaagcaacttgaggacggccgtacccttgctgactacaacattcagaaggagagtactcttcacctcgtcctccgtctccgtggtggcatgcagatcttcgttaagacactcaccggcaagaccataaccctagaggttgaaagctccgacaacaaccaataacttcaaggccaagatccaggacaaggagg

SEQ ID NO: 231881 - DNA, 362 bp, Glycine max
gctctgcgagatcttcattcgccgattttacaagatgagtaagcttcagagtgatgctttgcgtgaagccatttcaggaagcatggccgattccagtgagaagaatcgcaaatttgtggagaccatcgaactccatatcgggttgagaaactacgatccacagaaggacaagcgtttcagtggctctgtcaagctgccccacatgcctcgccccaagatgaaaatttgcatgcttggtgatgctcagcatgttgaagaggcggataagatatgactggactggatggatgtggaagccctgaagaagctaaacaaaactaagaagttggtgaagaaactagctaaaaaataccatgcccttt

SEQ ID NO: 231882 - DNA, 363 bp, Glycine max
aactcaaacgaatacgttttctctttctcttcaatttcacccttattagcatagcatattcatttccctttcttgaatcgttcttaactgcgagaggggatatcagagaagttgattggcctcccattaataacagatctgaatgatctgatggagtctaaaggtgggaagaagaagtcgtctagtagtaagtcctttttgtacgaagctcctctcgattacatcattgaagacgttcgaccacacggtggaatcaagaagttcagatctgctgcttactccaactgcatccgcaagccatcctgagattccctaggtcgtgtgaggacgtagcccccttagtcctgcatctgctatattttt

SEQ ID NO: 231883 - DNA, 346 bp, Glycine max
gtttattggacaaatatcaaaattatgtcgtggtggaggacgtggaaagccaaattttgctcatgctggtgcgaggaaccctgaaaatttggcaagtgcgacttcataaagctcggtcagagcttatagccactctatgtgaaaaagggaattgacattaagtacacttaacaaatagatcttcttatgctaaatcagcagagtatattgattctctgttgtcgaacaattcatcactaaacaattcacaagcaatcggggcggaaactgctgaagttttaacgagttttcttgcaattccagggggcatgtacttgaattttcaaaatactatagagcatttgtt

SEQ ID NO: 231884 - DNA, 340 bp, Glycine max
ctttagtgtggtctaaagaagtggaactctattcaactaatcagaattgcgtgaagatgctagttggaaataaagttgatagagattctgaaagggttgtgagcaaagaagagggtttagcacttgccgaggagttgggatgtctgttttttgaatgtagtgccaaaactcgagaaaatgtggagcggtgcttcgaggaacttgcactaaagataatggaagttcctagtcttttggaagaaggatctacagcagttaaaaggaatattctaaagcaacaacaacaaccccaagcatccgaatttggtggttgttgctcttaattgctgcaatgtgaaca

SEQ ID NO: 231885 - DNA, 322 bp, Glycine max
gtggagagagataattcaatggtctcgttgatgtctataagaagacattggtatctgatggtgttgccgggctctaccgtggttacaatatctcaggtgttggaatcatcgtgtatcgtggtctgtactttggattgtacgattctgttaaaccagttgtcctcacagggtcattgcaggatagcttttctgccagctttgcccatggatggttcatcacctatcgtgcaggtcgtgcatcagatccactacacactgttagaagatgattgatgatgacctctggtgaagctgtccagtacaagatctccttggatgcatt

SEQ ID NO: 231886 - DNA, 352 bp, Glycine max
aatgacttgggagtgaagttcccatttaaccaaccaatggaagatatacaacagtttgtggaatgctgatgactgggccacaaggggtggtttggagaaaacagattggtccaaagcccccttcatagcctcctacaagggcttccacattgatggttgtgaggcctcagtcaatgccaagttctgtgacacacaaggcaagacgtggtgggatcaacctgagtttcgtgatcatgatgctgctcagtggcaaaaactctcctgggttcgccagaaatacaccatctacaactactgtgctgaccgcaaacgctaccctcaagtctctccagagtgtgctagagaccgttat

SEQ ID NO: 231887 - DNA, 333 bp, Glycine max
cctatgtgctatatggtggagccacggttcctgcacagtgctgcaatgggatcaggaacctctatggcatggctcagaccaaagcatatcgccaagctgtttgcaactgcatcaagaacgctgttaggaacagtggcttcacctactctcacttcaatctcaaccttgctgctaaccttcccaagaactgtggggttaacattccctaccagatcagccccgacacagactgcaccagggtgcagtgaggttggtgcatgatgtgtatgttagcagtgttagaataagaggccacgtgacacgaacagggaatggctagaaattgctttttta

SEQ ID NO: 231888 - DNA, 348 bp, Glycine max
aaaaatatgaaaatgatgtacattggagcacttgttgtactcattgcattacgcttcctcaattgcgacgaggcagaagacacgggaagccttgtgcctgcaatcataacttttggtgactcagccgtggatgtagggaataatgactatcttcccacccttttcaaggctgattaccctccttatgggagggactttgctaaccaccaacctactgggaggttctgcaatggcaaactagctactgattttactgctgacactttgggtattaagacctatgctccagcatatcttatgccacaggcatcagggaaaaacctccttattggagcacactttgcttct

SEQ ID NO: 231889 - DNA, 370 bp, Glycine max
gctgagtttggaattgtgactcagcaagattcttcttcttcgatggaccataaagatcagaatttttcctcgcaggaagcagacaaagaagaaactgaggagccccaggaagaagaagaatcttgctgagtttggaattgtgactcagtgtatagctccgacaagggtcaatgaccaatatttgactaatgttctgttgaaaatcaatgctaagcttggtggtctgaactcaatgttaggcgttgagcattcgccttctattcctattgtgtctagagcgcgaaccatcattattggcatggatgtgtctcatggttcgccagggcaaacagatattccttcaattgctgcggtggtcagctctagagaa

SEQ ID NO: 231890 - DNA, 357 bp, Glycine max
ggaaaatgtttcttattcaaaggaaaggaaaacacctaacaagcttggttggtaagttatctacaatctgcatcatggaaggtgttattctgagaagggtcattccttcggataacagttgcctcttcaatgctgttggctatgttatggatcatgacaaaaagaaagctgctgagttgagacaggttatagcagcatcagtagcaagtgatccacagaaatattgtgaagcatttcttgggaagccaaacacagagtattgtaactggattcttgactcatagaagtggggaggtgcaattgaactttcaatattagcagattattatggacgttaaattgcagcatatgatattc

SEQ ID NO: 231891 - DNA, 361 bp, Glycine max
tgcaacatgtactgcttggattgtatgaacggtgctctctgctctctctgcctcgcttaccataaagatcatcgtgctattcagataaggaggtcctcataccatgatgtgattagggtgaatgagattcagaaggtgttggacatcacaggggtccaaacctacattatcaacagcgcgagggttgttttcttgaatgagaggccgcagccaaggcctggtaaaggtgtcaccaacacttgtgaagtctgcgagcgtagccttcttgattcctaccgattctgttctctaggttgtaagattgttgggacttcaaggaacttcctgaagaaaaagtcagcggcaatggtatcagactcag

SEQ ID NO: 231892 - DNA, 376 bp, Glycine max
gtcttttcatatagatatcccttcaacacaacataggtcatcgaaaggatctcgaagacccaccaacgcacgaaagccgggatctttcagaaaatggattcctattcgaagggtgcataaccgcatggataagctcacactaacccgtcaatttgggatccaattcggttccttaggaggtatcgggaaggaattttggaatgtaataatatcgattcatacagatacagaagaaagggttctctattgattcaaacgctctacctacgagatagggatagagaaagaggaaaaaaccgaggatttcacatagtacttttggtcgaaaaatcgatctgatttttttcgtacttttcgctcaatgatgaaatgggtc

SEQ ID NO: 231893 - DNA, 390 bp, Glycine max
  unsure (1)..(390): unsure at all n locations
gagatttgaagtttaaaccttcaaattaatcaaaccattttaatttgcctatagattctgagtcactgctgctatggcgctacgcgtacttcttgtgttggggatgttgctgatgttgtgccttgttaaggtttcatctgatccaaagatagaagaagaaatactggaagcagaagaagaactgcagtttcccgataacgagccacttatcgtgagagacgcgaacagaaggctaatgcaagatatggattgtggtgggttgtgcaagacgaggtgcagtgcacattcgaggcccaacttgtgcactanggcgtgtggcacgtgctgtgtgaggtgcaagtgtgtcncacctggtacatctggaaatagggaactatgtggaacctgcta

SEQ ID NO: 231894 - DNA, 476 bp, Glycine max
  unsure (1)..(476): unsure at all n locations
gagttgaatcangttgccatagcgaagagatatgacgtcgcatgcacgcgtacgttagctccgaattcggctcgaaggaagttgagtagttcttcatcatagtcttaaacattaaaccttagcaaaactcaacaatgctagacatcaaaggctacctcgtactcttcttcctatggttcatatcaaccattctgatacgttccatcttcaagaaaccacagcgtctaagactcccaccgggtcctccaatttcaatacccttgctgggacacgcgccatatctccgttcactgctccaccaagcattgtacaagctatcactgcgctatggacccttgatccacgtcatgatcggttcgaagcacgtggtggtggcgtcgtcggcggagacggccaagcagatcctcaaaacctcggaggaggcattctgcaaccgtcccttaatgataaccaacgaaaagcctaacttacggcgc

SEQ ID NO: 231895 - DNA, 469 bp, Glycine max
gctaggttgccatggcgaagacaatgaagtcgcatgcaggcgtacgtaagctcggaattcggctcgagcacaaattcataatatatatatatatatatatatatatatatatatatatatatatgtatgtagtgctccttctccattttctatctatcgtcaacgttagtgctttgtttaggtgaactaattcggagaccttgcaagacttcatcaatggctgtcaaagtttatattgtgtactactccatgtatgggcatgttgagaaactagcagaataaataaagaaaggggcttcctctgtggaaggtgttgaggccaagttatggcaggtacctgacacactgctggatgaggtgcttggtaagataagtgcaccacccaagagtgacgtatcagtcattacccccaatgaactatccgaggctgaagggtttggtaatcgggcttctcaaacaaggtttgggg

SEQ ID NO: 231896 - DNA, 375 bp, Glycine max
ctcatcctcttctttctctctctaccattgccatggatccctacaagcaccggccatccagcgccttcaattctcccttctggactacaaattctggtgctcctatttggaacaacaactcctctttaaccgttggagctagaggtccaattctgctggaggattatcatcttgtggagaagcttgcaaattttgatagggaacgtatcccagaacgtgttgtccatgccaggggcgctagtgcaaagggtttctttgaggtcacccatgacatttctcacctgacatgtgcagatttccttcgagcccctggagttcagacgcctgtaattgttcgtttctcaactgtcattcatgagcgtggtagccctgaaa

SEQ ID NO: 231897 - DNA, 365 bp, Glycine max
tactggtactgttgtcggatcgaaaaccctaaattgaattcgaatacacaacatgcagcaggggggaggatctgagacggaagtaacatgggaagaccagcagaacatcaacaaattcggaaggttgaataatcgctttcacgagcttgaggatgagatcaaaatcgcaaaggaaacaaatgataatttggaggatgcaagcaacgagttgattctcacagatgaagaggtcattcggtttcaaatacgagaggtttttgctcatgtgccaaacgatgaagttgagaacaggatagaacagataaaagaggtgacaagccagaaattagcaaaacttgaagaggagaaagaatctattcttgctc

SEQ ID NO: 231898 - DNA, 391 bp, Glycine max
ttttgataggacgaccctttggtgtttggatcttcaagaaagagagacccttgggatttcgtcaccatgagtctcttcggtcttggaaacagaaaccaaaaaacatttcgtccaaaaaagagtgctccatctggaagtaagggtgctcaacttcaaaaacacatcgatgccacgttgggtagtgggaacttgagggaggctgttaaactgcctcccggtgaagatattaatgaatggctagctgtaaacaccgtggacttctttaatcaagtgaatatcctgtttggtactcttacagaattctgcacgccaagtaactgcccttcaatgactgcaggaccaaagtatgagtatcgatgggctgatggtgttactataaagaaaccaatag

SEQ ID NO: 231899 - DNA, 387 bp, Glycine max
gtaaaatctacaaacatcttgttggatgaaaagttacaagcaaagttatctgattttggtctatccaaaattatcccaattgatgggggaactcatgtgtcaactgttgttgctggtactccaggttatctagatcctgagtactacatatccaatagattaacacagaaaagtgacatttatggctttggagttgttcttctagaaataatcacttgtcaaccagtaatagcatggaatgaagaaaggactcacataattcaatgggttagatccctgattgggataggggatatcaagggcattgttgactcaaggttagaaggagattttgacattaactcagcttggaaagccgtagaaatagcaatggcgtgtgtttcccta

SEQ ID NO: 231900 - DNA, 386 bp, Glycine max
cttggtttcagtgaaccatgacactcaatcctgcatggaccccaatgtgatggaggctaaggtggtggtgagttcttgtggccatgatggaccctttggcgccactggggtgaagatgctcaagagcattgggttgattgatactgtgccagggatgaaagcccttgacatgatcatggcagaggatgccattgtgaagctcactagggaggttgtgcctggcatgattgttactgggatggaagttgctgacattgattgtgctccaacgatgggtccaacatttggagcgatgacgatgtcagggcagacatcagcccatctggctttgagatcattgtgacttccccatgctttggattctgtacgataccttcatcttgagc

SEQ ID NO: 231901 - DNA, 369 bp, Glycine max
ctcgagccgattcggctcgaggtctgctgttagatctgtacccgcctagccattgatttggaaaagtccaacttcaaggatgagtaagcttcagagtgatgctctaagagaagctatctcaggaatcatggctgattccaaggaaaagaacaggaaatttgtggagaccattgaactccaaattgggttgaaaaattatgatccccagaaggacaagcgtttcagtggctctgttaagttgcctcatattcctcgccccaagatgaagatttgtatgcttggagatgcccagcacgttgaggaggctgagaagataggattggactacatggatgttgaggccttgaagaagcttaacacaaacaaaaa

SEQ ID NO: 231902 - DNA, 372 bp, Glycine max
ctcgagccgattcggctcgaggctgaatcgttcggtgcccgttgatgcactgcaaaggataatgatgcgagcacctcaactatcggatttgggtattggatcacttgtccatgatccagaatcggaggcctacataaagcttaagaataccattctcaagtgcaagtccataaccagtttgtctgggtttttggaagttgctcctcattgtcttgcagctatatatcctatttgcccgaacttaacatctttgaacttgagctatgcagcaggcattcagggaagtgctctggtaaaactaattcatcactgtgttaaacttcagcgcttatggataatggattgcattggagacaaaggactaggtgttgt

SEQ ID NO: 231903 - DNA, 372 bp, Glycine max
agaaagataaagcattccatagcctcccataaaaatgaagaatactatcttctctgctctctttctactttgtgccttcaccacctcatacctaccttcaaccaccgcggtggtcgataccgacggtgatattcttcagaatcctggcacatactttatcttgtccgtttttcgacccggcggcggagtagaattcgccgccactggaaacgaaacttgccctctcactgtcgtgcatactctcttcgggaggggctttccagcaatattatcgtcccggttacgaatccctttcatcggcgaacgacaactcttcagcatcctgttccgtattgtgccatggtgcgccaccactccttctaagtggaccat

SEQ ID NO: 231904 - DNA, 340 bp, Glycine max
aaaacatctcaatgggttcttcttctattacaacatcgcccgcaaccatgaccatggctgcgatcgtgctcctgttcacggtctttgccgtttcctccgccctagacatgtcgataatctcgtacgacagcgcccacgcggacaaggccgccacgttgcgcaccgaggaggagctgatgtccatgtacgagcagtggctcgtgaagcacgggaaggtgtacaacgcgctcggcgagaaggagaagcgcttccagatcttcaaggacaacctgcgattcatctacgaccacaactccgcggaggaccgaacctacaagctcggactgaaccggttcgctga

SEQ ID NO: 231905 - DNA, 460 bp, Glycine max
acaatcatgctgccatatagcacaatatgacgtcgcatgcacgcgtaagtaagctcggaattcggctcgagatcttcactcagaccaaccttctctgagaaggtggacaccaccccattcgggactgtagttgagaatttctatatgactgatgccattacaagggcatcaaagataatggcacaatgcagtgccatgctgttgaagaagtgaaacatggattttttatttttcggtttcaatcaagaacattcacgtttttcccttcctggccatgcaagattgcttgccaacagcttattggatgttggaagtatccaatagattaaaactatgatttatctgttctatttgtaaaaaactgatacaagggctgcaaccgaccaatgagctcgtcgacccgggaactagttccggaccggttcccgcatgtcttgcagctttccctctcttaagtcgt

SEQ ID NO: 231906 - DNA, 388 bp, Glycine max
ctcgagccgattcggctcgaggggagttgttgaatcgggaagcaaaaaaaatgagaatccatcacatagcatgcctccaagacaattattcctatctgatcgtagacgagagcacgaaggaagccgcggcggtggacccggtcgaaccggagaaggttcttgaagttgccagctcgcacggcctcactctcaaattcgtcctcaccacccaccatcactgggatcatgctggtggaaacgacaagataaagcagctggtgccaggaatcaaagtctatggtggttccattgaaaacgtcaagggttgcactgacaaagttgaaaacggtgataaggtctctcttggagctgaaatcactatattggcccttcacactccttgccacac

SEQ ID NO: 231907 - DNA, 368 bp, Glycine max
agaaaaactactcgtcgtggttcctcaaaatacatggaaaagcaactagcattcacagggttgttgagcaataaagctgaagaaaaccctgatttctttaactggaacagagttaaagtacggtactgtgatggagcatctttcagtggagatagtcaaaacgaggttgcacagcttcaatttcgaggacaaaaaatatggcaagctgcaatgcaggaattattgttcaagggaatgcagaaggccaaccaggcccttttgtctggatgctctgcaggtggtctggcatctataatacattgtgatgagttccggagcttgtttcctacatctaccaaagtgaaatgtttgagtgacgccgggttttt

SEQ ID NO: 231908 - DNA, 342 bp, Glycine max
attgattccaagtggctcccgccgagcttgaagcaatgttaagtgctcaacaaggcatatccgatgctgctgttgttcgcatgagagagtaatctgcacgggaaagtcaagtttcatttgatgtaatagtcaaatggctctgatatagccgacgatcatatcatgaactacatttcacaaccaggtggttttttacgagtagaatatgtaaagttttcttcacggactctattccttagacaccctcaggtacggattcgagtatcaggtattatctgcgagacttaaggaatgtttagtagtgggtatttacgtccaagtatgatacacacgaacatcgtg

SEQ ID NO: 231909 - DNA, 387 bp, Glycine max
ggaggcgactatctgtttgcttttcgaatgataatggttctatttcgacgagaattctctttttgtgattcattgtacctttgggaggatgttgatgacaaatcagaggaatctaaaggaagattaaagtcattgcgccactatggaaagtacgagagagaaaatatgaaaaatggaggaaagaatggtgaagatcctccccttcccatatctgtttttcttgttgctagtgtgcttaaagacaaaagcacaatgttactccagcaagcgcgaggcttggatgatgttgtcaagatattgaatgatgtaaatggaaatcttgatgccaaaaaagcttgtgtggctgcattaaaacttcacaagaaatatttgaaaaaggccaagaat

SEQ ID NO: 231910 - DNA, 379 bp, Glycine max
cccccaccgagtcaccaaccatggacgttaagtttggcaccacattaatagttattttctccgtaatgtggctcatgagggtgaatgccattgacccttgtgcctctcaaccggataattcggacctcaacgtgattcccatctacagcaaatgctcaccgttcaaaccacccaaggcagacacatgggacaacagaattataaacatggcctcaaaagacccagtccgagtgaaatacttgtccaccttagtgagtcaaaagacagtctccacggccccaatcgcttcgggccaggccttcaacatcggcaactatgtggtgagggtcaaattgggaacacccggtcaacttttgttcatggtcctcgacaccagcac

SEQ ID NO: 231911 - DNA, 362 bp, Glycine max
attgaagttaaaagccttagccttccctacaactccaaacacaaagacatcatcatccatggctgcctccgtctccactgtcggagctgtcaacagagctcttttgaacctgaatggttctggagctggagcttcagctcccagttcagccttctttgggaccagcttgaagaaggttattgcctcaagggtccccaacagcaaggtttccggtggaagcttcaagattgttgctgtagaagagaagaaagagattgaagagacccatcagaccgacaaggacagatggaagggtcttgcctatgatatctcagacgatcaacaagacattacaagaggaaaaggtttgggttaaccccctt

SEQ ID NO: 231912 - DNA, 320 bp, Glycine max
catttgtcatagcaacaaacaggcatcttagtgtgctccaccctatttataaacttttgttgcctcactatcgtgacaccatgaacatcaatggactcgcaagacaatcactcatcaatgcaggtggcattattgagcaatcatttctgcctaggccatttgctgtggagatgtcttcggcagtttacaaggggtgggttttcactgatcaagcccttcctgcggatcttatcaagagaggaatggcagtggaggattcatcctctccctatggccttcgccttgtgatagaggactagccttatgctgttgatggacta

SEQ ID NO: 231913 - DNA, 334 bp, Glycine max
ctcgaatcgagtttaaagctgaacatgagggaaaattccactcattctacccagttgcgaccatccttagttacctgaccaaggcgcctctggttccaccgggtacaccagtggtgaacgcgttgtcaaagcaccgagctatgctggaaaacatcctgagggcttgtgttggattagctcctgagaacaacatgatcctacagtaccagtgaagttcacagtcttaagagtaacggttcgggatagtgtacttgaatctgatcaaaacttaactcacatcgcataacccgcttttctgttatatacctcaggcaactgtgaactttgacgatcg

SEQ ID NO: 231914 - DNA, 388 bp, Glycine max
caatatattccattctctctgtgtatttccctacctctcccttcaagatgcagatcttcgtcaagaccctcaccggcaagaccatcacccttgaggtggaaagctctgacaccatcgacaacgtcaaggccaagatccaggacaaggaaggaatccccccggaccagcaacgtctcattttcgccggaaagcaacttgaggacggccgtacccttgctgactacaacattcagaaggagagtactcttcacctcgtcctccgtctccgtggtggcatgcagatcttcgttaagacactcaccggcaagaccataaccctagaggttgaaagctccgacaccatcgataacgtcaaggccaagatccaggacaaggagggtatcccccc

SEQ ID NO: 231915 - DNA, 383 bp, Glycine max
gctctgcgagatcttcattcgccgattttaaaagatgagtaagcttcagagtgatgctttgcgtgaagccatttcaggaagcatggccgattccaaggagaagaatcgcaaatttgtggagaccatcgaactccaaatcgggttgaaaaactacgatccacagaaggacaagcgtttcagtggcactgtcaagctgccccacatccctcgccccaagatgaaaatttgcatgcttggtgatgctcagcatgttgaagaggcggagaagataggactggactggatggatgtggaagccctgaagaagctaaacaaatctaagaagttggtgaagaaactagctacaaagtaccatgcctttttagcttctgaagcagtcatta

SEQ ID NO: 231916 - DNA, 370 bp, Glycine max
  unsure (1)..(370): unsure at all n locations
cacaacanaaaaagacaacccagagagcgcgtcttaataaacgctcttctctgaaaacccccatttcttttcttctttcttcttctctttcgcttcttcgatcttcgatcttcgtcgctgaaaatgagagagtgcatttcaatccacatcggccaggccgggattcaggttggaaacgcctgctgggagctttactgcctcgaacacggcattcagcctgatgggcagatgccaagtgacaagaccgttggtggaggtgatgatgctttcaacaccttcttcagtgaaactggggcaggaaagcacgtgccccgtgcgatttttgtagatcttgagcccactgtgattgatgaggttaggactgggacat

SEQ ID NO: 231917 - DNA, 356 bp, Glycine max
gcaaagctcatccttgagttaaaaaatggcagcagcttcttccatggctctctcatccccatccttggctggcaaggccgtgaagctgggcccatcagccccagaagtgggaagggtgagcatgaggaagaccgtcaccaagcaggtctcctcaggaagcccatggtacggcccagaccgagtcaagtacttgggcccattctctggcgagcccccgtcctacctaaccggtgagttcccaggcgactacggctgggacactgctgggctttccgcagacccagaaaccttcgccaagaaccgtgaactcgaagtgatccactccaggtgggccatgctcggagccttgggctgcg

SEQ ID NO: 231918 - DNA, 362 bp, Glycine max
gctagcaccacattcacctgaggcttccaaagcaatggcttcccttgcagcatccactgctgctgcttcccttggcatgtcacaaatgcttggaaaccccatcaacttcagtggtgccacaaggccagctccatctgcttctagtcctgcctccttcaagactgtggctcttttctccaaaaagaacgctacaccaacacctccaaaaaaagctgctgctgctgctcctgccaatgatgagcttgccaagtggtatggtcctgacagaaggatcttcttgcctgagggtctcttggaccgatccgaaatcccagagtacttgaccggagaaatccctggagactatggttatgaaccatttg

SEQ ID NO: 231919 - DNA, 391 bp, Glycine max
aactcaaacgaatacgttttctctttctcttcaatttcacccttattagcatagcatattcatttccctttcttgaatcgttcttaactgcgagaggggatatcagagaagttgattggcctcccattaataacagatctgaatgatctgatggagtctaaaggtgggaagaagaagtcgtctagtagtaagtcgtttttgtacgaagctcctctcgattacatcattgacgacgttcgaccacaccgtggaatcaagaagttcagatctgctgcttactccaactgcatccgcaagccatcctgagattccctacgtcgtgtgaggacgtatcccccttagtcctgcatctgctatatttttctagtctcttctcttcccctttttcttg

SEQ ID NO: 231920 - DNA, 388 bp, Glycine max
gtttattggacaaatagcaaaattatgtggtggtggaggaggtggaaggccaaattttgctcaggctggtgggaggaagcgtgagcatttggcaagtgcccttgataaggctcggtcagagcttatagccactctatgtgaaaaacggaattgaatttaagtacacttagcagatagatctttttatgctaaagcagcacaaaatattgattctctgttgtcgaagaattcatcacaaagacagttcacaagcaaaatgggcggaagctgctgaagttttaacgagttttcttgcaattccagggggcatgtactttaactttatgatagtatagaccatttgttcgtgtgactttattctcctgacaatctggcctgcattcacaca

SEQ ID NO: 231921 - DNA, 356 bp, Glycine max
tggcttgtctaggtcttcaatcgaactcgccaggaacggaactttctcagattgacacacaccatgaaggaaagtggtttcgagaataatgatacaaagcaagctgctgctgatgtgttgtttctatattcaaaatttgcaatggcatgcattggatgtaaggctcgtccatgtgatttgaggtttcatttgatgaaggagatttcaggtatgccctcttctctaaatagggagtcaccacagaatgcagcatctcctgatgcaatgggtgagtcatccagcacaggaacagcaagacttgatagaacagacagttttcgtgcactctagttgagagtggactgtgaccatgtttt

SEQ ID NO: 231922 - DNA, 374 bp, Glycine max
agaaaatggcaagaatatcaaattggtctcttgtcttcctcctcatctctacactactccacatagagcccagcctctcaagcccaagcccaagcccaagcccaagcccgttcataaaatcctcctgcagcagcacccagtacccagccctctgcgtctcatccctctccgtctacgcctccagcatccaacaggaccctcaccaactggttcagacagcactctccctctccctgaaccgcacccaagccaccaaaaccttcgtggctaactgcaacaaattcagaggcctgaaacccagagagcacgctgcactcaaggactgcgccgaggaaatcagcgacagcgttgaccgcctcagccggtcgctgaaa

SEQ ID NO: 231923 - DNA, 476 bp, Glycine max
ggaatgaattaggtggcatagtcgaagagatatgacgtcggacgcacgcgtacgtaagctcggcacacgagccaaaacaacccattcggagtgaaggcattgaggcgtactccggctaaaccccattggacctttgggcgtaagaacaaggtcagcagtgcttaagcagataaaggaaatgtgaacgtgcaggaaggagccaatgatgaagtacatgaaagacgaagaattaaaacaccagctgatacacttcccctttaccttcacataaatttctctgtgccattttattatgatacaaattgatactattctgtatcaaatttcagtcagatattggctgtgtacatagggttatattattgatgcactgtatttgtattcaaattccaattccaaatggcgaacatatttgattgctgttagtttcccaggttatgtagactatgttacaatgcacaatatgtggaattgcc

SEQ ID NO: 231924 - DNA, 265 bp, Glycine max
cgcgtacgtaagctcggaagtcggctcgagctctctctctctctctctagcgtgcacacaaaataatggacatgaaaaccatgcgactcatctcatgatccagaagtgagaaagggaccatggatcatggaagaagacttgatcttgagaaactatattgcaaatcactgtgaaggtgtttggaattcgttagccaaagcttctggtcttaatcgaacgggaaagagttgtcgactccgttggctaaacgaccttcggcctgatg

SEQ ID NO: 231925 - DNA, 388 bp, Glycine max
ctgttgtacagaaaaatcttgagatcggtgaagttctagctgttgatgtttcttccattgttgctgtgacaagtgcagtcaatatccaaataaaatataatggtcctgcaagaaggacaatgtttgggggtgacaatgctgtcacagccgttctaacaggaccaggcattgtgttcatacaaagtttaccttttcatcgattctctcaacgaattgctagggcggtgacatcacccaacatgagggaaaatcccaagtttttcatacagattgcagttttcttttttctggcgtatgttgtcattgtatcttcgttaatattaacagatgtatgaaattcagtttggtttttctttagtagtttttacttttctcttatcctaacata

SEQ ID NO: 231926 - DNA, 395 bp, Glycine max
ctttagtgtggtctaaagaagtggaactctattcaactaatcagaattgcgtgaagatgctagttggaaataaagttgatagagattctgaaagggttgtgagcaaagaagagggtttagcacttgccgaggagttgggatgtctgttttttgaatgtagtgccaaaactcgagaaaatgtggagcggtgcttcgaggaacttgcactaaagataatggaagttcctagtcttttggaagaaggatctacagcagttaaaaggaatattctaaagcaacaacaacaaccccaagcatccgaatttggtggttgttgctcttaattgctgcaatgtgaacattgagtcataactagcgcatattggaatgttccctctgattcctgtatatgtaag

SEQ ID NO: 231927 - DNA, 390 bp, Glycine max
gtggagagagacaattcaatggtctcgttgatgtctacaggaagacattggcatctgatggtgttgccgggctctaccgtggtttcaacatctcatgtgttggaatcatcgtgtatcgtggtctgtactttggattgtatgattctgttaaaccagttgtcctcacagggtcattgcaggatagcttttttgccagctttgccctatggatggctcatcaccaatggtgcaggtcgtgcatcatatccaatacacactgttagaataataatgatgatgacctctggtgaagctgtccagtacaagagctccttggatgcattcacacagatgctcaagaatgatggtgccaagtccatgttcaagggtgccggtgccatcatcctccgt

SEQ ID NO: 231928 - DNA, 373 bp, Glycine max
gaatgagataatattttttgtggatgatgtccccataaggaggtatcctaggaaaagtgatgccacatacccctcaaggccaatgtatgtgtatgggtcaatatgggatgcatcttcttgggcaacagaggatggaaaatacaaagctaattataattaccaacccttcgttggtaggtataaaaacttcaaacttcaaggttgcactagtgaaagctctgcctcatgcaagccaccttctttctcgccatctggctttggtagtctaagccctcagcagtttagggcaatgcaatgggtccaaaacaactacatggtctacaattattgccatgaccctaggagagaccacacatttatcccagagtgttaa

SEQ ID NO: 231929 - DNA, 358 bp, Glycine max
cctcttcttagcaaatgtttcaatattccaaggccatgttgcttaatttagttcttgtttcctttgtcctcttgagttctatcagagatgggagtgcagggatcaccagctctttcgttcggccacagtggccaggagttgacattcccgtggatcatgaagtatttgcagttccaaagggttataatgcacctcaacaagtgcacatcacgcaaggtgactatgatggaaaagcagtaatagtctcatgggtgaccccagatgaaccagggactcgccatgtgcaatatggcacatcaaaggataagtttaaaactagtgcagaaggcacagttgcaaactacactttctataacta

SEQ ID NO: 231930 - DNA, 360 bp, Glycine max
gccccactcaaccaccacacctctcctcgttcacgctacccctttctgctcttcttctacctttcaagttttaaaagtataaagatggcagagacattccgaattacctcagagtcggtgaacgagggacaccctgacaagctctgcgacgaaatctccgatgctgtcctcgacgcttgcgtcgagcaggacccagacagcaaagttgcctgcgaaagatgcaccaaaagcaacttggtcatggtcttcggagaaatcacgaccaaggccaacgttgactacgagaagatagtgcgtgacaccggcaggaacatcggcttcgtctcaagtgatgtgggactggatgccgacaactgcaag

SEQ ID NO: 231931 - DNA, 392 bp, Glycine max
aatgacttgggagtgaagttcccatttaaccaaccaatgaagatatacaacagtttgtggaatgctgatgactgggccacaaggggtggtttggagaaaacagattggtccaaagcccccttcatagcctcctacaagggcttccacattgatggttgtgaggcctcagtgaatgccaagttctgtgacacacaaggcaagaggtggtgggatcaacctgagtttcgtgatcttgatgctgctcagtggcaaaaactctcctgagttcgccagaaatacaccatctacaactactgtgctgaccgcagacgctaccctcaagtctctccagagtgtgctagagaccgtgatatttaatttgaataacgtgatattaatgcaaagtatctatc

SEQ ID NO: 231932 - DNA, 390 bp, Glycine max
cctatgtgctatatggtggagccacggttcctgcacagtgctgcaatgggatcaggaacctctatggcatggctcagaccaaaccagatcgccaagctgtttgcaactgcatcaagaacgctgttaggaacagtggcttcacctactctcacttcaatctcaaccttgctgctaaccttcccaagaactgtggggttaacattccctaccagatcagccccgacacagactgcaccagggtgcagtgaggttggtgcatgatgtttatgttagcagtgttagaataagaggccacgtgacacgaaaagggaatggctagaaattgcttttttaaggctcttgtactagtgctcttgtattatgtctgtggttatatatatatattatata

SEQ ID NO: 231933 - DNA, 384 bp, Glycine max
aaaaatattaagatgataaacattggagcacttgttgtactctttgcatttctcttcctcagttgtgcctatgcacaagacacaacaacccttgtgcctgcaatcataacttttggtgactcagccgtggatgtagggaataatgactatcttcccacccttttcaaggctgattaccctccttatgggagggactttgctaaccaccaacctactgggaggttctgcaatggcaaattagctactgattttactgctgacactttgggttttaagacctatgctccagcatatcttagcccacatgcatcatggaaaaacctccttattggagcaaactttgcttctgctgcatctggttatgatgaaaatgctgccactttg

SEQ ID NO: 231934 - DNA, 387 bp, Glycine max
  unsure (1)..(387): unsure at all n locations
aaaagccttagccttccctacaactccaaacacaaagacatcatcatccatggctgcctccgtctccactgtcggagctgtcaacagagctcttttgaacctgaatggttctggagctggagcttcagctcccagttcagccttctttgggaccagcttgaagaaggttattgcctcaagggtccccaacagcaaggtttccggtggaagcttcaagattgttgctgtagaagagaagaaagagattgaagagacccagcagaccgacaaggacagatggaagggtcttgcctatgatatctcagacgaacaacangacatcacaagaggaaagggttgggttgactcccttttccaggctccacaggatgctggaactcactatgc

SEQ ID NO: 231935 - DNA, 380 bp, Glycine max
cttttgcataagaatatgatgttgtgaaggtgaatagggacttcaaggtgacattctcagctgcctcaatatgtgtgcagggcacaaattggaatttggctgagaaggatagtgagagtggaaggaggctcattgctgcatcatgcatggatgattactttagaattactgagacaccaatcaaaggttcatattagatacgttggtgtcctacagatgtatgccccttttgtaggtttgactgtggcattgttggtggtttgcgtgagaatgggaagattttgttggccttggatggtaatgtgctcccagttgtgtttgagaaagcatactaatatgtgtagcttcaattctgtgtttgacatttctgttcttggtat

SEQ ID NO: 231936 - DNA, 368 bp, Glycine max
aataatcacaactcaaaccctctctctctctctctctctctctctcatataacaatatttccacgtacaattaagacacgatcactattgcatctacaatggaattagcaccctcaaactccaaccaacaacatgagaacaacaacagcaacaaggttcaggggctccattgctctgtgaagaactatgagtggggcaaaccgtgccgtgactccctcgttgccaagctattttccatgaattctgggtcgttacaatcatcacagcttgatgaggatcagccatatgcggagctttggatgggcagccacgtgtctggaccctctttcattgtttttgatggctcacaacaaagagtgaccctcaag

SEQ ID NO: 231937 - DNA, 337 bp, Glycine max
gtggtgtgaatcactgtccaatcccgttcgcgtgacccggccagccctataaactatatatcgtgaatcggattcagagagactgagagaaacgatgagggcagtgagtgcgttaatggtggctcggatgttgacgcgggaccactctctccctgtcctttgcagcgaaagcatacccttccgatcggtctggtggttcgtctatgccggcatctcatgtttcctcgtcctcttcgccggcatcatgtccggtctcaccctcggactcatgtctctgggtctcgtcgacctcgagattctcgagcggagtggttctcctgttgagaaaatgcaagct

SEQ ID NO: 231938 - DNA, 364 bp, Glycine max
tgattttctttgtagaagttttttagtagcatgttttccagattttgtctcaacaagcagagcaggtttgcttgtgtaaattaatacatggagtaagaaccgcttccttgttgtgtattgggacaggttatgttcagtttagggctgaatttgacctggttctgtatgttcttgtactagaccattctaaccatgacaaattggaatgggctaaaggtgtggccccctcttcaaatttcagtcaagtgctgtgaaatcgatgaattcctgcggaatggggagatcgatttagcttagcctgacacatagatgctttctatgtatcttcagtatgatcaaaatttgaatggttcagaaatttatc

SEQ ID NO: 231939 - DNA, 345 bp, Glycine max
gaacattctcatgtacggtgatggccctgctaagaccatcatcaccggtcgcaagaacttcgtcgatggtgtcaagaccatgcaaactgccactttcgccaacactgcagaagggttcattgccaaggcaatgacattccagaacactgccggtgctgagggacaccaagccgttgcattcaggaaccaaggagacatgtccgctctcgttggttgccacatcttgggttaccaagacaccttgtacgtccagaccaacaggcaattctaccgcaactgcgtcatctccggcacagtcgacttcatcttcggcacctcctccaccgtgattcagcactccgttat

SEQ ID NO: 231940 - DNA, 373 bp, Glycine max
cccaactcaatttttctctcaaccggcccaatttagcataagcccagcatggccaccgcaacagcagcagccacctcgtccttcatggggacgcgcctcctggaggcccactccggggcggggcgggtgcaggcccggttcgggtttggcaagaagaaagccgccgccccgaagaaagtttccagggggtcgggctctagctccgataggcccctgtggtatccgggcgccaaggcgcccgagtacctggatgggagccttgtcggagactacggattcgacccatttgggctaaggaagcccgccgagtacctgcagttcgagttggactcgctggaccataatcttgcgaagaacgtggctggggacatca

SEQ ID NO: 231941 - DNA, 374 bp, Glycine max
ctcgagccgcttcttcgtcgttatcttcttcttttgttgtttgtgtgtttgttttttctctcacctgaaaatgtcttgctgcggtggtaactgtggttgcggaagcgcctgcaagtgcggcaacggctgcggaggctgcaagatgtacccagacttgagctacaccgagtcaaccaccaccgagaccttggtcatgggagtggcaccagttaaggctcaattcgagagtgctgaaatgggtgttcccgctgagaacgatggctgcaaatgtggagctaactgcacctgcaacccctgcacttgcaagtgaggtgttggagagctaaagcttcaagcagaaatgggccttagaaataatgataaaaactatatgt

SEQ ID NO: 231942 - DNA, 376 bp, Glycine max
cgacgatgaagacaaccttctgatccgtcaagtggtgccggacgcggaggaccaccacctgctcaacgcggagcaccacttctccgccttcaagacaaagttcgccaagacctacgccacgcaggaggagcacgaccaccgcttccgtatcttcaagaacaacttgctccgcgccaagtcgcaccagaaattggacccctccgccgtccacggcgtcaccaggttctccgatctcactccgtctgagtttcgcggccagttcctcggcctgaagccgctccgccttccctccgacgctcagaaggctccgatccttccgaccagcgaccttcctaccgatttcgattggcgcgaccatggagctgttaccggcgtc

SEQ ID NO: 231943 - DNA, 383 bp, Glycine max
aaatgaatcaagtgtggaccgtcttatgaagcagattacaaatttcatgtctgatattgctgatgagttcaaaattgttgttgttgaagcaataagatcactatgcttgaaattccctttaaaatatagatctctgatgaatttcctaagtaacattcttagggaagaaggtggctttgattacaagaaagcaattgtagattcaattgtgattcttattagagatatccctgatgctaaggaaagtgggttgcttcatctttgtgagtttattgaagattgtgaattcacttatttgtccacacagatactgcacttcctgggagttgaaggaccaaaaacttctgaccccagcaaatatattcgttatatttataacagag

SEQ ID NO: 231944 - DNA, 360 bp, Glycine max
cgcacgaatatcttgttgtttggagcgatccgagaaaaactctgtaaacatgttggtttaccaggacctccttacaggtgatgagcttctctctgactccttccgttacaaggaaattgagaatggaatgctgtgggaagttgaggggaagtgggttgttaaaggagcagttgatgtagacattggtgcaaacccttctgctgagggtggaggagaagatgagggagttgatgatgcagctgttaaggttgttgacattgttgacacattcagacttcaggagcaacccgcattcgataagaagcagtttgttaccttcatgaagaggtttatcaagaatttgactcccaagctcgatgc

SEQ ID NO: 231945 - DNA, 343 bp, Glycine max
  unsure (1)..(343): unsure at all n locations
ctccaggatcatattggtggcctgcagaagcactgtgaggaaacaattatcagaatgcttctccaggatcatattggtggcctgcaggttctttaccagaacatgtggattgatataaccccagaacctggggctcttgttgttaacattggtgatcttctacagcttataacaaatgacagattcaagagcgtagaacatagagtacaggcaaatctcataggtccaagaatatctgttgcatgctttttcagcgaaggtcttaaatcatcaccaaaaccctatggacctataaaagaattattgacagaagacaatcctcgcanatacagagaaaccacag

SEQ ID NO: 231946 - DNA, 344 bp, Glycine max
gctaatcctagttccttcaactcctcgctggcaacaacagcaatactaccaataatggcgctccacaatcatgatgttcgacaacaagctctgtgacataacatgtgaagtgatagatccccatgccctggggctcatgttggtaacattggtgatcgtctacagcttataccaaatgacaaattcaagagcgtataccatagagtacacgcaaatctcataggtccaagaatatccgtcgcatgctttttcaccgaacgtcttaaatcatcaccaataccctatgggcctataaaagaattactgacagaagacagtcatcccacatacagataatccacagt

SEQ ID NO: 231947 - DNA, 359 bp, Glycine max
ggagtttgtaaccatgcttttcacttccattgcataagccgatggctcaagacccgtcaagtatgtcctctagataatagcgagtgggagtttcagaaatacggtcactagaactttgatgcggctgagctacttccatcttggacatttggattgtagcatttctatcaactttatagctctacatgttgtctttgcttgcctattggagttttattcaaaagagtcacttctaaatgctttcgcatatagttacgcccccagttcctaattcgatcatatccttctctaacaatgtggcaaaacggtggtgttaattcactcaatgacaagatttatggaatattatagcatgcaaa

SEQ ID NO: 231948 - DNA, 394 bp, Glycine max
  unsure (1)..(394): unsure at all n locations
gacgcggatgaggaggagacggagtcgtcgaggcggatggttgttaatggggagggccaccgggagaacggttttcgggttgcgcccgtcgagggtgacgacgtggaggacgaggatgacgaggatgattccggggaggagattgatgaggaggagggggatgacgatgatgtggtggaggttcatgagattgaagatagtgatgatgaggatggagtggaggagtacgatgacgaggacgatgacgaggatgatgatgaggaggaggaagaggtggataacgacgagggtgattttgcggaacccgagagtaccgggaggctgacgagtactgatggggagattgatgggcatgagcaaggggaggangatggggatgacgatgataatgggg

SEQ ID NO: 231949 - DNA, 388 bp, Glycine max
gagttatagaggcattgttgctgtttggaaacagatctctgatctgaaaatgagtgcatcgaggttcattaagtgcgtcaccgtcggcgacggcgctgtcggcaaaacctgcttgttgatttcctacaccagcaacacttttcccacggactacgtgcccacggtttttgacaatttcagtgctaatgttgtggtggatggaagcaccgtaaacctggggttgtgggatactgctggtcaggaggattataataggcttagacccttgagttatcgaggagctgatgtatttatacttgccttttctctcataagcaaggctagctatgaaaatattgcaaagaagtggatccctgaactaaggcattatgcccctggtgttccaata

SEQ ID NO: 231950 - DNA, 386 bp, Glycine max
  unsure (1)..(386): unsure at all n locations
gtggtgagtatcatacctgtgctttgacagattctggcgaagtatatacttgggggaatgatgtttgttgtgcacatttattgattgaacggagaactacaagtcagtggataccacaaaaacttggtggatccttagatggtattagtatctcaagtgttgcctgtggggaatggcatactgcaattgtctctagttgtgggaagttatttacttatggagatggtacatttggggttcttggccatggcgatcttcggagctattcaagtccaaaagaagttgaatctcttagtggtctacgggtgaagtctgctgcttgtggatcatggcatacggctgctattgttgaagtcatgtntgaccgtttcaagtacaatactgct

SEQ ID NO: 231951 - DNA, 426 bp, Glycine max
aaacattataatttctattacatacattttgtagctaggatgagcaagttactactcattcgtgttgctgggttcgtggcaacctttgtcaccatggtgatgatgatggtgcccaaaaacgtgagtgcccaaaacataggtgatgacatcgtcacacaagacttcttcaacagcataatcagtcaggctgatgatggttgtgcagggaagaacttctactcacgagatgctttccttaatgctcacaattcctacaatgagtttggtaggcttggtaatcaggatgactccaagcgtgaggttgcagctgctttcgcccatttcacccatgaaacaggacatttttgctacatagaacagattaacggtgcatcaggggactactgtgacgagagcaacaccgagtacccatgtgcccctaacaaa

SEQ ID NO: 231952 - DNA, 377 bp, Glycine max
agatgactacccttatgctgttgatggactagagatatggagtgctatccagacatgggttaaggactacgtctccttgtactatgccacggatgatgcagttaagaaagactcagaactccaagcttggtggaaggaagctgttgagaagggtcacggtgacttgaaagacaagccatggtggcctaagttgaacactcttcaagatctgattcacatttgctgcattattatatggactgcttcagcactccatgcagctgtgaatttcggacaatacccttatggcggtttcatcctaaatcgtccaactctaaccagaagattgctcccagagccaagaaccaaagaatatggtgaactttacagtaatcatc

SEQ ID NO: 231953 - DNA, 401 bp, Glycine max
  unsure (1)..(401): unsure at all n locations
aggggcttcaacagccacaaccttgatcttgcattgagccatgaaactacttagccacttgggttcctcactagagacacttgtctattaactcttttttgttgttgtggtgtttcatttgtgaaactaacaacaacacaaggccatcatcatggcagctgcttccccaatggcaagccaactcaagtccaccttcactaggactcttgtagctcccaagggcctctctgcctcttcaccacttcacctcgtgccttctagaaggcaatttagcttcactgttaaggccatccaatcagagaagccaacctatcaagtgattcagccaatcaacggtgacccattcattggaagcctggaaacnccagttacatccagccctttgatcgcatggtacttgt

SEQ ID NO: 231954 - DNA, 368 bp, Glycine max
atctgtcttccgaagcaggaactaaatatggctgacttgttggaatggtcaaagcaagataagaaacgaatgcttcatgtcgtctaccgtgttggtgaccttgatcgcaccatcaaattttacacagaatgtttaagaatgaagcttttgaggcaaagagatatcccagaggagaaatatgctaatgcttttcttggatttggccctgaagaatcccattttgttgttgaattaacatataattatggggttacctcgtatgacattggcgatggctttggacattttgcaattgcaactcaagacatttataaattggttgagcacatcaaggccaagggtggaaacatcacaagggaacctggtcc

SEQ ID NO: 231955 - DNA, 375 bp, Glycine max
gaagattatgttcagagagtgaggcaagttcatgaatctggtggttatgggtctagagggtatgcatatgactggaagagagaggaagcaaataaaaaccttctgcgaacccatacaactgctgtttcctccaggatgctttaccaattagcacagaaaccatttgcccccaaaaaatatttctctatagatcgtgtattcagaaatgaagcagttgatcgtacacatcttgctgagttccaccaaatagaaggccttgtatgcgatctaggactcactctctgtgacttaataggagtcctacatgatttcttctcacgcttaggcatgaccaagctgaagttcaaaccagcttacaatccatacaccgaacct

SEQ ID NO: 231956 - DNA, 374 bp, Glycine max
cataaccatcaagtttcagttccaaacataacccatcaaagtctttctccctcagtgatcatatattcattcagttctatacaaaatcctcaaaaactcttcctctctgccatgaccatggaatacagaaccttagaactcaacatcatatccgcaaaggacatcaagaatgttaatctcttctccaagatggacgtatacgccgccgtttcgctctccggtgaccctctcgaccctcagggcgccaccacccacgtccacaaagactccggcagcaaccccacgtggaactaccccgtgaaattctctgtcaacgaatcgctggcgaatgaaaatcgtttatctcatgagatcaagctcatctccgaccgcac

SEQ ID NO: 231957 - DNA, 362 bp, Glycine max
gcaagcgcttctcctctttgtgttctggctatgcttcttggcaagagttagatcggacgaggattgcgtgtacacggtgtacgttcggacgggttcgatcatcaagggaggcaccgattcagtaattggtctgaagctatacgacaagtccggctacggcatatacatcaccaacctcgaggcatggggcgggttaatggatccgggtcacaactactacgagcggggcaacctcgacatattcagtggtagaggcccttgcttggaagcacccgtttgcgaggccaacctaacttctgacgggtcggggccccatcacggctggtacgttaattacgtcgaggtcaccaccactggggtcc

SEQ ID NO: 231958 - DNA, 406 bp, Glycine max
ctttaagattctctaccgttcaacgcaacactctcaattccatctactcttcgttcccaatatgacggagtgcatgacggacttggctcaagctgccgcatgccgaaacggcacgacggcggcacacttaaaagtgatttccatctttatgatttttgtgaccagcgtgacaggcgtatgtgcgcctgtcacactggcacgatactttcagggaaagtccctctacaacatagccatcttgttaatcaaatgctttgctgccggcgtaattcttgcaacctcattggtccacgtgttgccagacgcctttgctgcactctccgattgccaagtggcatcccagcatccctggaaggactttccctttgctggcctggtgacccttaatggggtgctaatggccctg

SEQ ID NO: 231959 - DNA, 366 bp, Glycine max
gcataaaatgtcaaatacaagtttgcttgatttccaatacagcctctcaaggaaaaaatacctgaggaagccatcacgtctgttctcctgggaccggcagaactcggggtcgaagaatgtatttcctcagcctaaggctgatgagatgaagcaggtgtttgacaagtttgattccaataaagatgggaaaatttctcaacaggagtacaaagccaccatgaaggctctaggcatgggggactcggttcatgaagtgccgaatattttcagggtggttgatttgaatggagatggattcatcaacttcaaggaatttatggaagctcagagtaagggtggcggggttaggatgatggatatacagag

SEQ ID NO: 231960 - DNA, 388 bp, Glycine max
tcttacttcaactgaaagagaacaacacgtttcccatagatctcaccaatgataacatcaaagcagtgctcttgaacttacttgtaggagctacaggtacaactgaagtcacaacaatctgggccatgactgaactaataaaaaatccaagcattatgaagaaagtgcaagaagaaattagaggcttaagtggtaagaaagatttcttggatgaagatgatattcaaaagttttcctacttaagggcagtgataaaagagacacttagattgcacttaccagcaccactacttataccaagagaaacaaataaaaaatgcatgttagatggctacgaaattccagccaagacattattatatgtgaatgcttgggcaattcatagaga

SEQ ID NO: 231961 - DNA, 378 bp, Glycine max
caaacccatttatagcaccaaccctttgatcattcccacgtgtaaagtgaggccaagagtgcaatactgtggcaccatgatcaagagttctttgatagagcctgatgggggggcattggtggatcttgtggtgcctgagggtgagaggggtgctaagatcaccttggctgagtcactgcctaaggtgcagctcacaaggattgatcttgagtgggtgcatgtggtgggggaagggtgggctagtcccttgaaagggttcatgagggaggatgagtatcttcagagtttgcatttcaattcccttaaggtcaaggatggttctgtggtgaacatgtcccttcccattgttttggccattgatgatgagaccaaagagag

SEQ ID NO: 231962 - DNA, 362 bp, Glycine max
gtttctcgcaaagtttaagtcatcatgggtaaggaaaagactcacatcaacattgtcgtcattggacatgtcgactctgggaagtcaactaccactggtcatttgatctacaagcttggaggtattgacaagcgtgtgattgagaggttcgagaaggaggctgctgagatgaacaagaggtcattcaagtatgcctgggtgcttgacaagctcaaggctgagcgcgaaagaggaattaccattgatattgctttgtggaagtttgaaaccaccaagtactactgcacagtcatcgatgcccccggacatcgtgactttatcaagaacatgattactggtacctcccaagctgattgtgctgt

SEQ ID NO: 231963 - DNA, 325 bp, Glycine max
atctttgtcatattccaaaattaagcttgcattattcaccagaatggctaattcatatgaaaacaacttcccccctcagaagcaagacactcagcctggcaaagagtacctcatgaatccaccaccccaatacaacagctcccaatacaagccatcaaataaacttcagggaaagatagctgtagtaaccgggggtgattctggaattggacgagccgtgtgcaacttgttttcattagaaggtgctactgtgatcttcacctacgtgaaggggcaagaggacagggacgcgagtgacacgcttgagatttataaaaaagctaag

SEQ ID NO: 231964 - DNA, 340 bp, Glycine max
  unsure (1)..(340): unsure at all n locations
ctttgttcgacccagaggagctcacacagtggtccttctatagagccctcatcgctgagttcatagcaacccttctcttcctttatgtcactgtgctcaccattattggctacaaaaggcagactgatacaacggtaggtggcaccgactgtgatggggttggcattttgggcatcgcttgggcctttggtggcatgatcttcatccttgtttactgcaccgccggtatttcaggaggacacataaacccggcggtgacattcgggttgttcctangacgcaaggtgtcgttgataagggcgttgttgtacatggtggcacagtgtgccggtgctatctg

SEQ ID NO: 231965 - DNA, 420 bp, Glycine max
aaaagaaaaaaaatgggttcttctctgtggacctgtctgattttgttatcacttgcttctgcttccttcgccgccaacccaagagcaccaattgatgtgccatttggcagaaactatgtgcctacctgggcctttgatcacatcaaatacctcaatggtggttctgagattcagcttcatcttgataaatacacaggtactggcttccaatcaaaagggtcctacttgtttggtcacttcagcatgtacataaaattggttgctggtgattcagctggcacagtcactgctttctatttatcatccacaaactcagaacatgatgaaatagaccttgagttcctgggaaaacagacccgggcacctttaaattttgcaaacaaatgtgttcaccggtggcaagggtgacagagaacaaag

SEQ ID NO: 231966 - DNA, 348 bp, Glycine max
agatgactggggggggtatcactatgcaatcgacgccgggaagctcaggatacttggatttgtatccagagcggaagatgtcctttttcaaaaatccttacattctcggactggctgctgtcgccggcatcggtggtctcctcttcggctacgacactggtgtgatatcaggggctcttttatacattaaggatgattttgaggaggttagaaacagcaatcttctccaggaaacaatagtcagcatggctattgccggggcaatcctgggaacagcattgggtggttggattaatgatgcctaaggtccaaagaaaggcaacctccttggcgaagttaaccttaacg

SEQ ID NO: 231967 - DNA, 391 bp, Glycine max
agaaaatacaagccgtagaagagggctcgctctttcgtgtttttgttcgcgaaggaaactctatccttagctatcgcgatggatcggtaccagaaggtggagaagccaagagctgaaactccaatcgatgaaaacgagatccggattactagtcagggaaggatgcgcaactacattacttatgccatgagcttgcttcaggagaaaggttctaatgaaattgttttcaaagcaatggggagagctatcaacaaaaccgtgacaattgtggagttgatcaagaggagaattgtgggcctccaccagaatacagcaattggatccactgatatcactgatacttgggagcccctagaggaaggcctccttcctttggagacgacaaggcacg

SEQ ID NO: 231968 - DNA, 410 bp, Glycine max
gcaatggcttctctggcaagcttagctgttgttcaaccatctactgtcaagggccttgctggaactaagctctctttcaagccctctcgccagagcttcagacccaagaatttcaggagtggtgccgttgtagcaaagtacggtgacaagagtgtgtactttgatttggaggatctaggcaacactactggtcagtgggacttgtacggctccgatgcaccttcaccctacaaccctcttcagagcaagttcttcgagacattcgccgctccattcacaaagaggggattgttactaaagtttttgatcctgggaggtggttccaccctggcatacttgagtgccacagcgtcaggtgacatttctacaatcaagaaggggccacaacttccaccaaagcaaggtccccg

SEQ ID NO: 231969 - DNA, 338 bp, Glycine max
gaagagctctcaaagattgcgaaggaaaagaagttgaaaggttttgagtttataaaagcagttcaccttgactcaattccatttgacatggaacgtgaccttatcactccaacatacaagaagaagaggccacagttgcttaaatactatcagaatgccattgacaacatgtataagagtggaagtaaacccagtgcctgagacctgatttgggagataatttattttctgtatgtgatggtgtttgtctccgttcaattgtttccttttggtgactgtatatacgctgagtagttatatatggatacgtcatttaatttgagtttttttttcacgtc

SEQ ID NO: 231970 - DNA, 345 bp, Glycine max
  unsure (1)..(345): unsure at all n locations
caaagagagagagagagaagaccaaaggagggtaaggaaaaacttcagcagaggaattccttgcagaagggtgcaactttactccctctctttctctcttgctctttcttgtcanggtttggtcatataagaagccatggccagttttggaggaaccacacaaaagtgcatggcttgtgccaaaactgtgtatcttgttgataagttaactgcagatagccgtgtctatcataaggcttgcttccgatgccaccattgccgtaatacccttaagcttagcaactactgttcttttgagggggtgctctactgcagacctcactatgatcaactctacaagcgaac

SEQ ID NO: 231971 - DNA, 368 bp, Glycine max
ggcactcaacattttacactcttttcttcttctcgttgttgcttcgctgttgaatcatggatcagaaggtcgatttcagcgctccccattccatgggaaccactatcatcggcgttacttacaacggcggtgtcgttctcggagccgactctcgaaccagcaccggagtgtatgttgccaaccgagcatcggacaaaatcactcagctcactgataatgtatacgtgtgtcgctctggatcggctgctgattctcagattgtctctgattatgtgcgttacttcctccatcaacacacaatacaacttggacaacctgcaacagttaaagttgctgcaaaccttgtccgacttctctcatataacaat

SEQ ID NO: 231972 - DNA, 393 bp, Glycine max
gcaacacaacaaaaaaagacaacacagagagaagcgtcttaataaacgctcttctctgaaaaacctgatttcttctcttcttctcttctctttcgtttcgatcttcgatctctgaaaatgagagagtgcatttcaatccacatcggtcaggccggtattcaggtcggaaacgcctgctgggagctctactgcctcgaacacggcattcagcctgatgggcagatgccaagtgataagactgttggtggaggtgatgatgctttcaacaccttcttcagtgaaactggggctggaaagcacgtgcctcgtgcgatttttgtagatctcgagcctactgtgattgatgaagttaggactgggacataccgccaactatttcatcctgagcagctc

SEQ ID NO: 231973 - DNA, 401 bp, Glycine max
cactcataacacaaagcacaaagcaaagctcatccttgagttaaaaaatggcagcagcttcttccatggctctctcatccccatccttggctggcaaggccgtgaagctgggcccatcagccccagaagtgggaagggtgagcatgaggaagaccgtcaccaagcaggtctcctcaggaagcccatggtacggcccagaccgagtcaagtacttgggcccattctctggcgagcccccgtcctacctaaccggtgagttcccatgcgactacggctgggacactgctgggctttccgcagacccagaaaccttcgccaagaaccgtgaactcgaagtgatccactccaggtgggccatgctcggagccttgggctgcgtcttcccggagttgctgtcccgc

SEQ ID NO: 231974 - DNA, 417 bp, Glycine max
tggacgtatcacatattttttaggttctgcaaaaagcaaagactcagatagatgctatccaaccagtatcttgggcggacatgattgctgtggctggagctgaagcagttgaagtatgtggaggtccacctattcaagtttcactgggcagattatatacactggtgcctgatccagaagggagacttcctgaggaatctctcaatgcttctggtttgaagaaatgtttccagagcaaaggcttttcaacacaagaacttgtggctttgtctggagcccacactattggcagtaaaggttttggaagcccaatttcttttgacaattcatattataatgttcttttggagaagccgtggacgtcttcatgtggtatgccgagtatgattgggcttccttcagatcacgctcttgttg

SEQ ID NO: 231975 - DNA, 392 bp, Glycine max
ctcctttcttccatcttcttctcttttcacgtcattatcctaaacttgcagattttcacatcccaagcaacatgaaggggaggttcatgtttctgtcggtgctcctttgtgccacctttcatgtctccttctccattactgacggcttagtagcaaacggcaacttcgagctgggtccgaagccctccgccctgaaaggaactgtggtgattggtggcagccactcgatcccagaatgggagatctctggcttcgtggagtacataaagtccggccagaagcagggcgacatgctgctcgtggtccccgagggggcctacgcggtgcgcctcgggaacgaggcctccatcaagcagaggatcaaggtgatcaagggcatgtactactccatc

SEQ ID NO: 231976 - DNA, 346 bp, Glycine max
ggtcgactctagatgataccctcggggaattccaattccacattttcaagaactaatgaggcaaaaatgttcatatatgaattggtaatatttgttttcttattaaggctatcctgaagccacaggaaatgagatcggtattcctcggggaattccatttcacaatttcagaaagtatagaggcaaaaatgttcatatatcaattggcattaattgttttcctattaggcctagccggaagccatgggaaacgatatttgaaatcctcggagatttccaattccacattttcaagaaataaggaggcaaaaatgttcaaatatgaattcgaagtatttgttttcgt

SEQ ID NO: 231977 - DNA, 416 bp, Glycine max
caaaagcaaaagatgaagatccagtgtgatgtgtgtgacaaagtggaagcctccgtcttctgtcctgcagatgaagctgctctttgccatagctgtgatcgcaccattcaccgcgccaacaagcttgcaaccaaacacgcccgtttctctctccactaccccacctccaaagacttccctctttgtgatatatgccaagagaggcgtgcatatctattttgccaagaagacagggcgttgttatgcagggaatgcgacgttcctatccacagagccaatgagcatacccaaaagcataacaggtttcttctcacgggtgtgaagctctctggtacttgtttagattctgcttcgtcctcaacaatttacacaataataatagagtcactggctctgaaggaagaaacgacgctcga

SEQ ID NO: 231978 - DNA, 346 bp, Glycine max
ctctctctgagtcggtcgagttgaatcggtgtgagtcagtgaccgagtcgaaccatgtcggacgaagaacaccatttcgaatccaaggccgatgctggagcctccaagacctatcctcaacaagccggaaccatccgcaaaaacggttacatcgtcatcaagggtcgtccctgcaaggttgttgaagtttctacttccaagactggtaagcacggtcatgccaagtgtcactttgttgggattgatattttcactgccaagaagcttgaagatattgtgccctcttctcacaactgtgatgttccccatgttaatcctactgaataccagttgattgacattgctg

SEQ ID NO: 231979 - DNA, 353 bp, Glycine max
gtttcaatcccctgttattttttcagagtgatcagaagagtaaaactagtaaaaaatttgctgctgaagctgggctccctgtgctgacaaatgtattacttccgaaaacaaaggggtttcatgcttgcttggaagctctgcgaggctcattggatgcagtatacgatgtgacaattgcatacaagaatcagtgtccttcctttctggacaatgtttttggtgttgacccttcagaagtgcacctgcatgtgcggcgtattccggtggaggagattccagcttctgaaaccaaagctgcttcttggttaatcgacacattccagattaaggaccaattgctttcggatttcaag

SEQ ID NO: 231980 - DNA, 406 bp, Glycine max
aaaatccttgggaacagtaattggttttgccatttcaaagctgggaaagaacattcaagtactttcaagttcctttgtcaataagcaagaccaatacactgtggaaggagtgcagaatcttggagacaaagcagtgatgtgtcataggctaaatttcagaactgcagtattttactgccatgaagtccgtgaaacaacagctttcatggttccattggtggctggtgatggaaccaaaactcaggcacttgctatttgccactcaaatacttctggaatgaatcatcaaatgcttcatcaacttatgggagttgatcctggaactaaccctgtttgccatttccttggaagcaaggccattttatgggtacccaatttatctgtggacactgcctatcagaccaac

SEQ ID NO: 231981 - DNA, 383 bp, Glycine max
atctgcttctcactgatctccattcccattccatggcttccactgaatcatcccctttcaagaaaattcagattcaaagggatgacactacatttgacgcatatgtggttggaaaagaggatgctcctggaattgttgtgattcaggagtggtggggtgtggattacgaaattaagaaccatgccgtgaagatttctcagcttggtagtgggtttaaagctcttattccagatttatacagaggaaaggttggtctggatgttgctgaagctcagcatttgatggatggtcttgattggcaaggtgctgtgaaggatattgctgcttcggttaactggcttaaagcaaatggctcaaagaaggctggtgtaactggattttgt

SEQ ID NO: 231982 - DNA, 398 bp, Glycine max
atattgtgccctccctctttctaactatttccctctcttaacacaattaacaaagatatatcatatcatatcaactccaaatgatgaaaaatattgggttgtttcttcttgtggtggtggctacttttgtggtggcagccacagctggtagcttttaccaagactttgaaataacatggggtggtgagcgtgccaaaatctatgaaaatggaaatcttctcaccctctccctagacagagcctctggctctggctttcgttccaaaaaagaatacttgttcggaaaaattgacatgcagctcaagctcgtgcctggtaactctgctggaacagtcactgcctattatttatcttctctggggcctactcatgacgaaatagacttcgagtttttgggt

SEQ ID NO: 231983 - DNA, 405 bp, Glycine max
aggagatagtgaaagagcttcttcctctaattcgagtgtacaaggatggcagcgtggagcgtcttctaagctctgaaaacgtggcagcctcccctgaagatccccaaactggagtctcatccaaagacatagtcatcgcagacaacccctacgtctccgctcgcattttccttcccaaatcccaccacactaacaacaaactccccatcttcctctacttccacggtggcgccttttgcgtcgaatccgccttctcctttttcgtccaccgctatctcaacatcttggcctcagaagccaacataatagccatctccgtcgacttcagactcctcccacaccaccctatccctgctgcctacgaagacggttggaccaccctcaaatggattgctttccacgcca

SEQ ID NO: 231984 - DNA, 403 bp, Glycine max
caccagtttcaccgcacgaatatcttgttgtttggagcgatccgagaaaaactctgtaaacatgttggtttaccaggacctccttacaggtgatgagcttctctctgactccttccgttacaaggaaattgagaatggaatgctgtgggaagttgaggggaagtgggttgttaaaggagcagttgatgtagacattggtgcaaacccttctgctgagggtggaggagaagatgagggagttgatgatgcagctgttaaggttgttgacattgttgactcattcagacttcaagagcaacccgcattcgataagaagcagtttgttaccttcatgaagaggtttatcaagaatttgactcccaagctcgatgcagagcaacaggagttgtttaagaagcacatc

SEQ ID NO: 231985 - DNA, 389 bp, Glycine max
gcctcgctctgtttctgtctctgtgtttgcggctgaggattccgaacgagcgaccttcttcgtttctcgcaaagtttaagtcatcatgggtaaggaaaagactcacatcaacattgtcgtcattggacatgtcgactctgggaagtcaactaccactggtcatttgatctacaagcttggaggtattgacaagcgtgtgattgagaggttcgagaaggaggctgctgagatgaacaagaggtcattcaagtatgcctgggtgcttgacaagctcaaggctgagcgcgaaagaggaattaccattgatattgctttgtggaagtttgaaaccaccaagtactactgcacagtcatcgatgcccccggacatcgtgactttatcaagaaca

SEQ ID NO: 231986 - DNA, 352 bp, Glycine max
cacatgaaaagcctccaaaaccaacccaacgttggcgcgatggctttcccctccaaaggcgatgacgagcaagttctggtgcagcgtaaatcgaatgcgagagttttgacactaaacaggactaaacagttgaatgccctctctttttatatggtttctcggctacttgaaattttttctgaagatgagaaagattctgatattaaattggttgtcgtgaagggaaatggaagggctttttgtgctggtggtgatgttgcagctgttgctcgtgatggaagtaaaggtgactggaagtttggtgcaaatttttttcaaagtgaatttaaattgaattacttgatggcaacat

SEQ ID NO: 231987 - DNA, 364 bp, Glycine max
agaaattgctttgctgtaagtttctgattcctttcttcagaattccaagttttcatttcgttagggacaaaagattgtgagatagagtatggctggaaaaggcgagggtcctgctatcggaatcgatttgggaacgacgtactcttgcgtcggcgtgtggcaacacgatcgtgttgaaatcatagccaacgatcagggtaatagaactaccccatcctacgtggctttcaccgatacagaacggttgatcggcgatgcggcgaagaaccaggtcgctatgaacccaatcaacactgtttttgatgctaagcgtttgattggaagacgtttttctgatgcatcggtacaaagtgacatgaaactg

SEQ ID NO: 231988 - DNA, 412 bp, Glycine max
aaaaattgatctgcagatcgtctctgatccgttgcttcaaaaatcgacgttttcactacatttgggacaaacaattgtgatgctacagtaacgctggaacaagggatggtcctgctatcggaaacgactagtcaactacataatcctgctacagcgtgtgtgatcaatactcgtggttgaatatcaatagccaaacgactctacaggtaagtaacatactgaccaccaatcggtactgtggcgtttcacctgaaatagaaccgttgataggttatacggtcacaaaccaggtcgctatgaacccaatcattactgtattagatgcaacacctatgattggtatacgtatttctgaagcatccgtacaaagtgacatgactcagtcgccgttcaaggttaatcctggacctgc

SEQ ID NO: 231989 - DNA, 365 bp, Glycine max
  unsure (1)..(365): unsure at all n locations
ctcgagccggtcttcctcctcatctctacactactccacatagagcccagcctctcaagcccaagcccaagcccaagcccaagcccgttcataaaatcctcctgcagcagcacccagtacccagccctctgcgtctcatccctctccgtctacgcctccagcatccaacaggaccctcaccaactggttcagacagcactctccctctccctgaaccgcacccaagccaccaaaaccttcgtggctaactgcaacaaattcagaggcctgaaacccagagagcacgctgcactcaaggactgcgccgaggaaatcagcgacagcgttgaccgcctcagccggtcgctgaaggagctcangctatg

SEQ ID NO: 231990 - DNA, 383 bp, Glycine max
accacatcttcttcccaaccactactactcactcactgcagatctcaattgcatcgctgtccatggctaccatcgttagcatcaaggtccgccagatcttcgacagtcgtggcaatccaactgtcgaggtggatttgacttgctccgatggtacttttgccagagctgctgttccaagtggtgcatccactgggatttatgaggcccttgaattgagagatggaggatctgactaccttgggaagggtgtatcaaaggctgttgacaatgtgaacaccgtcattggccctgctttgattggcaaggagccaactgagcagactgctattgacaacttaatggttcaacagcttgatggaactgttaacgaatggggttggtgc

SEQ ID NO: 231991 - DNA, 374 bp, Glycine max
gaaagagatacatagttagagagagagcagagacaccgttcggtgctccgctgaattcggttgtggcccctgcgctccgctgcaattttacactcaaaaggacctcatgtctaacatagaggagaacaaagatctgggacagatggacgtggatgcatctgatgagtcagctaacatgccatcaccccaaaagcaggaggagtctgtaaagaaaaagtatggaggaatgctgcccaaaaagccaccactcatatctaaggaccatgaacgtgcttacttcgattctgcggattgggcacttggaaagcaaggcggagagaagcctaagggaccacttgaggctcttcggcctaaattacagccaacgcagcagc

SEQ ID NO: 231992 - DNA, 317 bp, Glycine max
gggagcatgaaggagacagaggagatgttggagttctggaaagagaagggtctgagttcgatgattgaaatggtaaacatggattacattaacaaagcctttgaaaggttggagaagaatgacgtgagatacaggtttgttgtggatgtcaaaggcagcaaacttgtcgatcagtaaaagaaagaaagtatactactagcacgacacacgcaacatccatccttccatcatgaagagtctggaaaagttattaattaattgagaactaaagctgtatttgttgttcactctaaaaaagaagctgtgttttgtttatt

SEQ ID NO: 231993 - DNA, 364 bp, Glycine max
cacgtctactctaaaggatcccctcggggaattccaattccacattttcaagaaataaggaggcaaaaatgttcatatatgaattggaattatttgttttcttattaggcctatcctgaagccaaaggaaatgagatcggaattcctcggggaattccaattccacattttcaagaaataaggaggcaaaaatgttcatatatgaattggaattatttgttttcttattaggcctatcctgaagccaaaggaaatgagatcggaattcctcagggaattccaattccacattttcaacaaataaggaggcaaaaatgttcatatatgaattggaattatttgttttcttaataggcctatcctg

SEQ ID NO: 231994 - DNA, 342 bp, Glycine max
gatcggtgttcacttgatctcatcataatcgtcagcgtcaattgaagaagatgccgatcagaaacatcgccgtcggaaggcctgaagaggcgactcaccccgacacgttgaaggcggctttggctgagttcatctcaaccttcatcttcgtgttcgccggctcaggctccggcatcgcctacaacaagctcaccgacaacggcgctgccacccctgccggcctcatctccgcctccatcgcccatgcattcgccctcttcgtcgccgtctccgtcggcgccaacatctccggcggccacgtcaaccccgccgtcaccttcggcgccttcggcgggcgccaaa

SEQ ID NO: 231995 - DNA, 409 bp, Glycine max
tgattgcaagcccacggggaataccaatattagagactctccacatcactctgggttttggactcaatcagacggtgatggtgtgtccatctttaattcgaagcatatttgggttgatcattgctctttgtctaattgtcgtgatggtctcattgatgccattcatggatccacggccatcaccatctccaacaattacatgacccatcatgacaaggttatgcttttggggcacaatgattcgtacactcaagacaaggacatgcaggtcactatagcattcaatcattttggagaaggccttgtccaaagaatgccaatgtgtagacacgggtatttccatgtggtgaacaacgactacacccactgggaaatgtacgccattggtgggagtgcaaaccctaccatc

SEQ ID NO: 231996 - DNA, 404 bp, Glycine max
cagaacaatcgtatgcagttttaagccacctgcatcttttggtcatgcgtgcaccttatatattttcctcagactacaaacacttctattgccagtataatgagccatcatatgtcaaaaagttgaagcttgaaatgctgactgcagttgcaaatgaaagtaacacctatgagatagtgacagaattatgtgaatatgctgcaaatgttgacattcccattgcaaaggaatcaattcgagctgttgggaagatagcattgcagcagtatgatgtcaatgctattgttgatcgacttctccagtttcttgagatggaaaaggactatgttacttctgaagctctggtgcttgtgaaagatctgctaagaaaatatccacaatggagtcaggattgtattgctgtt

SEQ ID NO: 231997 - DNA, 414 bp, Glycine max
  unsure (1)..(414): unsure at all n locations
gtggtaacaaaaggcaacctacttcgccgaagcgctcgcgaggcgaatctacagagtcttccctcagcagcactccctctcggattctctacagattcacttctacgaaacttgtccttaccttaagttcgcgcacttcaccgcaaaccaggcgattctcgaagcgtttcaagggaaaaatcgcgttcacgtgattgatttcggaatcaaccaggggatgcagtggccggcactgatgcaagcccttgcgcttcgcaacgacggccctccggttttccggctaaccggaatcggaccgccggcggcggacaactccgaccacctccaggaggtanggtggaagctcgcgcagctggcggagaggatccacgtgcagttcgagtaccgcggcttcgtcgcaaacagcctcgccga

SEQ ID NO: 231998 - DNA, 400 bp, Glycine max
attgattgatactatactagtgagaaaagaaagggaagtcctccgcgccgccactcctctcatctctctgctctaaacgacaccgttttaagtcttctcctcaagtcatggccacactcaagagcctctgcttcagaggaactgcctttcccgtttgcccctccaatgtcaccaacaatagaaactccaagagctcatattggaggcctgcacaagcaaccgtgaagcccaatttccatctcccaatgcgcagttttgagttaagaaatacgacttctccagaggacataaatgctctgagattgataactgccattaaaactccatacctacctgatggtcgatttgatcttgaagcatatgatgacttggtgaatatgcagattggacaatgggccga

SEQ ID NO: 231999 - DNA, 373 bp, Glycine max
tgaagacacaaaagaaaaaaaatgggttcttctctgtggacctgtctgattttgttatcacttgcttctgcttccttcgccgccaacccaagagcaccaattgatgtgccatttggcagaaactatgtgcctacctgggcctttgatcacatcaaatacctcaatggtggttctgagattcagcttcatcttgataaatacacaggtactggcttccaatcaaaagggtcctacttgtttggtcacttcagcatgtacataaaattggttgctggtgattcagctggcacagtcactgctttctatttatcatccacaagctcagaacatgatgaaatagactttgagttcctgggaaacacaaccgggcaac

SEQ ID NO: 232000 - DNA, 357 bp, Glycine max
gtcttgccccatcaatacaggctccaggatcttggtcttcacctctggacctgctactctgggacccggaatcgttgtcgattctgatcgccgccaacccatcataactcaccatcacatcttcaacgcccaagcaacacactatgctaagtcttccgctttctagaatcaactctccaagaggctatccggtgcatctgttgttctcgatctctttgcctgttcccttgatcaagttggggcaaccgagctccgaggacccgttgagcactccggtggattcatcgttctctctgagtcttttgattccgatcagttcaagaattgtctgaggcagatgttcagatgtgatgacca

SEQ ID NO: 232001 - DNA, 406 bp, Glycine max
ccgcaccagtttcaccgcacgaatatcttgttgtttggagcgatccgagaaaaactctgtaaacatgttggtttaccaggacctccttacaggtgatgagcttctctctgactccttccgttacaaggaaattgagaatggaatgctgtgggaagttgaggggaagtgggttgttaaaggagcagttgatgtagacattggtgcaaacccttctgctgagggtggaggagaagatgagggagttgatgatgcagctgttaaggttgttgacattgttgacacattcagacttcaggagcaacccgcattccataagaagcagtttgttaccttcatgaagaggtttatcaagaatttgactcccaagctcgatgcagagcaacaggagttgtttaagaagcacatc

SEQ ID NO: 232002 - DNA, 380 bp, Glycine max
  unsure (1)..(380): unsure at all n locations
tagagaactggtactacaagatattgctacttatgactggccagttggagaatgccactatcgctgtcgatgccttgtctgtatgtatgaccatcaaacgggtgggaaatgatgattcccctggctttcttcgcgggtactggggtaagggtggcgaacgagttaggcgcangaaatggcaaagcagcaaaatttgcaacgcaagtatcagtggcacaatcaacaatcattgggcttatattttgcgttctgataatgatattccatgagcatatagcatacatattcaccaccagcactttcgttctacaagccgttgacaacatgtcattactcttagctatcaccattcttctcaacagtgtacaacccgttttgtc

SEQ ID NO: 232003 - DNA, 367 bp, Glycine max
cgttaaacaaggcatttcaattatcgtgtcttcttggctctctgtttaggatcgacatggatttcttttttccattggcaatacttgtgatgatattaggcacaccatactctagtgcttctggaaagagtgaaagtaatgtgaaaacagctgtttttctgtctcctaagtttgaacttggaccgggatcggttgcaaataaatatgattatgatattgattttccaagaggtcatatagcacttaagagtttcaatgcagaggtagttgatgaagcatggaaccctgtgcctcttcatgaaacttatctccaccactgggttgtttggagatactatcaacctaaatatgtgacgacacacacaaa

SEQ ID NO: 232004 - DNA, 354 bp, Glycine max
ccctcttcttccccaccatcacaccaaccaaacctcactctccctgccatggtcatgggagcctttcgccacttcgaaccggtttccaaatgcagcaccgaaaaccggtttaaccaaaccgtggcctcggacttggacggcaccctcctggtgtcccctagcgcctttccttactacatgctcgtcgccatcgaagccggcagcttcctccgtggccttgtcctccttggatccgtccctttcgtgtacttcacgtacatattcttctccgagaccgcggccatcaagtccctgattttcattgccttcgcgggcctgaaggttaaggacattgagatggtcgcgtcctcggtg

SEQ ID NO: 232005 - DNA, 349 bp, Glycine max
tagcagagcagcgactcacactggtcttcgcttctcattcatcatttctcagctaaccttctcttcctctcagtctcagatcagaaacctcaggcagccatggcagcgttccagaagatcaaggtcgtcaaccccatcgtcgatatggacggagatgaaatgactagggttatctggaagtcaatcaaggacaagctcattttgcccttcttggagttggacatcaagtattatgacttaggccttccttaccgtgatgagaccgatgatgaagttacaattgaaagtgcagaagcaactctcaagtacaatgtagcaatcaagtgtgcaactatcactccagatgaag

SEQ ID NO: 232006 - DNA, 352 bp, Glycine max
cacacacccctcgcatccaacaatgtctctcaccattccctccaacctctccaagcccgccgccctccgccccaaactaagcccaaagctaaggtccgccgccacaaccaccatcgtctgcagcaccaccaacaacaacaacaacaacaacgtgtcctccgacctgaaggcgttctccgccgcgctggccctctcctccatcctcctctccgcccctctccccgccggcgccgacatctcggggctcaccccatgcaaggagtcgaagcagttcgcgaagcgtgagaagcagtcgataaagaagctggagtcgtcgctgaagctctacgaggcgggcagcgcccccgcactg

SEQ ID NO: 232007 - DNA, 403 bp, Glycine max
ccttctccttctcttctctgcttctctttgcatctccgaaaacaatgaagctcattagcagcattaaccccaaaaatctcaaactcagtcccaaacgcttctttcgcaaaaaggaacgatctttaatctcacgctccgacccaccttcattcggatccggatcttcctccgacgactccaccacaaatcacaagccttccgccggtaaccaaactccgaccagcgtcctcccgggcgtctccggagactggtccgacgtcgccgccgtcgacgtgcggtgggacctcgcccaggccttccgcctcatcgaccgcgacaacgacggcgtcgtcacacgccaggacctcgaggccctcctcacgtgcctcggcgcgtcgccgtgccccgacgacatggcggtcat

SEQ ID NO: 232008 - DNA, 360 bp, Glycine max
ggattcttcaaactccaatggagcatcacagaggctcctggacttggctcaacggctccgcctgtacaaacccccaccattccctgaagacatcttggatcagatcatggaagagaagggagataaggttgtctcagaagtgagttacacgaaatcagccaccccaattgctcaaaacacagcaaaaatcggatacaagagagctgctgttttgatctgcatctttgaaggggatgctggggatctgagagtgatactcactaagcgctcttccaagctttccacttactctggtcaagtggccttgcctggtgggaaagccgaggaaggggataaggatgatggggacactgcaaaaag

SEQ ID NO: 232009 - DNA, 354 bp, Glycine max
ggactatgcatttgagttcattatcaacaatggcggcattgattctgaagaggattacccttaccgtggtgttgatggtagatgtgacacatataggaaaaatgctaaggttgtttctattgatgactacgaagatgttcctgcctatgatgagttagctttgaaaaaggctgttgcaaatcagcccgtcagtgtagctattgaaggagggggcagggaatttcaattatatgtatctggtgtattcactgggagatgtggcacagcactagatcatggtgtcgtggctgttgggtatggtacagctaatggtcatgattattggatcgtaaggaattcatggggtcctagctg

SEQ ID NO: 232010 - DNA, 325 bp, Glycine max
gctttgagagagagagagggaggagggagagtgttgacgctccatcaagatgggtatttctagggattccatgcacaagaggcgtgccactggtggcaagaagaaggcatggagaaagaagagaaagtatgagcttgggcgtcaggccgcaaacaccaagttatcaagcaacaaaactatccggaggattcgtgttcgaggtggcaatgttaaatggacggcattgaggttggataccggcaattactcatggggtagtgaagcagttactcgcaagactcgtattctagatgttgtttacaatgcctcaaacaatgagcttgtg

SEQ ID NO: 232011 - DNA, 352 bp, Glycine max
gataggtggagttacatgccagtcatccatcttaatgcaattgcaattgatccaaggaacccaaatctctttgcggttgctggctctgatgagtatgctcgactttatgatattcgcaggtataaatgggatggatcaactgattttggccaaccaaccgacttcttttgccctccacacttgattggtgatcagcaagttggaataacaggcttggccttttctgaacaaagagagctgcttgtgtcatacaatgatgagcttatttacctttttacccaagatatgggtttgggaccaaatccccctgatcctgggtcccctaaatctatgaacagtgatgcaagtgaaa

SEQ ID NO: 232012 - DNA, 397 bp, Glycine max
aacactcataacacaaagcacaaagcaaagctcatccttgagttaaaaaatggcagcagcttcttccatggctctctcatccccatccttggctggcaaggccgtgaagctgggcccatcagccccagaagtgggaagggtgagcatgaggaagaccgtcaccaagcaggtctcctcaggaagcccatggtacggcccagaccgagtcaagtacttgggcccattctctggcgagcccccgtcctacctaaccggtgagttcccaggcgactacggctgggacactgctgggctttccgcagacccagaaaccttcgccaagaaccgtgaactcgaagtgatccactccaggtgggccatgctcggagccttgggctgcgtcttcccggagttgctg

SEQ ID NO: 232013 - DNA, 408 bp, Glycine max
agaataattatcttcttcaaaataaaataaaaaaaaataaaaaaaggaagcagataggaaagggttgaatccaaaaaaaaataaaaaatggcatttcttgacgtacggaaaaaaataatgggtagggtttggacttggacgatggcactgatgctttgcctgatggcagcatcggttaggagcgaggacccttatatttactacacatggaaagtgacatatggtaccattgcccctatgggtgttccccagcagggtatcctgatcaatggccagttccccggccctgaaatcaactccaccagcaacaacaatgttgtcatcaatgtcttcaacaacctcgacgagcccctcttgttcacatggcatggtgtccaacacaggaagaactcctggcaagatggtaca

SEQ ID NO: 232014 - DNA, 395 bp, Glycine max
ctggtactggcttccagtccaaagggtcttacttgtttggtcacttcagcatgtacataaagatggttcctggagattctgctggcacagtcactgctttctatttatcttcccaaaacgcggagcatgatgagatagactttgagttcttggggaacagaacaggacaaccttacattctgcaaacaaatgtgttcaccggaggcaagggtgatagagagcaaagaatctatctctggtttgatcccacgaaagaataccacagatactccattctctggaacttgtatcagattgtgttctttgtggacgaggtgccaatcagggtgttcaagaacagcaaggacttgggagtgaaattcccattcgaccagccaatgaagatctacaacagt

SEQ ID NO: 232015 - DNA, 368 bp, Glycine max
gtctcaagcaaccatggcaatggcaacccaagcctctctcttaaccccacccctctccggtctcaaagccagcgaccgcgcctccgtgccatggaagcaaaactccagcctctccttctccagcccgaagcccctcaagttctccagaacaatcagagcagcagccgccgacgagaccacagaggcaccagcaaaagtagaggctgcaccggtcgggttcaccccaccagaacttgacccaaacaccccttccccgatcttcgggggcagcaccggcgggctcctgcgcaaggcacaggtggaggagttttatgtcattacgtgggacccaccagtcgagtttgtctttgaaaagaaaagggcggccg

SEQ ID NO: 232016 - DNA, 357 bp, Glycine max
gtgattgtttgttgttgtaactcgttcttcttcttttgttgttctgtgtttgtgtttgttttttctctcacctgaaaatgtcttgctgcggtggtaactgtggttgcggaagctcctgcaagtgcggcaacggctgcggaggctgcaagatgtacccagacttgagctacactgagtcaaccaccaccgagaccttggtcatgggagtggcacctgttaaggctcaatttgagggtgctgaaatgggtgtgcccgctgagaacgatggctgcaaatgtggaccaaactgctcctgcaacccctgcacttgcaagtgaagtgttgggagagcaagcttcaagcagagataccccttaa

SEQ ID NO: 232017 - DNA, 338 bp, Glycine max
ttagaatatcgtgggcagtgttctgtgaaccccccaaggagaagatcatcctgcagccacttcccgagcttgtcactgagacagagccagcacgctttccacctcgcacttttgctcagcatattcaccacaaactattcagaaaggatcaggaaggtctcccaaattgatcactgcaggcatcacatttgtatttgtttgcttgtcttatgaattacttcttagttcttatgggttgtactaataaactaggccttgcatgtcggtgtggcctcatcaatcatcatgctaagtttgttttatcctttattaaatactattgatattaatcgtgtttg

SEQ ID NO: 232018 - DNA, 431 bp, Glycine max
cgattgaatgacgtgacactatataagagcaatgacgtcgcatgcacgcgtacgtaagctcggaattcgctcgagaagtagttgagaactaagaaggagaagcaaatggcttcctcaatgatctcttccccagctgttaccactgtcaaccgtgccggtgccggcatggttgctccattcactggcctcaagtccatggctggcttccccaccagaaagaccaacaatgacattacctccattgctagcaacggtggaagagtgcaatgcatgcaggtgtggccaccagttggcaagaagaagtttgagactctttcctacctgccagaccttgatgatgcacaattggcaaaggaagtagaataccttcttaggaagggatggattccttgcttggaattcgagttggagcacggtttcgtgtaccgtga

SEQ ID NO: 232019 - DNA, 440 bp, Glycine max
agctagctttcctcagtcaagggagagacaagcttgcatgcctgcaggtcgactctagaggatcccctcggggaattccaattccacattttcaagaaataaggaggcaaaaatgttcatatatgaattggaattatttgttttcttattaggcctatcctgaagccaaaggaaatgagatcggaattcctcggggaattccaattccacattttcaagaaataaggaggcaaaaatgttcatatatgaattggaattatttgttttcttattaggcctatcctgaagccaaaggaaatgagatcggaattcctcgggggtaccgagctcgaattccctatagtgagtcgtattaaattcgtaatcatgtcatagctgtttcctgtgtgaaattgttatccgctcacaattccacacaacataccaaccggaagcataaa

SEQ ID NO: 232020 - DNA, 354 bp, Glycine max
agcaaattgaggaagcagttgagagagaccaaggtgtgagtgatttcttcgtctatggtgtcaacttgacatttctagacttacaagaaaccaatgtgtatgacttgcaattgaagggacacacaccaaagtttgtttactacacccttcaaggtgttggagatgaaggggttgttttggtgtatccattgcccaaaggttctatggagaatggtgttgatgggaagtttctgaccatgatttttccggaggatgaaatggtgaagcttaaatctgagctcaagataattggtcttttgcttgagaataattaagttttaatgagattaaaagcatgtttgactttccgttcat

SEQ ID NO: 232021 - DNA, 411 bp, Glycine max
gcactatgctacaagcccaacaaacttgggtttaattggtataggcgtgccaaggtcttgttaattttgagcgttaagtgctgcaactaatcaaaatcccaagaccttggcctaccttgccatacagaaaaaaaaaaagcaaaaaaaaagccaaggtttggagccaacaaaaataaacacaaagcacaagtcatggaaagaataatggttggaagtgcaacaaaggttgctttcaccctcttggccactttcgccattgtcattccatgccttgaggctggcattgctgagtttgacgattttctcaaagcccaagctgatgaagcccataaaattgctcttgattcctatgtcccagagccccacgatgtcgcccatgaactcaatttccatgttcatatggcactggaa

SEQ ID NO: 232022 - DNA, 375 bp, Glycine max
ctcttcgctcctccgtcactccaccgccgcgtcgctccgccgttggtcgcgtgtttgcggcgagatctacatccttagtgtgaatctgcgattcttcgaatcgaatcaggtgagagcgtggtgtgtgtttgagttttgagtatggcagcggcggaagataagtggtgcgtggtgaccggaggtcgtggtttcgcagctcggcatttagtggaaatgctaatccgtcacaacgagtactgcgttcgcatcgccgatttggagggcaacattgttctcgagctcgccgagcagttagggcttcccgggcaggcccctgaactcgggccggggccaatatgtctcccttgatcttcgcaacaaggcccaacttctaaa

SEQ ID NO: 232023 - DNA, 406 bp, Glycine max
gctcctttatatattgtttccgtgtttttctctctttgtgattttgtgaggcccaaactaactttataagcaatttacgtgtttgaaattaatattttgtgagctagctagcttcttcatcatggcaaagtcttctactgaaaagaatggactgaagaagggtccatggactccagaggaagatcagaaactcatcgattacattcagaaacatggacatgggaagtggagaacccttcccaaaaatgcaggactaaaaagatgtggaaagagttgtcggcttcgctgggctaactacttgaggcccgatataaagagagggagattctcattcgaagaagaagaagccatcattcagttacacagtgttttgggaaacaagtggtctacaattgctgctaacttg

SEQ ID NO: 232024 - DNA, 350 bp, Glycine max
ttcaatttcaatcaacggttatacccttttctatttgagcatcatcatgtccaccgcagcgcagcccaaggccaagaaaacggcgtcgtccaagaagcccctctcccatcctaccttcgccgcgatgatagcggaggcgatagcgagtctgaaggagagaaccggttcgagccaatacgcgataaccaaattcatcgaaggcaagcacaaggagttgcctccaacctacaagaagcttgttctcgttcatctcaagaagtctgttgctgctggcaagctcgttaaggtcaaaaactctttcaagctcgcaccgactaagtctgctcctggtaaagccgctgctgctccca

SEQ ID NO: 232025 - DNA, 358 bp, Glycine max
ccgcaaagaagacgtggaaagggtcctccgcggttccgactgcgtattccaccttgcggccttcggaatgtcaggcaaagagatgctccaatttggtcgcattgatgaagtcaacataaatgggacttgccatgttatcgatgcttgcctccacctcggcatcaaaaggcttgtctactgtagcacaaacaatgttgtctttggcggtcaacagatcatcaacgggaatgagacattgccctatttcccaattgatcaccatgtcgatccatatggccgcagtaaatcaattgctgaacagttggttcttaagaacaatgcccgtactctcaagaacgactccgggaatcgtctttac

SEQ ID NO: 232026 - DNA, 354 bp, Glycine max
cattttcattggcacaatgcctgatgccaatgtgataatcaagaagcttagagaagctgaaggattaacttttggcaacagagtctattgggtgcgttttgatgaagaattttctgataagaaatttaaatcttccagcccttttggaataaagtacacgttccatttggaggacgctgttgattgtcctgaatggattgtccccttccatgtagtcaagtcattagctgaagagaatgactttgagcttgttttcgcaaagaactcacatgaatttgtgcatgagtatatgaaaaaaccggaatttgtggagctcatgcgaagacttggtgcattgggagatggcaaccaaga

SEQ ID NO: 232027 - DNA, 353 bp, Glycine max
gaaaatgggacagtatactcctttggatcaggtgctaatttctgtcttggccatggtgagcagcatgatgagttgcagccacgtcctatacagaaattcagaaggaaaggtattcatattgttcgtgtatctgcaggggatgagcatgcagtggcacttgactcaaatggatttgtatatacatggggcaagggatactgtggtgctttaggccatggggatgagattgagaagacaactccagagttgttgactagtctcaagaatcaattggctgttcaggtctgtgcaaggaagaggaaaacatttgttctagttaattctggttcagtctatggctttggctccatggg

SEQ ID NO: 232028 - DNA, 358 bp, Glycine max
attggaactgtgccagtgggacgtgttgagaccggtgtcttgaagcctggaatggtggtgacttttgcaccaactggactgacaactgaagtcaagtctgtggagatgcaccatgaatctcttacagaggcacatcctggtgacaatgtgggattcaatgttaagaatgttgctgttaaggatttgaagcgtggttatgttgcctcaaactcaaaggatgaccctgcaaaggaggctgctaacttcacagcccaagtcatcatcatgaaccaccctggtcagattggaaatggctatgcccctgtcctcgactgccacacttctcacattgctgtcaagtttgctgaactcatgaaca

SEQ ID NO: 232029 - DNA, 357 bp, Glycine max
aaaaaccttcccttctcttctcacccccacactcccatctcacacacccctcgcatccaacaatgtctctcaccattccctccaacctctccaagcccgccgccctccgccccaaactaagcccaaagctaaggtccgccgccacaaccaccatcgtctgcagcaccaccaacaacaacaacaacaacaacgtgtcctccgacctgaaggcgttctccgccgcgctggccctctcctccatcctcctctccgcccctctccccgccggcgccgacatctcggggctcaccccatgcaaggagtcgaagcagttcgcgaagcgtgagaagcagtcgataaagaagctggagtcgtcgc

SEQ ID NO: 232030 - DNA, 405 bp, Glycine max
ggaataacagacaaaggagattcagaactcatcgcgcacaatcaagtcgacaccaccaccaacaactcttactagaggacgattctcaaagctctcttccagcagaaaatggtgagggcgaggaagaggaggaggaactcacggaacctaaaataaagcttgctatgtgggattttgggcaatgcgatgccaaaaagtgcactggacgcaagctttcaagattgggcatgctaaaagagttacgtgtgagtaatggttttgggggcattgttttaagtccggctggaaatcaatgtgtctcaagagaagattactctttaatccagaagaaaggattggctgttgtggattgttcatgggcacgcttagatgacgtgcctttcgtaaggctgcgctgtactgctc

SEQ ID NO: 232031 - DNA, 261 bp, Glycine max
atcatcatgggcacctctgctattcagcaatcagcattcgcaggtcaaactgctctgaagcagctcactgagttggtccgcaagaccggtggcgccggcaaaagtcgcaccaacatgcgccgtaccgtcaagagtgctcctcagagcatttggtatggccctgatcgtcccaagtacctgggtccattctaagagcagattccgtcatacctgaccggagaaattccccggtgacaacggatgggacactgctgggctatc

SEQ ID NO: 232032 - DNA, 397 bp, Glycine max
  unsure (1)..(397): unsure at all n locations
cttaaacgtctctctctttctttgaggcttctttccctctcttcgtcccttgctctgtgtcgccgtaacacaaaaagggaagagagagaaagaaccaccccacccaacaacagcttttgttcttcacaagacatagcttcgtgtgtgtgtttcttttcttccttccagcttggaaagactgaagtctctgtctttttcaggttttgggggtgttgttgaagatgttggtagcaaatagctttgatctatggcgaaaggacggttttttctctgcggcggaagaggtgcaggaatcagctgatataatggaatctgcatacanggcatggttgagagagaagagagaaaggtcaactcctgaggaattaaatgaactatgcagagagctgcaaactgc

SEQ ID NO: 232033 - DNA, 357 bp, Glycine max
ctttcaccctaggtgtgaagcagatgatctgttgctgtaacaagatggatgccactacccccaagtactctaaggctaggtatgatgaaatcgtgaaggaagtctcttcttacttgaagaaggttggttacaacccagacaagattccctttgttcccatctctggttttgagggtgacaacatgattgagaggtccaccaaccttgactggtacaagggaccaactctccttgaggctcttgaccaaatcaatgagcccaagaggccctccgacaagcctctaaggcttccattgcaggatgtctacaagattggtggtattggtactgtgccagtgggacgtttagagactgggg

SEQ ID NO: 232034 - DNA, 361 bp, Glycine max
gttccccacagatcttaacacttcaaagttcaatctccccattttcatttttccatagcataagctaacagaataagaaaaatgaagttgaggtcttcaatcgcatttatttgcattctggcgagtgcgagtgtgacaatttcagaatcattaagccaacaagagcaattgtcagcatatgaagttcttgagaaatacgatctcccagtggggcttcttccaaaaggtgccacagggtatgagctaaacgaaaaaaacgggcacttcacagcgtatttgaatggaacatgctacttcagcatagagtcgtatgagctaaagtacaagtccacaatcaagggcgtgatctccaagggcaagt

SEQ ID NO: 232035 - DNA, 274 bp, Glycine max
taacaatggagtatgaaagatggaccagggaaattactatttatacgaacactacaaaaataccatcaagtggttgaggaactttcattttcctaccctttaccattccttttatctatcttgtttttgtgttttcctttctttgatatgttgagataagagcatgaaggctagcaagatatgtaagattcatttttttttatcccgttttgttgtagaagagatgtgaattgttaccgatttggtttggttgaatcaacaaattcttttcctg

SEQ ID NO: 232036 - DNA, 481 bp, Glycine max
cgaatgaattacgtggccgacagaagacatagacgtcgcatgcacgcgtacgtaagctcgggattcggctcgagccctcttcagcccgaacgccgaacctccccgttcggttcccgctcgtggattggtggttcgcgcagcgaaaggatccacgaaccaccgcgccctgaccggagtgatttttgaaccgttcgaagaggtgaagaaggagctcgatctcgttcccaccgttccgcaagcttctctcgcgcgccaaaaatacgttgacgaatctgagtccgccgttaacgaacaaatcaatgtggagtataacgtttcgtacgtttaccatgccatgtttgcgtacttcgatagggacaacgttgcgctgagaggacttgccaagttttttaaggaatcgagtgaagaagaaagagagcatgctgagaaattgatggagtatcagaacaaacgtggtggaaaagtgaagttgcagtcaatt

SEQ ID NO: 232037 - DNA, 271 bp, Glycine max
gcgaatccggagacgctgcccgatggaaccgtgaatttgatggtgtggcattgcactattcccgggaagactgggactgattgggagggtggctacttcccacttacgctgcactttagtgatgactaccctagcaagcctccagagtgtaaattcccacaaggtttcttccaccctaatgtttatccttctgggactgtttgcttgtctatacttaacgaggatagtgtgtggaggccacccataacagttaagcaaattctcgtgggca

SEQ ID NO: 232038 - DNA, 303 bp, Glycine max
cgaacatgtgcgagtacatggcgccatcgctggacgtgagacaagacgtagtggtgatggaggtgccgaagctgggaaaacaagccgcaacgaaagcgattaaggagtggggtcaaccaaagtcaaagatcacacaccttgtgttctgcaccacttcaggcgtggacatgcccggagcagattaccagctcacgaagcttctcggcctgaggccctccgtgaagcgcctcatgatgtatcagcaaggctgcttcgccggcggcaccgtactccgcctcgcgaaggacctcgccgaggaacaac

SEQ ID NO: 232039 - DNA, 431 bp, Glycine max
ttaggatgccgtggcactataaaagacaatgacgtcgcatgcacgcgtacgtaagctcgggattcagctcgagagaaagtgctagagatgtgcattggtatgcaaattccttaattttcacaaaccttttttggttattcttggttgcaggtgttggaaagagttgccttcttctacgattctctgatggttctttcacaactagtttcatcacaaccataggcattgattttaagataagaaccattgagcaggatggaaaacggatcaagctccaaatttgggatactgcaggtcaggagcggttccgaacaattacaactgcttactatcgtggtgctatgggcatattgctagtctatgacgttacagacgaatcttcatttaacaatatcaggaattggattcgtaacattgagcagcatgcttca

SEQ ID NO: 232040 - DNA, 402 bp, Glycine max
tgatatagttgttgatgaccaggacagaccattacggacttctcagctgcatactaaagatgttcaagctaaacctctcagtggttctgctaggagttgcactaaagtaagatccttcactatttgattgaaaaatgagagctagaagtttactgggaaaattaaccacatggtatttgttttaggttcacaagaagggcattgcacttggtagatcagtggaccttacaaagtacagtggctatgatgaattagttgctgaattggatcagctgtttgaatttgggggtgaattattgtcaactaaaaaagattggcttatcgtctttactgataatgagggtgatatgatgcttgtatgcgatgatccatggcagtaaggatctgtattttaattataca

SEQ ID NO: 232041 - DNA, 400 bp, Glycine max
gggctgaacaatggccggaaaacatgtcggcggcgagggcttagcggggaacctcgccggaatgtcgaagaatcagctctacgatatcatgtcgcagatgaagaatctaatcgaacagaaccagcaacaggccaggcagatcctcatacaaaatcctaaattaaccaaagcgcttttccaggcacagattatgcttgggatggtgcaagcacctcatgtgggttcaaaagttcggccaatgggttcacagagcaatcagcagtcagtacatctaatacatgaaccaaatagtcagcctgctccattattgcctgagcacggtggtgcacatgattaagcaggtgtatctcaaacccaaattcctctgaggaaacaccagaaccagccttcagtgccaatt

SEQ ID NO: 232042 - DNA, 416 bp, Glycine max
caattaaggaaacatttgataaattggttgaagatgggaagatcacaccaatcaaggaaatcacacctccaccaatccctgaggaccttagtactgcaattaagagtggaaaagtccgtgctccaactcatattatttccaccatttctgatgacagaggagaggagccatgctatgctggtgtacccatgtcttccattattgaaaaaggttatggtgttggtgatgttatctctcttttgtggtttaaacgaagccttccccgttactgtactcaatttattgaggtaggctattcaacagcagagatttcattgaatactttcctttcacagtgtttgtctggagtatgtgaaaatattctacactctacagacaaacttttatgttgtcagttttccttttagatttttttt

SEQ ID NO: 232043 - DNA, 427 bp, Glycine max
  unsure (1)..(427): unsure at all n locations
cgcgtccacgcgtacgtaagatcggaattcggctccgagagaataatccggttgattacttgtcaagggaacattaaaaataggggatttcattgtcagccagccttttgaggatgataaagatgaccttcggcgatcacctggcactcctgttttcactgcaccagaatgtattttaggtgtgaaatatggtggtaaagctgcagacacgtgggcagtaggagttactttatactgtatgatattgggtgaatacccttttcttggagacacccttcaagatacatatgacaaaatagtcaataatcctttagtactccccaacgacatgaatccaccattgaaaaacttaatagaaggacttctttccanagacccaagtttaaggatgactttgggtgctgttgcggaagatagctgggttatt

SEQ ID NO: 232044 - DNA, 365 bp, Glycine max
attcaccacaatcttattagttaaactttgtccacggacatcattaggacgtttgcgcaatgttggtgtctagctatactgtcctactaatatcacggtttctcgtcactggcgtgtgtgtttggggaagatccgccatctttctgcggtaccttgaaagtcactggtcacagactcacaacaagtaaattgatcaaggcagagccatccaactcattctagactaaaactctggttgtggctttgcctccaagagtaagtacatgtttggccgtgttagcatgaagatcaagctcattccgggagactctgctgacacagtcactgcattttatatgaattctgacaccgacactgtacgtgat

SEQ ID NO: 232045 - DNA, 365 bp, Glycine max
  unsure (1)..(365): unsure at all n locations
gtgaatcagcaccacattcacctgagctttttgtgaggattccaaagcatggcttcccttgcagcatccactgctgctgcttcccttggcatgtcagaaatgcttggaaaccccatcaacctcagtggtgccacaaggccagctccatctgcctctagccctgcctccttcaagactgtggctcttttctccaaaaagaaggctgcacctccaaaaaaagctgcagctgctgctcctgccaatgatgagcttgccaagtggtatggtcctgacagaatgatcttcttgcctgagggtctcttggaccgatctgagattccanagtacttgaccggagaatccccggagactatggttatgaccca

SEQ ID NO: 232046 - DNA, 394 bp, Glycine max
aaagaagaaataatatgcgcttaagggaggagcaagatgctgcatacagggctgcacttgaagctgatcaagctagggaacgacagagaagagaagaagaagaacatcttgcatgggaagctgctgaagccgagagaaagcacaaggaagaggaggcggctcgtgaaagagcagcacaagaagctgcagagaaacaagctgcattggctaaaatacgtcaagagaaagcccaatctcttggtgaagaacctgaaaaaggacctaatgttacacaggttttggtacggtttccaactggtgaacgcaaggaaaggaggttctacagcacagcgacaattcagtctttgtatgactatgttgactcacttggatgtttaaaagccgagagttacag

SEQ ID NO: 232047 - DNA, 368 bp, Glycine max
gggaggtactacaaacttctattctaatctcgcagttttagcaattatcacttggcaaatcttgcttgtctgtgtaccaatggtttacattacaatacgcttgcagaggtactatttttccactgcaaaagaagtgatgcgcatgaatggcacaacaaaatccatcgtagctaatcatgtagctgaaactactgctggagttgtgacaataagagcctttgaagaagaagatcgtttctttgagaagaatcttgatctaattgacatcaatgctagtcctttcttccatagttttgcctcaaatgagtggctgatccaaagattagaaataattagtgcaatacttctttccttcacagcactatgca

SEQ ID NO: 232048 - DNA, 382 bp, Glycine max
gttttcttaaaatttcttccttgccactgccagtgtgtcaccaccatggccaccgtcacaacccaagcctccgccgcgattttccggccatgtgcctcgaaatcgaggtttctgaccggctcttccggtaaactcaaccgggaagtgactatgaggccaatggggtgccctccttctgcctctttcaaggttgaagccaagaagggagagtggttacctggcttggcctccccaacttacctcaatggcactcttcctggtgacaatggatttgaccctctgggactagctgaggacccagagaacttgaggtggtacgttcaagccgagcttgtgaatggacgttgggccatgttgggtgttgcaagaatgctacttcctg

SEQ ID NO: 232049 - DNA, 306 bp, Glycine max
gccaaggctaagattaccaaggaacccaaagctaaaaaggtttccagaccacgcaaccctcccactcatccttcctaggaagagatgattaaagacgcaattacctcgctgaaggagaaagacggttcgagccaacacgcgattgcgaagttcagcgaggataagcacaagcagcttccaccgaacttcaggaagcttcttctctaccatttgacgaaagttgtagccgctggaaaactcgtcaaagtcaaaggctccatcaagctcccacctacgcgaccttctgcatcatcttcatcttcgccg

SEQ ID NO: 232050 - DNA, 352 bp, Glycine max
ctgtctcgtttacacatctctccaacctttcactttcgtttctcagttttattcgaatccctctctcaatctcctttccaaatggccagcgttgaggttgcacagcaaacaccaacaacagttccagaaaatgaaacaaccgaggtaagcaagacccaggaaacaaccccagtcactgaggctcctgcaacagaacaaccagcagctgaggttcctgcaacagaacaaccagccgctgaggctcctgccccagaatcaaccaccgaagcaccaaaggaagaaaccaccgaggcaccaacagaaacagtagaaaaaacaactacagaagtagccccagaggagcctaaagaag

SEQ ID NO: 232051 - DNA, 336 bp, Glycine max
ctttttcctgtcgacagtcaatgcatagagctcgtgcagatctagagcagatgcaaactgtgtcatactgagaagcttagtgacatacagtgtcagcctgagtcacagctttagttcataactgatgcctggcgacaaataattgaatgtacaacagtgctgaaatggtcatatgcatatgggttctatttgccggatcatgagcatgcaatcaagcagttctttgagtacttaccaagtgactcagaatctggtctggcgagacttcatcaatgcgcagaagaggaactacagccattcttaactgctgatgattcatctagagaatttaatgac

SEQ ID NO: 232052 - DNA, 324 bp, Glycine max
atctgggattgtggagagtgtaggggaaggagtgagtgaagttgaggaaggggacatagtagtgccaatattcaatggggagtgtggagagtgttcgatgtgcaagtgtgagaagaccaacttgtgtgagaggtttggggtggatgccacgaagaaggtgatggaaggagatggcacaacaagattctccactgttaatgggaaacccattttccatttcttgaacacttcaactttctcggagtacacggtggtggattcggcctgtgtggtgaagtttctggactccgatcacagtctcagccacaggaacctcaccttgct

SEQ ID NO: 232053 - DNA, 404 bp, Glycine max
  unsure (1)..(404): unsure at all n locations
ctctcttctcgctcttggcttttcgctcttcactcactctcattcagtcatttccaccgttcatggatccagtaagcgtgtggggtaacacgcccttggcgacggtggatcccgagatccatgacctcatcgagaaggagaagcgccgtcaatgccgcggaatcgagctcatcgcctccgagaacttcacctccgtcgccgtcatcgaggccctcggcagcgctctcacgatcanatactccgagggcatgccgggcaaccgctactacggcggcaatgaatacatcgaccagatcgaaaagctctgccgctcacgcgcnctccacgccttccacctcgacgcccagtcctgcggcgtcaacgtccagccctactctggctcccgggcaacttcgcagcctaca

SEQ ID NO: 232054 - DNA, 348 bp, Glycine max
ggacgaagtagacgacctgaaaatggtgggaaccaaattgatagtaagaagctgtaccagcttgatcttgacaaaatcgtctgtggtgaagatacaaggactactttaatgattaaaaacattcctaacaagtatacgtcgaagatgctgcttgctgcaattgatgagaatcaccagggtacttatgacttcctctacttgccaattgacttcaagaataagtgtaatgtgggttatgcttttatcaatatggtgtctccttcacacatcatcgccttctacaaggcctttaatgggaaaaagtgggagaagttcaacagtgaaaaagttgcttcactggcatatgca

SEQ ID NO: 232055 - DNA, 415 bp, Glycine max
cttggatccctttcgatccgacgacttcgttcgttccttctccttccaagttctaaccatttcccactgtcttcgattttagggcattaaatctgccatggcagcagcacccgctagagctcgtgccgattacgattacctcatcaagcttcttcttatcggcgacagcggtgtggggaagagttgtctacttttgaggttttctgatggctcattcacaaccagttttatcaccaccattggtatcgattttaagataagaaccattgaactagacagcaaacggattaagttacaaatctgggatactgctggtcaggagcggttccgaactattaccacagcttattaccgtggagccatgggtaccttgctggtttatgatgttactgatgaagcatctttcaataatatt

SEQ ID NO: 232056 - DNA, 387 bp, Glycine max
tgataaggttattgttgaagcctttaagatggtgaatgcagatgacaccatgacagttaaagaatacgaattcaagagattgataaggttattggtgaagcctttaagatggtgaatgcagatgacaccaagacagttaaagaagacgaattcaagaaaattttaagtgaaatacgggtagtatcacgttacagttagaggcaaatcccatatctgtttcttccaattcagttgtgcatgagcctttaggctcatcttctacactcttgcagccatctagtgaaacagcataattgtctcaagtttgtgacgggtcaaaaactaagtacaataagattttttattcatggaaattgttactgacatagtttatcttttaagaaatca

SEQ ID NO: 232057 - DNA, 426 bp, Glycine max
ttcatgattacagtcagtgaagtgtgcatattacactctgcagatggtgacattcatcttcaattcaggctctctctctcctttccaaatggccagcgttgagattgtgctagtgttgattatgtgatgtttcacttgtgtgtctctcccgtcaagttatttgcttctcatgtttacaaatccagctttcttaagcttggcacgagactttgttagatgaaattagaaatctcccaggttgcacatcatacaccaacaacagttccagaacatgaaacatccgatgtaatcaagacacaggaaacaaccccgggaccagtaccagccactgaggctcctgcaacagatcaggcagcagctgaggttcctgctcatgaagaacaacaagcaactgaggttcctgccgcagaatcaaccaccgaagca

SEQ ID NO: 232058 - DNA, 405 bp, Glycine max
ctcaagtccaacctacccctttttcttctcccaccaacttcaccgtcttcttcctcgatcatgtctcacttcaagggcaagtaccatgatgagcttattgccaatgctgcttacattggcactcctggaaagggtattcttgctgctgatgagtcaacagggacaattggcaagcgtttggccagcatcagtgtagagaatgttgaatccaacaggcgtgctcttagggagctgcttttcaccgctcccggtgctcttaaatatctcagtggtgtcatcctctttgaggaaactctctaccaaagcacagctgcaggcaaccccttgtggaagtcttgaaggaggctggtgtgcttcctggcatccaagttgacaagggcacagtttgagcttgctggcactaat

SEQ ID NO: 232059 - DNA, 398 bp, Glycine max
  unsure (1)..(398): unsure at all n locations
ggtgactgcgcgatgggtgcctacaagtatgtttcagagctatggcgcaagaagcagtctgatgtcatgcgcttcttgcagcgggtgaggtgctgggagtataggcagcaaccttccattgttcgcttgacaaggtcgacccgccctgacaaggctcgtcgcttgggcttcaaggctaagcagggctatgtgatataccgtgttcgtgttangaggggtggccgaaagaggccagttcccaaaggtattgtttatgggaagcccacaaaccagggtgttacccaactgaaatttcagcgtagcaagaggtcagttgctgaggagcgagctggacggaagctgggtggacttanggtcctcaattcttactgggtgaatgaggactctacttataaata

SEQ ID NO: 232060 - DNA, 235 bp, Glycine max
agctcactgcttgtcatgaaggttacaagctgcatggttgcggtgttgatggttagttttggacacataattcccttggcagaagctgaaattccatgtggcagggtgcaaatcacagtggctccatgcatagggtacctaaggggtcctggtggaggtgtccctgcagcatgctgcaatggggttaggagcataaacaaggaagccaaaaccaccccagatcgtcaaggggtgt

SEQ ID NO: 232061 - DNA, 388 bp, Glycine max
  unsure (1)..(388): unsure at all n locations
attcggcccaagggaatttggaacaaattgtacccatgaaatacaacccaaggaataaaatttcattaaaacctgtaatggctaaggccaatgttgtaatcaaccttattggaagggattataaaacaaaaaactacaccttttaaaaaattgcactatcacatggctaagcaactagcaaagattccagagcatngtggtatcctgagatttattcaagtttcttgtttaagtgcatctccttcatctccatctangatgctcagaactaaatcagctgctgaggaaatgattttaagggaactacctgaggccacaatcttgaaacctgctgtaatgattggtacagaggatcggattttgaatccatgggctcattttgctaaaa

SEQ ID NO: 232062 - DNA, 404 bp, Glycine max
  unsure (1)..(404): unsure at all n locations
gctgttgagtggaaccatatcgagcacctgagttgacttgttttgtcccttgtccatctccatggccactccacagtcccacttccgttttctcgctttctcactctctatcatccatatctctctcttcctctccacaaccgcaacccatcaatcgctcctcgaagaacaagacactcccatcacgcacttccagcgctacctccgcattaacacagcccagccaacccctgactacacctccgcggtctccttcctcaaagcccacgcccaaagcctgggcctcagaatccaacacctcgatttcgtctaaggaaggcccgtcctcttcttcacttggccgggctcaaacccttccttcncatccctccttctcaattcccacctcgactccgtccccgccg

SEQ ID NO: 232063 - DNA, 398 bp, Glycine max
tcggcggcaattgccagattgccatcattattcatagacaatacaggaggcaatgatgtgcatagatgaattggcattacttgttttcttaataggcctatcctgaatccaaacgaaatgagatcggaattcctcggggaattccacttccacattttcaagaaataaggaggcacaaatgtccatatatgaattggcattatttgttttcttattacgcctatcctgaagccaaaggaaatgagatcggtattcatcggggaattccaattccacattttcaagaaatacggaggcaaaaatgttcatatatgaattggaattacttgtattcatattaggcctatcctgaagccaaaggaaatgagatcggaattcctcgggggtaccgagctcga

SEQ ID NO: 232064 - DNA, 278 bp, Glycine max
tgctgacaaatattgggatctgtattctaacgagtcacttgagcatgaccttcccggtcaccttctccgctaccccatcggggttgccagtgaaggagatgtcaccgagctgccaggatttgaattctttcccgacaccaaggctcgcattcttggtggcaaagctgactacctcccccctattctcactacttaatttgattttgtactttgttacaaacttgttattgcttacatcctaatctgtgttttcattactacttagtaataaagaagct

SEQ ID NO: 232065 - DNA, 338 bp, Glycine max
tacgacgtggcgtccaaactaagccacacggctaataaatacggccggcacactttcactgcatcaagaaaggaagaaacataccgaatgagagcatcaaactcttcttcttcgatttccattgcgaagcgttactttttcttcttctttctcttcattttcttcgctcttcgatcttcgtccggggactgctccgaataccaccaccaccactcgccgatggccacgatcggaggcttacacgactcccaaggctctcaaaacagcgtcgaaaccgaagccctcgctcgattcgccgtagacgaacacaacaagaagcagaattcgcttctggagtt

SEQ ID NO: 232066 - DNA, 379 bp, Glycine max
  unsure (1)..(379): unsure at all n locations
gagcaagagagacataccagttgaagcattcaggggagggttcatattgtcaaaagttgcgaacccttggtcaacaggtgagctcaagttgaaaaacaccaacgtggaggacaaccctgctgttaccttcaactacttcagccacccttatgatcttaggcgctgtgtggagggtattcgcttggcgataaaggttgtccagtcagaacacgtcacaaactacactttgtgtgagagagaaactgcagagaaaatgcttaacctcagtgtgaaggccaatatcaacctcattcccaagcgccccaatgacacaaagtcagtagaacagttttgtanagactccgtgatcactatttggcactaccatggtgggtgccat

SEQ ID NO: 232067 - DNA, 380 bp, Glycine max
  unsure (1)..(380): unsure at all n locations
cagcaagagacccttcagggattctctccccatacacctacaatctaagaaacacaggccctgatgatgtttacataaaagttcactactgtggaatttgccattctgatctccaccagattaaaaatgatcttggcatgtccaactatcccatggtcccaggacatgaagtggttggtgaggtactggaggtggggtcagacgttagcaggttcagagtgggagagttggtgggagttggactcctcgtaggttgctgcaaaaactgccagccatgccaacaagacattgagaattactgcagcaangaagatctggtcttacaatgatgtttatgtccattggaaaaccaagcaaggttggctttgctgaaaacatgg

SEQ ID NO: 232068 - DNA, 307 bp, Glycine max
gtccaagccctatacaaccaatccctaacacacactcatttgattcaatttctatggctagcctcatcgttgcatttttggctgcagtgctctgcatggttgtggtgagtgcacccatggcacatgcaactatcacgtgcgggcaagtgaccaatagcctgatcaattgcatctgttacctccagaacggaggaacgccgcacgtcaggatgctgcaacggactgaacagcctcaatgccgcagccactgacatcgcagatcgacaaacggcgtgcaaatgcctcaagtcggccgccattcaaatct

SEQ ID NO: 232069 - DNA, 423 bp, Glycine max
acagttagtacaaaaaagggttacttcagcttccacatatcttgaagaattgatcaatgggcaagtctgtagttgagaagctactttggatggcaattgtgtgcttggtgctgggtgtaatttccattactcccaaggcccaagcagcagtgacatgcaaccaggtggtgagcaacctcaccccatgcatttcttatgtgctcaatggtggcaaaaccgtgcctggcccttgctgcaatgggatcaagaccctctttaacctcgctcactccacaccagaccgccaaaccgtttgcaagtgcataaagaacgctgttagtgcgttccattatggcaagtccaatgtggaccgtgctgctgctcttcctaagcagtgtggggttaacattccttaccagatcagcccttccaacgactgtacca

SEQ ID NO: 232070 - DNA, 365 bp, Glycine max
ttgtacaatttcacccaagcggtatatatggagcaggttgccttatcacataatgatctcgtggtgaaggtggaattcttaggaatagtgagggtgagcgatttatggaacgatatgcccctactgcaaaggatcttgcatcaagagatgtagtttcaagagcaatgacgatggagattcgggaaggtcgtggtgtaggacccctgaaagatcacatctatctccacttgaatcacttgcccctagatgtgctcaaagagagacttcctggcatctctgaaactgctgctatttttgctggtgtggatgttacaaaggaaaccattcctgattttgcaaactgtacattataacatgggcggtat

SEQ ID NO: 232071 - DNA, 183 bp, Glycine max
atcattcctcctcttcctcagtactgtcattttcgattcgcttcactgtaactaggtttaattctaaggccttcatcgacaatgaccatcggacgtcatcgttcaaggcgcatcgtaatggctgtctaatcggatgtgactccgatcagcgccgagaacttccgcgcgctctgcacctgcgag

SEQ ID NO: 232072 - DNA, 414 bp, Glycine max
ggtagatgatgggaacgctatctacgcaatttcgttccatcaaacgcccaaattcaaaccctaaactatccaaatcgtcatctcctacaaaatcagaaattaaattcaacgctaaaccaaaaccaaaatcagagtcagagtcagagtcatggtctgtttatctcatcctctccaccaaccatcctatcaaaacctacgttggaattacaaacaatttccctcgccgtttgaagcagcataacggtgaacttaaaggtggtgcaaaggcatcccgtgctggaagaccttggatttgtgcatgcataatttgtggttttacagaccgaagtgaagctagtgtatttgaatcaaaatggaaaactttctcaaggagagctccccgcaaaaatcaaaatgacaatctctccaagcaaa

SEQ ID NO: 232073 - DNA, 379 bp, Glycine max
ctctgattgtgtatatgatttgcatccgggcgatcacatagagattcagtggagaagaaacaaagaatttccttatggttggtggtatggtgttgtaggccacttggagttatgcgatgggaatgaaaattactgccgttgtcatagtagtgacacagtggtgctagagttcaatcagtacactcctgactcgcgttggaggaagacaactataagtagaaaagatcatagagaggaaggaaatgaagcagatggtttttatggaggaatcagaaagattaagagtgagactgagatttccatttggaaaagcatttggccttctgaagtcttggactaatcagatttaattttccacttagcattatgtcaagactag

SEQ ID NO: 232074 - DNA, 297 bp, Glycine max
gctgagcttaaggtgaaggaactcaagaacggacgattggccatgttctctatgtttggcttctttgttcaggccattgtcaccggaaagggtccattggagaacctcgccgatcaccttgctgaccctgtcaacaacaacgcctgggcctatgccaccaacttcgtccccggaaagtgagcgtcaaagaacgaaatgacttttgagagtttttagatttgtgtttggtgaagtacttcagataatgtgaattatcttgtgtatccgaatccaacttaatgttacttgctttttaca

SEQ ID NO: 232075 - DNA, 307 bp, Glycine max
ctcttacatggatgctgttagagtttatcttggttataaaaggacatgtgtagctggcttccttcaatttttgactttgtatggtactagtattgcttatgtactaaccacagcaactagtctgagtgcaattctgagatcaaattgttatcacaagaaagggcatgaagctccttgtaaatatggtggcaatctgtatatggcactgtttggacttgttcagattgtaatgtcattcataccggatctccataacatggcatgggtttcagttgttgcagcacttatgtcctttacatactcagtc

SEQ ID NO: 232076 - DNA, 383 bp, Glycine max
agaccaagccccactcaaccaccacaccactctctctgctcttcttctacctttcaagtttttaaagtattaagatggcagagacattcctatttacctcagagtcagtgaacgagggacaccctgacaagctctgcgaccaaatctccgatgctgtcctcgacgcttgccttgaacaggacccagacagcaaggttgcctgcgaaacatgcaccaagaccaacttggtcatggtcttcggagagatcaccaccaaggccaacgttgactacgagaagatcgtgcgtgacacctgcaggaacatcggcttcgtctcagacgatgtgggacttgatgctgacaactgcaaagtccttgttaacattgagcagcagagccctgat

SEQ ID NO: 232077 - DNA, 324 bp, Glycine max
aatggcatttccgtccgtaacctctgtaactgtggataacgtgacattccctcccaacgtgaaacctcgctgctcccccaacaccttcttcctcgccggcgccggcgtcaggggcctccaaattcatcacgctttcgttaaattcactgccatctgcatttaactccaatacgacgccctttccttccactccgttaagtggaaaaccaaatctgctcaccagttaacggaatccgaccaattcttctcagatatcgttacaggtccaatcgagaaatttatgcacgtgacaatgatcaaacccttgacggggcagcaatactc

SEQ ID NO: 232078 - DNA, 374 bp, Glycine max
cgggagagatggcacctgcaaatttgacaaaaccaaagttgcggctactgtatctaattacagtgtggtttcccttgatgaagaacaaattgctgcaaacctagtaaagaatggccctcttgcagttgctatcaatgcagtttttatgcagacatatgttggtggcgtctcatgcccatacatctgtgggaagcatttggatcatggggttcttctagttggttatggtgaaggtgcatatgctcccattcgttttaagaacaaaccttactggatcattaagaattcatggggcgagagctggggagagaatggatattacaagatctgcagaggtcgaaatgtgtgtggagtagattccatggtctcaactg

SEQ ID NO: 232079 - DNA, 394 bp, Glycine max
gtcaaagccttctgctcttgcaaagaagaaggttgacagctctgattctgatgatagcagctctgatgaagataaggggaagatggatattgatgatgatagttctgatgaaagtgaagagccacaaaagaaaaagactgtgaaaaatccaaaagaaagcagtgatagttccgaagaagacagtgaggatgaaagtgaggaggaaccctccaaaactcctcagaaaagagacagggatgtggagatggttgatgctgcctcgtctggaaatgaagccgcctaagacccaagtttacaccaaagaagaaactggcgcttcaaagacacaatttgttgggaacttgcaatttagtgttgaacgagctgacgtggaagatttcttcaaggatgctgg

SEQ ID NO: 232080 - DNA, 365 bp, Glycine max
atagctaataagctaggttcagtagttagtgagtgatcgatatctggagatgggtcgaggcaagattgagataaagttgattgagaaccccaccaacaggcaagtcacttactccaagcgaaggaatggtatcttcaagaaagctcatgaactcagtgttctctgtgatgccaaggtttcacttatcatgttctctaaaaacaacaagatgcatgaatacattagccctggcctcacgacaaaaaggatcattgatcagtatcagaagactttgggggatattgatctgtggcgttctcactatgagaaaatgcttgaaaacttgaagaagctgatagatattaacaacaagctcagaagacaga

SEQ ID NO: 232081 - DNA, 354 bp, Glycine max
gggaaaattaacaagtgcataacttttcctgatatgctggatatgattcctttcatgaccgggacgggtgatattccaccactttacatgctttatgctgttgttgtgcacctggacacactaaatgcatctttctctggacactatgtttcatatgtgaaagatctgcaaggcaattggttcagaatagatgatgctgacgtacagccagtgctaattaatcaggtcatgtcagaaggagcatatatcctattctacatgaggtcctgtcgccgtcctccggtagaacatactatgaatgccatgcagcaatctgtttatgattcttcaaagcacaatccaatggaaatgcag

SEQ ID NO: 232082 - DNA, 325 bp, Glycine max
caacagcctccatggaggcttgaacaagctcgctgagttgttggaggtcgagagggttgggattagccatcaggccggctccgatagcttgctcacttcctgtacattcaggaaattgaaggataatttctttagtggctccttggagaagtatgcaggtgtcttgtatgggttaggtgttgagaatggacaaggttctcattgaggacaaaagaagatgataaaacttgttagatctctctttgtttgagctgcttctgtatatctgttgaaataccaatttctattaatgtaaacctttggcattaagtgtctttattaaaaa

SEQ ID NO: 232083 - DNA, 322 bp, Glycine max
cgcacctcgactcgctcgtgggacaggcactgttcggagatggcgccgcagcgttgatcatcggatcagaccccgacccagcagtggagcggccgatattcgagatgatatcggccgcccagacaatcctgcccgactctgacggtgctatagatgggcaccttcgggaggtgggactcacgttccacctcttgaaagatgtgcccgggatcatctcgaagaacattgagaagagtcttgttgaagcttttgagcccatcgggatcagcgactggaactctatcttctggatcgcacatcccggtggtcccgcgatcctcga

SEQ ID NO: 232084 - DNA, 351 bp, Glycine max
  unsure (1)..(351): unsure at all n locations
gacgtcacatcgcaccttaatccgaattccgctccagcaagtatcaagggaacaatgatggggcttaccttgggactacatttccacaactcatcttgatgacttaaggacaactgattccacataaaccagcacacgctatgttccatgagtttttgggttcacagttcacaagccatatagctgaagttgaagctttcatgaaagtaaaaatctgcccgtgtcacatttaactcttccttatggttctctttgcaacatccggcaaatcatatgctttccaanacagtacaatctaggcatctgttttaattgttatacgagcttgttgtaaagaaatatgcagacatg

SEQ ID NO: 232085 - DNA, 381 bp, Glycine max
aagggcttgacaattttgatgagtggacaattgatttgaggaaactgaatatgggtgagccttttgctcaaggagcttttgggaaactttaccgaggtacttacaatggtgaagatgttgcaatcaaaatcttggagaggcctgaaaatgatccagcaaaggctcaattgatggaacaacagttccagcaggaggtcacaatgttggccacactaaagcattctaacatagttcgtttcattggtgcatgccgcaagccaatggtatggtgcattgtaactgagtatgccaaaggtggttcagttcgacaatttttaatgaagcgtcaaaaccgctcagttcccctcaaattggctgtcaaacaagctttggatgttgcaa

SEQ ID NO: 232086 - DNA, 312 bp, Glycine max
  unsure (1)..(312): unsure at all n locations
tcagcttttcccatcgtgaaatgagtatgggttcttcattgaggcacttgtgtctaactttggattcactagtctcttcagcattctgtgcctttccacggcagtcagtcgatgttccattctgcatanactacgttcctacctgggcctctgatcacatcacatacttcagtgcaggttctgacaatcaagttcatctgtgacagtacactggtaatggcttctagtgcaaagggtcatacgtgtatggtcacttcagcatgagcatgaagatggttcctggcgattcagctgtgcaagtcactgcatttt

SEQ ID NO: 232087 - DNA, 372 bp, Glycine max
gacaggcaccatgtcacttcttaaccagctctttaacagaggcgttttcggcactcgatgcaaaacatgcctgaacctggcaatttcacgcattaagctgctgcaaaacaagagagatatgcaactgaaacaaatgtgcaaggagattagccaattcttgcacgctggccaagaggcaattgctagaatcagggtggagcatatcatacgggaacagaatacatgggctgcatatgaaattttggagttgttctgtgaatttgttcttgcacgtgtacctataattgagaatcagagggagtgccccacggaattgcgagaagccattgcaagtataatttttgctgctcctagatgttcagatgtaccaga

SEQ ID NO: 232088 - DNA, 358 bp, Glycine max
gaggacatgtgccagttgtgcgaccatattgcttccaatttggtcttcttcaccctcttacggtttgcatcagattcccctaattcttgcttgattttgcgctttcgctatattttcttcaaaatgactcaagatctagagatgaaggatcgctcaacgccttcgaactccgtttcttcgcctgctccatctactctgcagcatttgatggagatagcgtctcttatcgagaccggttcgtactcgaaggaagttcgtaggattgctcgcgctgttcgccttagaattgcgttgaggcggaaattgacagcatccgctatctcttcttttctcgatcatgttctcactcctggctctg

SEQ ID NO: 232089 - DNA, 375 bp, Glycine max
  unsure (1)..(375): unsure at all n locations
cttcacaccattctcacacaacaactttcaaactctgagaaagaatggctgccaacacattgatgagtactgctatctcagccttcccatctctcctttcttcctcaaaatccagatttgccaccgcagttcctctttctagctttggtgtcaccaatgcctcttcttctcgcttttctatgagtgctgactggatgccaggccagcctagacctccttaccttgatggttcagcacctggtgactttggattcgaccctcttcgtcttggtgaagtaccagagaatcttgagaggttcaaagagtcagaactcattcactgcanatgggccatgcttgctgttccagggattttggttccagaggcattgggct

SEQ ID NO: 232090 - DNA, 397 bp, Glycine max
gttaccggattggcttagagcaccgacaggttatacttatttgatgaacatgatgaaagactcggagagaaagagctatggatcgctgttgaatactttttatgagcttgagggagattatgaggagcattacaagaaggccatgggaactaaaagttggagtgttggaccagtttccttttgggtgaaccaagatgctttggataaggccgatagagggcatgccaaagaagagcaaggggaaggagaagaagggtggctcacatggcttgattccaagacagagaactctgttctctatttgagttttgggagcatgaacaagttcgctactcgtcaacttgttgaaatagctcatgcccttgaggattcagaccaagggttcatttgggtgggt

SEQ ID NO: 232091 - DNA, 360 bp, Glycine max
  unsure (1)..(360): unsure at all n locations
atttcaacgcaaaagtctccgattttgggttggtaaaacttgctcctgaaggggaaaaagcatctgtaatgacccggcttgcacggacgtttggatatttggcgccagaatatgcagtgacaggaaaaatcactaccaaagcagatgttttcagttttggggttgtgctaatggagttgttgactggattaatggcacttgatgaggatagacctgaggaaagccaatacttggcagcatggttctggcatataaaatcagataagaagaaactaatggctgctatcgatcctgcccttgatgtanaagaagaaacatctgagagcgtctccatcattgctgagctagcaaggcactgca

SEQ ID NO: 232092 - DNA, 403 bp, Glycine max
ataacttaggaaaagcaacccctgcttccatcttgaaaggtgctaatggaaccaatagtcctggttctatcattgttgctgccaaggaagctgttaaaaggagagtggaagctgcttcagctgccaccaaaagagctgaaaatatggatgccattgtgaaggctgctgagctggcagcagaagctgtatctcaagcaggaaaaattgtaactatgggtgatcctttgccaataagtcagttggtagaagctggcccagagggatgtttgaaagcaacccgagagtcttctcagcaagttggattattcaaagacattaccagagatatggtgaacattaatgtgagagatattcctgaaacttcttatacacataacagagacattttatctggtggcatttc

SEQ ID NO: 232093 - DNA, 392 bp, Glycine max
agagaagctctgggatgacgttgttgctggccctcaacctgagcgtggccttggcaagctcagaaaactcaccaccctcaaaactattgatgaaggagacagtagcaagctgcagaagacgttgtcgatgccgtcgacaccgacaaccccgatgactcccacgactccaacgacaccgggatccgcgcgtaaagctgacaacgtttggaggagcgtcttccatcctgggagcaactccgccacaaagaccatcggtgctcagatgtttgacaaaccacttcccaacactcccactgtctacgactggctgtacagtggggagaccagaagcaggcaccgctgaaaggataagctaagaaaaccgtgggttgcatgtaaatattgtcgttttt

SEQ ID NO: 232094 - DNA, 379 bp, Glycine max
agaaaaccaaagttgatagagtgctgatgtgctggtgggccttcacaggtctcacacacattattcttgagggttattttgttttctctcctgagtttttcaaggataaaactggcttctacctggctgaagtttggaaggaatatagcaaaggggattcaaggtatgcaggaagggatgcaggggtagttactgttgaaggaataacagcggttttggagggtccagctagccttctagcagtatacgctatagctactgggaagtcatatagctacatacttcagtttgccatttctttgggacagctatacggaactgctgtttattatataacagcaatcttggaaagtgataatttttctacaaactcgtttta

SEQ ID NO: 232095 - DNA, 369 bp, Glycine max
  unsure (1)..(369): unsure at all n locations
ctcacanacacacactgaactaaaaaacatcaaaagagacatggctgagcaaaccttcatcatgatcaagcctgatggcgtccaaagaggccttattggcgagatcattagcagatttgagaagaaaggtttctacttgaaaggtttgaaacttgttactgtggaccgtccttttgctgagaagcactatgctgatttgtctgccaagcctttctttagtggtttggtggattacattatctctggccctgttgttgccatgatctgggagggcaagaatgttgttacaactggccgaaagattatcggagccacaaacccagctcaatctgagcctggaactatccgtggtgactttgccattgacat

SEQ ID NO: 232096 - DNA, 400 bp, Glycine max
gcgccgtttctgtgcttttactctgctaccttgtgacaatggtgagggttagtgtgttgaatgatgctcttaagagcatgtacaatgctgagaaacggtggaagcgccaggtcatgattacgccatcctcaaaagtgattataaaattccttttggtgatgcaaaagcatgggtacattggagagtttgagtacgttgatgatcacagagctgggaaaattgttgttgaattgaatggtagactgaacaaatgtggggttattagtccgcgttttgatgttggtgtcaaagagattgaatgttggactgctaagctgctcgcctcaagacagtttgggtatattgtgttgactagctcagctggcatcatggattatgaataagctaggagaaagaatgt

SEQ ID NO: 232097 - DNA, 379 bp, Glycine max
ccctcatcttgcaaaattctctcagctaattcgctattttcttgtagtaaacaaagcatgcaagcatatccatttcaacatggccctcaaaactggttcagttgagatgttcttcttccccttcgtaggaggaggacatcagattccaatgatagacacagcaagagtgttcgcatctcacggagccaaatcaaccattctagtcacaccctccaacgctctaaacttccaaaactcaatcaagcgcgaccaacaatccggtcttcccatcgccattcacaccttctccgccgacatacccgacacagacatgtctgccggtcccttcatcgacacctcggccctcctcgaagctcttcggcagctcctcatccaacgg

SEQ ID NO: 232098 - DNA, 368 bp, Glycine max
cgggaagcttcattgggagcatgaaggagacagaggagatgttggagttctggaaagagaagggtctgagttcgatgattgaaatggtaaacatggattacattaacaaagcctttgaaaggttggagaagaatgacgtgagatacaggtttgttgtggatgtcaaaggcagcaaacttgtcgatcagtaaaagaaagaaagtatactactagcacgacacacgcaacatccatccttccatcatgaagagtctggaaaagttattaattaattgagaactaaagctgtatttgttgttcactctaaaaaagaagctgtgttttgtttattaaaaagagtgctctgttttctctgttttggttacacg

SEQ ID NO: 232099 - DNA, 393 bp, Glycine max
aaagaaacaggtttcgcccgttacaacatcatcaagatcaacgctcttccgtcctctcttcaccgacgttggcattgcatttgacatgatgcttctcgctcacaacgccggcggcaaagagaggacggaagagaactggaagtggctgttcaaagaaacaggtttcgcccgttacaacatcatcaagatcaacgctcgtccttccatcattgaggcgtttccaatctaacgaagaggaagccactacacttcatgtgcgtggttttatgttgcatgtgttgttattattactaacagctatgtgatcttcgtgtgatgtggttttcatccctacccgtgttatgtttgtgtattaaataaaagtatgaaacgccccaccaccaagtaatatgg

SEQ ID NO: 232100 - DNA, 399 bp, Glycine max
tccatggctagcctcaaggttgcatttttggctgcagtgctctgcatggttgtggtgagtgcacccatggcacatgcagctatcacgtgcgggcaggtgacgaatagcctgatcaattgcatcggttacctccagaacggaggaacgccgccgtcgggatgctgcaacggagtgaagagcctcaatgccgccgccaagaccaccgccgaccgccagacggcgtgcaactgcctcaagtcggccgccagccaaatctccggcttcaaagccaacaacgccgcctcgctccccggcaaatgccgagtctccatcccctacaagatcaagcactccaccaactgcgctaccatcaaggtttgaagagaaagtcatggacgcaggaaaccgggaactactcac

SEQ ID NO: 232101 - DNA, 369 bp, Glycine max
  unsure (1)..(369): unsure at all n locations
ctaacactcattaattgcaagaatggcacttcgttgcttggtgatgtccctttctgttctcttcactcttggtcttgcgagagaaagccatgccagagacgaagatttttggcatgctgtttggccaaacactcccattccaagttcattgcgagatcttctaaagcctggccctgcaagtgttgaaatcgatgatcaccctatgcaaattgaagaaacacagtacccgaaaaccttcttctataaagaagaccttcatcgaggcaaaacaatgaaagtacaattcagcaagcctccctttcaacaaccatggggtgttggtacatggttaaaggaaattaaagacactactaganaaggatatagttt

SEQ ID NO: 232102 - DNA, 366 bp, Glycine max
ctttcaattccaaattcagtctcacaaattagaatggctagccaatcaaacactaaatcagttcacgatttcacagttaaagatgccaggggaaatgatgttaaactcgccgattacaaaggaaatgtccttctccttgtcaatgttgcctcacaatgcggcttgactaagtcaaactacacagagcttaatcaattgtatgagaaatacatagggaaaggacttgagattctggcattcccgtgcaatcagtttggggctcaggagccaggaactaatggacagattgtggagtttgcatgtactcgcttcagaactgagtttcccattttcgacaacgtggatgtgaatggtgacaatgctggt

SEQ ID NO: 232103 - DNA, 363 bp, Glycine max
gcatcttcttctggtagtttagacacctctgcaagtgcaaactccttcaccaacttcaccttctccacacaccctttcatgaccacttctttctctgaccttcttgcttctcccacagacaacaacaaaccaccacatggtggtggtggtggtttgtctgagagaactggctctggtgtccccaaattcaagtccacaccaccaccttctctgcctctctctccccctcccatttctccttcttcctacttttctattcctcctggtttgagccctgctgagcttcttgactcacctgttctccttaactcctccaagattctgccatctccaacaactggagcatttgttgctcggagcttc

SEQ ID NO: 232104 - DNA, 377 bp, Glycine max
ggcaaagctatttttgaaacaggcaaagcaatacgcagatgcaagaccaagctatcctccacaactcttccaattcattgcttccaagactccctctcactacctcgcttgggacgtcggcactgggagcggccaagctgccaaatctttagctgcaatatacaggaatgtgatagccacagatgctagtgacaaacaacttgaatttgcagccaagctcccaaatgtgagataccaacacaccccttcaaccatgtcgacggccgagcttgaacaaatggtggcatctgagggaaccatagaccttgtgaccatagcacaagccctgcattggtttgaccgcccaaccttctacgaacaagtgaagtgggttctca

SEQ ID NO: 232105 - DNA, 344 bp, Glycine max
ggaaaaacacacctaggcgctgttcaaacctggccgaacccgaaacatcactctatataaataatgcaaacctaaaacagaggttcgtccctcttactaacactacggtttacagagaagcgaagaggcgcagccgtagcagtaactcgtggaattgctagcaatggcgaggatcaatgtttacgagctgaggcagaatacgaaggctgatctgttgaatcagctgaaggacctcaatgccgaacttgccatgcttcgtgttgctaaggtcaccggcggtgcacctaacaagctctctaagatcaacgtggtgaggttgaacattgcccaggttttgacggtga

SEQ ID NO: 232106 - DNA, 389 bp, Glycine max
agcaccggtgacatgggagctgatttttatcatcgatacaagggtgacataaaaatagcgaaagaaattgggctggactctttcagattctctatctcatggtcaagaatattcccaaagggcaagggagcagttaacccccttggggttaaattctacaacaatgtcatcgatgagatcctagcaaatggtttaaaaccttttgtcactctttttcattgggactttccacaagctcttgaagatgagtatggaggattccgtagtcctaaagtagtggcggattttcgtggctacgcaaacttctgcttcaagacctttggagacagagtcaaatattgggtcactttgaatgaacccttatcatttagtctcaatggctacaatgg

SEQ ID NO: 232107 - DNA, 358 bp, Glycine max
ctttagatgctttgatgatggacaaatcacatcaaatcgcatcttctacacgctcagactaatgtctgcatcatggacttgttgacactgatacttccatggtcttggcagcttatgagtactacaggcatgacggtgttgtacggaatgtgattgacatgtatgttggagaactataaatgattagattcaagcacgttctcaaagttgatcaagcctagcttgacactgtgactccagatattatagggcgtgtcaaaatagtcatttcagcatatccatgatcatttgctacactgttgcgggtggatacattcactttttgtgctaatgtgcagattgacaatcgagcttatga

SEQ ID NO: 232108 - DNA, 379 bp, Glycine max
taaacacacccccgcctggagctactgatttgtatttccccaccaagtattctcaatccacattggggcaatttaaatcctgtttttggaagcagtggctgacatactggaggagtccagattataatctcgtcagatattttttcaccttggcttgtgccctcatgatagggacagtattttggagaattggcaaaaacagggagagctcagctgatctgacaatgattataggagcaatgtatgctgctgttatttttgttgggattaacaattgtcaaactgttcaaccaattgtagccgttgaaagaacagtgttctatcgagaaagagctgctggaatgtatgctcctttgccttatgccttagcacaggtctt

SEQ ID NO: 232109 - DNA, 379 bp, Glycine max
cacaacttattaatataatcgtggctaaaatggtgataactatatatattacttttatttatacatttaataatagaataagtatattgataaaaaataatatatatatatagatatatatatatatatatatatacatatatttataattatgtattaaataatataaacatattaaagtttagagaaatagacataatatttacaagttgaatttaattacaaaatattaacagtgtaaagaaactttacattcatctcattagtcatttttcgtgtactataatattcacatatgaaagacatgaatatagcataatattaagatattgtctaatccttttggctaattatgtgtgcgtcatttaaaatattttct

SEQ ID NO: 232110 - DNA, 358 bp, Glycine max
aagaacttggctttgcttccttcaaagtgaggtctctaagtttcactttctttgcataaggcaatctcctttctctgtgactctgagtatcgtatcgttttattattatttctaattctctcttatcatgtccactgaatatgtctccgtcgttggatcttcctctcaacggtggcttcaattttgatctaagccgaagatacgcaatgcttcaacacaatggcctcaaagcctcagtctttctcaatactgggaccactagtgtcagtttagttttccatgatggtgtcattcttggtgctgatactagggcatctgaaggacctatagtggctgataataactgtcagaaaattca

SEQ ID NO: 232111 - DNA, 275 bp, Glycine max
ggactccatgaggaagagggtgagtatgaacaacctcacgcagtacgagctccctcgcgacgccgccaatgccacggacgacgtcgctgccggctacgcctccgctgacgatgccgctccgatagattccggcaataaccgcgaccgcaagcgacggattccatgggctgaggaagagcacaagctattcttggtggggttgcacaaagtggggaaaggtggttggtgagggatctcaaggaacgatgtcacgacgaggacgccaacacaggttg

SEQ ID NO: 232112 - DNA, 357 bp, Glycine max
cttgttttttgcaaattcgcaacccacacagcaagggaaggtgcgagtgagtgagtatggcgtctccattatcagctcaattggttcaatgtcagaactcacttccacctcttcagggtaattttagccaagatgtgtctaaggttcaaaggtcgcgtgtggtatgttacggtaccagatcaccgcttggttattatggtaaagcattgacatcaagatcacataacgccctgaggttttctgtcacgcgacaatctgaagcacggtcaattggatataggagaatgacatgtgtcaatgctgcagacaatgttgtagagcttcaagccaaggtgacaaccaagtgtttctttgatg

SEQ ID NO: 232113 - DNA, 412 bp, Glycine max
gtagaacccaagccacagccagtctctgctccttcaccaaaggtgagcactaagttttctgatgtgttggcattcagtgggccagcacctgagaggatcaatggaaggttggccatgattgggtttgtggctgcaatggcagtggaagtagccaaagggcaaggtgtgttagaacaaatatccaatggtggcatcccatggttcttggggacaagtgtggtccttacccttgcttccttgattccactcttccaaggtgtcagcgtggagtctaagtccaaagggttcatgtcctcagatgcagaactgtggaatgggagatttgctatgttgggtttgattgctctggcttttactgagtatgttaagggtagtactttggtataattcagtcatgaaagcacaccacaat

SEQ ID NO: 232114 - DNA, 409 bp, Glycine max
ggactgcacaaacttgcttactgcaataactggtgataactgctgcctcaattcttcagtttttgatcaattcattacgaatgaacctcagccaacagcaacaaagaacatgatgcacttggctcagattgttagaagtggggttctggcaaaattcaattacggaggaaaatctcctcaaatctataacctttccaatatcccccacgacctccctctcttcataagctatggtggcgaagatgcactcgctgatgtaattgatgttaggaatatgctagctgacttgaagttccacgatgaagacaaactaagtgttcagtacatcaaggaatatgctcatgtagactacattatgggagtcaatgccaaggacttagtgtacaatggtattacttcatttttcaag

SEQ ID NO: 232115 - DNA, 370 bp, Glycine max
gcaaaaatggcacctgcaacactgtctctgtctctcctcctcctgttctcactcagcatcgccgtaaccgttagatcgagcgactacgactacgattgtgtgtacactgcatacgttagaaccggttcggtgttgaagggcggaacggactctaagatcgggctgaagctgtacgacaagtacggctactacatctacattaaaaacctcgaagcatggggcggcttgatgggcaagggctacgactacttcgagcgcggcaacctcgacatcttcagcggaaggtgaccctgtcttgacggacccgtctgtgccgttaacgttacttctgacggatcggggttctcacacggctggtaccttaactacg

SEQ ID NO: 232116 - DNA, 370 bp, Glycine max
ctccacaagcttccccgcgactccactctcctccaatctcctcttcttcaagctcaatcacacttcttcttcttcttccaaacgaacctcaaccttccatggcttcaagcgcttttcacccgtcatggagtggcaggattgcacggttaacatggagattgatgtgcccatctctgtagcctacacttgttattctgatcgcgaagccatcccaaactggatgccctttatttcttctgttaagatattgccaggcaaacctgacctgtcacggtggtccttgaagtataaagcatttggtcgtgatattgaattctcgtggcttgctcgtaatatgcagcccattccagatcagaaaattcactggcga

SEQ ID NO: 232117 - DNA, 393 bp, Glycine max
aagagctatgaaatcgcatgcacgcctacgtaagatcggaattcggctcaaagttaatctctctctctctggagcgtcctcgcttcgtcacggcacacaaccccttttcggatcggcggagcaatgcctcaccggcgagattcccgacgctgttcaatcagccatcgaacacctgcgaaaagccgcaaatatgaacgttttcgttaaaactcgcaatggcacgcacttcgaaattgaagtgaaaccctcagacacactttctgaagtgaagaataatatagaaaccgttcagggtgaacatgtctatcctgctgcacaacacatgcttagtcatcaaggaaaagttcaaaaggatggtactactttggcgcaaaatatactagctgaaaatag

SEQ ID NO: 232118 - DNA, 360 bp, Glycine max
ctttccgattggacctttccagcttctaaacttggctggctatggagttgccgttgctacttcaaaagtatttgctgatgcattttctgatcgcatatttaaatcgccactgcttgatcttctgatcaaatctgggcgaaatggcaaaaacaatgggaaagggtactacatttatgaaaagggtggcaagccaaaacctgatccttcaatactaccaatcatcgacgagtctagaagactttgcaatattatgcccaatggaaagcctatatctattactgaccaagagattgtggagatgatactattcccagtagttaatgaggcatgccgtgttctagaagatggagttgttatacg

SEQ ID NO: 232119 - DNA, 355 bp, Glycine max
  unsure (1)..(355): unsure at all n locations
cgccacggccgaagagatcgcaaagcaaataaaaaactcgacgctctaccacgaacttgccaccgacgacatgaacaaacaggccatggacatctgcaaggaagttctaggttacgctgtcgatgacatgcaccaatccgttcgcaagttggaagagtttgaactaaacaagttgaacgattacgcctatgatctcaaggtctggatcgccggtactctcgctcaccaacagacatgtttggatgggttcganaacacgaccaacgaggctggcaagaccatggctagggttctcaacacttctttggagctcagcgacaacgcattggacatagtggacggtgtaaccaatctc

SEQ ID NO: 232120 - DNA, 267 bp, Glycine max
caagacggacgcaaccatcacacctcacctcgttcacgcgacgcctttctgctcttcttctacctttcacgttttaaaagtagacagatggaagagacattcctatgtacgtcagagtcggtgaacgagggacactctgacaagctctgcgaccaaatctccgatgctgtcctcgacgcttgcgtcgagcatgacccagacaggatagttgcctgccacacatgcaagagagacaagttggtcatggtcgtcggagacgatcaggag

SEQ ID NO: 232121 - DNA, 358 bp, Glycine max
atccatttccacaccacaccatggcctcaaccaacgctctctcttcagcctccattctacgctctcccaaccgccagtctctgacccgaagagcgaaccataatggaagagtaaattaccggaaaccgaataaccgtttctccgtgaaagcctccgccaaagagattgcctttgaccagcattcccgctctgctatgcaggccggcattgacaagctcgccgacgctgttgggctcactcttgggcccagagggaggaatgttgtgttggatgagtttggaagtcctaaagtggtcaacgatggtgtcaccattgctcgcgcaatcgagcttcccgattctatggagaatgctggtgc

SEQ ID NO: 232122 - DNA, 380 bp, Glycine max
gtttttagggtttacaccgagcagcgacacctccctcccgcagtagccatggttctcaaaactgaactatgccgattcagtggtgccaagatctaccccggaaagggcatcagatttgttcgtggtgattctcaggttttcctgtttgccaactcaaaatgtaagcggtatttccacaaccgcctgaagccctcaaagctcacctggactgctatgtacagaaagcaacacaaaacggacattgctcaagaagctgtgaagaagaggagacgcgctgccaaaaagccttactctaggtccattgttggtgccactctggaagttatccagaacaagagagctgataagccagaagttcgagatgcagctatggaagctgc

SEQ ID NO: 232123 - DNA, 397 bp, Glycine max
gatagagagagacgcttcgcaaatctcaatcgaatctcagaaaaatgagagaaatcatcagcattcacataggtcaggccgggatccaggtcggaaactcctgctgggaactctactgcctcgaacatggcatccagcccgacggcatgatgccttctgactccaccttcggtgtagcccacgacgccttcaacaccttcttcagcgaaaccggatctggcaagcacgtcccccgtgctgtcttcgtcgacctcgaacccaccgtcatcgacgaggtccgctgcggcacctaccgtcaactcttccaccccgaacaactcatctccggcaaggaagacgccgccaacaacttcgcccgcggccactacaccgttggcaaagagatcgtagatctgtg

SEQ ID NO: 232124 - DNA, 392 bp, Glycine max
ggtttctgtgcctaaattcctcttcatatgtggatcaaatgttgtccaaaaaggccttgctagtggtgtcacaggtatggctggtcttggcagaactaaagtttctcttccttctcaatttgcctcagctttcagctttcatagaaaatttgccatttgcttgagttcttctactatgacaaatggtgtaatgttctttggtgatggcccttacaattttggttatttgaactcggatctctccaaggttctaactttcacccctctcatttcaaaccctgttagcactgctccaagttatttccaaggggagccctcagtggaatactttattggggtgaaatctattaaagtctcagacaaaaatgtaacattgaacacaaccctgttgt

SEQ ID NO: 232125 - DNA, 379 bp, Glycine max
ggaattattaattggtgtttactgggattaatgaaacctagctagaaaggaaaatgatgggagaacaagggagtgtattttatatatatatatgtaaaaatttgtgtattgtttgtagtggttaaatttgtgaaaaaggtaaaaggttttttctttctttctgggtatacatactaaagggtttttgagagttcagtctgctttgagatttgtgttttggatgatggaggaagctcagggcagttctagttccctgccacctttcctcaccaagatttatgagatggtggatgatccttcaactaattccattgtttcatggagttccaccaataggagtttcattgtttggaacccaccagagttttcaagggatttg

SEQ ID NO: 232126 - DNA, 353 bp, Glycine max
gttcaccaattaggctttcaagagacaaactgttttgaaaaatgggatccaaggttgttgcatccgttgcccttctcctctccatcaacatccttttcatttccatggttagctccagcagccactacgatccaccgcccccaccttgttacgtccctgctcctttaacagcaccaccatcattgtcaccaccagcgtcattgtcaccaccaccaccgtcaggacctagttgtccggatctgagtgtttgcctcagtgttttagacgggtctcccgcggagggttgttgtgccctcatcgctgatcttgttgagcttgaagcctctgtgtgcctttgcatccaactcagggtc

SEQ ID NO: 232127 - DNA, 206 bp, Glycine max
aaaaaaaaaaaaagaaaaaaaaaaaaaaaaaaaaaaaaaaaaaagaaaaaaaaaaaaaaaaaaaacaaaaaaaaaaaaaaagaaaaaaaaaaaaaaaaaaaaaaaaaaagagaaaaataaaaaaaaagggggtgccccccaaaaattagcctcgtcaaccggggatttatttcgggtgggaaactgtaaggggtggaaattttccc

SEQ ID NO: 232128 - DNA, 404 bp, Glycine max
ttcaacttaagagatcaatatggccaccaccactacccagcctccctctaatatctgttttttccttctgttgttgcttctagcacactttcatttgggcataagccaacttgagctgaattactactctaaaagctgcccaaaagctgaagagatcatcaaggaacaagtcacacaactatataacaagcatggaaacactgccgtttcgtgggtcagaaatctcttccacgattgcgtggttaagtcatgcgatgcatcattactgttagcgacggtgagcgatgtagtgtcggagcagacatcggatagaagttttgggatgagaaacttcaagtacgtaaacactatcaaagcagcggttgagaaagaatgccccttcacagtgtcatgcgctgacattg

SEQ ID NO: 232129 - DNA, 385 bp, Glycine max
caagaaagagaagctcaaaaaggaacgactcgtcaagcagatcaagcgcgaggtgtcggtgatgaaactcgtccgccacccccacatcgttgaactcaaggaagtcatggccaccaaaggaaaaatcttcctcgtcatggaatacgtcaatggcggtgaactcttcgccaaagtcaacaatggaaaactcaccgaagatctcgccagaaagtacttccaacaactcatcagcgccgtcgatttctgtcacagccgcggcgtcacccaccgcgacctcaagccggagaatctcctcctagaccaaaacgaagaccttaaagtctccgacttcggactctccgctctgccggagcagcgccgcgccgacggcatgctcttaaccccg

SEQ ID NO: 232130 - DNA, 363 bp, Glycine max
caacaatggcaatggcaacccaagcctctctcttcatcccacccctctccggtctcaaacccagcgaccgagccaccgcgccatggaaacaatcctccaccctctccgtctccacctcgaagcccctcaagttctcgcgaacaatcagagcagcagccaccgaccagaccacagaggcaccggttgggttcaccccaccggaactggacccagacaccccttcgccgatcttcggaggcagcaccggcgggctcctgcgcagggcccaagtggaggagttttatgtcatcacatgggactcgccgaaagaacagatctttgaaatgcccactggcggcgctgccatcatgagggagggtccca

SEQ ID NO: 232131 - DNA, 375 bp, Glycine max
aaacactcataacacaaagcacaaagcaaagctcatccttgagttaaaaaatggcagcagcttcttccatggctctctcatccccatccttggctggcaaggccgtgaagctgggcccatcagccccagaagtgggaagggtgagcatgaggaagaccgtcaccaagcaggtctcctcaggaagcccatggtacggcccagaccgagtcaagtacttgggcccattctctggggagcccccgtcgtacctaaccggtgagttcccaggcgactacggctgggacactgctgggctttccgcagacccagaaaccttgcgcaagaaccgtgaactcgaagtgattcactccaggtggggcatgctcggagccttgg

SEQ ID NO: 232132 - DNA, 249 bp, Glycine max
  unsure (1)..(249): unsure at all n locations
ggcgaacagttcctcaagtatccaccacctaaagtgatgcacgtcgacaagtctgcatggatgactgatgaagaatttgcaagagaaacaattgctggtttgaatccaaatgtcatcacgattattgaggagttcncactaagtaacaagctaaatactcaagcctatggtgatcagacctgtataataacacatgagcatttggagcctaacttaggtggtctcactgttgatcatgctatccaaaac

SEQ ID NO: 232133 - DNA, 379 bp, Glycine max
accaaccttgtgccctaccctaggatccacttcatgctttcgtcctatgctccggttatctctgccgccaaggcctaccacgagcagttgtcggtgccggagatcaccaatgccgtgttcgagcccgccagcatgatggccaagtgtgatccaaggcacggcaagtacatggcttgctgcttgatgtaccgtggtgatgttgtccctaaggatgtcaatgctgctgttgccaccatcaagactaagaggactgttcagtttgttgattggtgtccaactggattcaagtgtggtatcaactaccagccaccttctgttgttcctggtggtgaccttgctaaggttcagcgtgctgtatgcatgatcagcaacaacaccg

SEQ ID NO: 232134 - DNA, 404 bp, Glycine max
gaagtatggtgctggaattggccctggtgtctatgacatccactccccaagaataccaccaactgaagaaatcgctgacagaatcaataagatgcttgcagtgctcgagaagaacatcttgtgggtcaaccctgactgtggtcttaagacccgcaagtacactgaagtgaagccagccctcacaaacatggttgccgcagcaaaactcatccgtaacgaacttgccaagtgaatggtataagaaagtagaatctacaagttcattggttctgcttttataatacaccaaagaaaaattttctatattgggttgtttcaataaccgtgtgtggaatatttagatgttttagcatgctctgtgagcaattgaatcctcctcaaaccctctccccttaattttccca

SEQ ID NO: 232135 - DNA, 338 bp, Glycine max
  unsure (1)..(338): unsure at all n locations
tgtgaatcagcaccacattcacctgagctttttgtgaggattccaaagcatggcttcccttgcagcatccactgctgctgcttcccttggcatgtcagaaatgcttggaaaccccatcaacctcagtggtgccacaaggccagctccatctgcctctagccctgcctccttcaagactgtggctcttttctccaaaaagaaggctgcacctccaaaaaaagctgcagctgctgctcctgccaatgatgagcttgccaagtggtatggtcctgacagaaagatcttcttgcctganggtctcttggaccgatctgagatcgcagagtacttgaccggga

SEQ ID NO: 232136 - DNA, 380 bp, Glycine max
gtttgaaggcatgccagcagtgttcacaggaatgttaggaggggaagaactatctcaagcctatgcaagtggagatgtctttgtgatgccgtcagagtcagagacacttggccttgttgttctggaggccatgtcatcaggaatccctgtggtgggagcgcgtgccggtggcgttccagacataattccagaagaccaagatggcaaaattggttacctctatacaccaggtgatcttgaagattgcctgagcaaactaaagccgcttttggatgacaaagagttgagagaaaccatgggagaagctgcacgtttggagatggagaagtatgattggagagcagccactcagaagattcgcaatgaaaactacaatgctg

SEQ ID NO: 232137 - DNA, 366 bp, Glycine max
tctgtgacctgtttggagctggctgaaatatgcagagaagttggccttcctccaggggtattaaacattgttactggattaggcaatgaagctggtgctcctttgtcatctcatcctgacgtagacaagatttcctttactggaagctctgcaactggaagcaggattatgacagctgcagcacagctaacgaagcctgtttctctagagcttggtggaaaaagcccaatcattgtttttgaggatgttgaccttgataagactgctgaatggaccatctttggctgcttctttacaaatggtcagatatgcagtgcaacatctcgccttattgtgcatgaaagtatagcaacagaatttgtgaat

SEQ ID NO: 232138 - DNA, 421 bp, Glycine max
catgcacgtctacactagatgatcacctcggtgaattccaattccacattttcaagaaataaggaggcacaaatgttcatatatgaattggaattaattgttttcttattaggcctatcctgaagccacaggaaatgagatcggaattcctcggggaattccaattccacattttcaagaaataacgaggcaaaaatgttcatatatgaattggaattatttgttttcttattatgcctatcctgaagccaaaggaaatgagatcggaattcctcggggaattccaattccacattttcaagaaataaggacgcacaaatgttcatatatgaattggaattatttgttttcttactaagcctatcctgaagccaaaggaaatgagatcggaattcctcgggggtaccgagctcgaattccc

SEQ ID NO: 232139 - DNA, 354 bp, Glycine max
cacaaccaggtccctgaatgctttttagagagagaaagagtaataataataaagtggaagaaaaagaattaggagagtgaaacaagaagaagaagaagaagaagaagaagaagaagaattgagaagatggtgtttgaggaaactgagctgaggctgggactgggactatgtctccctggaaatggaaccacggcaacaactgaagctgctgctgcggaattaggagtgaggaagagagggttctctgagactgaaactgatgaaacagccaccgttgatttgatgcttaacctctcacccaaggaagctgctgctgctgatggtgcagatccacgtgagaagccaaagacttcg

SEQ ID NO: 232140 - DNA, 386 bp, Glycine max
  unsure (1)..(386): unsure at all n locations
tccctctctaactctcttctaaaacttaccaacacaacaaaatccagtttcccaataanagagtttttgttgaaatggaaaacgttccggcggtgtgtaaggaagatgatcagatggatttgcctcccggatttcgattccacccgacggatgaagagctcataagccattacctctacaagaaggtcattgacaccaagttctgcgccagggcaattggagaagtggacctcaacaagtccgagctttgggatttgccatggaaagccaaaatgggagaaaaagagtggtactttttctgtgtgagagacagaaaataccccactggcttgagaaccaacaaggccacagaagctgggtactggaaggccacaaggaaagacaaa

SEQ ID NO: 232141 - DNA, 388 bp, Glycine max
ccggaatcagaggctccccctaacttctggggccacaccccggaagaagaatactacacctcccaaggcgttcgcaacaccaagtcccacttcgaaacccccaacggcaaaatcttcacccagtccttcctccctctcaacctccaaccccaccaagtcaaagccaccgtctttatgacccacggctacggctccgacaccggctggctcttccagaaaatctgcatcaacttcgccacctggggctacgccgtcttcgccgccgacctcctcggccacggccgctccgacggtctccagtgctacctcggcgacatggacaaaatcgccgccacctccctctccttcttcctcaacgtccgcaatagccacccctacaaaaacctcc

SEQ ID NO: 232142 - DNA, 362 bp, Glycine max
cagcgttctgagtcttttcttcttcgttaccctcttcacatgccttctctctgctaattcccacgatgaccatattttcctaccgagtcaactccatgacgatgactcagtgagttgcactgctaccgacccaaaccttaactacaagccggtgatcggaatcctgacccaccccggcgacggtgcctctggccggctcagcaacgccaccggggtttcttacatcgccgcctcctacgttaaattcgtggagtccggtggtgctagagttattccccttatctacaatgagtcacctgagaaccttaacaagaagctcgatttggtcaatggagtgctcttcactggtgggtgggctgttt

SEQ ID NO: 232143 - DNA, 411 bp, Glycine max
acgtctcattcaaacctgaattcagctcaagattcaacctttctcttcctcctcactcaaacttcccctctctacgccgttcctcccaaatggatgcaccaatggagttttggggtgttgaggttaaggttggtcagaccgtgacagttgacccaatggatcctgtggattcatacatacacatatctcaggttgcgctcggagaggcgaaaaaggagaaacctaatgagtctgtggttttgtatttgaaagttggtgaacagaagattgtcttgggaaccctttctagggatggcattcctcatctatcgttggatttggttctggactccgattccgagctttcccacacttcaaaaagtgccagtgtctttttctgtgggtacagagtactaactggcggcaacaatg

SEQ ID NO: 232144 - DNA, 364 bp, Glycine max
gccgaagaaggtattgacgtcgatgatgaaaatgaaattggtgaaaacattactgcttctcctttgtgtgaaactcttctgttatgcagtgattggtgctcctcaaacttgtcctgctaacaatgaggataaatgcggcgattcagatgaatggaaaggggagtttttccctgacattcccaaaattaaatatgagggtccgtcaagtaagaatgtgctttcatttaaatggtataatgcagaggaggaaattcttgggaagaagatgaaggattggttaagatttagtgttgcattttggcatacattccgtggaacaagtgctgacccatttggtgcacctaccaaatactggctatgggaa

SEQ ID NO: 232145 - DNA, 365 bp, Glycine max
ctcgagccgaatcggctcgagcggaaagacaatcacccttgaggtcgagagctctgacaccattgacaatgttaaggctaagattcaggacaaagaaggtatcccaccagaccaacaaaagcttatctttgcaggaaagcagctagaagatggcagaaccttggctgattacaatatccagaaggaatctaccctccacttggtgctccgtcttcgtggtgggatgcaaatctttgtcaagaccttgactggaaagacaattacccttgaggtggagagttctgacaccattgacaatgtcaaggctaagattcaagacaaagagggtatcccacccgaccaacagagactgatctttgctggaa

SEQ ID NO: 232146 - DNA, 382 bp, Glycine max
cttttaatacctttgctcccaataaggcagcaggagatcacagaactccaattaaactaaaagaaatttctccagatcaatcaaatcaaactgcagcagatacgtggaatccatggcagcaaccagaccagacaggaggaggaggagcctctcaaactatccatgaaacacaactcaaggcatctcgcgacgtggcaatggcaacagctgccaaagcaaaattacttcttcgggagctaaaaaccgttaaagcggatttggctttttctaaagcacgctctgctcaactagaagaggaaaacaaaatgctccgggaccgcgagggtaccgacaagggacaaaacgttacccgtgcagatgatgatttgatccggcttcaact

SEQ ID NO: 232147 - DNA, 390 bp, Glycine max
cggatctcttcttcagtggtggaagctactagaacactagtttgttgagcactgcgatgaggaagtggacggttgcttccgctctccttcttctctctctcctctttctctttgcagatcaaggtcgaaagtttcaggcgaatgccgagggagattccgacgagcttgtagatcctccgaaggtggaggacaagatcggtgctgtgcctcatggcctttccaccgattcagatgtcgtcaagagggagtcggagtcgatctcgaagagatctctccggagcaatgcggagaagtttgagttccaagcggtagtgtcacggcttatggatattatcatcaattctctctacagtaacaaggatatcttcctcagagagttgatttccaatg

SEQ ID NO: 232148 - DNA, 384 bp, Glycine max
atcaaagtttcttcctttctctgctctttgccttctctgacacatttggtgccttgtagagcgtgttttggcaggaaggtggtatggcgaaggacgttgaggttgctgagcgtggctccttctctgggaaggactaccaggaccctccaccagcaccactcattgatgctgaggagctcacaaagtggtccttttacagggctctcattgctgaattcattgccactttgctcttcctctacattactgtgctcacagtcatagggtacaagcaccagactgacctcaaggaaaatggtgaaatctgtggtggggttggcattcttggcattgcatgggcctttggtggcatgatcttcatccttgtctactgcactgctggga

SEQ ID NO: 232149 - DNA, 372 bp, Glycine max
gaagtcttctgaaagacgcagttatggtggaccacgagttccttaccgtggtggtcgtcgtggaggtttcagcaatggtgaaactggtgaaggtgaagacggacgacctcgaagagcatttgatcgtcgcagtgggactggacgaggaaatgaattcaaacgtgaaggttcaggacgaggtaactggggaacccaaactgatgaacttgctcaggtaactgatgaggttgtgaatgaaacggaaaagaatttgggtgatgagaagcctgcagttgaagaagatgtagctgatggaaacaaggacagccctactaatgaaaccgaagaaaaagagcctgaagataaggaaatgactctggaggaatatgaaaa

SEQ ID NO: 232150 - DNA, 386 bp, Glycine max
cgatcacaaaaatggcggcgaaacttcaaatatttacgggattgccccccgcgccatttcaatcttcttcttcctccactctctgcgtactcaagaagcctctcactacctccttcttcggcaccgcgcgagtggaagttctgaaacttagagtgatgaggattgtgaagcctacgcgtggcggaggtgctctcggtgctcgcatgaacctctttgacaggttcgccagagttgtgaagtcgtacgcaaacgctgtcttaagttcgtttgaagatccggagaaaatattggagcaagctgtgcttgaaatgaacgacgacttgaccaaaatgcgtcaagctactgcacaagtattggcatctcaaaagcgattggaaaataaatac

SEQ ID NO: 232151 - DNA, 370 bp, Glycine max
aagcaacattttgttgatgccctcctcacattgcaagacaaatatgaccttagtgaagacaccatcattggtctcctttgggatatgatcacagcagggatggacacaactgcaatttcagttgagtgggccatggctgagttgataagaaacccaagggtgcaacaaaaggtccaagaggagctagacagggtaattgggcttgaaagggtgatgactgaagcagacttctcaaatctcccttacctacaatgtgtgaccaaagaagcaatgaagcttcacccaccaaccccactaatgctcccacaccgtgccaatgccaatgtcaaagttggaggctatgacattcccaaagggtccaatgtgcatg

SEQ ID NO: 232152 - DNA, 384 bp, Glycine max
ccaattcatacatgcatgcatagcatctaagagagagaagctaagcaagtacaaaaaatgaaatgggtgaagctcatcatgttgactttttaacagctttgatgagagaagaaacagcacatgacgataaatttctaagggatgctgtgttcaatctatttgtggctggaagagataccataacttcagctctcacgtggttcttttggcttgttgccacaaacccctcagttgaagccaagattcttgaagagatgaaagaaaaacttgggaccaaagaaaagacgctgggggttttaagcgtggaggaagtgaaaaggctggtttatctgcatggtgctatatgtgaagcattgaggctatttcctcctatacctttcgaga

SEQ ID NO: 232153 - DNA, 384 bp, Glycine max
caattcacaaccgaaacagtttccatctctctcacaaaatgacaacaatatcaaattgctcccttctcttcctcttcctcttcctctccaccctccacatagcttccaccctctcaacccccaccaacttcatcaagtcctcctgcagcaccacccagtacccagccctctgcatccagtccctctccgtctacgcctccaccatccagcaagacccccacgagctcgtccagacagccctctccctctccctcaaccacaccgaggccaccaaaaccttcgtcgcaaaatgcaacaaattcagaggcctcaaaccgagagaatacgctgccttgaaggactgcgctgaagaaatcagtgacagcgtcgaccggctcagccggt

SEQ ID NO: 232154 - DNA, 383 bp, Glycine max
atccccttcaaaatctggttttgtggaggcaaacagaggatgctgtggtaccgggactgtagagacaacatccttgttgtgtaatccaaaatcaccaggaacttgttctaatgccacacagtatgtgttttgggacagtgtccatccttcacaagctgctaaccaagttctagctgatgcattaattctacaaggcatatctcttgtcacataaagactcgtcattatttatgttgttagaaattattattgtgtacaagtacaactacacatcgtgaaagtgattcaaaagtttgctgtttttctttagtttggaaaaaaaaaactgtgctctatgtattttagatcttgagaaatttcagataaactcgtttgtaaaccat

SEQ ID NO: 232155 - DNA, 381 bp, Glycine max
ggagaaatgagtttgttatacgcctgcaaccttcagaagctatgtacatgaagcttacagtcaagaaacctggactggagatggaaacagttcaaagtgaactagatttgtcttataggcaacgctatcaagcagtaaccattccagaggcttatgagcgtctgattcttgactcaattagaggtgatcaacaacattttgttcgcagagatgagttgaaggcatcatgggagatcttcaccccacttttgcaccgcattgataagggggagttcaagtcaaccccttaccaacctggaacaagaggtcctgtagaagcagataaattactgctggaaaaagctggttatgttcaaacacatggttatagatggatcccct

SEQ ID NO: 232156 - DNA, 368 bp, Glycine max
tgcacattcttctttctatatattccaaatcccttttccgatttccaccaaaatctaaaccgaaattcccaattacccttcccaattttcaccaaaacctaatactcccacaccaatcttcgatcatggacgccgattcacaacctcaacaactcgaagagagaacagaggagcaagaactgaagtacctggaattcgtgcaattcgcgaccatacaggctctgatgcgctgcgccatcctctactcatacgccaaggagcgcgcgggtcctctgaagcccggtgtcgacaccgtggaggaggccgtgaagaccgtcgtggctccggtctacgataggttccaccttgtccccggcgaggtcctcaaa

SEQ ID NO: 232157 - DNA, 372 bp, Glycine max
gttgaattgagttgagaagagaagaggtcatagacacaacacaagacatgtctgttgtcgagtcaggtgaacacaacaacatcagaggagtaccaactcatggtggacgctatgttcagtacaatatctatggcaatctctttgaagtttccagaaagtatgtccctcctattcgtcctgtgggtagaggcgcttatggtattgtttgcgctgctgtaaatgcagagacaggtgaggaagttgccattaagaagattggcaatgcatttgataacagaatagatgccaaaaggaccttacgagaaattaaacttcttcggcacatggatcatgcaaatattatgtccattaaagatattatacgtcctccac

SEQ ID NO: 232158 - DNA, 356 bp, Glycine max
accaatatagcccaagccctatacaaccaaaccctaacacacacccatttgattcagtttccatggctagcctcaaggttgcatttttggctgcagtgctctgcatggttgtggtgagtgcacccatggcacatgcagctatcacgtgcgggcaggtgacgaatagcctgatcaattgcatcggttacctccagaacggaggaacgccgccgtcgggatgctgcaacggagtgaagagcctcaatgccgccgccaagaccaccgccgaccgccagacggcgtgcaactgcctcaagtcggccgccagccaaatctccggcttcaaagccaacaacgccgcctcgctccccggcaaa

SEQ ID NO: 232159 - DNA, 423 bp, Glycine max
gacgtaggacgcacgcgtacgtaagctcggaaatcggctcgagtgtggttgttccaattttcctacctgattgtggggagtgtatcgattgcaaatcaagcaagagcaacctttgttcaaagtttccatttgaggtgtctccctggatgcctagatatgccacttctagattcacagatttaaaaggagagatcatacatcatttcttgtctgtttctagttttagcgagtacactgtggtcgacattgcccatctaatcaagattgatccggcaataccacccaacagggcatgcctcatcagctgtggtatatcagcagggataggtgctgcttggagagcagcaagtgtggagccagggtctacagtagctatttttgggctggggagtattggattagcagttgctgagggagctagac

SEQ ID NO: 232160 - DNA, 377 bp, Glycine max
aacaatcacaacattcaagcgctgcatgaccaatctcctgacttcaggaactggttgagtgcaattatctcgtaccagcaatcatgcatggacggcttcaacaacgagaccaacggtgagcaggaaattaaggaacaactgcacacaggaagtttggaccaaatggggaagctcactggcatagtcctagacattgtcaccaacttatccaaaatccttcagagttttgacctcaagttggatttgaacccggcttctcgtcgtcttctcgagcttgatgctgaagggtaccctacgtggttctctgctgcagatcgcaggctacttgctaagatgaaccaaggaggtgcacccccacccaatgcaatggttgccct

SEQ ID NO: 232161 - DNA, 361 bp, Glycine max
acgaatacctcttcatcttgttctatctgtgacgagcatcatggccacaagagcagtgttattgttggctatgtgtgtgcttccggcgatggttgtggccattcgcccagcaaagaaccctttttgcgtgaagggtcgtgtctactgtgacccttgccgtgctggttttgagacctcagctaccacctacattgctggtgctgagattatgttgcaatgcaagagcagggttagcaacgaggttgtgtacacgaagaacgggtacaccgactcaaccggagcatacacaatgtacgtggatgaggatcacgcagatcagatctgcagtgccaagcttgtaaacagccctcaccctcaatgc

SEQ ID NO: 232162 - DNA, 372 bp, Glycine max
atggggtttgaggaaactgagttaaggcttggactgcctggaaacggaggcactgaagaagtgctcatcaggaagaggggtttctctgagactgaaactggtcatgaagatgagtctgccaccactgtggatttgatgcttaatctttcttctaaggaggccgcaaccactgctgctgctgctgcagatccaactgataagcacaagactttgcctaaggagaagacccttctgccagcagatcctgctaagcctccagccaagacgcaggtggtgggttggccacctgtgcggtccttccggaagaacatgttggctgtgcaaaagagcgttggagaagagagcgagaagaacagcagccctaatgcaagc

SEQ ID NO: 232163 - DNA, 385 bp, Glycine max
agggatcccaccagaccagcaacgtctcatttttgctggcaagcagcttgaggatggacgtacacttgctgattacaacattcaaaaggagtccactctacacttggtgctccgtctccgtggtggaatgcaaatctttgttaagaccttgaccggaaagacaatcacccttgaggtcgagagctctgacaccattgacaatgttaaggctaagattcaggacaaagagggtatcccaccagaccaacaaaggcttatctttgcaggaaagcagctagaagatggcagaaccttggctgattacaatatccagaaggaatctaccctccacttggtgctccgtcttcgtggtgggatgcaaatctttgtcaagaccttgactggg

SEQ ID NO: 232164 - DNA, 385 bp, Glycine max
tctagaaccaccataacatcattctgcccttccctcgcgtttcaacaccgataacccgcaaaaatctccattgatctgcgcctcctgttccatggcaaagctgcctgtggaatacaacggcgactgcgccaccaccgcctcagcatccgcctccgcagccgcggagtctcagagatccattcccacgccgtttctcaccaaaacctttcaactcgtcgacgaccaatccatcgacgatgttatttcctggaacgacgacggatcaacgtttatcgtctggaaccctaccgtcttcgccagagacttgcttcctaaatatttcaaacacaacaatttctctagcttcgttcgccagctcaacacttacggattcagaaaaattgta

SEQ ID NO: 232165 - DNA, 361 bp, Glycine max
ctcaaatcatggatttcttgcaagcacaagaaaatcagatacttgtgggtgtggccgtggccgttgtagccattgggcttggtgcagtatatctctattcatccaagaagaccaaaggttgcttggacccagagaactttaaggcattcaaacttgttaagcgtgcacagctgagccataatgttgcaaagttcacatttgcactcccaacacctacatctgttttgggtcttccaattgggcaacacataagttgcaggggtaaagatgctcaaggtgaagaggttatcaaaccatatactcctactactttggattccgatgttggacattttgaactagttattaagatgtacccaca

SEQ ID NO: 232166 - DNA, 261 bp, Glycine max
agctggagaaggagggatacagaatcattggaaacgttggagaccaatggagtgacctcctgggaagcaacaaagggactaggacttttaagctgcctaatcccttgtactatgattaagctctcaaatcaagcctctaagttgctccttaatttctatgaaataagatcctgagtattattacttagtcatgtaggggcactgaacaatgttgttttcccttttcgaggctttcatgaattatgagctcttgttccatta

SEQ ID NO: 232167 - DNA, 367 bp, Glycine max
atcccagtagaaggccaaaggggcgagaaaccctactttttcccattcttatacgaaacttcagacatagatgagaacaatctctacccttttgtgcacctttccacagatggaaacctcttcatcttctctaacaatcgttcccttcttctgaaccccaccacccacaaaattgttcgcacctttcccgtcttacccggtggctcccgcaactaccctgcctctggcatgtctgcccttctccccatcaaccttaacgaccccgccaccgccaccaaggctgaggtcatggtttgtggcggcaaccttcccgatgccttccatattgccgagactaacaaaatcttcctcccagctcttcgagact

SEQ ID NO: 232168 - DNA, 380 bp, Glycine max
gcttattgcagattaattctatgttgcaatagttcttctagagttacagaagcaatccgctctcgatgtctcaatgtgcgaataaatgcaccaagtgaagaacagattgttgaagttttagaattcattggtaagaaggaaaggctgcaacttcctcctggttttgctgctcgcattgtggagaaatcaaatcgaaatttaaggagggccatattgtcatttgagacttgtcgtgtccaacagtatcctttcactaacaaacagacaattcctccaatggactgggaagagtatatttctgaaattgcatctgacataatgaaggaacagagcccaaaaaggttgtttcaagttcgaggaaagctctatgagctgctaat

SEQ ID NO: 232169 - DNA, 387 bp, Glycine max
acgccccgcttggttcattgccgctgctaacctttttgcctttgtccacgttgatggaggctaccacgtgtttgccatgccagtgtttgatatgatcgaaacctgcatggttacaaaattaaattttccaccttctactgcactccgagtaacaactcgcactatttatgttgcggtgacaatgttaattggcatatgtgttccgttctttggctctcttcttggatttcttggaggctttgcgtttgccccgacatcatattttttgccctgtatcatatggcttaagcttaaaaagcccaagaaatttggcttgtcttggacaattaactggatctgcattattcttggggtagtgttgatgatattatctccaattggtgctct

SEQ ID NO: 232170 - DNA, 386 bp, Glycine max
  unsure (1)..(386): unsure at all n locations
gcatctctctgctcttctctgttctgttctgttctgttctgtttctctctcctcnccatatattcctcttcttcttcagaactcagaactcagaagggccacttcacttttagaaacccagttttgcatctgggtttttgcctgttgaagtgccaattttgaagataataataaaaacaattatgacttggaaaagcagaggagaattgccttctagaagcgtcatctcgcagagatgggtactgtttctctgcttaggaagtttctgtgctggaatgctcttcactaccaggatatggaccatacctgaaaacaacaaaggactagcacgaccaacagcctcagaagctgaaaaattgagtttagtttctgaacgttgcaattcg

SEQ ID NO: 232171 - DNA, 377 bp, Glycine max
tttgatttggaacaaacaacaatagaggggttgtggtgctctgtgtgctgcaatttccttttgagcttgtgtttgattcatcaaatcatcaaagatgactgtaggggcaggaatatctgttgcagatgggaacttgatggtgttggggaacaaagtgctgagccatgtccatgacaaggttcttgttacccctgcatgtggtggtgctttgctcaatggggcattcattggggttcaatcccatcacaagggtagccgcacagtcttcccaattggcaagcttcaggggttgcgatttatgtgtgttttccggttcaagatgtggtggatgacgcagagaatgggcacttgtggacaagatatccccattgagacgc

SEQ ID NO: 232172 - DNA, 369 bp, Glycine max
cttcttccaaaatgggtatctctcgtgattccatgcacaagaggcgcgccaccggcggcaagaagaaagcttggaggaagaagagaaagtatgagcttgggaggcagccagcaaacacaaagctatcaagcaacaagacggttaggaggattagggttcgcggtgggaacgtgaagtggcgcgctttgaggcttgatactgggaactactcttgggggagtgaggctgcaacccgcaagacaaggattcttgatgtggtgtacaatgcatccaacaatgagcttgttcggactcagacattggtcaagagtgccattgttcaagtcgatgcagcacccttcaagcagtggtatctgcagcattatggcg

SEQ ID NO: 232173 - DNA, 384 bp, Glycine max
agaaatttaagtgaggagctagagaatgatgatgaagtctgctatgtgtgcagtggtggttgtagcacttcttcttctggcggaggtggggcccatggctgaggctgtgacatgcaccccaacagagttgagtccgtgtcttccagcaatcacttccggtgctaaaccttccaatgcttgttgcacgaagctgaagcagcaaaaaccatgcttatgtggctacctcaaaaacgctagcttgaagcagtatgttaactctcctaatgcccgaaaaaccgttgcttcttgtgggattccctttccaacttgttaattaattaagccttcttataattaaagtgtgggatatatatatatatatagataaacagtttaatttataca

SEQ ID NO: 232174 - DNA, 380 bp, Glycine max
atcaaaatgaatctgtaccactcctccaccaccaccaccaccaccaccatcttcaccgtcatattcctcctccttgcaatattattcactctcacaccccacaaggccaacggtgccacgtgtcaccctgaggaagaagcgggcctgttgggcttcaaatccggtatccgatccgacccgtccggcctgctcagtaactggatatcgggtacggactgctgcacatggaccggagtagaatgccactataacagcacccgggtccaaagattattcttaacgggtcaaaaacccgaaaccatcttatcgggtaccatctcaaccaccctctcaaaactcaaactcctcgatggactccacctcataaacctcatcaacat

SEQ ID NO: 232175 - DNA, 381 bp, Glycine max
gagaagaggagtgagagaagatggggttgtcgttcacgaagctgttcagcaggttgtttgcgaagaaggaaatgaggattctgatggtaggtctcgatgctgctggtaagacaaccatcttgtacaagctcaagcttggagaaatcgtcaccaccatccccaccatcggatttaatgttgagactgtggagtacaagaacatcagcttcactgtgtgggatgttggtggtcaggacaagatccgtcctctgtggaggcattatttccagaacactcagggtctcatttttgtggttgatagcaatgatagggatcgagtggttgaggcaagggatgagttgcacaggatgttgaatgaggatgaacttaaagatgctgttt

SEQ ID NO: 232176 - DNA, 388 bp, Glycine max
cagaaacaaaagtgcaagaattaggtggcatcaccgatgtgcatggagctgccaacagcgtcgagatcaacaatctcgctcgctttgctgtagaggaacaaaacaaaagagagaattcagttctggagtttgtgagggtgattagtgcaaagcagcaagtggttgctggagtgaattactacataacattggaagcaaaagatggtttgattaaaaatgagtatgaagcgaaggtttgggtgagggaatggttgaactccaaagagttgctagaattcaagccagtcaatgtttctagcacaccaataggtggcattaccgatgtgactgcgaatagcctcgagatcgacattctcgctcgttttgcggttgatcaacacaacaaaaa

SEQ ID NO: 232177 - DNA, 386 bp, Glycine max
aatttcctagatctcccaaacaaattgtagcataagtcccatggccaaagagactagtgttgtttatctatatcccagcaaatcacaagtttggggtgagaattttgatcataaaaaacttgtaataacaacactagctgctaatggaaagaaggaggagagtaatggagcacctaatgacacatatcctgcgtttcccgggtggtatgctgatgtttcctggccaggagaagcacacacatataaaatagaaaagattctattccacgggaaatcagaattccaagagcttcttgtatttgagtcttctagacaaggcaaggttgcaattcttgatgggcatatccagctgacagaaaacgatgaatttgctttacaagagatgc

SEQ ID NO: 232178 - DNA, 388 bp, Glycine max
ggacacctgcagctagctgatcaagataagatcatttctgcaattaaagaagcaggaaatgttaagaagttctatccatctgagtttggaaatgatgtggaccggactcatgcagttgaaccagccaagtctgcatttgcaacaaaggccaaagttcgccgagctattgaggctgaaggaattcccttcacttatgtgtcaagcaacttctttgctggttacttcctgcccaacttgtcacagcctggagccacagctgcccccagagacagagttattatcctaggagatggaaaccccaaagctgtttttaacaaggaagaggatattggaacttatacaatcaattctgtggatgatccaagaaccttgaacaaaattctctaca

SEQ ID NO: 232179 - DNA, 382 bp, Glycine max
tttctttcttcttctacatccactgcacaattgccacatgaatcattagttagggtttattctccaagaaaagcaatgagtgcgtccaggttcatcaagtgtgtcactgtgggtgacggtgccgttggcaagacttgcatgctcatctcctacaccagcaacacttttcctacggactacgtgccaactgtctttgacaatttcagtgcaaatgtagttgtggatggaagcactgtgaatcttgggttgtgggatactgctggccaagaagattacaatagattaagacccttaagctatcgtggagcagatgtattcctgcttgctttctctctcataagcaaggctagctatgaaaatgtttccaagaaatggattcctg

SEQ ID NO: 232180 - DNA, 384 bp, Glycine max
gtcacagtgcttgaccttgcagcttctggagccaacatgaagaaaattgaagatgttgacactttttcacagtatactgagcctttgttgtttctattggacacaattccctcaaatgaaaaggtagttctagttggtcacagctttggagggctgaacatagcacttgccatggagaaatttccagaaaaggtagcagttggtgtttttctaacagcttttgctccagacgttgaacaccacccatcttatgtcttggaaaagtacagcgagaggaccccgttagctgcatggttagacactgaatttgctccaagtggaaacaaaacaacaatgttctttggccccaacttcttgtccgacaagctctaccaactatcccca

SEQ ID NO: 232181 - DNA, 366 bp, Glycine max
gtctctgcctctctgcaatccacagccgaaaatgcctttcaagaggtacgttgagatcgggagggttgctcaaatcaactacggcaaggaatatggcaggctcgtcgtcatcgtcgacgtcattgaccagaacagagcacttgtcgatgcccctgatatggtgaggtcccaagtcaatttcaaaaggctttcccttaccgacatcaagattgacatcaagagggtccctaagaagaaagatcttgtcaaagccatggaggatgctgatgttaagaacaagtgggagaagagttcatggggtagaaaactcattgttagaaagagaagggcatccctcaatgattttgataggttcaagataatgtt

SEQ ID NO: 232182 - DNA, 367 bp, Glycine max
gtgcaacaacaaacgcaccagatggataggtatcagagggtagagaagcccaaggcagagactcctataaacgagaatgagatacgcgtcactactcaaggaaggatgaggaattacatcacctacgccaccactctcctccaggagaaaggatctagtgaaattgttctcaaagcaatgggacgtgcaataaataagaccgtaatgattgctgaactgatcaagagaaggattgttggtctgcatcaaaacacccaaattggatcaactgatataactgacacatgggaaccactagaagaaggccttcttcctttggagactactcgccatgtttcaatgatcacaattaccttgtcaaagaaag

SEQ ID NO: 232183 - DNA, 372 bp, Glycine max
ggcttccctccctcctttgaagaaacaaattagaagagtgtgttgtgttgtgttgaagtagcaagctagcaaagatgtttggcatcttaggaggcaataaggggcacaagatcaagggtactgtggtgttgatgagcaagaatgtgttggacttcaacgaaatagtgtccactactcagggtggtttggttggtgctgccaccggcatcttcggtgctgccaccggtattgttggtggagttgtcgatggtgctactgccatcttcagtcgcaacattgccatccagttgatcagtgccaccaagactgatggacttggaaatgggaaagttggaaagcaaacctatttggggaaacatcttccttcgttac

SEQ ID NO: 232184 - DNA, 391 bp, Glycine max
gttgaaatcgatgaactccctaagcaaattgatgatacacagtacccaaaaacattcttctataaagaagaccttcatccaggcaaaacaatgaaagtacaattcaccaagcgtccctatgcacaaccttatggtgtatatacatggttaacggatattaaagacacctctaaagaaggatatagttttgaagagatatgcatcaagaaagaagcgtttgagggagaagagaagttttgtgcaaaatccttgggaacagtaattggttttgccatttcaaagctgggaaagaacattcaagtactttcaagttcctttgtcaataagcaagagcaatacactgtggaaggagtgcagaatcttggagacaaagcagtgatgtgtcatgggc

SEQ ID NO: 232185 - DNA, 376 bp, Glycine max
gtgattgtctttgtatcacgaaaactatacgattcgattccttgttttcaatggacaccttcttcaattctcaatcttcttcttcttcgagaagccgctggagttacgatactctcaagaatttccgtgagatctctccgctggttcagaatcacatcaaacgggtttattttacgttatgttgcgctgtggtggctgctgctgttggagcttttcttcatgttctgtggaacattgggggttttctcaccacgttggcttccattggaagcatggtttggttgctatctacaccccctgttgaagagcaaaagaggttgtctctgttgatggcttcggccttgtttcagggcgcttccattggacctctgattga

SEQ ID NO: 232186 - DNA, 386 bp, Glycine max
gatgaacagcttcttgctctggatagcctgctcaacagtgagcccacccaagttaggttcatcttagatcaccatgactatctcattccatatttgaggaaaataaatgcaactaccacaaagacttatgctaccagaaccatatttttcttgaaaagtgatggaactttgacgccattggccattgagttaagtaagccgcatcctcaaggtgaagaatatggtcctgttagcgaagtctacgtgccttcgagcgaaggagttgaagcttatatttggttattggcaaaggcttatgttgttgtaaatgactcgtgctaccatcaactcgttagccattggctaaacactcatgcggttgttgagccattcgtcataacaacaaa

SEQ ID NO: 232187 - DNA, 408 bp, Glycine max
ctctagaggatcccctcggggaattccaattccacattttcaagaaataaggaggcaaaaatgttcatatatgaattggaattatttgttttcttattaggcctatcctgaagccaaaggaaatgagatcggaattcctcggggaattccaattccacattttcaagaaataaggaggcaaaaatgttcatatatgaattggaattatttgttttcttattaggcctatcctgaagccaaaggaaatgagatcggaattcctcggggaattccaattccacattttcaagaaataaggaggcaaaaatgttcatatatgaattggaattatttgttttcttattaggcctatcctgaagccaaaggaaatgagatcggaattcctcgggggtaccgagctcgaattcc

SEQ ID NO: 232188 - DNA, 379 bp, Glycine max
gtcaagacatgcttctgatgagatctaccttgggaagagggacagtgacgattggactgatgaccaaaaggcaattcaagcctttgaaaagtttggaaccaagctgaaggaaattgaggccaaaatcaattcgaggaacaaagattcaagccttagaaaccgtaatggaccggttcagatgccttatactgtgcttcttcctaccagtgaggaaggccttactttcagaggaattcccaacagcatctctatctaaggccagagtgcgtttatgtgtggttctctttccaaacctacgttacctttctcgttgacgagtaaatatgcaagcttatgcatgcatataataattgtcttatgcattcttaagtgttgtatg

SEQ ID NO: 232189 - DNA, 383 bp, Glycine max
tggggacactgcgagttcaggtccatgcaaactgtcgcctgagaaggatttacttctctgaccgcctctactctgaagaggaagtccctccagagttcaaattgtaccttccaatgcagattagactttagagatgccctcatttggatgactagttctttttatgtttatcttttattgtaaagtgtatgttatgagtctctctctgtttttttttttttggtaaaatctcaccttgtgcttgtcatcatgcagaaatcatgaaaaaatgggagtttggagttgtagcctggagaaattgatgtgattttatatgcttactacatatagttctactagttgactttattctaaactttgtatctatgttgtgctagattaaa

SEQ ID NO: 232190 - DNA, 383 bp, Glycine max
gaaaccggtgccgaggaagcttgctgccgaaaaggtggatttggaggaggagaagattgagagccagctggagaccatcaatgctttccacataatttccttgtcggaggggttcaatttgtcgcccttgttcgaggacaagaggagggaggagatgaggttcgccaccgcggggacgcccagcaccgtcatttcgcggctggaggaggtggccaaggccgggaagttcgacgtcaggagtagcgagaccaaggtgaggcttcagggtcaggagcgtgggaggaaggggaagctggcgattgccgcggatatctacgccgtgacgccgtcgtttatggtggtggaggtcaagaaggacaatggggataccttggagtataacc

SEQ ID NO: 232191 - DNA, 212 bp, Glycine max
tgacaacccgatttatgaagaaccgcaagaagcgcggtcacgtcagcgccggccacggtcgtattggtaagcaccgcaagcaccccggctgccggggaaatgcccggcgcattgcacacaacaggattctcctccgacaattccaacccggggtcctccggaaaggaaggaataagtaccttcaaaagctccgccacaaattccaatccccc

SEQ ID NO: 232192 - DNA, 355 bp, Glycine max
cgctctctcactcacaaacacacactgaactaaaaaacatcaaaagagacatggctgagcaaaccttcatcatgatcaagcctgatggcgtccaaagaggccttattggcgagatcattagcagatttgagaagaaaggtttctacttgaaaggtttgaaacttgttactgtggaccgtccttttgctgagaagcactatgctgatttgtctgccaagcctttctttagtggtttggtggattacattatctctggccctgttgttgccatgatctgggagggcaagaatgttgttacaactggccgaaagattatcggagccacaaacccagctcaatctgagcctggaactat

SEQ ID NO: 232193 - DNA, 317 bp, Glycine max
atcggtccgtaagctcggtaatcggctcgagatcaacatcaacatcatgggtgtcactcctctcctttcgtatctctactatccgaaggcttgtcttctcaaatcaaacaacagcgtgacgaaatagaccaattccttcaagcccaggaggagcaattgcggcgggcattagcggagaagagacagagacattatcggacgctgctaagggcagcggaggaatcggtgttgcggaggctgagggagaaggaagcggagttggagaaagccacgcgccataacgcggagttggaggcacgcgcgacgcaacttaacgt

SEQ ID NO: 232194 - DNA, 405 bp, Glycine max
tccgtaatctgctcgagctcatgatcaagaagtgtttagctttcacagtgatcattcaccttgccatggttttgaggaagttttggcttgctatcaaaaagttgttccaaatttgagactgtctggaccaacatcttatgctcctgtgattgaggctgcaatagacatagttgagaaaagtcatggccaattccatgtgttagttattgttgcagatggccaggttacaacaagtgctgcatctgaacatggagaactcagtccacaagaagcaaggacaatcaaagcaatagttgatgcaagttcatatcccctttctattattctggttggagttggtgatggaccctgggaagacatgaagaagtttgatgacaagatacccgctcgcgactttgacaattt

SEQ ID NO: 232195 - DNA, 358 bp, Glycine max
aacctttctcattccccatctcctcaccttattcagccactgctaatttctagggttccgaaatggacgctggcggaaagatcaagaagggcgccggaggaagaaagggcggcggccctaagaagaagccggtttcaaggtccgtcaaggccggtctccaattccccgtcggaagaattggccgttatttgaagaaaggaaggtacgcccagcgtgtcggtaccggtgctcccgtttacttggccgcagttctcgagtacctagctgctgaggtgcttgagttggctgggaatgctgcacgtgacaacaagaagaacaggattattccgagacatgtgctattggctgtgaggaacga

SEQ ID NO: 232196 - DNA, 385 bp, Glycine max
tctctctagagtaattgcggaatcagctagaattttctaataatggccaaagacgttgagcaggttacagagcaaggtgaatactccgcgaaggattaccatgacccacctccggcgccgttgatcgacccagatgagctcactaagtggtccttgtacagagccgccatagctgagttcatagcaacactccttttcctttacatcaccgtgttgaccattattggctacaagagacagagtgacaccaaaatccccggtaacaccgagtgcgacggcgttggcattttgggcatcgcttgggccttcggtggcatgatcttcatccttgtttactgcaccgccggcatctctgggggacacatcaaccctgcggtgacattcg

SEQ ID NO: 232197 - DNA, 178 bp, Glycine max
ggggatttgaaggataagccagggtggcaaaagatgcaaactcggggagaggtggggtgaggcttcggctagcctcatagtggagtgcgtcagctcttcaggctgggggttaactttggacagtatccagagggaggtgtaagcgtgaagagggcggctattagcaggagattcatgc

SEQ ID NO: 232198 - DNA, 383 bp, Glycine max
ccgaatattacccttggacgtgggcagtgtctctttcagtttcttggtgaagttattaagggtagctattcagttggaacgtgaagagttggagagatctgaactgattaggagaataggtatgtgccttgaggaggctaaggtgtctgatttattaatttgcgccccagttggtgacacagtttttgatgttgacattgtgcaaaggctagtagaagagtttgtagcatgtgatcaacatgttcagacggatactctgttggaagatgactttcaggaggagatcagaagccccgggatggtttcagaatcttcaaaggcaaaagtggcaaaattggtggatggataccttgctgagattgcacgtgatccaaatttacctt

SEQ ID NO: 232199 - DNA, 369 bp, Glycine max
  unsure (1)..(369): unsure at all n locations
caacactgagcttaaccgagcttcgcaaagatgaatcgggaaaagttaatgaagatggccggttcggttagaactggaggaaagggtactgtgagaagaaagaagaaggctgtccacaagacaacaaccacagatgacaaaaggcttcagagcaccctgaagagaataggggtgaatgccatccctgctattgaagaggtcaatatctttaaggatgacgtagttatccagtttctaaatcccaaagttcaagcatccattgctgctaatacttgggttgtcagtggttcaccgcaaacaaagaagttgcaggatatactccctagcattatccaccaattangaccagataacttggaaaacctgaag

SEQ ID NO: 232200 - DNA, 372 bp, Glycine max
ctagggttatcatttctccatttccattttctctctcacttttcaagaatcgtaagctatgggaaagtcttacccaactgtgagtgctgattaccacaaggccgttgagaaggcgaagaagaagctcacaggcttcatcgctgagaagagatgcgctcctctaatgctccgtttggcatggcactctgctggaacctttgacaagggcacgaagaccggtggacccttcggaaccatcaagcaccctgccgaactggctcacagcgctaacaacggtcttgacatcgctgttaggcttttggagccactcaaggcggagttccctattttgagctacgccgacttctacgagttggctggcgttgttgccgg

SEQ ID NO: 232201 - DNA, 363 bp, Glycine max
ttcagtggtgacacagatggaagggtgcctattacatcaaccaagtattcagttaagaagatgaaccttcccattaaatctgtttggcacccttggttttcctatggagaggttggtggctatgtagaagtatacaagggaggcctaacattagctacggtgagggaagcagggcatcaagtgccaagttaccaaccagccagagccctaactttgatcaaatatttcttagacggcactcctcttcccggtcctcccaaaagaaaggactaggactagtttcttcaaatccacttttcaataattgttgtggtaattattaatttaaggaaaataaatacaattatattatagtggggtttc

SEQ ID NO: 232202 - DNA, 361 bp, Glycine max
gggcaaagagaaggtggtgaaggtaggcatgatggagcagatcaagagagagatctcagccatgaacatggtgaagcacccaaacatcgtgcagcttcacgaggtcatggcgagcaagtccaagatctacatcgccatggagctcgtccgcggcggcgagctcttcaacaagatcgccagaggccgtctccgggaggagatggccagactttacttccaacaactcatctctgctgtggacttctgccacagccgcggcgtctaccaccgtgacctcaagccagagaaccttctcctcgacgacgacggcaacctcaaggtcaccgacttcggcctcagcactttctccgagcacctccgg

SEQ ID NO: 232203 - DNA, 361 bp, Glycine max
ccgagcacgaaaagcagttaattgtggccaaaccgaaccctaacaccaaaagccctcgccgatcctccacctcttcctcgctcgccatcatcgacggcattttcgcgagaaaaagcttcttctacgacaggcttccctcccaaccactcagactcaccgttctcaaactcgacggttcctgcttccatattcaagtttcgaagaccgccaccgttgcggaactgaaggacgcagtggaggccgtgttcagtcacgtgcctcacaaggggcctgccaaaatttcatgggcacatgtctgggggcagttttgcttatgctatgatggacagaagctagttacagaaaaggataatcttcgaaa

SEQ ID NO: 232204 - DNA, 355 bp, Glycine max
ctggcgttcccatacccagcacagggccacatcctcccactcctcgacctcatccaccacttagccctacgaggcctaaccgtcacaatcataatcacaccaaaaaacgttcctatcttaaaccctctcttatcctcgcatccaaacacggtccaaactttagttctcccattccctccccaccctaacatccccgctggcgcagagaacgtccgtgaggtcggcaacagaggaaactaccccttcatcaacgccctctccaaactccaaccagaaattatccactggttcgcaacccacagtaaccctcctgtagcactcgtctccgatttcttcctcggttggactcagcaac

SEQ ID NO: 232205 - DNA, 380 bp, Glycine max
tttctttcttagttgcagcgcgattgctgcatcgtcctccaataagagctcgctgctagtgaaccctaacacggcggcaacgagaggtgttcggttgaagctcagatcagcgatggcagcagcaacccgcacttctctgcggttcctcctctcagtctccgtaaccctaactctcgctcacctcgccgcctcaaattccgaaggcgacgctctctacacgctgaaacggagcctctcggaccctgacaacgttctccagagctgggatcccactctcgttagcccctgtacttggttccacgtcacctgcaaccaggacaaccgagtcactcgagtggatcttggtaactctaacctatctggacatttggtacctgaac

SEQ ID NO: 232206 - DNA, 130 bp, Glycine max
gcaggacagtaaagtgattatatggaccgtggcaaaagatggggatcagtgggaaggcagggttttgagggatttcaagacacctgtttggagggtctgaggggcgttgagaggaaacatactggctgtg

SEQ ID NO: 232207 - DNA, 368 bp, Glycine max
ctctcccatcctttcgcattctcaatacccttttgatttgtgaaaggaaagcaaacatggttgatcaggtccaacaccctacaatcatggacaaggttgctggtcagctccatctccgttctggtctttcatctggtattagaagttatgatggagcctaccgccacccagctatgtaccaaagaccctcttttgggaattactcgaatgctgcattgcagtttcctgtgatgcccacatgcaaagctaccatggatttgtctgctactgcaacatctgcctcacccgtctttgttgctgctccagcagagaaaggccattttcttttagactttctcatgggaggtgtttcagcagctgtctccaaa

SEQ ID NO: 232208 - DNA, 369 bp, Glycine max
ctttgtttgggctgcccaaccggtttataaacacgaggaagttttagaagaacaatggaaagagatgcttaatcttactaatcgtctatgctggaagttattgaaaaaagatgggtatgtcgcaatatggcagaaaccttctgacaatagctgctatctaaaccgtgaggcaggaactcaaccaccactgtgtgacccaagtgatgacctcgacaatgtttggtatgttaatctaaaatcatgcatctctcaattgcctgagaatggatatggagcaaatgttgctcgatggccggcacgcttgcatacaccacctgataggcttcaaagcataaaatttgatgctttcatatccagaaatgagctttt

SEQ ID NO: 232209 - DNA, 366 bp, Glycine max
cgctctgtttctgtctctgtgtttgcggctgaggattccgaacgagcgaccttcttcgtttctcgcaaagtttaagtcatcatgggtaaggaaaagactcacatcaacattgtcgtcattggacatgtcgactctgggaagtcaactaccactggtcatttgatctacaagcttggaggtattgacaagcgtgtgattgagaggttcgagaaggaggctgctgagatgaacaagaggtcattcaagtatgcctgggtgcttgacaagctcaaggctgagcgcgaaagaggaattaccattgatattgctttgtggaagtttgaaaccaccaagtactactgcacagtcatcgatgcccccggacat

SEQ ID NO: 232210 - DNA, 347 bp, Glycine max
cttgttgatgatgtcattgagcattactcaaaaatcaaagaaaatccagagttccattctcttcccagcttcctatttggacagtccatgggtggagctgttgcattaaagatacacctgaaacagcctaaggcatgggatggtgccattcttgttgcgcctatgtgtaaaattgcagatgacatggttccaccaaaattcctcactcatatcctgattgggttagccaatgttttaccgaagcataagttacttccaaacaaggatttagcaaaagcagcattcagagatttgaagaagagggaacagactgcttacaatgttgttgcttacaagggataaccacg

SEQ ID NO: 232211 - DNA, 357 bp, Glycine max
aagaaaatcctcacccattttcttcgtagccaaacactctgaaattcccagttatgtcgtggcaagcgtatgtggatgatcacctactgtgtgaaatcgaaggtaaccacctcactcacgccgctatcatcggccaagacggaagcgtttgggctcagagcaccaacttccctcagttcaaacctgaggaaataactgccatcaataatgactttaatgagcctggatcacttgctccaactggattgtatatcggtggcaccaaatacatggtcatccagggtgagcctggtgctgtcattcgagggaagaagggtcctggtggtgttactgtgaagaagaccggtgcggccttga

SEQ ID NO: 232212 - DNA, 270 bp, Glycine max
tgcccttgttgactcaaggcataagaaggtttttaaggtgaaaaactgcataactgacattgatcctgagagggaaaaagaggaaaaagagaaggctgaaagccaaaatatccgcgcaaatgtgcttcttaaccgaaagcgtgagaaggtgaatcggaagtatactccagctgtggagaggaggcgtcaactttctcctgggtttttagaggatgctttggatgaggaggatgaagcggattattatgataatcgtcgttctcagcatcg

SEQ ID NO: 232213 - DNA, 350 bp, Glycine max
cgaggatgttgtacctatccctggaacaactaagattaagaacctggatcaaaacataggtgccttagcagtgaaactgtcagaaaaagacctgagagaaatttctgaggcggttcccattggtgatgtagcaggtggtagatactacaatggattggatcacttttcatggaagtatgctaacacacctccaaaagattcaaaaatctcaacctgacgcacccaaccaaccctttggttagggaatctaccaagtcatcatgaattgagggtaacaaggctggcaaaggctaatatcaggatgctatttaaatatcaataatgtagcccttcttgatgttggacttcct

SEQ ID NO: 232214 - DNA, 283 bp, Glycine max
ggcttctgcagaagtagagttccgatgctttgttggtgggcttgcttgggccaccgaccacgatgctctcgagaaagccttctctcaatttggcgaaatcgtcgaatccaagggcatcaaccgattgtgaaactggaaaattcaaaaggtttggaattgggaccttcgccaaaaagcaagcgattagagacgcaattgaaggaatgaacgggcaaaacctccaccgtcgtaatataaccgtgaacgaggctcaaatcccgtggaaaaggttgcgggcggggcc

SEQ ID NO: 232215 - DNA, 373 bp, Glycine max
agttccatcaatgaagaccggtgaagcaccggctctgaaggcagagcaagaaaagactactctagaaaatcctcctcttcaagatcagatgcgggctccagaatactcgggagctcaacaagctcaacattcagcttcaaagtcaccagctgccattttaccagattctgagagtggagatgcgaaattacatacttcatcaacggttactgttcatgagacgaacacaacactttctgagcaccttgattccaagataacagagggaagaaaaccggttgaccgttcctcatgtggttccaacacggcctctagcagcgatgtggaaactgatgcactagagaagggtgagaaagggaacggaagagcctga

SEQ ID NO: 232216 - DNA, 368 bp, Glycine max
ttattttttgggatataggtggtggttttgatatcttcaataaaaaagggaaaaaggtacgttttgttcgttggggatttcctggaaaaaatcgtcgtattattctcgaaatacctatgaacgagcttcactccatcagaataataacagaagttaaagaagagggtatttttactcgtaccagtacttttgagagtatcgtttatctggaaaccatagaacaggggtttattcccttgactcgtattgaagataatttgaatgggacacaaattgcacataaagctggcgaattatctgtatttttgggtgtaccacttttttactgatgagaattgaacttaattagaaattaaattgcacaaaaa

SEQ ID NO: 232217 - DNA, 380 bp, Glycine max
gctagaaacactcatctgaaaatgaccatgcttgttttgtttgttgctacagttttggtagcatatgaatgccatggctcagactaccagaagttccctctccaaatgaaaactgggtttggtgggcaatacagcagtgaggtggcatgtgccagttggaggcttggcgttgcagcacataacgtagtcaagtggcaaactgttcctgcagcttgcggagagtacatagctgactacgttctaggagatgaatatagatcagattccaaaacagttaaccaagaagcttatttctatgcgaaatcgctcaaactcaccaatcaaagatgtctttgtcttggacgttgacgacactactctctctaatctccagtattttg

SEQ ID NO: 232218 - DNA, 362 bp, Glycine max
gcaaaaaatggcttctagttcagaatctcaatctcagtctaaaccgctccaagaccgagttgcaatcgtcaccggctcgtcccgcggaatcggccgagaaatcgcgcttcacctcgcctcactcggcgcgcgactcgtcgtcaactacacctccaactcggcccaagccgactcagtcgcggcgcagatcaacgccggttccgccaccacgacaccgcgcgccgtcgtggtccaagccgacgtgtccgatccggctcaggtgaagtcgctcttcgactcggccgagcgcgccttcgactcgccgatccacatccttgtcaactcggcgggcgtgatcgacggcacgtatccctccgtcgccg

SEQ ID NO: 232219 - DNA, 362 bp, Glycine max
atttgactctcacaaaccttgcatccatccacacatggctggcatgaactctagcgtattggcctgtagctatgccatatctggtgcagcatgctccgagctcaatgggaaggtcacttccgtggcctctgttgcatcctctggctacaagttgccattgatcaaatgtgaggccagagttcccaaatccaaagaatctgaaggaaggagaggtgcccttgttctcttggcagctacccttttcatctctgcagcctccaattcttctgccaatgctgggatcattgatgattaccttgagaggagcaaggctaacaaggaattgaatgacaagaagaggttagctactactggagcaaact

SEQ ID NO: 232220 - DNA, 355 bp, Glycine max
caaaagcaatggctaatagaccttcgaattcttcaattctcctctccctttttctattggccatcgccctctccctcgctgagtcccaatctttcatcggagtaaactacggccaggtcgccgacaaccttccggcgccggaggacacggccagcctcctcaaatccagcagcatcggcaaagtccgtctctacggcgccgatcccgccatcatcaaggccctcgctaactccggcatcggaatcgtcatcggcgcctccaacggcgacattgcgagtctcgccggcgatcccaacgcggccatccactgggttaacgcgaacgtcttgccctactacccggcgagcaacatcac

SEQ ID NO: 232221 - DNA, 401 bp, Glycine max
catggctatgctgcagcaccaacaattgcagcacttttctgctttctatacttcttccacaggagactatgttgcagacacccccttttgacagactaccccatcctcggcatgctgccacaattactcttcaacctgtggcgtgcccatgattttttcactgagatattgaaacggcatggaccaacaggtgagttcactggaccttggtttaccagcatggactatttggtcacttgtgaccccatcaacgtccaccacatgctgagcaagactttccacaactacgtcaagggacccgagtttcgtcacatttttcaggccttcggagacgggattttcaccgctgattttgaagcatggaagtacaacagggatctcttcacatctctctttaaaca

SEQ ID NO: 232222 - DNA, 370 bp, Glycine max
gcttttccctcgttgaaatgaaaatgggttcttctttgtggactttgtgtctaattttggcttcactagcctcttctgcattctgtgcctttccacggaggccagtggatgttccattcggcagaaactacgttcccacttgggcttttgatcacatcaaatacttcaatggaggttctgagattcaacttcatcttgacaagtacactggtactggcttccagtccaaagggtcatacttgtttggtcacttcagcatgaacataaagatggttcctggcgattcagctggcacagtcactgctttttatttatcttctcaaaatgcggagcacgatgagatagattttgagttcctggggaacagaac

SEQ ID NO: 232223 - DNA, 365 bp, Glycine max
gcccgaacttggggaaccattgcccctggcctaccttatgttgaacaaactataaccaatgctggaaattggttgattgggggtgacgtagaggtcattgaaccaattcagtacaatgatggacttgatcattttcgtctatctccgacacaactccgtgcagagttcacaaggcgcaatgcggatgctgtgtttgccttccagctccggaatcctgttcacaatggccatgctttgctaatgactgacacccgaaagcgccttcttgagatgggctataagaatcctgtcctcttgcttcatccacttggaggctacaccaaagctgatgatgtcccacttgattggcgaatgaagcaacatga

SEQ ID NO: 232224 - DNA, 479 bp, Glycine max
ttaggctgcatagacaagacaatgacatcgcatgcacgcgtacgtaagctccggaattggctcgagaaacacttaggctctcttaaaacaaaggtccctcaaaccactttccccacactctttagtgtgtcatttttttttttgctctttccccacaaagaagtcttggacccttcttctgtgtagtgcaatggccatggctaaggttttctgtgttctgcttctggcactccttggcatttccatgatcacaactcaggttatggcaacagattctgcttatcacttggatggaaggaattatggacctgggagtctcaagagctcacagtgcccttctgaatgcacaagaagatgtagccagacacagtaccacaagccctgcatggtcttctgcaaacaatgctgcaaaaggtgcctttgtgttcctcttggctactatgggaacaggttcgtgtgccccgtgctacattaactgg

SEQ ID NO: 232225 - DNA, 370 bp, Glycine max
cgttgtatttggccatatcattgatggaatggatgttgtgaagacacttgactcccaggagacgagtaggttagatgtccctcgaaagccttgcagagattgttaattgccgagaactgcctatagagggttgatctttacgtggaagtacaacacttttcgtcagattttcagttcagtttccaatgttctgattgtcccttattaatcacgttaatgtgtctggattatcagtagtggctgccaaattggttgacttccggagacagagtggagatagcacatcgatattttgtatgactagactcatgcttaattcttagaacaatagtattcacttttccaaaaagtgcctttgtgttccacaagg

SEQ ID NO: 232226 - DNA, 387 bp, Glycine max
cagcagctttgaacgacgcagaaggttcatccaatctccgaatcctttaatcgcattgcaaccatgtcgaggagaaaggtcagagagccaaaggaggaaaacgtgactcttggcccagctgttagagatggcgaacatgtcgttggcgtcgctcgcatatttgcctcctttaatgataccttcattcatgtcactgatctgtctgggagggaaacgcttgtccgcatcactggtggaatgaaggttaaggctgacagagatgaatcatctccttatgctgctatgcttgcagctcaggatgttgctgccagatgcaaggaacttggcattactgctcttcatatcaagctccgtgccacgggtgggaacaagacaaaaactccgggt

SEQ ID NO: 232227 - DNA, 386 bp, Glycine max
gcgcgttgctgctctagttaatgatagcattggaacattagctggaggcagattcgacaatcaggatgtcattgctgctgtgattcttggtactgggacaaatgcagcatatgtagaacgagcacatgctattccaaaatggcatgggcttatacgaagctcaggagatatggttatcaacatggagtggggtaatttccgatcatcacatcttcctctaacagaatatgatctagctctggatgctcagagcttaaaccctggagaacagatttttgagacattgctttctggcatgtatttgggggaagttgtaacgagagctttattgacgatggccgaagaagctgacttttttggcgatactgttccccccaaattgaaag

SEQ ID NO: 232228 - DNA, 362 bp, Glycine max
tgttgacatgattgggaagaagcttgtgaactccaaggaaggacctccaacctttgaccaaccgaagatgactttgagcaagctcttggagtatggtaacatgcttgtccaagaacaagagaatgtgaagagagtacaactggcagacaagtacttgaacgaggctgctcttggtgatgctaatcaggatgccatcaaaagaggaactttctatggcaaagcagcccagcaagtaaaaattcccgttcctgaaggttgtactgatccaaatgcctcaaacttcgacccaactgcaagaagtgatgatggaacctgcttatacacaccctgagaacctaagcattctccacttgaagagaagc

SEQ ID NO: 232229 - DNA, 484 bp, Glycine max
tgactgacgttgcctagacaagacatagacatcgcatgcacgcgtacgtaaactcggaatttcgctcgagggaatggatagtggctttccaaagaaatctgggccaagctcctccaaagtgcaaattcaggaaactgatgaagcaagaaggaagttctcaaatgctaaatctatttcttcatcccaatattttggcgatcagaacaaggctgcagatgtggattctcaagctacattgtctaagttttcgggttcaagtgccatctccagtgctgatctttttggtgactcaagagacaacaacattgatcttactgctggtgacctcatcaatcgattatctttccaggcacaacaggatctctcttcccttaagaacattgcaggagagactggaaagaagctgagctcattggcctccacattgatgacagatcttcaagaccgaatcctctaaaatgtggtagctccggaattacgaaaa

SEQ ID NO: 232230 - DNA, 384 bp, Glycine max
gctttgagggactacaaggcacagttggcggaagacccaattgtacacaggcacctttcagccttgtacgatacccttatggagcagaatctctgcaggttgatcgagcctttctcaagggttgagattgcacatattgctgaacttagtgaacttcccacggatcatgtggagcggcagttgtctcagatgattttggacaagaagtttgctggaacattggatcaaggtgctggatgccttgtcatatttgacgatcctaagactgatgctatatatcctgctactctagagaccatttccaatgttgggaaagtcgtggacagtctttacgttacgtctgccaagataatggcatgagctctctggttattttactccgat

SEQ ID NO: 232231 - DNA, 377 bp, Glycine max
  unsure (1)..(377): unsure at all n locations
tctccgtctacgcctccagcatccaacaggaccctcaccaactggttcagacagcactctccctctccctgaaccgcacccaagccagcaaaaccttcgtggctaactgcaacaaattcagaggcctgaaacccagagagcacgctgcactcaaggactgcgccgaggaaatcagcgacagcgttgaccgcctcagccggtcgctgaaggagctcaagctatgtaaggttaagggtgaggacttcacgtggcacattagcaacgtggagacatgggtcagttctgctttgaccgatgagagcacttgcggcgatggattctccgggaaggcgctgaatgggaagatcaaggactctattanggctatgatgctcaat

SEQ ID NO: 232232 - DNA, 381 bp, Glycine max
agcaaatataatttgcagtaatggcttcaatgaataaccaaaaagaaattgagctctttgagggccaatctcttctgtacatgcagctatatgggcacctaagacctatgtgtcttaagtgggctgttcaactaggtattccagacataatacagaaccatgccaaacccatttctctttctgacttggtctctactcttcaaattccaccagctaacgctgcttttgtgcagcggttcatgcgcttcttggcacacaatggaatctttgagatccatgagagccaagaagatcatgaactaacatatgctctaacccctgcatcaaagcttcttgtcaatagtagtgatcattgtctatctccaatggttctagcgttta

SEQ ID NO: 232233 - DNA, 385 bp, Glycine max
atacattgtagtatcacttttgtctcggaatttgttcttttgagttatggcaagcttaaaggttgcatgtgtggttttgatgtgcatggctgtgatgagtgcaccaatgatggtgcaagccgtgtcatgcaatgatgtttctgtgaacctagcaccgtgcctatcttacctgatgcagggtggagatgttccagaatcgtgctgtagcggagtgaggaacattctgggttctgccagcaccacctttgacaaacaaaccgtgtgcaaatgtcttcagcaagctgctaataactatggcatcaacgacgaatacgctcaggcactccccgcccgctgcaatgtcagcgtcccttacaagatcagccgattcaacaactgcgactcc

SEQ ID NO: 232234 - DNA, 364 bp, Glycine max
ggcgaacaatatagatcagactccaaaacagttaaccaacaagcttacttttatgccagagacctcgaagtccatcccaaggacacatttgtgttcagtatagatggcaccgtactctctaatattccatactacaaaaaacatggatatggggtggagaaatttaactcgaccttgtatgatgaatgggttaacaagggcaatgcaccggcactgcccgagactcttaagaattacaacaagctggtgtctcttggcttcaagattatattcttgtcaggaagaacactggacaaacaggccgtaacagaagcaaacttaaagaaggctggctaccacacatgggaaaaaattaattctcaag

SEQ ID NO: 232235 - DNA, 358 bp, Glycine max
cgccacggccgaagagatcgcaaagcacataaaaaactcgacgctctaccacgaacttgccaccgacgacatgaacaaacaggccatggacatctgcaaggaagttctaggttacgctgtcgatgacatgcaccaatccgttcgcaagttggaagagtttgaactaaacaagttgaacgattacgcctatgatctcaaggtctggatcgccggtactctcgctcaccaacagacatgtttggatgggttcgagaacacgaccaacgaggctggcaagaccatggctagggttctcaacacttctttggagctcagcaacaacgcattggacatagtgaacggtgtatcgaatctcttc

SEQ ID NO: 232236 - DNA, 371 bp, Glycine max
tgttgttgtggctggtggtatggaaagcatgtctaatgtacccaagtacctggctgaagcaaggaaaggatcacgccttggacatgattcacttgttgatgggatgttgaaagatggtttgtgggatgtctataaggatgttggcatgggagtctgtgctgagctatgtgcagataaccatgcattaacaagagatgaccaggataactatgcagttcagagttttgaacgcggaattgctgcccaagaaagtggtgctttttcatgggaaattgctccagttgaagtctctggtggaaggggaagaccatcaacagttgttgataaggacgaaggcctaagaaagtttgatgctgccaagttacgcaaac

SEQ ID NO: 232237 - DNA, 390 bp, Glycine max
gttcttcttcgtcgttatcttcttcttttgttgtttgtgtgtttgttttttctctcacctgaaaatgtcttgctgcggtggtaactgtggttgcggaagcgcctgcaagtgcggcaacggctgcagaggctgcaagatgtacccagacttgagctacaccgagtcaaccaccaccgagaccttggtcatgggagtggcaccagttaaggctcaattcgagagtgctgaaatgggtgttcccgctgagaacgatggctgcaaatgtggagctaactgcacctgcaacccctgcacttgcaagtgaggtgttggagagctaaagcttcaagcagaaatggcccttagaaataatgataaaaactatatgtactttcaaaactttaaaattaa

SEQ ID NO: 232238 - DNA, 367 bp, Glycine max
cttttacttggcattgaaaagggtccagaagtactcaacgctgttagaccggctggatcggcacttgttgatgactggcactgcctgaaaaccatggtgaggacttttgagacacattgtggatccttgtctcaatacgggatgaaacacatgaggtcctttgcaaacatctgcaatgtagggataaagaatgaacaaatggctgaggcttcagcacaagcttgtgtcagtattccttccaatccctggagttctctgcaaaggggtttcagtgcataataactccctgtaatgtgcactagtaaagaccaaagtatgattattgttacattatgttacatggttgtacttgtatatacatatcttg

SEQ ID NO: 232239 - DNA, 376 bp, Glycine max
gcaaaattcaccattctgtggttgggctgcgatcttgcatatcagaaggtgcaattattgaagacacgttattaatgggggcagattattacgagacggaggctgataagaggtttctggctgccaaaggcagtgttccaattggtataggcaggaactctcatatcaaaagggcaattattgacaagaatgctcgaattggggaaaatgtcaagattattaacagtgacaatgtccaagaagctgcaagggaaacagatgggtatttcataaaaagtgggattgtcacagtaatcaaggatgctttaattcctagtggaacagtcatctaaacacaaccacctccccaaaaaatttcttgtaccccaaatcctaa

SEQ ID NO: 232240 - DNA, 372 bp, Glycine max
ggaacacaacgaatgcagtgtcttgccgctttcacaagtttggtgatgaccaaaagaatctggtcttccaaggtgatgccacatcttcttccaagggcatagaactcacaaagttacacggtggaggaaagccagtgggtggcagtgtggggagagtgttatactcttctccagtgcacctttgggaaagctctacagtggtcgcaagctttgaaaccgacttcaccttttccatctcatcagactctactactccaggtgatggccttgccttcttcattgcaccatttgacactaaagtccctccaaactctggtgggagcaaccttggactcttcccatcagacaatgttgttgctgtcgagtttgaca

SEQ ID NO: 232241 - DNA, 333 bp, Glycine max
gtaagatgattaattcaatgtcatgacacattctcatgttaggaaaatttggacatcatctggacatcaaagagaatctgacatcatcgactacagacatacccttcacttgttgaaagaatagctgagagacaatacttattatggtggagacagtctaagtttcgtcgatatagcacttgtgccaatccacacttggttcaacacccattaaacttttggtaacctcaacaaacacagtgagtgccacaactctattgcatgggctaacatgcgccatcacaccaattgcgttgccaattcccttcctgattagcaggaggtttattagtt

SEQ ID NO: 232242 - DNA, 493 bp, Glycine max
gcctgactttaggtgtacctagacaagagctatgacgtcgcatgcacgcgtacgtaagctcggaattcggctcgagaagtgatcgagcgatgacaaccaggaggtgggcttggaagcagccatcctttgaagaaagcgtaatagctcactggtctagctccatggcaccgaaaatgtatcagggctcaagtgattcaccgaagcgacgagaccttgaaagttgctttttcaagtgtcagtagcgggacgttctgtcaatcggggaaggtttttggtgacaacacctggagatatcagaagtgagaatgctgacatgagtaacgataaatcctgtgaaaaacacgatcgcctgccagtggaaggctttctgcgttcagtcaatctacgcagagtgaatcggtccctaaggaagccccgaccccgaaagggctgccgtccgatgggtacacgaaagtgacgaagttgccttgactacagaatcatgcctgtctgt

SEQ ID NO: 232243 - DNA, 391 bp, Glycine max
gaagaaggtgtgttggagaatgaaaactgaaacagagccaaatgaaaccgagtcagattggagcgagttgactcgcgagtgcctcatcaacatcctctctcgactcagcgtcgaggatcgatggcgcggcaccatgctcgtttgcaagtcatggttcagcgtcttcaaggaaccctctcttcacttcgtcttcaacctcgaccctcaattcgactcgcccagcgaatcaactcgctggtggacccccgagttcgaggccaagatcgataacatgcttcgatctgtcgtcgaatgggcccaatcctctctcacccatatacgcattcgccactgttctgatcgttctctcgccctcgtcgcccaaagttgcccaaaccttgacggtgtgttt

SEQ ID NO: 232244 - DNA, 362 bp, Glycine max
cagggctgaagaggaaagaaaaagaagagcttcatttgaattgatgagaaaggaacaacataaagctttccaagaaaagcataagttgaacccggacaagaataacgacgattttgacataacttcacttgctgacaacgatgagaaaagggtagttaataggagcaacgagtatgtggagcctaatgtgactctatcagtgttaagcaatgatgagaaatcttcttccctttcacagactccttcagcagcaagacgacttgtaccccctggttttgcaagtgcacagttggaacgcaatttggcaaccaagacatcgcttaacactcattcaacagaagttggacaacctgcgcctggtg

SEQ ID NO: 232245 - DNA, 374 bp, Glycine max
cttatcttctttcccactgaggaaacagaggatagcgtcatagcagcaatggcttctgcaagagaacaaatttattttctggcaatcgtccttctattctctcattcgaaactaatgttatcaaatgctgctataacaggggaaccaattcccgctgaatggccccatcagttccacgcgttgatgttcatgaaccaaagcggaactcttcagaaactggacttgtggtacgactggcccaacggccgcaacttcaacataattcagaatcagctcgactacctcgtaacatacgacctcgaatggaacaacggcacctccttcgtctacactctcgacgcctccgaacccacgtgccaagtcctgcacgtgga

SEQ ID NO: 232246 - DNA, 380 bp, Glycine max
cttcttccacaggagactatgttgcagacacccccttttgacagactaccccatcctcggcatgctgcgacaattactcttcaacctgtggcgtgcccatgattttttcactgagatcttgaaacggcatggagcaacaggtgagttcactggaccttggtttaccagcatggactatttggtcacttgtgacgccatcaacgtccaccacatgctgagcaagaatttccacaactacgtcaagggacgcgagtttcgtcacatttttcaggccttcggagatgggattttcaccgctgattttgaagcatggaagtacaacagggatctcttccattctctctttaaacagaaaagcttcgaggtgtttttactgaaaa

SEQ ID NO: 232247 - DNA, 355 bp, Glycine max
cccaagcgccacttacttaccactgggtggagtgtctttgtcagttccaaaaaattagctgctggtgatgcctttatattcttaaggggtgaaaatggagagctgcgagttggggttaggagggtcatgagacagcaaagcaatgtgccttcttctgttatatctagtcacagtatgcatcttggtgttctggccactgcatctcatgccattgccactggaacactgttttctgtgttttacaagcccagaacaagccggtcagagtttattgtgagtgtcaacaagtatctggaaattcagagtcataaactctctgttgggatgagattcaaaatgcgatttgagggtgatg

SEQ ID NO: 232248 - DNA, 372 bp, Glycine max
gaatagtgctgcaatggcttcaagtcatgaggaggtgacccttttgggagctactggaagcccatttgtgtgcagggttcatattgccctcaagttgaagggagttcaatacaagtatgtcgaataaaatttgaggaacaagagtgaactgcttctcaaatccaacccagttcacaagaaggttccagtgtttattcacaatgagaagcccatagcagagtctcttgtgattgttgaatacattgatgagacatggaagaacaaccccatcttgccttctgatccttaccaaagagccttggctcgtttctggtccaaattcattgatgataacgtttttggtgctgcatggaaatccgttttcacagctga

SEQ ID NO: 232249 - DNA, 354 bp, Glycine max
cgcctctaagctcgcagttccatgatctcgcgactcaagatgcatatattcgtgagaactttgactggcaggaccatcacccttgaggtgaaaacttccgacacgattgaccacgtaaaagctaacattcacgacaatgaagggatcccacctgaccagcagagacttagctttgcgggtaggccacttgacgatggtcgcacccttgccgattacaacatccagaaggaatcaaccctccatctcgtgctgtcgcctcaggggtagcatgcacatctttgtctagacttgaaccgggaagaccatcacccttgaggtgcaatcctctgacattactgataacgtcaaggccaa

SEQ ID NO: 232250 - DNA, 495 bp, Glycine max
  unsure (1)..(495): unsure at all n locations
cactgcacttcnagtggccctagacgaagagatatgaagtcgcatgcacgcgtacgtaagctcggaattcggctcgaaaaaaaagaagtatcactcatataatactctgtatcacttcacttcgataatcatccatagctactgaagaaaatggcaaccatctctgctgctatcacaaccccatcgatctcccgcgcaactcttgtgcaaaagcgggtctcatctcccgttcttggtttgccagcaatgggtaaggtgggaagagtgagttgctccatggaggaaaaaccttattctgtgaaggaaagcagctctagcatgttggggatgggggcatctctgatggcagctgccagcgctgcagccatgtcaggcccagccatggccttggtagatgagagactgagcactgaaggaaccggacttccctttggcctcagcaacaatcttcctggttggattcctttccgcgttcttggtcctaactggaacccc

SEQ ID NO: 232251 - DNA, 370 bp, Glycine max
cattttacaatgagctacgtgttgcccctgaagaacaccccgtacttcttaccgaggcaccactcaatcccaaggccaacagagagaagatgacccaaattatgtttgagactttcaatgtgcctgccatgtatgttgcaattcaagctgtcttgtctctgtatgccagtggacgtactacaggtattgtgcttgattctggtgatggtgtgagccacacggtgcccatatatgaagggtatgctcttcctcatgcaattcttcggttggaccttgctggccgtgatttaacagagtacttggtgaaaatccttaccgagagaggatactccttcagcacctctgccgaaaaggaaattgtccgtgatgt

SEQ ID NO: 232252 - DNA, 378 bp, Glycine max
caaagtttcttcctttctctgctctttgccttctctgacacatttggtgccttgtagagcgtgttttggcaggaaggtggtatggcgaaggacgttgaggttgctgagcgtggctccttctctgggaaggactaccaggaccctccaccagcaccactcattgatgctgaggagctcacaaagtggtccttttacagggctctcattgctgaattcattgccactttgctcttcctctacattactgtgctcacagtcatagggtacaagcaccagactgacctcaaggaaaatggtgaaatctgtggtggggttggcattcttggcattgcatgggcctttggtggcatgatcttcatccttgtctactgcactgct

SEQ ID NO: 232253 - DNA, 372 bp, Glycine max
gcagaaaccaaagaaccatgaagtctctgaggtccatcttagcaacttttgtggttctattatcaatttcactcactatctcacttccaattgaagaagctttcaaccattgtctaacacatcactctcagactccaaaccaatttccctcatcaatctacacttacaccaatggttccttcacttcaatccttgagtccacagctcaaaatctaaggtacttgttgccctcagtgccaaaacctgatttcatattcaccccactggatgactctcaagtccaagcagcagtggtttgtgcaaaaaagcttggtattcacatgagagtgcgaagtggagggcatgactatgaagggctctcgtatgtttccc

SEQ ID NO: 232254 - DNA, 357 bp, Glycine max
gtcactaactctgtgcattcttctcgcgctctcagccttcgagcacactcggcatttcctttcccaggatagtagaatatggcagacactgaggatattcaacctcttgtttgtgacaatggaacaggaatggttaaggctggatttgctggagatgatgccccacgtgctgtgtttcccagcattgtacgtcgtcctcgtcacactggtgtgatggttggcatgggccaaacagatgcatatgttggtgatgaggcacaatctaagaggggtattttgactcgcacgtaccccattgaacatggaattgtgagcaattgggatgatatggaaaagacttggcatcatagcttcgat

SEQ ID NO: 232255 - DNA, 406 bp, Glycine max
aggaagcctaacttaactccggaattcggtccaacctttcaatggactccatttcccccttcttggcaaggaactctggtcccggtaaccggtgattttggttcgggacaatgtctcgtgtttatgttgggaatttagaccctcgagtcagtgagagggacctcgaagatgaatttcgtatatatggtgttcttaggagtgtctgggttgctcgaagaccaccgggatatgcatttattgagtttgatgataggagggatgcacttgatgcaattcaggccttggatggaaaaaatggttggcgtgtagagctttctcataattccaagggtggtggccgaggagggcgtgggcgtggaggtgaagacacaaaatgctatgaatgtggtgaacctggacactttgc

SEQ ID NO: 232256 - DNA, 327 bp, Glycine max
ctttggcacggcaaaatgtatctcaacagcaaaaactcacgcatcaacttatagcctatagttccaaggacataagttgatgcgtgagtttgcccgaacatctaggctgaatgaaaaatcagatgtgtatagttttggaatacttctgctggagctacttactgggaagaaggccgtggacaatgagtccaatttgcatcaattgatattgtccaaggcagataacaacactgtaatggaagctgtggattcagaggtctctattacctgcactgatctggctcatgtcaagaagacctttcagcttgctttgctttgcacgaaaaa

SEQ ID NO: 232257 - DNA, 383 bp, Glycine max
aaacacttgcaaactagttttgtttttggcacatatcgcattacattacattagattggtggcaaagcaatggcatcgtcactacaagcagcagctactttcatgcaacccaccaagtttttgcagctaaagtctactcaggccatatctaaggcttttggtttggaacctgctggagttaataaggtcacatgctcccttcaggctgatcttaaggacttggctcacaagtgtgttgatgctaccaaaattgcaggctttgcccttgccacctctgctctcgttgtttctggggcaagtgctgaaggagtaccaaagcggctaacctttgacgaaatccagagcaagacctacttggaagtgaacgggacacgaacagcaaa

SEQ ID NO: 232258 - DNA, 369 bp, Glycine max
tttcaaagacactcttcctgatgatctactggctcctgttttgaaggctgtaattgagaaaaccaatgtgaacccaagtgaagttggggatattgttgtaggtagtgtattggctcctggagctcaaagagctagtgaatgccgaatggctgcattttatgctggttttcccgaaactgtgcctgttaggaccgttaataggcaatgttcatctgggctccaggctgtcgctgatgtagctgctgctataagggctgggttctatgacattggtattggtgccggtttggaatctatgaccactaatccagtgggatgggatggatcagtgaatcctaaggtaaaaatgtttgaacaagcacaaaactg

SEQ ID NO: 232259 - DNA, 368 bp, Glycine max
tcgaaaaccaaaagcatgggtcagggaacaccgggcggtctgaaccggcagggtcttccgggggaccggaagccggacggcggcgacaagaaggagaagaagttcgagccggcggcgccgccggcccgcgtgggccgtaagcagcgtaagcagaagggcccggaggcggcggcgcggctgccgacggtgacgccgctgtcgaagtgcaagctaaggctgctgaagctggagcgcataaaggactacctcttgatggaggaggagttcgtggcgaaccaggagaggctgaagccgcaggaggagaaggccgaggaagacagatccaaggtcgatgatctccgaggttctcctatgagcgttggtaacct

SEQ ID NO: 232260 - DNA, 393 bp, Glycine max
ttcagcttttccctcgttgaaatgaaaatgggttcttctttgtggactttgtgtctaattttggcttcactagcctcctctgcattctgtgcctttccacggaggccactggatgttccattcggcagaaactacgttcccacttgggcttttgatcacatcaaatacttcaatggaggttctgagattcaacttcatcttgacaagtacactggtactggcttccagtccaaagggtcatacttgtttggtcacttcagcatgaacataaagatggttcctggcgattcagctggcacagtcactgctttttatttatcttctcaaaatgcggagcacgatgagatagattttgagttcttggggaacagaacaggacaaccttacattttg

SEQ ID NO: 232261 - DNA, 353 bp, Glycine max
cgctgcaactctctaccttccctctttttccgaatctgaatagaaatggcttcggagactgagacgttcgcttttcaggccgagatcaaccagctcctcagtctaataatcaacaccttcgacagcaacaaggagatctttcttcgtgagctcatcagcaatgcctctgacgctttggacaagattcgatttgagagtcttacagacaagagcaagcttgatgctcagccagagttgttcattcacattattcctgacaagaccaacaacacattgtctatcattgacagtggtattggcatgactaaggctgatttggtgaataacctcggtactattgcaaggtctgggac

SEQ ID NO: 232262 - DNA, 363 bp, Glycine max
gcgcgtggtggcctgcaagagcgcttgctccgctttcaactcccccaggtactgctgcacgggctcctatggaagcccacaggcctgcaagcccaccgtctattccaagatcttcaagaccgcatgccccaaggcctactcctatgcctatgatgaccccaccagcatcgctacttgcaccaaagctaactatttggtcaccttctgcccccatcgccgctagctcatccatccatcactttctactctctctacttaccttagctagccttattttattgtcatacctcctttatgttgatgggtactactactatatatgccagtccccattcatattatatggttcttcaactttaatag

SEQ ID NO: 232263 - DNA, 345 bp, Glycine max
atagaacatacttgcctgcacgtctactctagatgatcccctcggggaattccaattccacattttcaagaaataaggaggcaaaaatgttcatatatgaattggaattatttgttttcttattaggcctatcctgaagccaaaggaaatgagatcggaattcctcggggaattccaattccacattttcaagaaataaggaggcaaaaatgttcatatatgaattggaattatttgttttcttattaggcctatcctgaagccaaaggaaatgagatcggaattcctcggggaattccaattccacattttcaagaaataacgaggcaaaaatgttcatatatg

SEQ ID NO: 232264 - DNA, 382 bp, Glycine max
gaatattgaaggtgaatatggacggattgttcaaaatccaactgaagaaatcaaggtgctttgtgttaacactttggaggccggagtttttagcagtggatttccgacagtttctgatcctgtggaggcatacacttaccctgaatatttgaaatctggatggaacttgaataatatactttcactctcaggatcccttctttgttttgaaagctctgaagcttcacgtaattttgcccccaagattcacatgggaatgtgcttctctccactcaactggaaagttgaagagcaccacttatactcattatattacgtgcatttgggtgaaccaaaagtgtggtatggcatcccaggaaaatttgctattaactttgaaaca

SEQ ID NO: 232265 - DNA, 360 bp, Glycine max
gatacaccttccaagaaacccatgtggagaggagttattttggcatacataggagttgcattctgctacttacctgttgccttcattggatactatatgtttggaaactcagttgatgataacatcctcatcacactagaacgccccgcttggctcattgccgctgctaacctctttgtctttgtccacgttgttggaggctaccaggtgtttgccatgccagtgtttgatatgatcgaaacctacatggttacgaaattaaatttcccaccttctactgcactccgagtaacaactcgcactatatatgttgcattgacaatgttaattggcatatgtatcccgttctttggctctctt

SEQ ID NO: 232266 - DNA, 370 bp, Glycine max
gtgatttcagtgagtgatcggtgttcacttgatctcatcataatcgtcagcgtcaattgaagaagatgccgatcagaaacatcgccgtcggaaggcctgaagaggcgactcaccccgacacgttgaaggcggctttggctgagttcatctcaaccttcatcttcgtgttcgccggctcaggctccggcatcgcctacaacaagctcaccgacaacggcgctgccacccctgccggcctcatctccgcctccatcgcccatgcattcgccctcttcgtcgccgtctccgtcggcgccaacatctccggcggccacgtcaaccccgccgtcaccttcggcgccttcgtcggcggcaacatcaccttcctccg

SEQ ID NO: 232267 - DNA, 412 bp, Glycine max
ggagggttttgtgattttttgaagaatcgcgttttggagttagtcggagatggagctgtcgactccgaattcttcctcgaagcacttgtccattacgccgggttctagggttttgagaaaccctctctccgacgaacagatctggaagcgcctccgtgacgctggcttcgatgaggaatcgattaagcacaaagataaggctgcgcttattgcttacatcgccaagctcgaagctgagatatatgatcaccagcaccacatgggccttctcatattggagaaaaaggatttggcttcgaagtatgagcaagtaaaggccttggctgaatcatccgagttaatgcataaacatgattcaaccatgaataaatctgcgttaactgaatcaaagaaacgtgaagaaagtttgaag

SEQ ID NO: 232268 - DNA, 399 bp, Glycine max
gcgaatccctctctctatctctcacacacactttctctctctctctctctcacccagatcttgtagcaatggcgagcgctcccactccacgcgaagagttcgtgtacatggcgaagctggcggagcaggccgagcgctacgaggagatggtggagttcatggagaaggtctccgcctccgccgagagcgaggagctgaccgtggaggagcgtaacctcctctccgtcgcctacaagaacgtgatcggcgctcgccgcgcctcctggcgcatcatctcctcaatcgagcagaaggaggagagccgcggcaaccaggaccacgtcgccgtcatccgcgactaccgctccaagatcgaggccgagctctccaacaaccggcacggaatcctcaaactcctcg

SEQ ID NO: 232269 - DNA, 477 bp, Glycine max
ggaatgaatcgaattgcgtggcctatagaagaatatgacgtcgcatgcacgcgtacgtaagctcggctatgccaacatggatgatatggctgtgcaaattgcattgcaaagaattcgaaccttcgtgcttcaaaacaaggaggtcatggttcctaacaagaaacattgctggcacagtaacttgaggttgagcctcaaaaccagaaggtttgatgatatcatgatgtcacctcactcccctatacctcagtcccctttggttaaagccacaatttgagttgccatatttctctgcaccatctcagaagaagtaactgatatacgatgattatttggttctttgatttgttattttggcaaggtacataagtgctggattttgttctttctaacaacaataacagacaactcctgatattgtttttgttaccaacaacatcaaagtctctttgccttgcgtcataaaactgtggcggg

SEQ ID NO: 232270 - DNA, 376 bp, Glycine max
agttgatggtggtttcaatcagaatctgaattcaaagactttgtctgctcccaatctcagtgcaatggactaccctgcacttacttcaccagatggccagactgcttcagtagaatatgtggttgataatgtgcaacaaagtggcaatccttaccgatcatatgacagtgatgtgctgcttttcaaatctgtctcttcagtttcatctaggggtggtgctattgactttgcttcagctgttaggaagttggcttctcgggattctggtggtatttggaagtatgataaaaatggctctggtgatgctgctatcggctcaagtaggaattcgaatgttctggctagtggttacaatggtggacaggggagagcacac

SEQ ID NO: 232271 - DNA, 363 bp, Glycine max
gagagagatggggctaagaagtaaattaagaatgtcagcgtcagtggtgcagcaggggatgaaggaaataagaaggagcgtgacgtacatgcctcgaccgggggacggtgcgccgcggggggtgacgctgataccgggggacggaattgggcctctggtgactcatgcggtggagcaggtgatggaggcgatgcacgcccccatatacttcgagaagtacgatgtgcacggggacatgaggcgtgtgccggaggaggtgctggattcgatacggaagaacaaggtgtgcttgaagggtggtttgaggactccggtgggtgggggtgtgagctccctcaacgttcagctcagaaaggacctcga

SEQ ID NO: 232272 - DNA, 394 bp, Glycine max
gcagacttaacaacagcacaaagcgggttactgtctgttcaagctaccatctctctctctctttcttagtgcctccttgccagaagttaaaatggcccaagaaactttcctattcacatctgaatcagtgaacgaggggcaccctgacaagctctgtgaccagatctccgatgctgtgctcgatgcatgcttggagcaggaccctgacagcaaggttgcctgtgaaacctgcaccaagaccaacatggtgatggttttcggagagatcacaaccaaggccaacgtggactatgagaagattgtgcgtgacacatgcaggaacattggttttgtctctgatgatgttggtcttgatgctgacaactgcaaggtcctcgtcaacattgagcaacag

SEQ ID NO: 232273 - DNA, 398 bp, Glycine max
gtgaaagtgagaaaaaataaaaatcaaagagcataatgtcagggatcattcacaagattggggagacccttcatgtgggagggcacaagaaggaggaggagcataagggtgagcaccatgctggagaatacaaaggggagcaccatggtgaacacagtagtgagttacaagggaaagcatcatggtgaacacaaagctggagagtaccatggtgagcacaagccagagcacaaagaggggttcctagacaaagtcaaggacaagatccatggtgagggcggcgccgccgagggcgagaagaagaagaaggagaagaagaagaaggagcatggccatgagcatggccatgacagcagcagcagcagtgacagtgattaaactgctgcatcacctatata

SEQ ID NO: 232274 - DNA, 372 bp, Glycine max
ggtttatgtgaactttgggagcattatggtcatgactagtgaccaattgacagagttagcttggggacttgcaaatagtaacaaaaactttttgtgggtcattaggcccgatcttgtggcagggggaattaattgtgcgttacccaatgaatttgtgaaagagaccaaagatagaggcatgttggcaagttggtgtccccaagaggaggttttggctcacccagcggttgggggattcttgacacattgtggttggaattcaacgttggagagtgtgtgtgaaggggttccaatgttgtgttggcctttctttgcggagcaacaaaccaattgtcgattttgttgcaaggagtgggggattgggttggagat

SEQ ID NO: 232275 - DNA, 386 bp, Glycine max
atggcctcagcatcaggggaggcaccaccaccccaacccacttcaacagaagcagctccagcatcaggctcttcagctccagccatatcagcagcagcaccacaacccggaggatcatcgccggcgcctccgagccgctacgaatcgcaaaagcgtcgagactggaacacgtttctgcagtacctacagaaccacaagcccccattaacgctggcgcggtgcagtggcgcacacgtcattgagttcttgaagtacttggaccaattcgggaaaaccaagggttaaatcacggggtgcccgtactacgggtaccccaaccctcctgcgccctgcgcttgcccactgaaacaagcgtggggaagccttgacgccctgatcgggcgact

SEQ ID NO: 232276 - DNA, 377 bp, Glycine max
ctattgtctggacagactctcagatcatattttatgtggacaatgttcctattagagaagtgacgcgaacagaatctatgggaggagatttcccttctaagccaatgactttgtatgcaacaatatgggatgcatctgattgggctaccaatggaggcaaatacagggttaactacaagtatgcaccctatgttgctgaattctctgaccttgtcctgcacggttgtgcagtggatccaattgagcagcacgtggccacgtgtgacaatgctcaaagctctgaggcaacaattcctccttctggtgttacaccagcacaaagaatcaaaatggagaatttcaggaagaagcacatgacatactcctactgctatgac

SEQ ID NO: 232277 - DNA, 395 bp, Glycine max
aaagcacaaagcaaagctcatccttgagttaaaaaatggcagcagcttcttccatggctctctcatccccatccttggctggcaaggccgtgaagctgggcccatcagccccagaagtgggaagggtgagcatgaggaagaccgtcaccaagcaggtctcctcaggaagcccatggtacggcccagaccgagtcaagtacttgggcccattctctggcgagcccccgtcctacctaaccggtgagttcccaggcgactacggctgggacactgctgggctttccgcagacccagaaaccttcgccaagaaccgtgaactcgaagtgatccactccaggtgggccatgctcggagccttgggctgcgtcttcccggagttgctggtccgcaacggg

SEQ ID NO: 232278 - DNA, 373 bp, Glycine max
cactactgcagatgctgttaaatttgtagagtcttgcaaagaaggttatgtagcagcaactgttacaccacagcatcttcttctgaatcgtaatgctttgttccaaggtggcttacagcctcacaattactgtcttccagtgctcaaaagagagatccatagacaggctattgtttcggctgtcactagtggaagtaaacgatttttccttggaactgatagtgctccacatgataggcgtaaaaaggaatgttcctgtggatgtgctggcatatacaactcaccggttgctctatcactatatgccaaagtttttgaagaggctggtgcacttgataagctagaggcttttacaagctttaacggacctgac

SEQ ID NO: 232279 - DNA, 396 bp, Glycine max
actcacactcactgcagatctcaatccatggctaccattgttagcatcaaggcccgccagatctttgacagtcgtggcaatccaaccgtcgaggtggatttgacatgctccgatggtacttttgctagagctgctgttccaagtggtgcatccactgggatttatgaggcccttgaattgagagatggaggatctgactaccttggaaagggtgtatcaaaggctgttgacaatgtgaacaccattattgcccctgctttggttggcaaggacccaactcagcagactgctattgacaacttaatggttcaacaacttgatggaactgttaacgaatggggttggtgcaagcaaaagcttggagcaaatgccatattggcagtgtctcttgcagtc

SEQ ID NO: 232280 - DNA, 410 bp, Glycine max
gcccaagaagaagaactcaccccacccagtgaaggtagtctacatatccaaccccatgaagatcaagaccagcgcctccgagtttagggctttggtgcaagagctcaccggccaggacgccgagtccccaccagatccctctcgcttccacggccatcaccccgattcctcctcctccgtcgagaatatcgaagaggaggaggaagaggataatattcaccgtgtgaattgtgttgtccctcctatgacagcaaccgatgagatcagtcttctcatcggctgctgcaaccagaacggacaacatcagccttcctcaatggagagtaataatttccagctgctggacgacgatgacgttttcacgccccagatgattgagaacatctctgccctgctcccagcaagtgtat

SEQ ID NO: 232281 - DNA, 392 bp, Glycine max
  unsure (1)..(392): unsure at all n locations
gaagaagatgacggtaaagatggcgaggatggttcagaagaacaagctgtgattggattatggagtggcattgcttggttggttggaatgactgtattcattgctgtgttgtctgaatatgtggtggatacaattgaggatgcatcagattcatggggtttgtctgtgagcttcctaagcataatcttgctgccgatagttggcaatgcagctgaacatgcaggagcaattatatttgccttcaagaacaagctggacatctcattgggtgttgcattaggttcagcaactcagattgccatgtttgtggtcncattatgtgtaatcgttgcttggataatgggtatcaatatggacatgaacttcaacctcttagagacaggttcccttgc

SEQ ID NO: 232282 - DNA, 373 bp, Glycine max
caagacttggtgagtgtcactgctgaagagaagaaccacgcagaactgacgcaatgggaagcacaagtttgcttcatctaatacttggtgttgttttggctctgctgaatgtgtctcttgtggaaggagaagatgcatacaaatactacacgtggactgtgacatatggcattctttctccactaggtagtcctcagcaggtggttcttatcgatggtcagtttcctgggcctcaactagacttggtaactaatgaaaatgttgttctcaaccttgtaaacaagttagatgagccatttcttcttacttggaatggcatcaaacaaatgaaaaactcatggcaagatggggtattgggaaccaattgccccat

SEQ ID NO: 232283 - DNA, 242 bp, Glycine max
tgcccttgttgagcaccggatttgaattgaggccaactaatttctttgagagaaatccagtccttaagaccctttctcctggcattgttaaatttccaggttgtgagaaaccctagatttgcttttgagctttgtcactttaagtacaatattgttgatcgatagatccggagaaacattatctttttactaatatcggtcatatgtgctaaggtgagaaaaataataattttgaataaaaa

SEQ ID NO: 232284 - DNA, 383 bp, Glycine max
tggagaggtggaagagctgcttcatttaacatcattcctagcagcactggagctgccaaggctgttgggaaagtcctccctgctttgaatggaaaattgactggtatggcattccgtgttcccaccgtggatgtctctgttgttgacctcacagtgaggctggagaaagaagcttcctacgatgaaattaaaaatgctatcaaggaggaatcagagggcaagttgaagggaattcttggttacactgaagatgatgtggtctccactgactttatcggcgatagcagatcaagtatttttgatgcaaaggctggaattgcattgaataagaactttgtgaagcttgtttcttggtacgacaacgagtggggatacagctcacg

SEQ ID NO: 232285 - DNA, 370 bp, Glycine max
ccaatcagtgcaagagaatcgccctccatcttctttcttcttcaattcattccgatggcgattccgttgccctctctcgatctcactcaccactccgatttcgaacccttagtctccccagacggttacatctccatttgcggctacggttccctcctctccgagacaagtgccagaaccactttccccgacctcgtcaacttccgaatcgcccggttaactggtttccgccgtctcttcaactccgtcggacgcatctttttcactcaccgtgttgccaatatcaaaactcaggaaattgctggcctttctgttgaaccatgtgatggtgaattcgttgttgtagctgtttttgagataaagaacacag

SEQ ID NO: 232286 - DNA, 365 bp, Glycine max
ctgcttttgactgctggcattggttctgatcatgttgatctcaaagctgcagctgctgctggtttaactgtggcagaggtcacaggaagcaacgttgtgtcggttgcggaggacgaactcatgagaatcctcattctaatgaggaatttcttgccagggtaccatcaggctgttaatggggaatggaatgttgctggcattgcacatagagcttatgatcttgaaggaaagacagtaggaaccgttggcgcgggtcgaattgggaagcttttgctccagaggttgaaaccttttagctgtaatcttctttattttgatcgacttaggatagatcctgaattggagaaagagattggagcaaaatt

SEQ ID NO: 232287 - DNA, 407 bp, Glycine max
  unsure (1)..(407): unsure at all n locations
ctcttcagcatgggaggtcatggctccatgagtgctgaggatggcttttcattcccatcattcatgccatctcccagtataccgaactatgatgaggatcgctctcgcccaggcagagctgttgtgggatggctgaagatcaaggcagcaatgaggtggggcttctttatcaggaagatagccgctgagaagcgggcacagatagaggagttagatgaataagttgtatggacaatggttgcaggcttaacagttagccataagataatactgatattctgcagatttagttgtctttatcagtgccaaccaaattgtgcagtccatggtgttaatattcttgatctatgtatctgtgtatctgatttgacagcagcacgtttgtcncagtattctgtacagtttgt

SEQ ID NO: 232288 - DNA, 392 bp, Glycine max
aagagaagaaaaaaaaaaagagagaaaagaaaaaatttgttttataactttttaacttattgttcacttcttcttcttcttcttcttcaatatcttggttctttgatattattctattgagcaaaaaatgggagttccagagagagaccctcttgcacaattgagtttgcctcctgggtttaggttttaccccacagatgaggagcttttggttcagtacctttgccgcaaggttgctggccatcatttctctcttccaatcattgctgaagttgatttgtacaagtttgatccatgggttcttccaggtaaggcagtgtttggagagaaggagtggtacttttttagcccaagagacaggaagtacccgaatggttcacgaccaaacagag

SEQ ID NO: 232289 - DNA, 472 bp, Glycine max
  unsure (1)..(472): unsure at all n locations
gaatgaattacgtgcctatagaagagatatgacgtcgcatgcacgcgtacgtaagctcggaattcagcaacaaggataagacactagtcttccaattttctgtcaagcatgaacagaagcttgactgcggtggtggctacatgaagttgctcagtggtgatgttgatcagaagaaatttggtggggatactccttacagtattatgtttggcccagatatctgtggttacagtacaaagaaagttcacgccaatcctaaccaacaatgacacaaacaacttgataaagaaggatgttccttgtgagactgaccaacttactcatgtttacacatttatcctccgtccggatgcaacctacagcatcctgattgataatgtggagaagcaaactggtagtctctactctgattgngatcntctcccttcaaagacaatcaaagatcccgaggctaaaaaaaccagaagattgg

SEQ ID NO: 232290 - DNA, 353 bp, Glycine max
gattgacaggcgatctggtaaggagcttgagaaggagcccaaatttttgaagaatggtgatgctggtatggttaagatggttccaaccaagcccatggtggttgaaactttctctgagtatcctccccttggtcgttttgctgtgagggacatgcgtcagaccgtagctgttggagtcatcaagagtgttgagaagaaagaccccaccggagccaaggtcacaaaggctgccgccaagaagaagtgattgcattttggcaattttgctagcacatgtgatcatcaacgtggtttcaaaaaaacttgttcctttacagtagtttatctttgcagagtcttatgtgtttgtttta

SEQ ID NO: 232291 - DNA, 372 bp, Glycine max
cttgggtttaattggtataggcttgccaaggtcttgttgattgagcgttaagtgctttaactaatcaatcccaagaccttggtttaccttgccacacaaaaaaatatataaaaaggcaaaataataataaaaaaaagagaaggcttggagccaagaaaataaacacaaagcacaagtcatggaaagaataatggttggaagtgcaacaaaggttgctttcaacctcttggtcactttcgccattgtcaatccatgccttgaggctggcattgctgagtttgatgactttctcaaagcccaagctgatgaagcacaaaaaattgctcttgaggcctatgtcccagtgccagaagatgtcaccgaccaactcaa

SEQ ID NO: 232292 - DNA, 392 bp, Glycine max
ctgagctttgctgaggctgctagccttcctttaacacttgagactgcttatgaaggccttgaacgaaccgggttttctgctgggaaatctatccttgtgcttggaggtgctggtggagttggaacccatgttattcagcttgccaagcatgtttatggagcatccaaggtagcagctactgctagcactaggaaactggaactattaaggaatttgggagctgactggcctattgattatacaaaggagaattttgaagacctgtctgaaaagtttgatgtggtgtatgatacagtaaggcaaactgaacaggcattcaaggttttgaaagaacgacgaaaagttgtgacaatagtaccacctggatttcatccagctatccttttcatact

SEQ ID NO: 232293 - DNA, 165 bp, Glycine max
ctattctgtatcaaatttcagtcagatattggctgtgtacatagggttatattattgatgcactgtatttgtattcaaattccaattccaaatggcgaacatatttgattgctgttagtttcccaggttatgtagactatgtgacaatgcagcattatttggaaa

SEQ ID NO: 232294 - DNA, 382 bp, Glycine max
aagacactagtcttccaattttctgtcaagcatgaacagaagcttgactgcggtggtggctacatgaagttgctcagtggtgatgttgatcagaagaaatttggtggggatactccttacagtattatgtttggcccagatatctgtggttacagtacaaagaaagtacacgctattcttacctacaatgacacaaaccacttgataaagaaggatgttccttgtgagactgaccaacttactcatgtttacacatttatcctccgtccggatgcaacctacagcatcctgattgataatgtggagaagcaaactggtagtctctactctgattgggatcttctccctccaaagacaatcaaagatcccgaggcctaaaaac

SEQ ID NO: 232295 - DNA, 403 bp, Glycine max
gtaccatcttataactaggtatttattttctcatatgctcttcttaaacttctctttggtagtgtgttcacatacatatctacttattgttattattattgtcaccacatacaataatgggttccattagtaacaccgaggttcataatcatcacaatgatgatgacgacgatgatcatcgtcatcgggtgaatttctcgatccagagaggatttgggacaaaattgaaggaggcattgaaggaaacattgtttccggatgatcccttcaggcagttcaagaacgaggagaagccaatggggagggtgatgaaaggggtgcaatacttcatcccaatctttgagtggctccccacttacaattttcgcctcttttgctctgacttgatcgctggactaaccat

SEQ ID NO: 232296 - DNA, 473 bp, Glycine max
gccatgcatacgccagccaagggagagacatgcttgcatgcatgcaggtctactctagatgatcacctcggggaattccaattccacattttcaagaaataaggaggcaaaaatgttcatatatgaattggaattatttgttttcttattaggcctatcctgaagccaaaggaaatgagatcggaattcctcggggaattccaattccacattttcaggacataaggaggcaaaaatgttcatatatgaattggaattatttgttttcttattacgcctatcctgaagccaaaggaaatgagatcggaattcctcggggaattccaattccacattttcatgaaataaggaggcaaaaatgttcatatatgaattggaattatttgttttcttattaggcctatcctgaagccaaaggaaatgagatcggaattcctcgggggtaccgagctcgaattccctatagtgagtcg

SEQ ID NO: 232297 - DNA, 378 bp, Glycine max
gaagtgttggatgcatttctatttctaactaattattgtgcttattattattgttgagaaagaaaagaatggcaaagttaataaaattctttgagttgaacacaggggccaagattccttctgttgggttaggcacttggcaagctgagcctggtgttgtagccaaagctgtcaccacagccattctggttggatacaggcatattgattgtgctcaagcgtataacaatcaagcagagattggttctgctcttaagaagctttttgatgatggtgtggtgaagcgtgaggacttatggatcacctccaaactctggtgttcagatcatgcttcagaagatgtgcccaaagcattggataaaacattgcaagatttgc

SEQ ID NO: 232298 - DNA, 376 bp, Glycine max
tcggggaattccaattccacattttcaagaaataaggaggcaaaaatgttcatatatgaattggaattatttgttttcttattaggcctatcctgaagccaaaggaaatgagatcggaattcctcggggaattccaattccacattttcaagaaataaggaggcaaaaatgttcatatatgaattggaattatttgttttcttattaagcctatcctgaagccaaaggaaatgagatcggaattcctcggggaattccaattccacattttcaagaaataaggaggcaaaaatgttcatatatgaattggaattatttgttttcttattaggcctatcctgaagccaaaggaaatgagatcggaattcctcggggg

SEQ ID NO: 232299 - DNA, 366 bp, Glycine max
gcctctcgcaacctcaaatctacacaatgcatttctaaggcttttggcttggaacctgctgcagctaaactcacttgctcccttcagcctgatctcaaagaatttgctcaaaaatgtgtcgacgctaccaaaattgcaggattcgcccttgccacctctgctctcgttgtttctggagcaagtgcagaaggtgttccaaaaaggctaaccttcgacgaaatccagagcaagacatacttggaagtgaagggaactggaactgctaaccagtgcccaaccattgaaggtggagtggactcattcgccttcaagccaaggaaatacaacgcccagaagttgtgcctggaaccaacttccttcacggtg

SEQ ID NO: 232300 - DNA, 398 bp, Glycine max
ggacaaccagttcaacacgatcaccgccgacggaacatccatgaagaacatggatacaggaatcgtgatccagggttgcaacatcatcccagaagccgaactcttccctacaagattccaggtgaagtcataccttggaaggccatggaagcaattctcaaggacaattgtgatggaatccaccgtgggtgacttccttcacccggaaggatggtgcccatgggccggtgaacacttcgaagacaccctgtactatgctgaatacaacaacgatggacctggtgccaacgttaacggaaggatcaagtggaagggttaccgcggtctcattagccagcaagaagctgctcagttcacccctgcccaattccctcaaggctggttccaacggtggaact

SEQ ID NO: 232301 - DNA, 353 bp, Glycine max
ggaatcaatggattcttcacaagggtctaccattgctggtttcgtggacaatgcatccattaagagaaatgagtctagttttgatggcgttcccgtgtatgttaaggaactaattgccggaggctttgctggtgcgctttctaagacctctgttgcacccctcgaacgggttaagatactttggcagacaaggacaccaggatttcattctcttggggtgtatcaatctatgaataagttactaaagcatgaaggttttctaggattatataagggaaatggagctagtgttatccgcattgttccgtatgcagccttgcattttatgacatatgagcgctacaaaagttgga

SEQ ID NO: 232302 - DNA, 401 bp, Glycine max
tgcatatttgccgaacttgtaaccaaacaagcactctttcctggtgattccgagctgcaacaactcctgcatatattcaggctattgggtactcccaatgaagatgtgtggccaggcgtgagtaaactaataaactggcacgaatatcctcaatggaaccctcaaagtctatcaacggctgttccaagtttagatgagcttggactggatttgctatctcaaatgttgaaatatgaaccttccaagaggatttctgccaagaaagcaatggaacatgtatactttgatgacctggacaagaggcacctttagaaagaacaaattgatccaatatttggacgtagaattttatgactaccaatttactctatgcttctctcgagcgtgtattctaatccgtt

SEQ ID NO: 232303 - DNA, 403 bp, Glycine max
gccaagtgaaagtgagaaaaaataaaaatcaaagagcataatgtcagggatcattcacaagattggggagacccttcatgtgggagggcacaagaaggaggaggagcataagggtgagcaccatgctggagaatacaaaggggagcaccatggtgaacacagtagtgagtacaaaggagagcatcatggtgaacacaaagctggagagtaccatggtgagcacaagccagagcacaaagaggggttcctagacaaagtcaaggacaagatccatggtgagggcggcgccgccgagggcgagaagaagaagaaggagaagaagaagaaggagcatggccatgagcatggccatgacagcagcagcagcagtgacagtgattaaactgctgcatcacctatatat

SEQ ID NO: 232304 - DNA, 291 bp, Glycine max
cgacgatatgcttatattggtgacattgttgttgctgtaatcaaacaagcagtaccaaatacgaacttagaaagatcagaagtgatcagagctgtaattgtacgtacttgtaaagaactcaaacgtagcaacggtataataattcagtatgatgaataatgctgcagttgtcattgatcaagaaggaaatccaaaaggaactcgaatcttttgtgcaatcgcccgggaattgagacagttaaatttcactaaaataatgtatccatagcacagtttcgtcttataatacct

SEQ ID NO: 232305 - DNA, 365 bp, Glycine max
accacaataagatttatgggagccttcctgtggggttgaccaaagtcgaacattttcagctattcgacgtcagctataatcagttatgcggtctcataccgaagggtggagaattgcaaaagatcgataagtctttgtactctcacaacaagtgtttgtgtggctctccactatcaccttgcaaccataagcagatgactgtctaagtcgatttcatactttgataagtattcgtattttcatgtgtgtttgtgtgactttccaatttcacctttcaaccattataagcatatgcctatcaaagttggtttcatcagattaattattctgatttcaataaaatcgattacttgtttttctgtatt

SEQ ID NO: 232306 - DNA, 371 bp, Glycine max
gagactttggagaccaactgagtaatggaaagtggagggaactcccttccatcagggtcagatggtgtgaagagaaaggtttcatatttctatgatccagaggttggaaactattattatgggcagggacacccaatgaaacctcataggattcgaatgacacatgctcttttagcccactatggattgcttcaacacatgcaggtcctgaagcctacggctgctaaagatagggacctttgcaagttccatgctgatgattatgtggcctttttgagaggcatcacccctgaaacgcagcaagatcaattgagacagctgaagaggtttaatgttggcgaagactgccctgtatttgatggtctttactc

SEQ ID NO: 232307 - DNA, 390 bp, Glycine max
caaaccaagatcttaaaatatctcttccatacaagtttgttttcaaagtgtttttgtctcccaaatcctactcttgtgaccacaagccttcacttcactctctctctctctctctctctctctctctctctctctctctctcttttttgaaacccttttttctcttctcaaaccaaaccaagcaagcaattatattacactactcactcactgagaccatggctcctaatatcaccaccgtcaccgacgctcaagccaaggccgccggcgggcgtggccgtgcctacgtcaccttcctcgccggaaacggtgactatgtgaaaggtgtcgttggcttggccaaaggtctgaggaaggtgaaaagcatgttaccctcgggtggttgcattg

SEQ ID NO: 232308 - DNA, 397 bp, Glycine max
ttttcattgttagcaacattatgctgcttttcagttcagcatttgccaaaactgctagtcctccctctctgagcccaactccagcaccagccccggcacccgactacgtgaacctcaccgagttgctcagtgttgctggtccatttcacaccttccttggataccttgagtccaccaaagtgattgacactttccaaaaccaagccaacaacactgaagaaggaattaccatctttgttcctaaggacagtgccttcaatgctgtaaagaaaactgtcctatccaacctcacctctgaccagctaaagcaagtgatcctcttccatgccttgccacatttctattctcttgctgagttcacaagcctttagcaaaaccagctctactcccacatttg

SEQ ID NO: 232309 - DNA, 403 bp, Glycine max
attgagaagagtcttgttgaagcttttgagcccatcgggatcagcgactggaactctatcttctggatcgcacatcccggtggtcccgcgatcctcgatcaagtcgaggagaagctccggctcaagccggagaaactccagtccacccggcatgtgctgagtgagtacggaaacatgtcaagcgcgtgtgttttgttcattctggatgaaatgaggaagaagtctaaggaggaagggaagagtaccactggagaagggttagagtggggggtgctattcggattcgggccgggtctaaccgttgagaccgttgttcttcacagtgttcccttggagggataaatcatgctgatgcggtgactagtgatttaagagtgatcaataaggaaccctcggaaataca

SEQ ID NO: 232310 - DNA, 397 bp, Glycine max
gcttgatcaggtccaacaccctacaatcatggacaaggttgctggccagctccatctccgttctggtgtttctggtattaggagttatgaaggagcctactgccaccccacaatgtaccaaagaccctcttttgggaattactcgaatgctgcattgcagtatcctgtgatgccctcatgcaaagctactatggatttgtctgctgctgcaacaactgcctcccccgtctttgttgctgctccagcagagaaaggccattttcttatagactttctcatgggaggtgtttcagcagctgtctcaaaaactgctgctgctcccattgaacgtgttaagcttttgatccagaaccaggatgagatgatcaaaactggtagactttctgagccctacaag

SEQ ID NO: 232311 - DNA, 371 bp, Glycine max
catacattaacaccaacactcaacctcactcagtcgctcgctcgctctcttcacaatttcgagatctgaaatcgaaatcgaaaccgaaactgaagagagagacaaaaaaatgagggagccatcgtcggtgggattcgaaggcaacggcgccgtttcttcgccgccgcaagctctcctcgagagactgaaagactacggtcaagaagacgctttcgccctctggtacgagctctcttacgaggaacgcgagtttctcatcaaggacattgagagtttagatctttcgagaattgaccggattattcggtgctcgctgcgatctcaaggactgccggcggcggccattgagcctgtgccggagagcagtgtgt

SEQ ID NO: 232312 - DNA, 388 bp, Glycine max
ccttgatctcaaaccacacatcgttttgttcgatttttccacatattggctaccaaacttggctcgtagaataggaataaagtctcttcagtactggattattagccctgcaacagtagggtacatggcatccccagctagacaaagagaagatgacatgagaaaaccaccttcagggttccctgattgttccatcaagctgcatgcacatgaagttcggttccttgctgcagcaaggaaactagagtttggcaatggtgttcttttctatgatcgtatctcagttggtgcagatttgtctgatgctattggattcaaaggttgtagagaaattgaagggccttatgtggactatctagagacacaatttggtaagcccgttttgcct

SEQ ID NO: 232313 - DNA, 372 bp, Glycine max
tgttgagcttttttgcgagtccatttggcaaaagggttgaatgggcattgaaactgaagggtgtggagtatgagtacatagaacaagatatcttcaacaagactagtctccttctccagttgaacccggttcacaagaaggttccggttcttgttcatgcccacaaacccatcgctgagtcattcgtcatcgttgaatacgttgatgaaacatggaagcagtatccactgttgcctcgagacccttatcaaagagcacttgctcgattttgggctaatttcgctgagcaaaaggtaatttctaaatccccttttagtttttgttttccgcacctggatttgggagatggatatttttttagtttttcataaa

SEQ ID NO: 232314 - DNA, 369 bp, Glycine max
ggtttgcaaacacctgcaaagatcagcacatatactattggccctttccaatctacaaaaaatgaaaaagcaaaagttaaagtgaaagttcggttgaatgtgcatggaattatatctgtcgaatctgcaactctactggaagaggaagaagaaattgaggttccagtttacaaagaacctgcaggagaaaattccaagatggaaactgatgaagctcctgctgatgctgctgctgctgctgcaactcctagcaccaatgacaatgatgttagcatgcaagatgctaataccaaggcaactgctaatgcccctggagccgaaaatggtacccctgaggcaagagataagcctgtgcagatggatactgat

SEQ ID NO: 232315 - DNA, 393 bp, Glycine max
caaacatgtcgaacacatgcggcaactgcgactgcgctgacaagactagctgcaccaagggaaacagctatggtgttattgtagagactgagaagagttacatcgagactgttgtcatggatgttccagcagctgagcatgatgggaagtgcaagtgtggcactaactgcacttgcacggactgcacctgtggccattaaggaatatgtatgaaaatgtaattgccatgtgtttggcaatacaaatatccaaataatgtaatcttcgtatgaataaatgtgtgtgctgttatcctacttcaggtctgtgtagtcatgcagtctgaatcatttcaagttcctgtcttagttaatataacagccatggttgtgggcatctatggtttattagact

SEQ ID NO: 232316 - DNA, 391 bp, Glycine max
atccgcgacggcgccgtttccgtcctcttctgcgtcctcatcgtcgccttgggtcccattcaattcggcttcacgtgtgggtattcttctccaacccaaggggctatagttcgcgatctaaacctctctatttcggagttttctttctttggatctttgtctaatgtgggagcaatggtgggagctatagctagtggtcagatagctgaatacatcgggcgcaaagggtcattgatgattgctgcgatccccaatataatagggtggcttgctatttcttttgccaaagattcctcgtttttgtatatggggaggttgttggaaggttttggcgttggggatatctcttatgtggtgcctgtttatatagctgagattgcaccccaaaaac

SEQ ID NO: 232317 - DNA, 478 bp, Glycine max
aatgagttaggttgccgagacaagacaatgacatcgcatgcacgcgtacgtaagctcggaattcggctcgaggtaatagaagagacatttggtcgcgaagcttatccactggatgtattttatgtacattcacatcttttggtaagatccgctaaattaagttcacaattaggcgaaggaagtatgactgctttaccaatagttgaaactcaatcggaagatgtttcatcgtataatcctactaatgtcatttccattacagatggacaaatattcttatctgccgatctattcaatgctggtatcagacccgctattactgtatgtagttccctttccatagttggatctgtggcccataataataccataagacaatttgctggtacattcagattggtattagcataattcccagaattagatgcttttgcccaattcgcgactgatctcgatatagctactcaacatcaaatag

SEQ ID NO: 232318 - DNA, 335 bp, Glycine max
tggaaagggatacaagccgtccacgtggctttgggtttagcacatttgcagaccgtatgggaatggttgatgcaatcaacgaaatgcattgcccggaaattggtgatcatttcatctcagtcaacaaagcacagcccacaatcgggggtgatgatacagaccaatgttacagatgtggctactcatcacgtggtacgggaagctatagtgctggatatagggtatgacatgatgactgcttcatatgtgggcgtctagtgcattgtgcccaatattgtcctttggcaagatgtggtcgttgtcacagtggtagttcatatccttcacgtcctaag

SEQ ID NO: 232319 - DNA, 401 bp, Glycine max
gtccgccaatttgttgataacttcagaagatcggcaatgccgttagatgtgctggtttgcaatgctgctgtttacttgccaactgctaaggaacctaccttcactgctgagggctttgaacttagtgttgggacaaatcatctggggcatttcctcctctcgcgcctgttgcttgaggacttggcaaaatccgattacccttcaaagcgcttgatcatcgttggttcaataacagggaacacaaacacattggctggtaatgtacctcccaaggctaaccttggtgacttgaggggacttcacggtggtttgaatgggctaaacagctcagccatgattgatggtggagacttcgatggtgccaatgcgtacaaggacagcatagtctgcaatatgctcac

SEQ ID NO: 232320 - DNA, 361 bp, Glycine max
gaaatggcaacagaaacaaaagtggcagtattaggtggcatcaccgaagtgcagggagctgccaacagcgtcgagatcaacaatctcgctcgctttgctgtagaggaacaaaacaaaagagagaattcagttctggagtttgtgagggtgattagtgcaaagcagcaagtggttgctggagtgaattactacataacattggaagcaaaagatggtgagattaaaaatgagtataaagcgaaggtttgggagagggaatcccaagagttgctagaattcaagccaacattaggtgcaggaggcatcatcgatgtgcctggagctgccaacagcatcgagatcgaccatctcgctcgctttg

SEQ ID NO: 232321 - DNA, 349 bp, Glycine max
gaaagaaaaaaacttagatcaaaatacttaatagcatggcgatacatttatacaaaacttctaccccaagcacacgcaatggagccgtagacagtcaagtaaaatccaatccacgaaatcatttgatctatggacagcatcgttgtggtaaaggccgtaatgccagaggaatcattaccgcagggcatagagggggaggtcataagcgtctataccgtaaaattgattttcgacggaatgaaaaaaacatatatggtagaatcgtaaccatagaatatgaccctaatcgaaatgcatacatttgtctcatacactatggggatggtgagaaaaaatatattttacaccc

SEQ ID NO: 232322 - DNA, 408 bp, Glycine max
aacagctaagctttatctctatggatcatgtgctaattcgtttggtgtttctaaaagtgacattgatgtttgccttgctattgaggaagcagacatggaaaaatctaagattataatgaaattggcggatattttgcaatcagataatctgcagaatgtgcaggcattgacgcgtgcacgtgttcccatagtaaagctcatggatccagtgacaggaatatcttgtgacatatgcattaacaatctcctagctgttgtgaataccaagcttcttcgggattatgcacacatagatccaaggttgcgtcagctggctttcattattaaacattgggctaagtcaagaagagtcaatgaaacttaccatgggaccttgtctagctatgcgtatgttttgatgtgcattca

SEQ ID NO: 232323 - DNA, 372 bp, Glycine max
gtatgaatacatgccgaacaaaagcttagaatttcatcttttcaataaagcatatgatcctcttccttggaaaacaagacttgaaataattcttgaagcagctcaagggttatcttatctgcatgaagaattagaaattcaggtgatatatcgagattttaaagcttcaaatgtactactggatgaaaactttaagccaaagttttctgatttcggacttgcaagggagggaccagtagctggtgatactcatgtttcaacagctgtgatggggacatatggttatgctgcccctgattacattgagacaggccatctcactgccaagagtgatgtgtggagttttggggtggtgctatatgaaatacttac

SEQ ID NO: 232324 - DNA, 377 bp, Glycine max
tcggggaattccaattccacattttcaagaaataaggaggcaaaaatgttcacatatgaattggaattatttgttttcttaataggcctatcctgaaaccaaaggaaatgagatcggaattcctcggggaattccaattccacattttcaagaaataaggaggcaaaaatgttcatatatgaattggcattatttgttttcatagtacgcctatcctgaagccaaatgaaatgagatcggaattcctcggggaattccaattcgacattttcaagaaataaggaagcaaaaatgttcatatatgaattggaattacttgttttcttattatgcctatcctgaagccaaaggaaatgacattcgtattcctcgggggt

SEQ ID NO: 232325 - DNA, 366 bp, Glycine max
gttgtgcttccaccaatagtgaagcccccgggttttctccctccaattcttaacccaccaagtacaccaacaccgtcgccggggaagggagggaacactccatgtccaccaccaaagtctcctgcacaggctacatgccccattgacacgctcaaactaggtgcttgtgtggatcttcttggtggcttggttcacattggcttgggagaccctgttgcgaaccagtgctgccccgtgcttcaaggcctggttgagcttgaagctgcggtgtgtctttgcaccactcttaagctgaagcttctcaacctcaacatttatgtcccacttgcccttcagcttcgtgtggcttgtggcaagtctcctcct

SEQ ID NO: 232326 - DNA, 283 bp, Glycine max
aaagcaagctcatcctagagttttaaaaatggcagcagcctcctccatggctctctcttccccatccttggctggcaaggccgtgaagctgggcccatcagcccccgaagtcgggagggtcagcatgaggaagaccgtcaccaagcaggcctcctccggaagcccatggtacggcccagaccgcttcaagtacttgggcccattctctggcgagcccccgtcctacctcactggcgagttcccaggtgactacggctgggacactgctggggcttcggccgac

SEQ ID NO: 232327 - DNA, 407 bp, Glycine max
cttttcatcattctcatatcctcaatcaccccccctcgcactcgctcttcccttcctctggtggcgacaatgtcgactcctgctaggaagaggctgatgagagacttcaagaggctgcaacaagacccgcctgcagggatcagtggtgccccccaggataacaacataatgctgtggaatgctgtcatatttggtcctgatgatactccatgggatggaggcacgttcaagttgacactccaatttactgaggactatccaaataaaccaccgactgtacgatttgtgtctcgcatgtttcatccaaatatttatgctgatggaagtatttgtttggatatattacaaaatcagtggagtcctatttatgatgtggctgctatactcacatctatccagtcattgct

SEQ ID NO: 232328 - DNA, 296 bp, Glycine max
cgcagccacttttgaacataggtggtaattaccatgatgaagcaccagaagtatggaggcatgaacttgacctgacgctggaaccattatattccctgtcaccttggatgcttttgaatactttcttacaagtggatgatattatataactatatatgtggtatggcaattgacaacatatttgatggcttatatatgccgccaagttttgtgggtttccctaatctgaagacgcgtatgtctattgtgtgttgtaagttcataatttggttacgctttcctaagtggaagctttg

SEQ ID NO: 232329 - DNA, 395 bp, Glycine max
ctcttctctcttcactcttcactcttgtcgtcatttcctcacaaaaccagtgtccgtaacatctccaccttaacgatgtcggtaaaggagtgtcaccaccacaagggaaagaagcacaaactctggagacgcatcttctggggcatagtgatcttcgccttcatcgtgttgctaacagttcttataatctgggcaatcctaaagccttcaaagccaaccttcatcctccaagacgtgaccgtctacggcttcaacgccaccatccccaacttcctcacctcaagctttcaggtcacgctttcctcgcgcaaccccaacgacaaaatcggagtctactacgaccgtctcgacacctacgtcacttaccggaaccagcaggtcacgtaccgaacctc

SEQ ID NO: 232330 - DNA, 328 bp, Glycine max
gtcgaagcttcttaaaatttgctggataaacgagactgagaatgcattgcactggatatgaccatggtgaatgctaagggcaataactccaacgccaagactaatggtcttaaacaaaatgccaagaagatagtccgaattcatgtttctaaaaccaataaatctttcttcttctacctcaatcacgcatataaatacttagtccagggcaatgacgtctagctctctgcattgggcatggctagtccaacggttgtaatcatctctgacattttgaaaagcaacggctgggcatttgggaataatattacaacatccactgttgctg

SEQ ID NO: 232331 - DNA, 375 bp, Glycine max
  unsure (1)..(375): unsure at all n locations
cttcatcaagctccgctccaacacaggggaaaatgagggagatccttcacgtgcagggagggcaatgcgggaaccagatcggttccaagttctgggaagtggtgtgcgacgagcacggcatagatccgacggggaagtacgtcggaaactcagatctgcaactcgagcgcgtgaacgtctactacaatgaagcctcgtgcgggcgcttcgtgccacgcgcggtgctgatggacctggagcccggaaccatggacagcgtgcggaccgggccgtacgggcagatcttccgccccgacaacttcgtgttcgggcagtccggcgccgggaacaactgggctaaggggcactacaccganggcgccgagctcatcgact

SEQ ID NO: 232332 - DNA, 392 bp, Glycine max
cggctcgagatttggttttactaagcagaacgagctctttgtgggtcgtgttgctatacttggttttgcaacatcactgttgggtgaatgaataactgggaaatgaattctagcacaattgaatctggaaactggaattctcctttatgaagctgagcctcttcttctgtttttcatcctcttcaccctgctacgagccattggaggtttaggtgaccgtggaaaatttgttgatgacgaacctactactggaggtgttattcctccacgcaaaggcttcatggaagctcttggtcctggttcaggtcccttatttggattcacgaaagcaaacgaactattttgtggaagattggctcaattgggtttcgttttctcattgattggagaaa

SEQ ID NO: 232333 - DNA, 392 bp, Glycine max
ggagaagctgttttcgttcgtcgccactaacactaatcgtttcttcaatgccttacgagaaggaactcgccgctgcaaagaaagcagtcactctcgctgctcgtctctgccataaagttcagaaggctcttctgcaatccgatgtgcactcaaagtcagacaaaagtcctgtcacagtggctgattatggttcacaagcattggtcagctttatacttgagagagaacttccttctgaatcattttcattagtagctgaggaggattcaggtgatcttcgtaaggaaagtggccaggatactctgaatcgcattacagaacttgtcaatgatactcttgctactgaaggatcaaatagcttttctactttaacaacagatgacgtgcttgtg

SEQ ID NO: 232334 - DNA, 368 bp, Glycine max
cttgctcttagccctcctcctcttcgccgccgtggccaccgccgcgatggcggtggccgcgtccgacgccgacgagatcctgatccgtcaggtggtgccagatgttggcgaaaccgaagaggaggacaacctgctgaacgccgagcaccacttcgcgagcttcaaggcgaagttcgccaagaccgacgccaccaaggaggagcacgatcatcgcttcggcgtcttcaagtccaacctccgcagagccaggctgcacgccaagctcgacccctccgccgtccacggcgtcaccaaattctccgatctaactccggccgagttccgccgccagttcctcggcctcaagccgctccgcttcccggcgcacg

SEQ ID NO: 232335 - DNA, 362 bp, Glycine max
cgacaacgaatggggatacagctcacgtgtcattgatcttcttgtattcgttgccaagaagtctctttaaggtgttacttcaaagtagcttgtcttcacattattaccgtatgtttatgtttagctgcgatttagtgtcttgctcgagcaaaaaatgagaggtctgaataaatcggtttctgaaaccagtggtgttacttgttggaggagcattagctcttttttggacttttgatgttttctcttgtggagggggatcgagtttttggatttttatatactcgctgatgtacttggcttgaatacttgctaatgtacttgttattgattgttagagtagatatttgtccgtcctttttttc

SEQ ID NO: 232336 - DNA, 351 bp, Glycine max
ctctagccgctcgagccgattcggctctagtccaatatattccattctctctgtgtatttcccgacgtctcccttcaagatgcacatcttcgtcaaaaccctcaccggcaagaccatcacccttgaggtggcaagctctgacaccatccacaacgtcaagggcaagatccaggacaaggaatgaatccccccggaccatcaacgtctcattttcgccggaaagcaacttgaggacgggcgtacccttgctgactacaacattcagaaggagagtactcttcacctcgtcctccgtctccgtggtgggatgcagatcttcgctaagacactcatctgcaagaccatatccct

SEQ ID NO: 232337 - DNA, 377 bp, Glycine max
ctttttcagttctctctctctctctctaagatggccgacgatccaatgcccacgcgctggtctttccaggacttcaaattgtgttatgatgctaagtttggtagaaagaaagtcgcggagaacggagatgatgctgccggtaaagcggtcagcaatggaaatggaaattcagtgacagtggccattgtgtccaatggcaacaaaagggcatcggaaatggctgtttatgagcagtttcgaagcgaggggcagaatcagattcacacaaatggctttgtgccgacccttacagagtgaaaggccgcagaagtctttgcttccagcctttgaatctggggaaatgcgagctttagcagagagcttaagttgggatatca

SEQ ID NO: 232338 - DNA, 329 bp, Glycine max
ctcaatttttctctcaaccggcccaatttagcataagcccagcatggccaccgcaacagcagcagccacctcgtccttcatggggacgcgcctcctggaggcccactccggggcggggcgggtgcaggcccggttcgggtttggcaagaagaaagccgccgccccgaagaaagtttccagggggtcgggctctagctccgataggcccctgtggtatccgggcgccaaggcgcccgagtacctggatgggagccttgtccgagactacggattcgacccatttgggctagggaagccccccgagtacctgcagttcgagttggactcgc

SEQ ID NO: 232339 - DNA, 255 bp, Glycine max
cttccgaggtaaaatgcgcaagttttaggcttgcagtggcagcacacaagatccgagccttgaaaaccattcctgatgaatgcgtagaacgaatcaaggactacattaagggcgaacagtttagatcagactctaaaacagttaaccaacaaggtttcttttatgcaagggaacggcaagtccatcacaacgacatatttatattctgcatagataacaccgtactctccaatatcccatactatgagaaacatg

SEQ ID NO: 232340 - DNA, 398 bp, Glycine max
gacaagaagagatgggtacaggagaagatcgagaaggggtcgcagtaaccgggggcttcttctggtcctacacagacgaaccccatgccacacgacgtcgtcagatcctctccaaataccctcaaatcaaacaactctttggccccgaccactctgctttcttcaggattagtggagttgttctgcttcagcttggtacgggtgctttacttcatgatgctggctggctgaagatatttttagtagcatacttttttggttcttttctcaaccacaatctctttttggctagccacgagttgagtcacaacctggccttctcaaccccagtctacaaccgttggtttgggatttttgccaaccgccctataggtgtggccaaggtccgttaccgtcca

SEQ ID NO: 232341 - DNA, 336 bp, Glycine max
cgccagggtttcctccatctgaacgaacatgccctcctccacgttctagaaggagattgacaacaaccacactgttgtgcgacgcgatggcccactgcatcgaccttctcagtaacgctggcgatgacatgcatcaatcctttcgcaacttggaccactctgaactagacaagtcgagcaattacgcctatgatctcaacgtcaggatcgcaggtactctcgctcacgaaaagacatgtttggatgagttcgagaacatcaacaccgaggctggcagcgacaaggtcagggttcgcaacacttctttggatctcacatgatcccattggtcatagt

SEQ ID NO: 232342 - DNA, 357 bp, Glycine max
aaagcattccatagcctcccataaaaatgaagaatactatcttctctgctctctttctactttgtgccttcaccacctcatacctaccttcaaccaccgcggtggtcgataccgacggtgatattcttcagaatcctggtacatactttatcttgtccgtttttcgacccggcggcggagtagaattcgccgccactggaaacgaaacttgccctctcactgtcgtgcagactctcttcgggaggggctttccagcaatattatcgtcccggttacgaatccctttcatcggcgaaggacaactcttcagcatcctgttccgtattgtgccatggtgcgccaccaacccttctaagt

SEQ ID NO: 232343 - DNA, 367 bp, Glycine max
cttgggtggtgccttttttctttttctttctctctatcgattctcgtaacaaaccctacccttttgagtcttccaagttttcaccatcgtaatgggttccgaaggatccagcgtcgtggttcctaggaatttcagattattggaagagcttgagagaggtgagaagggaattggggatggaactgttagctatggaatggatgatgctgatgacatatacatgcaatcttggactgggactatcatcggtccccctagtactgttcatgaagggcgtatctaccagttgaaattgttttgcagcagggattatccagacaatcctccatctgttaaatttcaaacaatgattaacatgacatgtgtc

SEQ ID NO: 232344 - DNA, 338 bp, Glycine max
gtttcatttgtgaaactaacaacaacacaaggccatcatcatggcagctgcttccccaatggcaagccaactcaagtccaccttcactaggactcttgtagctcccaagggcctctctgcctcttcaccacttcacctcgtgccttctagaaggcaatttagcttcactgttaaggccatccaatcagagaagccaacctatcaagtgattcagccaatcaacggtgacccattcattggaagcctggaaaccccagttacatccagccctttgatcgcatggtacttgtccaacctgcccgcatacagaaccgcagtgagcccactactaagaggga

SEQ ID NO: 232345 - DNA, 393 bp, Glycine max
aattagtactctcgttaatttttttgctaattgctaattgggcacaatggaaaagcttcatgctgtgtgcatcccatacccagcacaaggccacataaacccaatgctcaagctagcaaaactccttcatgttagaggcttccacatcacctttgttaacacagaatacaaccacaaacgccttctcaaatcaagaggttctgattccctcaatagtgtcccatcatttcaatttgaaaccatccctgatggtctctctgataaccctgatgttgatgccacacaagacgtagtttctttaagtgagtctactacaaggacttgtttaactcccttcaaaaatctcctttcaaaacttaatagtgcctcggatactcctcctgtgacttgcat

SEQ ID NO: 232346 - DNA, 321 bp, Glycine max
ggctgcaagagaggaagcatatttgtggaatgacaggtgatggtgtcaacgatgctcctgcattaaagaaagcagacattggaattgctgttgctgatgctacagatgctgcaagaagtgcttctgacattgtcctcactgaaactggtctgagtgtcattaatagtgcagtgctaaccagcatggcaattttccaagggatgaagaattatactatctatgcaatgtcaatcatcattcgtatagtatttggtttcatgtttattgcattgatttggaaatttgaatttgcacccttcatggtgttgattaatgccgtac

SEQ ID NO: 232347 - DNA, 398 bp, Glycine max
gagaaagggtgggtattgcttcacacagacacaacagtgtctgctgcaccttgcaatggtttcgctatcaacatggtttcgctacattgcccacaagctcgaatactccttctccctcagctggaagaactacaaaggaggtcaaattacagacagagaggtacgtgatgttgtttggaaaaacttctttcaaggaaagctgacgtacttgcactggaataaaggagaggagatggcccctactattgatggaaaagcagtaactcttgttcggaaattaccagttgtagacccaacgcgtgtttttgtaggagatgttgtggttgtgaaggaccctgagaagccagataactacctactcagaagattaactgcagttgaaggctatgaaatggttt

SEQ ID NO: 232348 - DNA, 381 bp, Glycine max
ggaactcgacctgagaagaaagatacccttaattcgcatgcgcgtcttgtgttggacaacaaccacaagatgattaacttcgaagaaaccgagttgcgactcggcctccctggtaacgactcagcactcaagggaagtgctgccaagagaggcttctctgaaactgcttctgttgatttgaagcttaatctttcttcttgcattaacgactctgcctcggattcaccctcatctatgtctacagagaagcccaaagagaacaagaccaccactgctgaacctcctccagctaatgatccagcataaccacctgcaaaggcacaagtggtaggttggccaccagttaagtcatttagaaagaacatagttcaaaggaacagc

SEQ ID NO: 232349 - DNA, 376 bp, Glycine max
gtaactagccgcagcacgaggagcagcctcaggaggagaaggatgtctcacaggaagttcgagcacccaaggcacggttcactgggatttcttcccaagaagcgtgctgctcgtcacaggggaaaagtgaaggcattccccaaggatgaccgcatccaaggcacccaagctcactgcattcttgggttacaaggccggtatgactcacattgttagagaggtcgagaagccaggatcaaagcttcacaagaaggaaacttgtgagcctgttacaattattgagacccctccaatggttattgttggtgttgtgggttatgtgaaaactccacgtggtctccgaacattgaacactgtctggggctcagcatttgag

SEQ ID NO: 232350 - DNA, 375 bp, Glycine max
gtgaagtttctggctttcataactggctgcagttttaccttgaagaagcaaaggggagagttgattatcaaggatatatttttccccgtcgacggggagaaactcctgactctgaagctcagcttctgactattcagtttgaatggaatggtgtcctaaaatctgtatccagcactttggttggagtgagccctgaatttgaaattgctttgtataccctgtgtttctatgttggtagggaggataaccacattcagcttggtccatatggggttaatatcaagtgctatcgattgggtgatcgaattggatctgttttccccattgcagattcttgaattttcagtttccagcattggtaatagttgttcccca

SEQ ID NO: 232351 - DNA, 377 bp, Glycine max
atgcaaatgtaatagacctcggaattggtgatacgacacaacccttaccaacaattgtaacatctagcatggttgattttgtgcatggcctttcaacagcaacaggctataaaggatatggaccaaagcaaggtgaaaaggccttgaggaaagcaatttctgttacattctacaatgatctggggataaaaccttctgatgtttttgtttcagatggtgcacactgtgatattactcgtcctcagctgcttatgggtcccaatctgaacatagctgtgcatgatccatcctttccggcctacatagattcgagtgtcataattggtcaagctggcaagtttgtacataaagctgggaagtacaaagacatataatac

SEQ ID NO: 232352 - DNA, 368 bp, Glycine max
gtgagtgatcggtgttcacctgatccgtcataagtcgtcatcatcaacatcagcatcaccgttgattgaagaagatgccgatcagaaacatcgccatcggaaggcctgaagaggctactcaccccgacacgttgaaggcggggttggctgagttcatctccaccttgatcttcgtgttcgccggttcaggttccggcatcgcctacaacacgctcagcgacaacggcgccgccactcgcgccggcctcatctccgcttccatcgcccatgctttcgcccacttcgtcgccgtctccgtcggcgccaacatctccagcggccacgtcaaccgcgccgtcatcttcggcgccttcgtgggcggcaacatc

SEQ ID NO: 232353 - DNA, 424 bp, Glycine max
ggagagacaagcattgctgcatgcacgtctactctagctgatcccctccggggaattccaattcgcacattttcaagaaataaggaggcaaaaatgttcatatatgaattggcattatttgttttcttattaggcctatcctgaagccaaaggaaatgagatcggaattcctcggggaattccaattccacattttcaagaaataaggaggcacaaatgttcatatatgaattggcattatttgttttcctattaggcctatcctgaagccaaaggaaatgagatcggaattcctcggggaattccaattccacattttcaagaaataaggaggcaattatgttcatatatgaattggaattatttgttttcttattaagcctaccctgaagccaatggaaatgacattcgaattcctcagggg

SEQ ID NO: 232354 - DNA, 392 bp, Glycine max
gggaagctggtgatcaaagtatgccatatggtggtggtggtccagagaattctcactctcagggcttcttccaaccattggaatgcaaccctacactacatattggtcctgattacaggtacaatgctgtagcttcagatcagataactgccacaactcaacctcaacaagtgagtggctttattccagggtggatgctttgaactaattaggctcagtgcattcaggtggagacataaaaaagcaaacaccttacaaaagggcaaaagccaaaaatgcatcttggtgttggcaaggtgtaaatgcaaccctgcttctacagttattttggtgtataagaaactgatgttgtgacttgttcaaacttttgaacttttagccatagacatata

SEQ ID NO: 232355 - DNA, 398 bp, Glycine max
gaatttgtcctccaattcatatacagattttgttttcaagcagcagttcctaagtttcttcaattgcacttagatccagctagcagcaatactcttcccgcaaatgggtccataacccaaagtttgaaaattactaatagccaacatgggaagaaatctcttgtcatgcgtataaggatagcatacaagataaatggcaaggatacactggaggaaggacaagtcaataactttcctcatggtttatgaagcccaatgatcaggggtcattaaggtgatgcacaaaacccatcgttttccccagcactccataattattggtgcggttttcatgtttcattccttcaattgaggaaggtatggttcgaccatctggaccactttttggcttaaatttg

SEQ ID NO: 232356 - DNA, 368 bp, Glycine max
atgattgtcaacgtccttgtattcatcgttgctacacatttggtagcacggcaatgccatgcgtaggacatgtatccaccccgaatgaacactggtcatggtgcccgtactccggaggtgaaatgcgcaagttggaggcttgctgtggaagccacaccatctttggctttgagacgattcctgaagagtgcgttgaagcagaaaaggaatacgtccgtggcgaacaatatatatcagacgccaaaacagttaaccaacaagcgtacctttatggcagagacctcgaagtccatctcaaggacacatttgtgttcagtagagatggcaccgtactctctaacattccatactacaaagtacatggatat

SEQ ID NO: 232357 - DNA, 392 bp, Glycine max
gcgttcactggacattgagaggccaacctacaccaaccttaatcgtttagtttctcacgtgatatcatcactgactgcttccctgaggtttgatggagccttgaatgttgatgtcaatgaattccagaccatccttgtgccataccccaggattcattttatgctttcatcttatgcacctgtaatttcagcctagaaggctcaccatgagcagctatcagttggtgaaatcactaacagtgcattcgagccatcatctatgatggccaagtgtgatccccgccatggtaaatacatgggatgcagtcacatgtacaaaggtgacgtagtgcctaaagatgttactgcagctgttggaattatcataaccaatcgcactattcaatttgttg

SEQ ID NO: 232358 - DNA, 346 bp, Glycine max
cacgcacacataaatgtttgtttggattggtcagtgtgtggacccaaaagaaaagcacacagcttttgaaattgcccataaatacatagataaggctgcatctctggaaggactatctcctcatgtaccactatacaaagtaacagaatggaatgaaccttgctttttcacaacatacttttcttgggatcatgcaaaagctatggtgccatggaactcattccagaaaaaggtgacattactctttggaactggccatcctgtacaggaaaagtctaatgggtcaagtcaaagagggggaccaagacaaagagcagaaactttggctgccttaaataatgcattc

SEQ ID NO: 232359 - DNA, 397 bp, Glycine max
ttccttcatttccatccccttctctcttttaaacctcacgcacaacgaaatcgtgattctgttgttcttttgaaatggaaaacgctccggtggtgtgtaaggaagatgatcagatggatttgcctcccggatttcggttccacccgactgatgaagagcttataagccattacctctacaagaaggtcattgacaccaagttctgcgccagggctattggagaagtggacctcaacaagtctgagccttgggatttgccatggaaagccaaaatgggagaaaaggagtggtactttttctgtgttagagacagaaaataccccactggcttgagaaccaacagggccaccgaagctgggtactggaaaggcacaggaaaagacaaagagattttcag

SEQ ID NO: 232360 - DNA, 382 bp, Glycine max
ctagctttgagcaacatcatgaagatctccattctctttatcacaatcttttcttgtggttttcttggaaatgttgtttcaaatgctagtcctcttccatatgaagctatttttaactttggtgactctataagtgatactggaaatgctgctcataaccacccacctatgcctggcaatagtccttatggttcaacatactttaaacatccttctggacgtatgtcaaatggacgactaatcatagattttatagccgaggcatatgggatgccaatgttgccagcctatttgaatctcaccaaaggacaagacattaagaaaggagtgaattttgcatacgctggttcaactgcacttgataaggattttttagtacaaa

SEQ ID NO: 232361 - DNA, 408 bp, Glycine max
ctcagaaccctcgatcactcccacgcgctcctatatcctctccttcaccgtcgctctctccaacgatcacaacaacatcgtcatcccatggcaaacgccgcatctggtatggcagtccatgatgactgcaagttaaggtttttggagctgaagacaaagaggacacaccgtttcatagtttttaagattgaggagcagcagaagcaggtcattgtggagaagcttggtgagccagcccaaggctatgaagatttcactgccagccttcctgctgatgagtgccgttatgctgtttatgattttgagtatctgactgaagggaatgtccctaaaagcagaatttttttcattgcatggtcccctgacacatcaagggtgaggagcacgataatctatgcaagctccaaa

SEQ ID NO: 232362 - DNA, 355 bp, Glycine max
cgtcatcggaaaatcgacgttgttggttacccctaccgtgaacgaccatgccacggagatcgcggagacttggaagagcagcctggaggatcgtggcggcgtggaaaacctgaagacacctgacgtccacactttcttgcagcacgttgttaccttcgggattgtcaagaacgatgactccgatttgtaccggaagcttgttattgcgtccgcttggaggaaacagatgccgaagctcgcgctttcgcatggtctcgctcagcaaatgcctgatatgattgaagagttgatcagcaaagggcagcaacttgatgcggttcactttacctatgaagtgggtctggtggaaaagttc

SEQ ID NO: 232363 - DNA, 405 bp, Glycine max
ggcgcacgttagcacaaactatcatggccacggcaacagcagctgccacctcgtcctttatggggacgcgtctcctggaggctcactccggagcggggcgagtgcacgcccgattcggcttcggcaagaaaaaggctcccgccccaaagaaagcctccaggggatcgggccgagacaccgacagacccctttggtatccgggcgccaaagcgcccgaatacctcgatgggagtcttgtcggagactacgggttcgatccgtttgggctacggaagcccgcggagtacctgcagttcgagctggactcgctggaccagaaccttgcgaagaacgtggctggggacatcattggaaccaagaccgagctcgcggacgtgaagtccacgccgtttcagccctacagcg

SEQ ID NO: 232364 - DNA, 398 bp, Glycine max
attgctttggcgactagatgcccccatctgaggtccctaggactgtactactgcaagaacatcacagatagagcaatgtattccttggcacacagcaaggtgaacaacaggatgtggggaactgtgaaaggaggaggaaatgatgaagatggtttaaggactttgaacattagccaatgcactgcactcaccccatctgctgttcaagctgtttgtgactcattcccttctctccacacatgctcagggaggcactcactcatcatgagtggctgcctcaacttgacatcagtgcattgtgcctgtgctgtccatgcgcaccgtgcattcaccactttcccttatcctgcccattaagaagctcatgcttttgatgttgaacacacttcgaggatgtg

SEQ ID NO: 232365 - DNA, 358 bp, Glycine max
gggcactagcaaggttgccagtggtgatacccatatggtttttggccataatcttccctttctttgggcccataaactctgcagttggggctcttctcgttagtttcacagtctacatcatccccgccacagctcatatgctcacttacagaaaagcctcagcaagacagaatgctgctgagaagcctcctttctttatgccaagctggactgcaatgtatgtctttaatgcattcattgtggtgtgggttttggtggttgggtttgggtttggaggatgggccagcatgaccaacttcattaggcaaattgacacatttgggctctttgccaagtgctaccaatggaaggccccaac

SEQ ID NO: 232366 - DNA, 355 bp, Glycine max
aaacctttcgttcttgtaaactttattgattgattctgagaatagaactacgagggtatagacatggctatcgcaattgcagcttcttttttggttctgcttctggctttccccactgtatttggagctgaccatgaaattggtgacactagtggatgggccctcggagttaattacaacacctgcgcctctgggacaactttcacagttggtgacactttggtgttcaagtatgactccactcatcaagttgatgaggttgatgagagtggatacaacagcatgcagctcaagcaacagcatcaagaactaccaatatggaaactccaagactgaattgacttcaccaggcaaa

SEQ ID NO: 232367 - DNA, 325 bp, Glycine max
atctaggcctctttgtttggtcaagcaccaaaggcgggggggaaccactatgggcgagaccccccggcctccattcttttgcatagtccgggggccggacgctgcatagctgcagggcataacggcgccctcgcctgacaccattcccggatctagcatcacacgggcgggccgggcctgaattcacaccagactcttctttatttgagctgctcccacgcacgcagaccggaagatctcagttgtcctggactggacaactacgtacagatcttcgtgggaccggggagggagtcgcaatcgatcatttctaggattccttatc

SEQ ID NO: 232368 - DNA, 375 bp, Glycine max
cgccgagacggtctttgccttcttcgactctgcattcgtcttcctcagattcgaacaatggcaacgttcaataaaaccctgttttatgaatgaaagtgcttttaaatttggatggtttttcctgttttatctgcttcacataagattctgcatcttagctgcagttgctcctcctatagttatcaaaggcaaatccctgacgtacgtctatttcatatatgttctctatttaacatgctaatattgctcatatggctttatttttgtcacaagaagactaagcattcaaattcattttccttgcacaagatagttttttttttcattcccttctcaaaaatagaagtaaatgacaaatctattggtcattgatat

SEQ ID NO: 232369 - DNA, 473 bp, Glycine max
  unsure (1)..(473): unsure at all n locations
ngaatgaattaggtgacactatagaagacaatgacgtcgcatgcacgcgtacgtaagctcggaattcngctcaagtcaaataagtcaatctctttgcgcagttccctaactctcctttcaagatgcagatcttcgtcaagaccctcaacggaaagaccatcacccttgaggtgggaaactccgagaacaatcgaaaacttcaaggccaagatccaggacaaggaaggaattcccccggatcagcaacgtctcatcttcgccggaaagcagctcgaggacggccgtaccctcgccgactacaacatccagaaggagtcaacccttcaccttgtccttcgtctccgtggtggcatgcagatcttcgtcaagactctcactggcaaaaccataaccctagaggtcgaaagctctgacaccattgacaacgtcaaggccaagatccaggacaaggagggaatccccccagaccagca

SEQ ID NO: 232370 - DNA, 311 bp, Glycine max
tgagggaaggtgtacacaatttctttgtaacattcattgaggtgctacgtgatagacctcctggtcatgattgggaacttgaacctggtgtcacatgcggtgactacttgtttggtatgctacagggaacaagatcagctctgtatgccaataaccgagagtccatcacagttactgtacaagaagtgacacctagaacagttggtgctcttattgcactctatgaacgagcagtaggaatttatgcctcccttgtcaacataaatgcttatcatcaaccaggtgtggaagctggtaaaaaagcagcaagt

SEQ ID NO: 232371 - DNA, 386 bp, Glycine max
gcagacttaacaacagcacaaagcgggttactgtctgttcaagctaccatctctctctctctttcttagtgcctccttgccagaagttaaaatggcccaagaaactttcctattcacatctgaatcagtgaacgaggggcaccctgacaagctctgtgaccagatctccgatgctgtgctcgatgcatgcttggagcaggaccctgacagcaaggttgcctgtgaaacctgcaccaagaccaacatggtgatggttttcggagagatcacaaccaaggccaacgtggactatgagaagattgtgcgtgacacatgcaggaacattggttttgtctctgatgatgttggtcttgatgctgacaactgcaaggtcctcgtcaacattg

SEQ ID NO: 232372 - DNA, 392 bp, Glycine max
tcacaatctaagcatcccaaaactaactattgtgctagctacttagttgtgtaagatggcttccaagggaaatgttgcatccacttatgttgcactactcatgtgtctctatttgctttcattcaccatggtgagctctcaaatctcaaccccaccaccaatgccttctcaaaacggtacatgtcctataaatgtacttcgattgggtgtgtgtgccaatgtgttgaacctggtcaatgttacactaggatcaccaccaaccctcccctgttgcaccctcattcagggtttggctgatgttgatgttggtgtttgcctttgcactgccctcagagctaaccttcttggcatcaacttaaacttgccaatttccttgacattgcttctcaata

SEQ ID NO: 232373 - DNA, 389 bp, Glycine max
gagaggtgaggtgaactcgtgtggggtgtggtagtgtggcagcgacacgtatcaacttcaataatcgcatcgcagaagcagtttccggtgcatctcatcgtctccgaaaatgaacgacgcagatgtctcgaagcaaatccagcagatggtgcggttcatccgccaggaagctgaggaaaaggccaacgagatctctgtctccgccgaagaggaattcaatatcgagaagctgcagttggtcgaagccgacaagaagaagatcaggcaagaatacgaacgcaaagagcgccaagttgaaattcgcaagaagattgagtactcaatgcagctgaatgcttctcggattaaagttcttcaagctcaagatgacgtgatcagtttcatgaaag

SEQ ID NO: 232374 - DNA, 387 bp, Glycine max
aaaataccaacgcgaacgatttggattcggaggattttcaggagatttctctgtcgtcgttgaatttcgctgaggagttcgagccgccggaggagatttttccggcaaacatcgaacggaaagcgaacagcgttgagcttccgttttcgctgaggataatcaagaagaagctgcagtggaaggaagggttcagagaggcaggggaatccgcgtattgctctgtcaagaaagcgttctcttccatggtttttatcatcagggagcttcacagtttcactatgcagatgagggagtttttgttctacgaagatctgcaagggattctcgaaagggtgcagaacgaaatgcacgcgtccttcgtgtggctgttccagcaagttttctctc

SEQ ID NO: 232375 - DNA, 358 bp, Glycine max
cgttctttctctcgcaatcttcactacattcaccgagcatttgcattcacattgaatatggctgagactacacaatctaatgctgagttgttggagtggcctaagaaagataagcgccgcttcctgcatgttgtgtatcgtgttggtgatcttgatcgcaccattaagttttatactgaatgttttgggatgaagcttttgaggaaaagagatattccagaggagaaatatgccaatgcttttcttggatttggccctgaacaatcccattttgttgtggaattaacatacaattatggggtgacctcatatgatattggaactggatttggacattttgctaacgcaactcaagatg

SEQ ID NO: 232376 - DNA, 385 bp, Glycine max
tggaaaagctcaaaagaaatctgaaagggagaatgaattgaaacaatgatttgagcagagcatgaaagaagctgctgataaatatcaaggggcaaacttgtatgtcaaaaatttagatgatagcctcggtgatgataaacttaaggagctgttctccccttttggtaccataacttcttgcaaggttatgagagacccaaatggcataagtcgtggatcaggatttgttgcattctcaactcctgatgaggcatctagagcactcttggagatgaatggcaaaatggtggtaagcaaacctctgtatgtgactctagcccaacggaaagaagataggagagctagactgcaggctcagtttgctcaaatgcgacctgttggaatg

SEQ ID NO: 232377 - DNA, 387 bp, Glycine max
gcgctatcaacttcagttcagaggacattccaaatggcattggctttgggggacgagtgaatcacttgggtttgtttatatcagcaaactttgatcaaggacatacattttcgtgtaccacgtttggtagcccttgtctctccaagactaaccgtatattgcctgaagtaatagaatgctggggagtcacacaagatgcgacacaagacaagaatgatgctgtcaagggcactattctggagaggttcaaggaagatcgcaacatgctcaaaatggtaggcctagcaaattccagcgagtaaagtgttgcttgcatgcgtttgatataatccacccattggacttttaatatcattgttcatatgccatgagaaatacaactttatg

SEQ ID NO: 232378 - DNA, 351 bp, Glycine max
cagaagccaaacccaatcacaacaacacatcagaaaaaaagagcacattcagagcaattccaacggttgaattttgtggctgacgacaccccatcgacgttagtcaaataaaacatgtcttgctccgtcgcggttcctaactcgccggtgttctccccatcttcttccctcttctgctctaatcccgacaccatctcttcgtcaccggaaacactctcgctctcgctctcgcaactcatatcttcaagctcatcgacgatgtcgtcatgtccttcagcctctgctgctgcatcctcatcagcatcgccttcctcgcagtctcggcatcgccttcacacactgcccatcgtg

SEQ ID NO: 232379 - DNA, 392 bp, Glycine max
aagctgtgctcagggctcgctatgaagatgctaagttcttttatgagatggacactcgtaaaaggttttcagaattccgaaagcaactgaaaaacattctctttcatgagaagcttggaaccatgctggataagatgactcgtgttgaaaacatggttactaaactaagttgcctcctagatatcaatgaagatgtgcaacaaattatccgggatgcttcctcacttgctatgtctgatcttgccactgcagttgtcactgaatttacatcactttcaggaattatggggcgtcattatgcccttagagatggatactcagagcagattgcagaggccttgctggagatcacacttcctagattttctggggacatacttcccaaaagtgat

SEQ ID NO: 232380 - DNA, 387 bp, Glycine max
caccattcctaagctcactctttctaagtttcttctatcctctctccgccatggttctctccaaaaccgcctccgaatccgacgtctctgtccactcaaccttcgcttctcgctatgtcagaacttcgcttcccaggttcaagatggcggaggagtcgataccgaaggaggcagcataccagatcataaacgacgagttgatgttggatgggaacccaaggttgaatttggcatcatttgtgacgacttggatggagccagagtgtgataaactcatcatggctgccattaataagaactatgttgacatggacgagtaccctgtcaccactgagctacagaatcgatgtgttaacatgatagctcatcttttcaatgcaccactag

SEQ ID NO: 232381 - DNA, 386 bp, Glycine max
cggcacccacacacacagttcgtcggaatgggaagggtgattcgcgctcagcgtaagggtgctgggtcggtgttcaagtctcacactcaccaccgcaagggtccggcgaggttccgcagcctcgacttcggcgagcgcaacggctacctcaagggcgtcgtcaccgacatcatccacgaccccggtcgcggcgcccctctcgccaaggtggcattccgccaccccttccgctacaagaagcaaacggagctcttcgtcgccgccgagggcctctacaccgggcagttcgtctactgcggcaagaaggccaccctcgtggtcggcaacgtgttgcccatccgatccatccccgaaggtgccgtcatctgcaacgtcgagcaccacgt

SEQ ID NO: 232382 - DNA, 464 bp, Glycine max
  unsure (1)..(464): unsure at all n locations
tgaattgaatctaggtggcactatagaagagatatgacgtcgcatgcacgcgtacgtaagctcggaattcggctcgagccgctttgggtgctgagatcattggtacctttgttcttgtctacaccgttttctccgccactgatcctaagaggaacgctagggactctcatgttcctgtgttagcaccacttcccattgggtttgccgtcttcatggttcacttggctacaatccctgtcactggaaccggcattaaccctgcaaggagtttcggaccagctgtgatcttcaacaacgacaaagcctgggacgaccaatggatttactgggttggaccgtttgttggagctgcggtggctgcaatctaccatcaatacattcttagaggttctgcaatcaaagctcttggatccttcaggagcaacgcttaattaananaaaaaaaaatcaagtttctccactac

SEQ ID NO: 232383 - DNA, 382 bp, Glycine max
ctctttctttctcccctacacaaaacatggctttgcccaatcagcaaaccgtcgattaccccagcttcaagcttgtcatcgtcggcgacggtggcacaggaaagacaaccttcgtgaagaggcatctcactggtgaattcgagaagaaatatgaaccgaccattggtgtggaggttcatccgttggattttttcacgaactgtggaaagattcgcttctattgttgggatactgctgggcaagagaagtttggtggcctcagagatggatattatatccatgggcaatgtgcgattatcatgtttgatgttactgcccgtctaacatacaaaaatgtccctacctggcaccgtgatctttgccgggtctgtgaaaacatccc

SEQ ID NO: 232384 - DNA, 382 bp, Glycine max
ctttgcgatatatgaactcttttacaaaggcaacgccattgtctaacacagttaccattagtctttcaaatgagttgccagttgttgttgagtacaagattgctgagatgggttatgtgcggttctatttggctcccaagatagaagaggatgaagaagatacgaaacctcaagtttaatctacctattagatggttgggttaggatattaggattttaatgtctttgaacttgtagctttcgtcatacatcttctgttgaagatattttaaccgtgtgagcaatgaattcacattttgtggatttcttagatgtgtattggttacctaccaccttattttccctcgatttgattgttaagaacaattcgaaacaattggtg

SEQ ID NO: 232385 - DNA, 389 bp, Glycine max
accgactccaacgccatctcccgcgctgctcggtccagtgatagggctgaggagagggagcaggacactgttacacaggctgatttggaacattttcttcatcttcttgaagggaaggatggagtgatggactggcagagttttatggaaaggtcaacaccaaacatgcaatacaaagcttggcgttacgatcctgagacaggtcctacagtttaccgtagtagaactgtctttgatgatgcaactccagagttggtgagggatttcttctgggatgatgactttcgtcctaaatgggatgctatgcttgcatactgcaaagtattggaggaatgccctcataatgggacaatgatttctcactggattaaaaagttcccctttttctg

SEQ ID NO: 232386 - DNA, 390 bp, Glycine max
ctcgagccgcttgaatcccttagcagtaatcatcgtcagggtcctgtacgactggatagccgtgtaggttctatgttcatcaaaccctcacctcttggttctccgcaaccctttcttcctctcgcaccttcacctttggctccattcactaataccactatcccaaagttatcaggactttgcactttgaactttactactgctgaaagtttgataagtgtgacagcaattgattgctgggaagtttttgcaccatttctggctaatgtaatatgttgtccccaattggaagccactctcacaattcttattggtcaatccagtaaacttaacaatgtacttgccttaaacgggaccgttgctaaacattgccttgcagatgtggaacaa

SEQ ID NO: 232387 - DNA, 387 bp, Glycine max
ttttgaagcacatgttgctgattttgggctcgctaaattcctgcaagattctggagcatctgaatgcatgtctgctattgctggttcttacggatacatagctccagagtatgcctacactttgaaagttgatgagaaaagcgacgtgtacagctttggagtggttcttttggagcttgtaacaggcaggaaaccggttggcgagtttggcgatggtgtggacattgtacaatgggtgagaaaaatgacagactcaaacaaggaaggagttctaaaagttcttgatcctagacttccctcggttccacttcatgaggtgatgcatgttttctatgtagccatgctgtgtgttgaggaacaagcggtggagaggccaactatgcgcga

SEQ ID NO: 232388 - DNA, 390 bp, Glycine max
acaacatttacattactctctcactttctccaatatggcttcttctcgaaatgagttttatgcacttatgctagtggtggtggttggctccatagtggcttcctgtggtgctaacttcaaccaagactttgatctaacttggggtgatcagcgtgctaagatattcaatggtggtcagcttctatctctttccctggacaaagtctctggctctggcttccaatccaagaaagagtacttatttggaaggatcgatatgcagctcaagctcgttgctggcaactctgccggcactgtcactgcttactacttgtcgtctcaagggccaactcatgacgagattgattttgaattcttgggaaacgtgagcggtgacccttacattctcca

SEQ ID NO: 232389 - DNA, 384 bp, Glycine max
gttaaagccgtaacctatggactatcacacaacagttctgctactgattacctttgtgagtgcaaccattattctcatattcattcggagattattcaaccaaacctcagaatcagaatatgcaaagcttccaccagggcctcgtccatttcctatcataggaaacatcttggaacttggcacaaatccacacatagcactcaccaaattctcaaagatttatggacctcttatgacttttaaacttggcagaataaccaccatagttatctcctctcctcaagtagccaaagaagtactacttgaaaatggtcaagtcctttctagcagaacaattccacattcagtccatgcacttgaccatcacatatactctactgtgtg

SEQ ID NO: 232390 - DNA, 389 bp, Glycine max
gtggcaaatccacacttcttgatgctttagcaggaagattgacatcaaacataaagcaaacagggaagattctaatcaatggccacaaacaagaactggcttatggaacatcaggctatgtaacacaagatgatgctatgctgtcatgtttaaccgctggggaaactttatactactcagctatgctccaatttccaaacaccatgtctgtagaagagaagaaggaacgagcagatatgacactgagagaaatgggtctacaagatgccatcaacacaagggttggagggtggaattgtaaaggcctcagtgggggacaaaggaggagacttagcatttgcattgagattctaacacacccaaaactcctcttccttgatgaaccaact

SEQ ID NO: 232391 - DNA, 389 bp, Glycine max
ctcgagccgaatcggctcgagagaaaatgtttatgttcctgagaagaaatttcactctttcaagaaggtgtctcggtccatgggatatggtgagaatgatatcaccttagtatcttttcaatcagtctccaaaggctatcacggggagtgtgggaaacgaggaggttatatggaggtgactgggttttctgcagaagtgagggaacaaatatataaagtggcatctgtcaacctttgctctaatatctctggtcaaattcttgcaagcttggtcatgagtccacccaaggttggagatgagtcctatgactcattcatggctgagaaggagaatattttggcgtcccttgccaggcgtgcaaagacactagaagatgcattcaacaaat

SEQ ID NO: 232392 - DNA, 381 bp, Glycine max
tcccaggcgaggagaaagatggaggggaaggagcaggatgtgtcgttgggagcgaacaagttccccgagagacagccgattgggacggcggcgcagagccaagacgacggcaaggactaccaggagccggcgccggcgccgctggttgacccgacggagtttacgtcatggtcgttttacagagcagggatagcagagtttgtggccacttttctgtttctctacatcaccgtcttaaccgttatgggagtcgccggggctaagtctaagtgtagtaccgttgggattcaaggaatcgcttgggccttcggtggcatgatcttcgccctcgtttactgcaccgctggcatctcagggggacacataaacccggcggtgaca

SEQ ID NO: 232393 - DNA, 385 bp, Glycine max
agaaggtataagcagccgttttttctgttggtatatgaaggtggtgaaggaagaagaagaagaatggtgacggaccaagatatagcgaaaggggtggagtccctactgcgtcactctgacccaaactccataactacggtaaacggcgtcgttcagcagctggaggccaaactagggttagacctctctcacaaggccagtttcatcagagaccagatcgatcatcttctccggtcacagccacagacatttgctcctcaccctcctccacttcacaaagactattttgcccctcacacccaactgcacttcccaaccacccactttgctccccattttgccctccatgacgagatcaacttcctgcagcacccccaccctcctc

SEQ ID NO: 232394 - DNA, 381 bp, Glycine max
ctcccacaccacacccatgacactcctcctgctccttattctcctctttcacgcggcggaagccaagggacagtggcagctcctccacaaaaacatcggcattgtcgccatgcacatgcagcttctccacaacgaccgcgtcatcatcttcgaccgcaccgacttcggactctccaacctaaccctccccgacggaagatgccgcaacaacccaaacgagttggtcgtcaaacgcgactgcaccgcgcactccatcgaatacgacgtcgcagccaacacattccgcgctctctttgtccaaaccaatgtctggtgctcctccggttcggtctctcccgacggaacattagtccaaaccggtggcttcaacgacggctaccg

SEQ ID NO: 232395 - DNA, 388 bp, Glycine max
ggaacaccccccacgaagcaccaattatggctctgaatctttgtatctcacctaagtttaaatgggttccttccttagatagtgcttcctattctttgagaccttcacttgggtcttgttttggtaacataaacattgctagtgtgagtctaagtactactagaagtttgagtttgaggaggagtgggagtgttagtgtaagatctagtttagaaactgcggggcccacagtcacagtgggacaggtcactgaggttaacaaggacaccttctggccgatcgttaaggctgccggggataaaaccgttgtccttgacatgtacacacaatggtgtggcccttgcaaagtgatggctccaaagtttcaagaattatctgaaaagtatct

SEQ ID NO: 232396 - DNA, 386 bp, Glycine max
gcagaagcctcctctgcctcgcaatcatcggcattgtcgtcgccgccgtcggaggtcagtctccagcggcggctcccaccacttcctcggcatccccagccacagccccttctaaacctaaaccaaaaccacctgcgccagttgcttctcccacttcatctcctccagcttcatcccccaatgctgcaaccgcaacccctcccgtttcgtctcccacggtagcatctcctccgtctaaagctgctgctccagctccagcaaccactcctccggtggccacacctcccgcggccactcctcctgcggctacacctcctgctgtgacaccagtgagctcgccgccagcgccagttccggtgagttctccaccagcgcctgttccggtg

SEQ ID NO: 232397 - DNA, 389 bp, Glycine max
gcagacttaacaacagcacaaagcgggttactgtctgttcaagctaccatctctctctctctttcttagtgcctccttgccagaagttaaaatggcccaagaaactttcctattcacatctgaatcagtgaacgaggggcaccctgacaagctctgtgaccagatctccgatgctgtgctcgatgcatgcttggagcaggaccctgacagcaaggttgcctgtgaaacctgcaccaagaccaacatggtgatggttttcggagagatcacaaccaaggccaacgtggactatgagaagattgtgcgtgacacatgcaggaacattggttttgtctctgatgatgttggtcttgatgctgacaactgcaaggtcctcgtcaacattgagc

SEQ ID NO: 232398 - DNA, 388 bp, Glycine max
ctcaaagctcacggacttgcgcctgaaattccagaggacctgtaccatttgattaagaaggcagtttcaattaggaagcatcttgagaggaacaggaaggacaaggaccccaatttcaggttgatccttgttgaaagcagaatccaccgacttctccccaataacagaagaactagaaacctcccaccatctcggaaattacaatctcaaaacgtgcaacacactggttgcctagagaatgtatcaactttcatgggttttgcttccttgcagtcaccgttgagccagcaatttgccatatcattttgatgtttatttgaaggctggataggttatgtggcttagttttgttcagaacctatggttagactgacaaagataattttac

SEQ ID NO: 232399 - DNA, 352 bp, Glycine max
ctgcgacttccaaacggaacgtcacatcttcaagcgccgcaacgacgggatttacattatctaacgttgggaagacatgggagaagcttcagttagcaactaaggttattgttgcagttgagaaccctcaggacatcattgttcaatccgcaatgccttatggtcaatgagcggttctgaagtttgcacactacactggtgcacatgctattgctggtaggcacactcccggtaccttcaccattcagcttcacacctcattcagtgagcctcgtctccttatcctcactgatccaagaacagatcaccagcctattaaggaagctgctcatgagaatattcccacattgct

SEQ ID NO: 232400 - DNA, 384 bp, Glycine max
attatggagcccagattcgtaatctccgcatcggaggccgaatcccaatcaatctccaaactcctcccttccctcgtttcctcttctcagtccctcgcccgtccttccatctccaactttcccgtcgccgccgtcggactcgccgcctccggccgcatcttcgtgggcgtgaacgtggagttccccggcctccccttccaccacaccatccacgccgaacagttcctcctcaccaacatggccaacaacgccgagacccgcctcgactccttcgccgtctccgccgccccctgcggccattgccgccagttccttcaagaactccgcgacgcccccgacatccaaatcctcatcacctcccacaaaaaccctcacttcagccct

SEQ ID NO: 232401 - DNA, 385 bp, Glycine max
aacactcataacacaaagcacaaagcaaagctcatccttgagttaaaaaatggcagcagcttcttccatggctctctcatccccatccttggctggcaaggccgtgaagctgggcccatcagccccagaagtgggaagggtgagcatgaggaagaccgtcaccaagcaggtctcctcaggaagcccatggtacggcccagaccgagtcaagtacttgggcccattctctggcgagcccccgtcctacctaaccggtgagttcccaggcgactacggctgggacactgctgggctttccgcagacccagaaaccttcgccaagaaccgtgaactcgaagtgatccactccaggtgggccatgctcggagccttgggctgcgtcttc

SEQ ID NO: 232402 - DNA, 388 bp, Glycine max
ctcttttggattcttcttcttcttcaccaccctgtgatcgcagactcaacactctcgctagacacttccttccgcaaatggcttctcacgacagcatctccgcttctccaacctccgcttctgattccgtcttcaatcacctcgttcgtgctcccgaagatcctatcctcggggtaactgtcgcttataacaaagatccaagtccagttaagctcaacttgggagttggtgcttaccgaactgaggaaggaaaacctcttgttttgaatgtagtgaggcgagttgaacagcaactcataaatgacgtgtcacgcaacaaggaatatattccgatcgttgggcttgctgattttaataaattgagtgctaagcttatttttggggctga

SEQ ID NO: 232403 - DNA, 382 bp, Glycine max
ctccatttccatttcctctctctcagtttccaagaatcttaagctatgggaaagtcttacccaaccgtgagcgctgattaccagaaggccgttgagaaggcgaagaagaagctcagaggcttcatcgctgagaagagatgcgctcctctaatgctccgtttggcatggcactctgctggaacttacgacgtgagctcgaagaccggtggtcccttcggaaccataaagcacccctccgaactcgctcacggcgctaacaacggtcttgacatcgctgttaggcttttggagccactcaaagcggagtttcctattttgagctacgccgatttctaccagttggctggcgttgttgccgttgaggtcaccggtggacctgaag

SEQ ID NO: 232404 - DNA, 390 bp, Glycine max
acaatttcaatctctctctctctctgtctctctctctctagacttagattttgtgaatggctgaagtggaagagggacaggtcatcggcgtccacaccgttgatgagtggaagctgcaactccagaatgcaaaagactccaaaaaactgattgtggtggattttactgcttcctggtgtggtccatgccgttttatggccccagttcttgcagagattgcaaagaaaactcctgaattgatcttcctcaaagtggatgtggatgaagtgaggcctgttgctgaggaatattccattgaggccatgccaaccttcctcttcttgaaagatggcgagatcgtggacaaggtggttggtgctagtaaggatgaccttcaagccaccatagcca

SEQ ID NO: 232405 - DNA, 385 bp, Glycine max
gaaaatttaacaattagggttgcttctcctttgccgacccatggctcccaaagctgatagttcaaagaaggctgatccaaaggcacaggccttgaaaactgccaaggcagttaagtccggtgctaactttaagaagaagaccaagaagatccgaacatctgttaccttccatcgaccaaggactttgaaaaaggataggaaccccaaatatccacgcattagtgctccacccaggaacaagcttgatcactatcagatattgaagtttcctctcacgactgagtctgcaatgaagaagattgaagacaacaacactttggttttcattgttgacttgcgggccgacaagaagaagatcaaggatgcagtcaagaagatgtatgat

SEQ ID NO: 232406 - DNA, 392 bp, Glycine max
aaccggttcgagccaatacgcgattgcgaagttcatcgaggagaagcacaagcagcttccaccgaacttcaagaagcttcttctctaccatttgaagaagctcgtcgccgccggaaaactcgtcaaagtcaaaggctcgttcaagctcccacctaccagacctgctgcatcttcttcttcttcttcttcgccggcaaagaagaaaaagcccgcagctgccaagtccaagcctaagcctaagcccaagcccgctgcgaaagccaaggatactaaggcaactaaatcgaaggcaccagctaagcccaagccagctgctaagcctaaagccaaagctccagccaaggccaaacccgctgctaaaccaaatgcttctgctgctgccaagcccaagc

SEQ ID NO: 232407 - DNA, 388 bp, Glycine max
gcttgctggtgctcaggttcttctgagtcgtttgaggttgttcttgagtcctgggtatccatatgaagaaattttgaggacctttcacaatcagacaagcataatcatgtgctcctatctaccagttttcacaagctttaacagaaccaaaggtggcttgattcaattaaaccatggtaggcctcagcctctccaatatgtggtcaatgcggcctttttggctgccctatatagtgattatcttgatgctgctgatacacctggatggtattgtggacctaatttcttttcaaccgacgtgctccgtagctttgccaagtcccagattgattacatccttggaaataacccaaggaaaatgagttatgtcgtaggttttggtaatcat

SEQ ID NO: 232408 - DNA, 382 bp, Glycine max
attacctctttccaaagtccaaattttctagttccaccaaaccaaaccaaaccaaaatggcagcagcctcagcctcatccatgatatcaacaccagccttatctccaaccatccaaaagcaccatcatttgaagccatccaacgtgtgcttccaaggtcttagacccctcgcaaggttcaccaaagcctcatcaaccaaagtgagcaccaccaccaaaagggttattccaaagggtggtgttagagctgaactcaactcagcccttgtgataagcctcagcactggcctctccctcttcttgggaaggtttgtgttcttcaacttccaaagggagaacgtggcaaagcaagtgcctgagcagaacggcctcacacactttga

SEQ ID NO: 232409 - DNA, 378 bp, Glycine max
ctgaggtgcaataaggttatgagtgctgttttctcttcttgaacttctctttaatcctcagatcctggattaaaggaaaaacataaacatcagccagaaaattcctgagccttgttttacatctttcttcaggaaggaaaagaagaagcacaatgtcattcacaggaactacaggtaaatgcaaggcttgtgataagactgtttatgtggatgacatgtgaactcttgaaggtataccttaccatagaaactgcttcagatgcagtcactgcaagggataccgaacgatgaatacctacgccacagtggatggtgtcctctattgcaagccacactttgaacagcttttcaaggaatctggcaatttcagcacgaact

SEQ ID NO: 232410 - DNA, 386 bp, Glycine max
agaagataaaaaaatacgagattgtatcaaaaattatatacaaaaaaatataagaattccctcaacaccagaggatattggacagataaagattcaaaaaagaattgatcttattcaagttataatatatatgggatttccaaagtttttaatagagggtaagtctcaaaaaatcgaagaattacagacgaatatgcaaaaaaaactgaattgtgtgaatcgaaaactaaacattgctattgtaaaagttgcaaatgcttataaacaccctaatattattgcagaatttatagctggacaattaaagaatagagtttcgtttcgtaaagcaatgaaaaaagctattgaattaactgaacaggcgggtacaaaaggagttcaagtac

SEQ ID NO: 232411 - DNA, 389 bp, Glycine max
caagcaaatgaagcaaaggtagaagggaataagctttttgtagaagggaagtatgaagaggcattattacaatatgaacttgctttacaagcagcaccagacatgccttcatctgtggaaatacggtcaatatgccattcaaaccgtggtgtgtgctttctgaaactgggaaaatatgataacacaattaaagaatgcacaaaagcattagaattgaatcctgtgtacattaaagctttggtaagaagaggagaagctcatgaaaagcttgagcattttgaagaggctattgctgatatgaaaaagatcttagaaattgatctctcaaatgatcaagctaggaaaaccattaggcagctagagccccttgctgcagaaaaacgggaaaa

SEQ ID NO: 232412 - DNA, 384 bp, Glycine max
agcaacagagccagcgagagcaaaaccctagttcatccatcaccagtcgaggaagaagatggtgaagttccttaagcccaacaaggctgtcatcgtcctgcagggccgctacgccgggcgcaaggcggtgatcgtgaggaccttcgacgagggaaccagggagcgcccctacggccactgcctcgtcgccggaatcaagaagtaccccagcaaggtcatcaagaaggactccgccaagaagacggccaagaaatctaaggttaaggcgttcgtgaagctcgtgaactaccagcacctcatgcccacgcgttacacgttcgacgtggatctcaaagatgctgttacccctgatgttctcggcaccaaggacaagaaggtcactgc

SEQ ID NO: 232413 - DNA, 383 bp, Glycine max
ccgagccttgcgttgaggggtactcaactcctgggggttattctgcaagggcagtccatcccatagcacttgggaaggtgatgagcattgcaaagatgatgaagtcagagtttgatagtgagaactatacactttctgccattggtggtgttgagacaggcggtgatgctgctgagtttatccttctcggggcaaacactgttcaggtgtgcactggggttatgatgcatggctatggacttgtgaagaaactatgtcttgagcttcaagacttcatgaaaaagcacaatttcacatccatagaagatttcagaggggtttctcttgagtattttactactcacactgacttggtaagaaggcagaaggaagcagttcagaag

SEQ ID NO: 232414 - DNA, 390 bp, Glycine max
gcggggataagattaaagattcaacaatggcctctgcttctgctactcttctcaagtcatctcctgttcttgacaagtgcgagtgggtcaaaggccagacccttcgccaacctctcgtgagatgtaacccttcctcagcatcagctctcaccatcaaagctgcttcctatgctgacgagctcgtcaaaaccgccaaaacagtggcctcaccggggcgtggtattttggcgatggatgagtcaaatgcaacctgcgggaagcgtttggcatctattgggttagagaacacagaagctaatcggcaggcataccgtaccctacttgtgacagtacctggtcttggtgaatacatctctggtgccattctctttgaggaaactctcctacaat

SEQ ID NO: 232415 - DNA, 389 bp, Glycine max
ctctctcttaaaattaaaactaagcatgtgctctgccatatcccaagtggaacaagaagagttgctcgaaaaattagaggtgttcaagatcaaaggcagggacaagcatggccgcaagatccttcgcattatcgccaaactcttcccagcgcggttggtgagtgttgatgttctgaagaagtacctggaggataaggttttcccgaagctggggaaaaggaaattcgtggtgctgtacgtgcacaccggacgtccagaggagcgagaattttcccggaatctccggtctccggtggatccacgactcgattccgggcgaacgttaaagggaacctccaagccgtttaatttaatcaacccggccttcaaggccgccttttcctcgccaa

SEQ ID NO: 232416 - DNA, 385 bp, Glycine max
aaaacactcataacacaaagcacaaagcaaagctcatccttgagttaaaaaatggcagcagcttcttccatggctctctcatccccatccttggctggcaaggccgtgaagctgggcccatcagccccagaagtgggaagggtgagcatgaggaagaccgtcaccaagcaggtctcctcaggaagcccatggtacggcccagaccgagtcaagtacttgggcccattctctggcgagcccccgtcctacctaaccggtgagttcccaggcgactacggctgggacactgctgggctttccgcagacccagaaaccttcgccaagaaccgtgaactcgaagtgatccactccaggtgggccatgctcggagccttgggctgcgtct

SEQ ID NO: 232417 - DNA, 384 bp, Glycine max
aaagcatttatggtgctttcagcggcttggagtatcttaaagctcagaaaatgaggaatcgccaattgcaatttcacaagaaaatatttgctgaggcagatgtcattgtctcaccaacaacgggtgtgactgcatatcaaattcaagatgatgccctgcagaccggtgaacttgactacgtgaatggagctgcacttgttcgttattccatagcaggaaactttcttggacttcctgctgtcactgttccggttggattcgatagattgggtttgcctattgggcttcagtttattggaaggccttggtctgaggccacactaatccatttggcatttgcaatgcaggctatctgcatgtcagagtacagaaagcccgagcttt

SEQ ID NO: 232418 - DNA, 383 bp, Glycine max
gggaaaaagagctgcaatccgatttgcagatctcaagaggaaaagatattggttcccgttaatggtataatatgatgctgtataagttctgattttctaaaccctctcttcccaagcatgacttattgtcatttatccaaaaggtcaagcattatttgctaactgagctcctgcaggttggtattggattacttgttcttcagcaattatctggtatcaatggaattttgttctattcaactaccatctttgcaaatgcaggaatttcatccagcgaagctgctacagttggacttggagccgttcaggtcatagcaactggaatttccacatggttggtggacaaaagtggccggaggctgcttctaataatatcctcatct

SEQ ID NO: 232419 - DNA, 400 bp, Glycine max
ccaatatattccattctctctgtgtatttccctacctctcccttcacaatgcagatcatcgtcaagaccctcatcggtaagaccatcacccttgaggtggaaagctctgacaccatcgacaacgtcaaggccaacattcaggacaaggaaagaatccccccggaccagcaacgtctcattttcgccggaaagcaacttgaggacggccgtacccttgctgactacaacattcagaaggagagtactcttcacctcgtcctccgtctccgtggtggcatgcagatcctcattaagacactcatcgggaagaccatcaccctagaggttgaaagctccgacaccatcgataacgtcgaggctaagatccaggacaaggatggtatccccccggaccagcaac

SEQ ID NO: 232420 - DNA, 473 bp, Glycine max
ttgcagtgactttaggtgacactatagaagagctatgacatccgaaggtaagctcggtattcggctcgaggagccatatatcatggggtactatttggtattcgttggtgtgttcttgtggtgtgccatggctagtcacattaatggactagccatgatggatggaaagttaatgagttcctcggcaaataattatgactatggagatgctcttggcaaagccatcttgttttttgaaggagaacgctcggggaacttgcccgccacccaaagagtgaagtggaggggagactccgctctctctgatggcaaacttcaaaacgtggatttgattggaggatattacgatgctggagataacgtcaagtttggatggtcaatggcatttacaactagcttattgagttgggctgctgtagagtacgagagtgagatatcttcggtgaaacaacttggttacctccacagtgctg

SEQ ID NO: 232421 - DNA, 401 bp, Glycine max
gtgctaagaaggaatgagaatgctctagtacggaactacaaacatggtttctcagggttcgcagctcgtctatcaaaaaaggaggcaacctcaattgctcagaaacctggtgtggtgtctgttttccctgacccagttctgaaactccacactacacggtcatgggatttcctcaaataccaaactcaagtcaaaattgacaccaaaccaaatgcggtctccaaatcttcttccgtcattggtatcttagacacaggtatatggccagaggcggcgagttttagcgacaagggtatgggtcctgttccatctcgttggaaaggcacctgcatgaaatcacaagacttctattcctccaattgtaacaggaagctaattggcgcaaggtattatgctgaccc

SEQ ID NO: 232422 - DNA, 375 bp, Glycine max
cggctcgagaacacacttggttttaattggtagacgcgtgccaaggtcttgttaattttgagcgttaagtgctgcaactaatcagatcccaagaccttggcctaccttgccatacagaagaaaatggaagcaaaaaaaaagccaaggtttggagccaacaagaataaagacaaagcacaagtcatggaaagaataatggttggaagtgcaacaaaggttgctttcaccctcttggccactttcgccattgtcattccatgccttgaggctggcattgctgagtttgacgattttctcaaagcccaagctgatgaagcccataaaattgctcttgattcctatgtcccagagcctcacgatgtcgcccatgaactc

SEQ ID NO: 232423 - DNA, 391 bp, Glycine max
aaccattcaatcctgacatggtagctgatttaattcatctaaggaaagcttctatattacatgattcacaagttgctgagattctgaatgatatttcacgacgaattgtgcgagacacaggccctattgtgatggataaatcaggttatactgaaaaaggttttaagagaaaaatagctgttcaggccctttttggaaaggtcttctatctgtccgagctgccagagttttgttcaagagatacctccttagttgtcaaggaaatcttcggagttacagatgaagatgctgacaaactcagaatccacacaatctctgaagctggcagtctagatgcacttgagaagatggttgatagttcagattcagacgatgctagcgaggattcatt

SEQ ID NO: 232424 - DNA, 395 bp, Glycine max
ccataacacaaggcagaaagcaagctcatcctagagttttaaaaatggcagcagcctcctccatggctctctcttccccatccttggctggcaaggccgtgaagctgggcccatcagcccccgaagtcgggagggtcagcatgaggaagaccgtcaccaagcaggcctcctccggaagcccatggtacggcccagaccgcgtcaagtacttgggcccattctctggcgagcccccgtcctacctcactggcgagttcccaggtgactacggctgggacactgctgggctttcggctgacccagaaaccttcgccagaaaccgtgagctcgaagtgatccactccaggtgggccatgctcggggccttgggctgcgtcttccccgaactgttgtcc

SEQ ID NO: 232425 - DNA, 381 bp, Glycine max
tctcatcgtattctctacgctattccgattaatcaatcatacatagatccattattcatagttaagcataataactgttgtgttacatctcgtgaattgttacaactgcttagccattttctattgcatatggcttcgtcggttctctccgcagcttcgcactctgtctcaccctcatgttctctgtccaccacgcacaagggaaagcccatgattatagacaacactttgggattccacagaggacacatttccttctctagttcaaggtctagaggtcggatctctatggctgttgcagttatcgtttctcggtttgaaggcatacctatggcgcctcctgatccaattctaagagtttctgacgcatttaaagtggac

SEQ ID NO: 232426 - DNA, 399 bp, Glycine max
aaaagatttccttgttctttttactgcttaaccgttcggctatctcatatatgaacaacaacatgttaggaatgaagagacggagagatgataatgaagggtccttggatttggcaaaatgtcttatgctgttttcttgtccaatagaaagcaacaagacacaacagaaaagttttggttctgtggaatttgagtgcaagacgtgcaaccgcaagttctcttcttttcaagcactgggagggcacagggcaagccacaagaggcagaagctggagggggaagaactgaaagaacaggccaaaagtcttagcttgtggaacaaacccaaaatgcacgagtgctccatttgtggccttgaattctctctgggccaggctctgggtggccacatgagaaaac

SEQ ID NO: 232427 - DNA, 394 bp, Glycine max
cgaaaaaccaaactctgcagagaagaatggtatctgaaacatcatcaggaagtcttgtattcaacgatgcaattctacaatacgtagcggataccctaccatttggaggagttggtgaatgtgggtttggcaagtaccatggaaagttctcctttgatgcgttcagtcaccataaggctgtggctagaagaagttacttgactgatttttggtttaggttccctccatggactcttgataagctccaactacttgaggtgtcttacaatttagactaccttggaatacttctagttctgctcggcttaaagaaatcaaaacggtcactatttcaggcttgtaactgatgtgcattatgttccttcacttatctatttcaagtgagcccctaata

SEQ ID NO: 232428 - DNA, 390 bp, Glycine max
caacgatggtgcagaggctcacttatcgcaagcgccatagctatgctaccaaatccaaccagcaccgggttgttaagacccctggtgggaagttggtgtaccagaccactaagaagagagcaagtggacctaagtgccctgtcactggcaagaggatccaagggattccacacttaagacctgctgaatacaagaggtctagattgcctaggaaccgcaggaccgtaaaccgagcctatggaggtgttttatccgggggagctgttagagaaaggattattcgcgctttccttgttgaagagcaaaaaattgtgaccaaggtattgacgatccagaaggcaaaagaaaagcaggcatcaaagagttaagctgttgagttattcgtgagtg

SEQ ID NO: 232429 - DNA, 394 bp, Glycine max
atcttcttatagcttcatcccaaaaagctcttttccttctaaatttgattccttagttcagcattctattattatatatggcttcttcaccttcctcagaaaacaaaaacctagagggagtagctggtggtgccggagagaaacccattccacttggtgagaacgttctgcagaagcatgctgcattctttgacttgaataaagatggtgtcatctacccatgggagagttttaaagggttgcgtgaaatcgggactggggttttgctgtccgttggaggtgctattttcatcaatgtgtttctcagtcagagtactcgtcccggaaagtttccatctatactttttccaattgaaattaaaaatatccaacgcggcaaacacggcagtgacac

SEQ ID NO: 232430 - DNA, 383 bp, Glycine max
ctcgagccgaatcggctcgagggatcactatgaaactgctcgtggtgtacagaaagtacttcagaactacaagaatcttcaagatatcattgctattttgggaatggatgagctcagtgaagatgataaattgactgttgcccgtgcccgtaagattcagcgattcttaagccagcctttccatgttgcagaagtcttcactggtgccccaggaaaatatgttgagttgaaggagaacatcaccagtttccagggtgtgttggatggcaaatacgatgacctcccagagcagtcgttttacatggttggcggtattgaagaggtcattgctaaggctgagaaaattgctaaggaatctgcagcgtcttaattacatacaacag

SEQ ID NO: 232431 - DNA, 383 bp, Glycine max
gatatttccaccaaacccgtttgcgttgttgtttgcgaataaatggcaactaagaggagcgtgggaacgttgaaggagggtgatttgaaggggaagagggtattcgtgagggtcgatctgaacgtgcctttggatgacaaccttaacatcaccgatgacactagagtccgtgctgctgttcccaccatcaagtacttgactggttatggtgctaaagtgatcctttctagccatttgggacgtccaaaaggtgtaacacctaaatacagtttgaagcctcttgtgccaaggctgtctcaacttcttggaattgaggttacgatggccaatgactctattggggaggaagttgaaaagttggttacacaacttccagaaggtgg

SEQ ID NO: 232432 - DNA, 385 bp, Glycine max
ctgcaacgatgtcggttaaggagtgccaccaccaccacaagggaaagaagcacaagctctggagacgcatcttctggggaatagtgatcttcgccttcatcgtgttactgacagttcttataatctgggcaatcctaaagccttcaaaaccaaccttcatcctccaagacgtcaccgtttacggcttcaatgccaccatccccaacttcctcacctcaagttttcaggtcacgctttcctcgcgcaaccccaacgacaaaatcggaatctactacgaccgtctcaacacctacgtaacttaccggaaccagcaggtcacgtaccgaacctcaatcccaccctcgtaccaaggtcacaaggaagaggatgtgttggtcccgtttgt

SEQ ID NO: 232433 - DNA, 395 bp, Glycine max
gcgtggccttttatacatcaaacggtgatgtgttcgagaagtcccatgatgagttggactttgaattcctaggtaacgttgccggaaaaccatggcggtttcagacgaacttgtacggcaacggcagcacaaatcgtggccgtgaggagcggtaccgtctgtggttcgatccaaccaaagaattccacagatacagcatcctttggaccgcaaagaatgtcatattttacattgatgaagttccaattagagaagtgctacaaagtgaagaaatgggaggtgactacccatcaaagccaatgtcattatacgccaccatatgggatgcatcaaattgggccacatccggtggaaaatacaaagtgaactataagtatgcaccttttgtgaccgaa

SEQ ID NO: 232434 - DNA, 394 bp, Glycine max
cacatattctttgttgcaatatcacaaacacctcgtccgtcacaatgcagctagctgtggcggccaacgctgtcgtttcaccgtcgccgttccgacctcatccccttctccggtcatccttctccggcgtctccgttaagctcactccccaatccataacgttttcacgcttgaagcccctcaccgtcgtcgccgccacgaagaaggccgtcgctgtcctcaaggggacctccgccgtcgaaggcgtcgccactctcatccaagaagacgatggcccgacgacagtttctgttagcatcactggccttactccggggcttcatggttttcacctacatgagtatggtgataccacaaatgggtgtatatcaacaggagcacattttaatcctaa

SEQ ID NO: 232435 - DNA, 393 bp, Glycine max
ctcgagccgattcggctcgagaaaaaaccccaagctcgacaccttctactacctcgagctcctcgggatcagcgtcggcggctcgccggtgcgcggcctctccgcctcgctcttccgcctcgacgcagcgggaaacggcggcgtcatcatcgactcgggcacctccgtgacccggctcacccgacccgcctacattgccctccgagacgccttccgcgtcggggcctcgcatctgaagcgtgcagcggagttctcgctcttcgacacgtgtttcgacctgtccgggctcacggaggtgaaggtgcccacggtggtgctgcatttccgaggtgccgacgtgtcattgccggcgacgaattacttgattccggtggataacagtgggagcttctg

SEQ ID NO: 232436 - DNA, 392 bp, Glycine max
gaacgatatcaggaactggatccaacattttcaggaacacgtgaatatagattgttggcggacattgctgctgcaattgatgaagaagatgttgcaaagtttactgatgttgtcaaggaatttgatagtatgacccctctggattcttggaagaccacacttctcttaagggtgaaggaaaagctgaaagccaaagaacttgaggaggatgatcttacttgaattgtacctttaatattcctggtggttggacctattgtttgatgatttacattgtactactatgtgtgtctgtccagttgttcgtcttacacatccacttacagagtgtacctgctttggttttaattgaattggtctgactgaattcaaaaaatgagtttttactgaaa

SEQ ID NO: 232437 - DNA, 386 bp, Glycine max
cttggttttaattggtataggcttgccaaggtcttgttgattgagcgttaagtgctttaactaatcaatcccaagaccttggtttaccttgccacacaaaaaaatatataaaaaggcaaaataataataaaaaaaagagaaggcttggagccaagaaaataaacacaaagcacaagtcatggaaagaataatggttggaagtgcaacaaaggttgctttcaacctcttggtcactttcgccattgtcattccatgccttgaggctggcattgctgagtttgatgactttctcaaagcccaagctgatgaagcacaaaaaattgctcttgaggcctatgtcccagtgccagaagatgtcaccgacgaactcaatttccatgttcatt

SEQ ID NO: 232438 - DNA, 376 bp, Glycine max
cttttctggacaagactttcgatgaggaaaacaaccttgacacggcaagaaacaccaagcttgacacaaaccttggattgcggccaatgtaagttgctatttggttccacaaccgtcgaactcgctggaagaccacgacgctggataaggattacgaggctctgcatgcaagttttgagaatcttaagtccaactatgacatcctcctcatggagaaagacagcttatgaactgaggtggcaagcctcagtgagaacgtgcttgacaaagggaaataacaggggcacatcgaccagcacgctgaaagtgcatactaaacacaaagattattgcacttgcaagaacatgatacaccccagaggcttttactggaatc

SEQ ID NO: 232439 - DNA, 372 bp, Glycine max
ggagcacgcgaactgatgtgtattcgaatcctaggagctagtaatcgacgatatgcttatattggtgacattgttgttgctgtaatcaaacaagcagtaccaaatacgaacttagaaagatcagaagtgatcagagctgtaattgtacgtacttgtaaagaactcaaacgtagcaacggtataataattcagtatgatgataatgctgcagttgtcattgatcaagaaggaaatccaaaaggaactcgaatcttttgtgcaatcgcccgggaattgagacagttaaatttcactaaaatagtttcattagcacccgaggtattataagacgaaactgtgctatggatacattatttttttgtgaaatagatt

SEQ ID NO: 232440 - DNA, 387 bp, Glycine max
ttcgaaaaccaaaagcatgggtcagggaacaccgggcggtctgaaccggcagggtcttccgggggaccggaagccggacggcggcgacaagaaggagaagaagttcgagccggcggcgccgccggcccgcgtgggccgtaagcagcgtaagcagaagggcccggaggcggcggcgcggctgccgacggtgacgccgctgtcgaagtgcaagctaaggctgctgaagctggagcgcataaaggactacctcttgatggaggaggagttcgtggcgaaccaggagaggctgaagccgcaggaggagaaggccgaggaagacagatccaaggtcgatgatctccgaggttctcctatgagcgttggtaacctagaggaactcattgacga

SEQ ID NO: 232441 - DNA, 401 bp, Glycine max
ttcgaaatccaccgatctctctcattcttcaatggccaccctttccgcatgcgcttcccctccatggccaaaccctaattctcccaattcaaatccagaccctaatttcctccccgatcaatcccaaaccctcgacttcgactccctcatgcctccgcaacccgaatctccaccgccccaccagcaccactcccccgacgcatcgccgccggaatcctccccatcgctcccgccgccgtcgctcctctacctctccttcaaccaggaccaggcctgcttcgccgccgccgccgacagcggcttccgcatctacaactgcgaccccttccgcgagctcttccggcgcgatttcgacggcggcggaatcggccacgtggagatgctcttcctctgcaacatct

SEQ ID NO: 232442 - DNA, 391 bp, Glycine max
ctcacttgaagatagattgcagaggcaagtgagcactattagtcaagccctaatatttgtgactcggtcacggggttggtcttatgttgaacgtcctggtattttgcttgtgacagctttcgtgattgctcagctaattgccactttgattgcggtatatgccaactggagctttgctgccatcgaaggcataggttggggatgggctggagtgatatggttatacaacataatattctatatcccacttgaccccatcaagtttttaattcgatatgctttgagtgggagggcttgggagcttgtcattgagcaaaggattgcattcacaaggcaaaaggactttggaaaggaacaaagggaacttcaatgggcacatgcacaaagaaca

SEQ ID NO: 232443 - DNA, 391 bp, Glycine max
tatttgggttcgattgccactgcagctaacaagcctgctttgaaagactgtaatattactcacattttgactgtggctggtagaataccacctgcacatcctaacgattttgtctataaaattatagacgttgttgacagagatgatgaagacttaaaacaatacttcaatgagtgttttgattttattgatgaagccaaaagactcggtggaggtgttttggttcattgttttgctggaagatcaaggagtgtgactatagttgtggcatatctgatgaagactcgaggaatgagtttttttgaagctctgaaacatgtgaagagtatacgaccagcagcaggtcccaatcagggtttcatttgtcagctggaggactttgaaaagtctc

SEQ ID NO: 232444 - DNA, 381 bp, Glycine max
ataactccctgtaatgtgcactagtaaagaccaaagtatgattattgttacattatgttacatggttgtacttgtatatacatatcttgtcccacctttgtaaatacaattgggacactactaggattgggaagaagggtctttacatttatagtttggcaaatagatattgcaactacctttgtataattctatttctgaagaagcaattacaatttacaagggatggtgccatttacggcataaggattaaggagggataaagggaccaattgctttggaatatccactcattacaatgcatgtatgacaacacatagtaatatgatgtgtgtttttattcagtgggcaactggcagatcgggttttccctggtcactt

SEQ ID NO: 232445 - DNA, 467 bp, Glycine max
tccgcagctacggagacgaaagcttgcatacctgcaggtcgactctagaggatcccctcggggaattccaattccacattttcaagaaataaggaggcaaaaatgttcatatatgaattggaattatttgttttcttattaggcctatcctgaagccaaaggaaatgagatcggaattcctcggggaattccaattccacattttcaagaaataaggaggcaaaaatgttcatatatgaattggaattatttgttttcttagtaggcctatcctgaagccaaaggaaatgagatcggaattcctcggggaattccaattccacattttcaagaaataaggaggcagaaatgttcatatatgaattggcattatttgttttcatagtaagcctatcctgaagccaaaggaaatgagatcgggattcctcgggggtaccgagctcgaattccctatagtgagtcgtatc

SEQ ID NO: 232446 - DNA, 389 bp, Glycine max
atcaaagtttcttcctttctctgctctttgccttctctgacacatttggtgccttgtagagcgtgttttggcaggaaggtggtatggcgaaggacgttgaggttgctgagcgtggctccttctctgggaaggactaccaggaccctccaccagcaccactcattgatgctgaggagctcacaaagtggtccttttacagggctctcattgctgaattcattgccactttgctcttcctctacattactgtgctcacagtcatagggtacaagcaccagactgacctcaaggaaaatggtgaaatctgtggtggggttggcattcttggcattgcatgggcctttggtggcatgatcttcatccttgtctactgcactgctgggatctca

SEQ ID NO: 232447 - DNA, 380 bp, Glycine max
gagaataatggcattcttccaagtgagtgtcaggcgttggattttaacctttgctatcctttacgtttgtgtatttgggaaaaactttggaaatgctgatgaggatgagtccgaggcacagacaggtggtggtgggtacggtggtgtgggaggtggttttggtggtgctggggccggagttgttggtggtggtggtggatttggagccggtggtggtggttttggagccggtggtggtggggttggtagtggtgaccctgctcaaattgtctccaaagccttgctctgtttcaatgataagaatatttatcgcagctgcgaagagacgtgtagattgaacgagaatggaaacctgaatgtgcctgtagagaaaactgata

SEQ ID NO: 232448 - DNA, 383 bp, Glycine max
cattgttgatgaaaaaattaaagagattgaacctctgcagcaggcactgggcaagctgcgtactgcaaataatgctggtcggggtgttggattatgctcatctgaggaggagcttaacaatcttattaatagcttgcactaccgcatacaacatgaaagcattccgtttgctgaagaaaaacaaatccttcgagaaattaaacagctagaggggacaagggagaaggttattgctaatgctgccatgagagccaaagtacaagattctatggggcagaaagaagccattcaagatcaggttaagcttataggtggtgatttggatggagtcaaaaaggagaggcaagcaatccggtccaaaatcaagcaacttgaagatacag

SEQ ID NO: 232449 - DNA, 397 bp, Glycine max
ctctctccagtggccacggacctcgaaacggcgattcacagtgggttgcctcacaaggacgaccacgacccaccccccgccccattctacgaccccgccgagctccgaaagtggtccttcttccgagccctcatcgccgagttcgtcgccaccctcctcttcctctacgtcaccatcctcaccgtcatcggctacaaccaccagacagccaccgccgccgagccctgcagcggcgtcggcgtcctcggcatcgcttgggcctttggcggcatgatttttgtcctcgtctattgcaccgccggcatatcagggggacacataaacccggcggtgacgttcgggttgtttttggcgaggaaggtgtcgctgacaagagctgttgggtacatggtggctc

SEQ ID NO: 232450 - DNA, 396 bp, Glycine max
gttgaaacacaaagaagaaaaaatgggttcctctttgtggacttgtctgattttgttatcacttgcttctgcttccttcgccgccaacccaagaacaccaattgatgtgccatttggcagaaactatgtgcctacttgggcctttgatcacatcaaatacctcaatggtggttctgagattcagcttcatcttgataagtacactggtactggcttccaatccaaaggatcctacctgtttggtcacttcagcatgtacataaaattggttcctggtgattcagctggcacagtcactgctttctatttatcatccacaaactcagaacatgatgaaatagactttgagttcttgggaaacagaaccgggcaaccttacattttgcaaactaatgt

SEQ ID NO: 232451 - DNA, 342 bp, Glycine max
gggcaatttagcttgcacatactcaagcattccaccattgtggcaaagccaaggtcattttagactccaccacatgatcatgatcatatgatcaatccccttaattttttcttttttcttttcccttttctttactctgtattgtatcaatgcttgaaaatggggttgttccaaaaatgtcatatatatttggcctgctaatgggtattgtaaatctctgaacttgaagtgatgcacggttttgagatggttttctaataaacctacacttttgtctctaaaaaaaaaaaaaaaaacaaaaaaaaaaaaaaaaaaacaaaaaaaaaaaagagaaaacaataa

SEQ ID NO: 232452 - DNA, 462 bp, Glycine max
tcaggtgtcacatagaagagatatgacgtcgcatgcacgcgtacgtaagctcggaattcggctcgagctcgagccgaattcggctcgagaaaagatataataataacttggtccagagcatctaccattatacctacaatgattggccataccattgctatccacaacggaaaagagcatttacctatttatataacagatcgtatggtaggccataaattaggagaattttcacctactctaaatttccgaggacatgcgaaaaatgataatagatctcgtcgttaacgttaattttaacataaatttttaaatcgtaatttataactaactattacaaaatggaattcttattaaaatgaaattcaaatcatttcttttataaaaaaacaaaaaattctttaattaaatatttaatgaaattaaatatttaaattaataaaattactcgtgttttattcg

SEQ ID NO: 232453 - DNA, 392 bp, Glycine max
cagcggaataacgaagcctcctcgttcttcttcttccgccctttctctctctagaaccgtacggtcgtttctttctctctcctcaaccggagacagcgtcgccttcttttctgaatctcgcggtgttgttagttctgcggcggttgtagttccggcggcgatgggacagcaatcgttgatctacagcttcgtcgctcgcggcaccgtgatcctagcggagtacaccgagttcaccggaaacttcaccagcgtggcggcgcagtgcctccagaaactcccttcctccaacaacaagttcacttacaactgcgatggccacaccttcaactacctcgttgataacggattcacttactgtgtggttgctgttgagtctgctggacggcagattc

SEQ ID NO: 232454 - DNA, 390 bp, Glycine max
aagacaaccatgcctcagtgagtctcttcatggacaagtttggctacaccaagttcaggactccagctattcttgtcaaccctgtgaaccatcattgctttcaaatatcacccaacattgagatagcaaggttgaagattgaccaagctgagtacctcgatagaagattcatggggtccagagagttcttccctaatgacatagggaatatacttaggaacaagctaagtttggggacatgggtggcatatttcaaaggagatattgcttggggtgattttgggtcagatggacaagtaccaaatagttgggctatgcttagtgtatggaatactggggagatattcacgttaaggctatggaaagcacctttttcttgcttggtatgca

SEQ ID NO: 232455 - DNA, 379 bp, Glycine max
aagcactatagtaaaaaaaggacattcattcatctatggctacccttattgctcccagcaaccactctccccaagaagatgctgaagctctcagaaaggcttttgaaggatggggaactgatgagaacactgtcatagtaattttgggtcatagaactgtgtatcagaggcagcaaatcagaagagtttatgaggaaatttaccaggaggatcttgtgaagcgcctagagtctgagatcaaaggagactttgagaaagccgtgtaccgatggatactggaacctgcagatcgtgatgctgttttggccaatgttgccatcaagagtggcaaaaactacaatgtcattgtggaaattgccactatcctctccccggaaga

SEQ ID NO: 232456 - DNA, 388 bp, Glycine max
gtttaaagttacatagtttttcattgttttacttaatctacaatggctgcttcaacaatggctctctcttcatcatcattggctggccaagctatcaagcttgccccctccacccctgagcttggtgttggaagggttagcatgaggaaaacagcctccaaaactgtttcctcaggaagcccatggtacggcccagaccgtgtcaagtacttgggcccattctcaggtgagcccccatcctatctcactggtgaattcccaggtgactatggttgggacactgctgggctttctgctgacccagagacttttgccaaaaaccgtgaactggaagtcatccactccagatgggccatgttgggaaccttgggctgtgttttccctgaac

SEQ ID NO: 232457 - DNA, 381 bp, Glycine max
gtgccaaagttcatattaagagagaaagagagagagagatagaagggaaaaaagcatcaaagatcatgaaacccaacttttcctttttatctaagcttttgatactgcaatatctatcagttttatgcatttctcaggaatttgatttcttctactttgttcagcagtggccaggagcatactgtgacacaaagcagagctgctgctatcctaagactgggaaacctgctgctgatttcagcattcatggactctggcctaacttcaaggatggctcatggccctcaaactgtgaccctgacagtgtctttgataaatctcagatctcagacctcattagcaacatggagaaggattggccatccctgagctgcccaagta

SEQ ID NO: 232458 - DNA, 380 bp, Glycine max
gttcatttctacacatccctagctctgtcgttccgtcgttgacgatggcgtttcgggtgcgatgccctgacctccgctctctctttcttctctctctcttgtccatcgcttccgccaatgtcttcttcgaagagcgtttcgatgacgggtgggaaaatcgatgggttaaatcagattggaaaaaagatgagaacgtggctggggagtggaaccacacctctggtcaatggaatggagacgctaatgacaaaggtattcaaaccagtgaggattacagattctatgctatttcagctgagtaccctgaattcagcaacaagggtaagacactagtctttcaattttctgttaagcacgaacagaagcttgactgtggtggt

SEQ ID NO: 232459 - DNA, 468 bp, Glycine max
actcagtggcacatagaagagatatgacgtcacatgcacgcgtacgtaagctcggaattcggctcgagtgatgacagtgtcgcaatagtaattcaacctagtacgagaggaaccgttgattcgcacaattggtcatcgcgcttggttgaaaagccagtggcgcgaagctaccgtgcgttggattatgactgaacgcctctaagtcagaatccgggctagaagcgacgcgtgcgcccgccgctcgatgggaattgcgcttcaaggcgtcgctccacgttttcccagaaagtttgaaccaacacaaaacgaggttgctcaggagaggctttggctcatgcccttcacctgcggtgcttggttttggccataaaaattatgatcagttctctgtgaaagtgtgcacggcttttacgactgaggatggtggggatgtgaaggagaaaaagtttcgaaatttgaagaaaaatg

SEQ ID NO: 232460 - DNA, 402 bp, Glycine max
gagagagaaagagagggagtaagtgggtaaaggaaagaaaactaaagaaacaaacctaacacaacacaaatccttgaaacgacgacggaaatggccgtttcgagctcgcacatgcgtttcacctttgagtgccgctccgatcccgatttttcgccccccccgccgtccttcgacaacctccgccgccgaaacttccgctcctccgcaggatccggcgcggcgtttcacggcatctcctccctcatcctccgcttccctcccaacttccagcgccagctaagcaccaaggcgcgccgcaactgcagcaacatcggcgtcgcgcaaatcgtcgccgcttcgtggtcgaacaacagcgacaactctccggccgccggggctccggcgccgcccgcggccaccgcc

SEQ ID NO: 232461 - DNA, 396 bp, Glycine max
tgacaattctatacaagcgtaacgtttgcttaggatgagaaaaagcaaccacttgatcggtctcttaaacttcctaacattcctgctgtcgattccgatcctacgaggcgggatatggctgagcagcatggcgaacaacaccgactgcctcaagttcctgcagtggccgctcatcatcatcggcgtcagcatcatggtcgtgtccctgatggggttcgccggcgcgtgttaccgcaacaccttcctcatgcggctctacctcgtcgtcatgttcctggtcattgccgttctgatcgggttcatcatattcgcctacgttgtcaccgacaaggcgtccggtccgaaggtgatgaaccacgcttacctggcgtattatcttgaggactattcggggtg

SEQ ID NO: 232462 - DNA, 395 bp, Glycine max
aggacacattctacatatctcatggatcaccaactttgtccatagatgaatccattcaggccaggaagttccttcagtcatggaagaaggacgtgtttcctcaaagaccctcttcaattcttgtcatctctggtcattgggaaaccgcagttcccacggtcaacgtcgttgactccatcaacgagaccatctacgatttctatggcttccccaaacaaatgtaccagcttaaatatcctgcacctggagctccacaattggcaaggagggtgaaggaactactcaagaaatctggtttcagccatgttgatgaagatagaaagcgaggacttgaccatggtgcttgggttcctctctttttgatgtatccagaaactgacatccctgtttgtcag

SEQ ID NO: 232463 - DNA, 387 bp, Glycine max
gcaaagatggggaacacggagaagctgatgaaccagatcatggaattgaagttcacgtcgaaatcgctgcagcggcaatcgcgtaagtgcgagaaggaggagaaatcggagaagctgaaggtgaagaaggcgatcgagaaaggcaacatggacggagcgcggatctacgcggagaacgcgatccgtaagcgcacggagcagatgaactacctccggcttgcctcgcgcctggacgccgtcgtggcccgcctcgacacgcaggcgaagatgacgacgatcagcaagtcgatgggcaacatcgtcaaatcgctggagtcgtcgctggccacggggaacctccagaagatgtcggagaacatggactcgttcgagaacagttcgtgaaca

SEQ ID NO: 232464 - DNA, 381 bp, Glycine max
ctcacgcatttcctcgtttttttcttcccttttctctttctccggcgacgatctcagattccggccactcctctcgccggcgagcccttactcttccctcctccgtcgagccctctccgattcgaatcgttcccagcctcgcaccaccatgaatcccgaatatgattatttgttcaagcttttgctgattggagattctggtgtaggcaagtcatgtcttctcctgaggtttgctgatgattcataccttgacagctatatcagtaccattggagtggactttaaaatccgcactgtggagcaggatgggaagactattaaacttcagatttgggacactgcgggtcaggaacgtttccgaacaatcactagcagctatta

SEQ ID NO: 232465 - DNA, 396 bp, Glycine max
tgctaggcctaatccacaagggtcattccattatgggaagattactcctacaaaagtaattaagttggccaattcagcacctttgatcaatggaaagctccgttatgctgttaacagtgtctcatatgttaaccctgacacccctctcaagcttgctgattacttcaacattcccggagtcttcagtgtgaatttactccaaaactctccctcaaacggtccaggatacataggcacctcagtgttgcaaacttctctccatgattttattgaggttattttccagaacaacgagaacaccatgcaatcttggcatcttgatggttatgatttttgggtcattggtcatggtttcggccagtggacagatgctagcagaaaaacatataatctagt

SEQ ID NO: 232466 - DNA, 393 bp, Glycine max
tagtacttgacgaagcaaccgcagcagttgatgttagaacagatgcactcatacagaaaacaattcgagaggaattcaaatcttgtacaatgctcattatagctcatcgccttaacaccattattgattgtgatcggattcttttgcttgatggtggtaaggttcttgaatatgatacccctgaggagctgttgtcaaatgaaggtagtgctttctctaagatggtccaaagtacaggagcggcaaatgcccaatatttacgcagcttagcccttggaggggataagtcagaaagagaagagaacgagcatctagatggcaagagaaaatggcttgcttcttctcggtgggctgctgcagcgcaatttgctctcgctgttagtctcacctcat

SEQ ID NO: 232467 - DNA, 378 bp, Glycine max
gatgtttttagatctaaagaaatcaaactagcattcctcgtcggagctgggctgcaggctttccagcagttcacaggaataaacacagtgatgtactacagccctaccattgtccaaatggctggtttcaactctaatgagttggctcttcttctgtctctcatagttgccgccatgaatgctactggaacaattcttggcatttacctaattgaccatgccggccgcagaatgttagcactttgtagcttacgaggagtgtttgcatctttgatcgtcttgtctgtctcatttttacacgaatcatcatcttcgactggatggcttgcagtgctgggtttagtcatatacattgcatttttctcgccggggatgggg

SEQ ID NO: 232468 - DNA, 388 bp, Glycine max
gttttctaaatctcattcgtcacctgcaactatttggattgctgatttttgttaataccatatttactgatattggcgcatttctttgagaaagttactaattcctagatagaggcaaaaatgttgggaattttcaaggagaagttggttaaagcacccaaagagctgaacagtcgagcttcgttgaattcatgcactaagcctaagctaagtcacgaaatccttcaggatttcatgtcctgcaattcctccaatgctttctcaatgtgctttgggaatgaagctttgctagcctattccccttcaaacaagccctccattcagcaaaggttgtttagtggtttggataacatatactgtgtcgtcctgggtggcctgcacaacctta

SEQ ID NO: 232469 - DNA, 297 bp, Glycine max
ctttcactcttcttcgtctcaaacctcttcgttccttcgattcattccatttcttccaaaatggccaaagacccagttcgcgttctcgtcactggagccgcagggcaaattggatatgctcttgtccctatgattgctaggggagtgaagctgggtcctgaccaacccgtgattctcacatgctgaaattctcaacacaaatcgttatggggtaaaaggaattggtgagcgcatcctctctaaggtgtgtgctaaacgattggttaggcagatgggtatatgcttatggtgtgattc

SEQ ID NO: 232470 - DNA, 374 bp, Glycine max
ctatgatgatcacaaccatgaaagatttcccccaggtgacccaagcaagagggcatttgcctacttcgtacttacaggtggtaggtttgcttatgcctctgtggtccgtctccttgtcctcaagtttgtgctaagcatgtctgccagtaaggatgttcttgctctggcttcacttgaggttgacctctccagcattgagcctggcactacagtgactgttaagtggcgtggaaagcctgtgttcatcaggcgccgaactgaggacgatatcaagcttgcaaatagtgttgatgttggatctcttcgcgatccccagccggatgcagatagagtcaaggacccataatggctcattgttattggggtttgtacac

SEQ ID NO: 232471 - DNA, 216 bp, Glycine max
gtttgttgtgagctataagctattttatcgtgaggagaatatgaagttgtttgttttctttgttgctgcagtagttttggtagcatggccatgccatggcgcaggctaccaaaggttccctctccgaatgaaaactggctatggtgagcgttcttcggaggtaaaatgcgcaagttttaggcttgctgtggaagcacacaacatccgaccctttaa

SEQ ID NO: 232472 - DNA, 448 bp, Glycine max
ggtagtaagtgagtttcccttataaaattcaatccccaaaacaagtctcacaaaattgagaaaaatttagagagatcaacacacacaaacacaacaacatatggaggtgctaagggtgcaaaccatagcttccaaatccaaagatgctgccatcccagccatgtttgttagggcagagacagagcaaccaggcatcacaaccgttcagggggtgaaccttgaggtgccaattagtgatttgacggacccagatgaagggagagtggtgcatgagattttggaggcaagtagggacgggggcatgttccagagtgtaagccatgagataccaagtgatgttatgagaaagttgcaaagtgttgggaaaatgttctttgagttgccacaagaggaaaaagagttgaatgcgaagcctgctgggtctgattccattgaagggtatggcaca

SEQ ID NO: 232473 - DNA, 197 bp, Glycine max
tgctgtgaaccaatgttcctgcaattcaaggtatagatgctctcataatcctcacaagtgctgttccagagataaaacctgggtttgatcctaccaaaggacaaagaccagagttctattttgatgatggtgcatatcctgagcaggttgactggattgggcagaaaaatcaaatagatgccgctaaggctgctgga

SEQ ID NO: 232474 - DNA, 319 bp, Glycine max
cgtttttacatcatcactgtgtgaagataatatagatatggaaatctcccatgacatcaagatcaaggatgacaagctaggtggtgtgaaggaagagaagattaaggtagaagttgaactgaagaataaatcagttgagaaagagcatacaaaaagtaaagaagagaagaaacataaagatgaagataaatcaaagaaaaaaaagaaagagaaaggggaagaggaagatgaagagggagagaagaaagaaaaagatgtaaaagataaaggggaggatggtgaagagaaagagaaaaaggagaaggataagaaggagagg

SEQ ID NO: 232475 - DNA, 444 bp, Glycine max
atgagatgtatttttggcgatccacgggaagcaccacctcctcttgagaagctcagtcctgaagcaactgtttcctttctctggaaaggagatggttcatttgttgaggagcttgttcagtgcataactcctcatgttgaagaaagcatcttgaatgatctcaagtttaaaattcatgctcacgatccttcaaattctggagatattcataaagagcttcgtaaatctctgttatggttgagggatgaagtccgaaatcttccttgtacatataaatgtcggcatgatgctgctgctgacttaatccaaatttacgcttataccaagtacttctttataatacgggattttcaaaccattacatcaacacctgtctatattagtccaacttgacttaagtcccaagtacactaacaagctgggagcagaaattcaagagtatcc

SEQ ID NO: 232476 - DNA, 425 bp, Glycine max
  unsure (1)..(425): unsure at all n locations
aacaangatgagacgttgagaaaccgcactgggccaactaaaatgccttacactctgctctatccttctagtgaggagggattgactttcagaggaattcccaacagtatctctatctaagggctctctcattgaggttgctgtactactctgcctgtttttcaataatgtgaaataggaggaatatgattccttcatctacctacgtatggtcaagttacatttagggtggttgaatgttctcgtgtttgctgtagtctgtttttagaacagattgaggagaaagcaatagaggggatcacgcatgtttcaacgagtgatagctggcatgacaaagtgcaaactagaataaattatcatcctatctaaacgatttccattacaaaagaagagaaggaaggggggaggggggaggagggggagcg

SEQ ID NO: 232477 - DNA, 210 bp, Glycine max
atctgttccgtgttgtagctagctcctcgaaaatgctggcacgcctcgccgcgagtcgcttcaacgagatccgtcagattttccgtcagccttctagggctttctcaaccgctctgaactaccaccttgacacaccggacaacaaccctaaacttccatgggaattcaccgaggccaatcaagcaaaggttaaggagattttgtctcact

SEQ ID NO: 232478 - DNA, 726 bp, Glycine max
  unsure (1)..(726): unsure at all n locations
tttaggtggccgntagtagatagggaagaggaggagagtagggggggtagataaggcgaggaagagcagagcgggagtgtgggtgntaatctcatctgtagctataatcatgtgtttcagtcatcctcagtttgtttattgagaataagaaacgagacttgctctttcaatatgtatttaggagaataaaattatcttaggacatgaagtgcctacagcaagcggattctggattcatataggtggaatttttggtggaagtggattatcttgaatcctgtatttcatagatggacttcgtgtagcaatgagtatttaattatttagtcgaaagatgttgcatgtctaaaaggggaaaagaaagggcggccggcgagtagtggagctcgtgcgacccgggaattaattcggggcgggtagctgcaagggtggcagctttccctatagtgagtcgtattagagcttggcgtaatcagggtcatagctgtttcctgtgttaaattgttaaccgctcacaattccacacaacatacgagccggaagcataaagttgaaaagcctgggtggccaaatgagtgagctaacttcacataaattgcgtttcgctcactgccccgctttccagtggggaaaacgggtgttgccaagtgcgataatgaagcgaggaggggggggggaaaaggggagttgggtaattgngcgcaaggggggtggtgcttttaacag

SEQ ID NO: 232479 - DNA, 602 bp, Glycine max
tacgtaagctcggaattcgggtcgaggttctcccacaccacacccatgacactcctcctgctccttattctcctctttcacgcggcggaagccaagggacagtggcagctcctccacaaaaacatcggcattgtcgccatgcacatgcagcttctccacaacgaccgcgtcatcatcttcgaccgcaccgacttcggactctccaacctaaccctccccgacggaagatgccgcaacaacccaaacgagttggtcgtcaaacgcgactgcaccgcgcactccatcgaatacgacgtcgcagccaagacattccgcgctctctttgtccaagccaatgtctggtgctcctccggttcggtctctcgcgacggaacattagtccaaaccggtggcttcaacgacggctaccgtgcggtcagaaccttcaccccgtgccgctcgtgcgactgggcagaagttcagcatggactcgcggggcagagatggtacgccaccaatcacatcttgccagatggacgtcaaataattatcggaggaagaagacaattcaactacgagttttacccaagacacaaggcaagaatacttagagtttacctttt

SEQ ID NO: 232480 - DNA, 429 bp, Glycine max
gctagtttatcgtgaggagaatatgaagttgtttgttttctttgttgctgcagtagttttggtagcatggccatgccatggcgcaggctaccaaaggttccctctccgaatgaaaactggctatggtgagcgttcttcggaggtaaaatgcgcaagttttaggcttgctgtggaagcacacaacatccgagcctttaaaaccattcctgaagagtgcgttgaaccaacaaaggactacattaatggcgaacaatttagatcagactctaaaacagttaaccaacaagctttcttttatgctagtgaacgcgaagtccatcacaacgacatatttatattcggcatagataacaccgtactctctaatatcccatactatgaaaaacatggatatggggtggaggaatttaatggaaccttatatgatga

SEQ ID NO: 232481 - DNA, 690 bp, Glycine max
ccggagtgtgggagtggggaagtagggggctcgcgaggcgggcagtgggaggggcagggggttttcggggtgcatttcttaggaagatatgcagggaaaattgtgtaatcttcaatgtccctcatgagagtctcttaaatgttgggcagattttctatgtatagcatagccccatatccttgtgattgccattttttttgcaaaatgagctgagtgtagcatatgaacaacactttgcttatggtaatcaagatacaattcgggattgacttaggagagaaaaagaagggcggccgccgactagtgagctcgtcgagccgggaagtaattccgggccggtacctggaggcgtaccagctttccctatagtgagtcgtagtagagcttggcgtaatcaggggcatagctgtttcctgtgtgaaattgttatccgctcacaattccacacaacatacgagccggaagcataaagtgtaaagcctggggtgcctaatgagtgagctaactcacattaattgctttgcgctcactgcccgctttccagtcgggaaacctgtcgtgccagctgcattaatgaatcgggcaacgcgcggggaaaggggggtttgcgttattggccgcaagggggagttttcgtttgagcagttgaaaggggaacaagggagtgccgtgtgacggggggccctggaa

SEQ ID NO: 232482 - DNA, 517 bp, Glycine max
cgctatcctattccgcgttctctcatccatcatgaaatgaggaaagtccaagaccgaatctaagagagccgatgccaaacttgctgtgaataagaacggcgccgccaccaagactaggaaacccgccggaaaggggaaggcagcgaaagatcctaacaagccaaagaggcctccaagtgctttcttcgttttcatggaggaattcaggaaggtgttcaacaaggaacgtcccgacaacaaagcagtgtctgctgtgggcaaaggtggctgggcaagatgggagacgatgtctggaggctggaaaagcgccttatgtgggaaagtctgagaggagggaagtggagtgcgagaagaacatgagagcttataacaagaaacaggcggaaggtcctactggtggggatgaagaaaaatcggagaagtctgtatctgaggtgaatggataggatggttacgaggaagggcattgggaggaggaggatgacgaataaagaatgggctgatgataatagcattt

SEQ ID NO: 232483 - DNA, 251 bp, Glycine max
  unsure (1)..(251): unsure at all n locations
aagtccatgataaagaancgatacatgcacctgacggaggagtttctgaaagagaacccgaacatgtgcgagtacatggcgccatcgctggacgtgagacaagacgtagtggtgatggaggtgccgaagctgggaaaacaagccgcaacgaaagcgattaaggagtggggtcaaccaaagtcaaagatcacacaccttgtgttctgcaccagttcaggcgtgggcatggcccgggcaggttaccagctcac

SEQ ID NO: 232484 - DNA, 501 bp, Glycine max
  unsure (1)..(501): unsure at all n locations
tacgtaagctcgggagtcggggcggggagggtggnaccatggctactgctgaacattttatggcaacagatattgaatgggatccaactggaagatatgttgcaactgcggtgacttcagttcatgaaatggagaatggtttcaatatatggtctttcaatggcaagcatctatatcggattctgaaggatcacttctttcagttcttatggagaccaaggccaccatctttcttgactccggagaaagaggaagagattgcaaagaacttgaagaaatacagcaggaaatacgaggcagaagatcaagatgtttccttgctgctgagtgaacaggagcgtgagaagcgcaggatgttgaaagaagagtgggacaagtgggttaatgaatggaagcagatccacgaagaagagagtttacagaggcaaaagctcagggatggagaggctagcgatgaagaggaggaatacgaggcaaaggacatcgaggtggaggaagtga

SEQ ID NO: 232485 - DNA, 506 bp, Glycine max
cgacctcgcatcgcaccttcaacttaacctattccacttgtaatcgtaaacgctttgctagaagaagagacaaagtgtgtctgtgtgtgtgagagagagagcaatggctggctcgtgggcacgccgttctctgattgttctagccatcatttccttcggatgtctatttgcgatttccattgctaaggaggaagccaccaagttagggacggtcatcggcattgatcttggaacaacctattcatgtgtcggtgtttacaagaatggccatgttgaaatcatagccaacgaccaaggtaaccgtatcaccccatcgtgggttgctttcaccgacagtgagagactcattggggaagctgccaagaatcaggcagctgtcaacccagaaaggaccatctttgatgtcaagagacttatcggaagaaagttcgaagataaggaagttcaaaaagacatgaagcttgttccttataagattgtcaacaaggatggaaaaacttacattc

SEQ ID NO: 232486 - DNA, 169 bp, Glycine max
gtggttatcatcttcgtcgtcctctttcagagatctcttcgttctctacgccgcacgccgaaaccatgggcgggaaaagagagggtcctgcgatcagaatcgatctcggaaccacctactcttgcgtcggtgtgtggcaacatgaccgcgttgaaatcatcgccaagga

SEQ ID NO: 232487 - DNA, 412 bp, Glycine max
ttttctagttccaccaaaccagagcaaaccaaaatggcagcagcctcagcctcatgcatgatatcaacaccagccttatctccaaccatccaaaagcaccatcatttgaagccatccaacgtgtgcttccaaggtcttagacccctcgcaaggttcaccaaagcctcatcaaccaaagtgagcaccaccaccaaaagggttattccaaagggtggtgttagagctgaactcaactcaggccttgtgataagcctcagcactgggctctcgctcttctggggaaggtttgtgttcttcagcttccagagggagaacgtggcaaagcaagtgcctgagcagaacggcctcacacactttgaggctggtgatacacgtgccaaggagtatgtcagcctcgtcaaatccaatgacc

SEQ ID NO: 232488 - DNA, 525 bp, Glycine max
ggagcagtttcataccgagaccttggacaatgttcagaaactcactggcatcacccttgacattgtgagtggtttgtccaacatcctcgagaagttcgggttgaagtttaatcttaaacccgcgtctcgccgtcttctcggcaaggatgggttgcccacttggttctctgctgctgatcgtaagcttttgggtcgtggatggagatcacgtgtcaagcccaatgttgtggttgcccaggatggcactggtcagttcaaaaccgttgccgatgctattgcgtcctacccaaaggataacaaacgtagatacattatctacgttaaggctggtgtctatgacgagtacatcaccgttcccaagagttcaaagaacattctcatgtacggtgatggccctgctaagaccatcatcaccggtcgcaagaacttcgtcgatggtgtcaagaacatgcaaactggcactttcggcaacactgcagaaaggttcattgccaaggcaatgacattccagaacactgccggtgc

SEQ ID NO: 232489 - DNA, 513 bp, Glycine max
gaatatctatatccatatttaccatagtatttgcagcccttgttgagatgaaaagattgaaaacagctcaagagtctggtgttgttgatgaacctaatgcaactgttccaatgagtatatggtggttgattccccaatatttcttgttcggagtctctgaagtttttaccatggttggtctgcaggaatttttctatgaccaggtcccaaatgaactaagaagcatggggtcgtgctctctacttgagcatctttggagttgggagctttataagtggcgttctcagttctgtgatagagaaactgtctggcaaagatggacaagacagttggtttgccaataatctgaataaggcgcatgttgattacttttattggctacttgctggactcaatgtaataggattggccttgttcatttgctctgctaaatcctacatttacaatcaccagggaatcagacgagaattgtgaattgtgcggttctgtcaattttagctttactgtatggga

SEQ ID NO: 232490 - DNA, 340 bp, Glycine max
atcttccttgtcactgcccgtgtgtcgccgccatggccaccgtcaccacccaagcctccgccgcaattttccggccatgtacctcgaaatcgaggtttttgaccggctcttccggtaaacttaaccgggaagtgactatgcggccaatggggtgccctccttctgcctctttcaaggttgaagccaagaagggagagtggttacctggcttgggctccccaacttacctcaatgggactcttcctggtgacaatgggttttaccctccgggggtatacgacggaccccagagaacttgaggtggtacgttcaaacccgagcttgttaaagggaccttggg

SEQ ID NO: 232491 - DNA, 432 bp, Glycine max
cttgagaaacattattcccattgctatatattatggctagcatgaaggttacatgggtggttgtgatcatgtgcatggccgtggtgggtgcaccgatgatggcgcaagccatgacatgcaatgatgtgacagtgaacatggcacagtgcctatcctacctgatgcagggaggaacaccttcaacactttgctgcagcggagtcaagaacattcttggctctgctgtcaccaccgttgacaaacaggctgtgtgcagctgtctcaaggcggatgctggcagggtaaaacatcaatgaccagtgatgctcacgcactccctggtttctgcaaggtcaatgtcccttacaagatcagccgctccactaactgtgcaagcatcaggttctgaacaagccatggacagatttgctcatttctgcagcgggatactga

SEQ ID NO: 232492 - DNA, 412 bp, Glycine max
acaatcaatcaccgcttcctctctcactttccctaacttcgaagtcaccaagttcttatatttcaagacaaaaggaatggtgggtttatctcttggagaaacacatttcatccaaggtggcattgctcaagatcttcgttgtgatggtagaaagagattgacatatcgaccaatctctgttgaaactggggtgattccccagaccaatggttcagcaagagtcaggagggggtggcacagatgtcagtgggagcgtgtaagggtgaacttgggagggcgcaagcttggtgcaacctgagaaaggagaagtcgctagatatgtggagtgcagttcaacagcagagccagcttttgagggtagagggggtgatgagttggaagcagaactgtcaaatggtcgtcaacgctgtct

SEQ ID NO: 232493 - DNA, 360 bp, Glycine max
tctgcgcaaacttaaaaagctgtttctttttctcgatcctactgcttctctttttagcaactgttgctctgctctacgttaaggacaagcaagttgaagcaattcctctggatgatgccactcaaccctcttgtttctttcagcttttcggtgctctgaaagagctcaagagaccgatgtggatgctgatgctggtcacagctgtgaactgggtggggtggtttccttacttccttttcgacactgactggatgggtcgtgaggtctacggtggaactgctggggaagacgcgtaagcgaagggagtgcgcgtgggatcattagggctgatggtaaacgccgtcgtgttgggcttcatgt

SEQ ID NO: 232494 - DNA, 521 bp, Glycine max
aagatgaaaatgaaagtgcttgttttgtttgttgctacagttttggtagcatatgaatgccatggctcagactaccagaagttccctctccaaatgaaaactgggtttggtgggcaatacagcaatgaggtggcatgtgccagttggaggcttggcgtggaagcaaacaacgtagtcaagtggcaaactgttcctgcagcttgcggagagtacatagctgactacgttctaggagaccaatatagatcagattccaaaacagttaaccaacaagcttatttctatgctaaatccctcaaactcaccaacaaagatgtcgttgtcttggacgttgacgacactactctctctaatctccagtattttgctaaccatggatttggtgtggaaccacacaatacgacggcgtttaagaactgggttcttgatggcgaggcattcgcactgccagagactcttaaaatgtacaacaaactgttggctctcgggatcaagattgtattcttatcagaaagacactg

SEQ ID NO: 232495 - DNA, 420 bp, Glycine max
tgttcaagattaggttgccctgtctgttctctcacacactcactctccttctctctcctattgcggctaaggtttgggtttttcactttcagcctctccattccttcaaccttcttcttctctttgatctctgatggagacgttccgtgtttagtagcaagggttagttgaggccttgtgtttggaaacgtacggtgtcgttttggagttgggaaaacagataattctgagagatgggaaccaggaacccttttgatttggtgggtgacgacgctgaggacgcttctcagctcatcgccgccgaacagctcagagcggcggctgctgctgcgggtgccaccgccgctcccaagaaggcgccggctcagcagattaagccggctcagctccctagcaagcctcttcctccggctcaagctg

SEQ ID NO: 232496 - DNA, 697 bp, Glycine max
gagatgaattaggtggcctatagaagagctatgacgtcgcatgcacgcgtacgtaagctcggaattcggctcgagggctgctgctgcattgaagggttcagatcatcgccgtgcaacaaatgtcagtgccagactggattctcaacaaaagaagctcaaccttccaatcctgccaaccaccactattggatccttccctcagactgtagaactgaggagggtacgccgtgaattcaaggctaacaagatctccgaggaagagtatgtaaagtcaattaaggaggaaattcgcaaagttgttgagcttcaagaagagcttgatattgatgttcttgttcatggagaaccagagagaaatgatatggttgagtacttcggtgaacaattgtcaggctttgccttcaccgttaatgggtgggtgcaatcctatggttcccgttgcgtgaagccaccgatcatctatggtgatgtgagccgcccaaagccaatgaccgtcttctggtcatctctggctcagagctttaccaagcgcccaatgaagggaatgcttaccggtcctgttaccattctcaactggtcctttgttagaaatgaccaacctagattctgagacacccagattcacactcacatgtgctactcgaacttcaacgacatcaaccactccatcaatcacatggacgccgatgttatcacc

SEQ ID NO: 232497 - DNA, 481 bp, Glycine max
tgttggtttacaagagcaggtttttgttcggaaggtgattgagctgcatgacaagtacctggcatatgtgaatgattgtttccaaaatcatacacttttccacaaggctcttaaggaggcttttgagatcttttgcaacaagggtgttgctggaagctcaagtgcagaactgcttgccactttctgtgacaatattcttaagaaaggaggaagtgaaaaattgagtgatgaagcaattgaagaaactcttgaaaaggttgtcaagttgcttgcctatattagcgacaaagatttgtttgctgaattttataggaagaagcttgctcgaaggctcctttttgacaagagtgccaatgatgatcatgagagaagtattttgacaaaactgaagcaacaatgtggtggtcaatttacctcgaagatggaaggaatggttacagatttgacattgggaaaggagaatcaaacaagctttgaggag

SEQ ID NO: 232498 - DNA, 460 bp, Glycine max
attttcctcatttccctccgaacatatcatatcacacacccatatagcccaaaagccacaacctgcgaaatcaaaaaagaaaaagaaagagaaaacaacaacaacaacaacaatatcgtattccattccataatgttgtgtaaactggttccggtgccgcgcaagaaaaaacccggtttgaacccggtttaccttaacgtctacgacctaaccccaattaacggttacgcttattggcttggcctcggagtttaccattctggtgttcaagttcatggggttgaatatggatttggagcaaacgaacgcgacacgactgggatttttgaagtggagcctagacactgccctggattcaccttcaggaaatcaattttcattggggtcaacggataatggggccgaaaggatgttcgcgcgttcaaggcgaagatgggtgaaaaagattcggggaaaacct

SEQ ID NO: 232499 - DNA, 477 bp, Glycine max
ttttgggacaagagtttatcagagttgcaatgaacattgatcctgagtgtaaaatgataaaaaaggaagaagggcgaattgagaaatgggcactgaagagggcctttgatgatgaagaacatccttatctgccaaagcacattttatataggcagaaagaacaattcagtgatggagttggctatggttggattgatggccttaaagctcatgctgagaaacatgtaactgacagaatgatgctcaatgctgccaacattttccccttcaacactccaaccaccagagaggcaataacactatagaatgatatttgagagggtcttccctcagaactcaagcaaggctcactgttcctggaggaccaagtgttgcatgtagcacagcaaaagctgttgagtgggatgctgcttgggctaacaaccttgatccatcaggtagagcagcacttggagtgcatgcatcagcttaaggaaa

SEQ ID NO: 232500 - DNA, 512 bp, Glycine max
  unsure (1)..(512): unsure at all n locations
gaatatcctatcgagggaatcatatttgcttcggaagatatgctcttcaagcacttgagccagcttggataacatctagacaaatagaagcgggacggcgggcaatgtcacgaaatgttcgccgaggtggacaaatatgggtacgcatatttccagacaaaccggttacagtaagacctactgaaacacgtatgggttcaggaaaaggttctcccgaatattgggtagctgtcgttaaacctgggaaaatactttatgaaatgggtggggtaccagaagatatagcaagaaaggctatttcaatagcatcatccaaaatgcctatacgaactcaattcattatttcagggtaataaattagaaccaaaggaaagaggtctttaagatgaaaacaaaaaatgcaaatgtaggttcctttttttgaacacanaatatttttacttccattttttgactgaaagaataaaagaatgatatgattcaacctcaaactcatttgaatgtagctgata

SEQ ID NO: 232501 - DNA, 461 bp, Glycine max
agcttttgttactttgtgacaaatggagggtccttagttctgtttctctttcttctctctgtgctttcaagcaagttctcaaatcactcgtcgtcgtcaggcttctgatctgctaattctcaaggtattcaaaattgggtggttttcgattgaactgtgatgtccaagccactgctaggcatagcggaagaggaaggtcaaagcaatgtcactttgttggtttcgtcgtcaggcagcatggaaagtgtgtgcctgaatagctcaagggtgaaaggagggaactacatggggttatctgattggtcatctgtagagaaggtccgcggcgtccttctcaggtggggactaagagcaatctgaacctcaaggctactgagctcagactggggcttccggggtcgcaatctcccgaacgagattcagatctttgcttgagaagttcgattcagtttgatgaaaag

SEQ ID NO: 232502 - DNA, 426 bp, Glycine max
tattaactcctaccccaagcatcaccagggtagatatgttatctacgttaaggctggtagctatgatgagtacatcaccgttgacaacaagaagcccaatcttctcatctacggtgatggcccctcaaagaccatcatcactggccgcaagaactttcacgagggtaccaagacaatgagaaccgccaccttctcgactgttgctgaagatttcatgggcaagtcaattgcattcgagaacaccgctggtgcagaagggcaccaggcagtggcactccgcagtgaaggtgatggttcagtgttctttgatgtgccgatgcgtggttaccaggaggcattgtatgcccacgcccatcgtcagttctaccgcaactgcgaaatctctggaacaattgacttcagcttcggctactccaccaccttgat

SEQ ID NO: 232503 - DNA, 211 bp, Glycine max
attctcttcattccatgggtttgcccaaccagcagaccgtggattaccctagtttcaagctcggtatcgtcggcgatggtggcacaggaaagacaacctttgtgaaaaggcatctcaccggagaattcgagaagaaatatgagccaaccatcggtgtggaggttcacccattggattttttcacaaactgtggagagattcgagtttactg

SEQ ID NO: 232504 - DNA, 201 bp, Glycine max
cgacgggagaatggttgatggtcgcgaaataacggtccagtttgcgaaatatgggcctaatgctgaaacgattcacaaaggaaggattattgaaacatccccaagatcaaggcgatcaaggagccgtagcccaaggaaaagggatcgtgatgattacagagacagagattataggagaagaagtcgcagcagaagttatga

SEQ ID NO: 232505 - DNA, 382 bp, Glycine max
atctcatgatccagaagtgagaaagggaccatggatcatggaagaagacttgatcttgataaactatattgcaaatcacggtgaaggtgtttggaattctttagccaaagcttctggtcttaaacgaacgggaaagagttgtcgactccgttggctaaactaccttcgtcctgatgttagaagaggaaacattacacccgaagaacagcttttgatcatagaacttcatgcaaagtggggcaataggtggtccaaaattgcaaagcatcttccaggaagaactgacaatgagattaagaacttctggagaactaggattcagaagcacattaagcaagctgagacttcacaacaacatggtaattcatccagagaatagtaa

SEQ ID NO: 232506 - DNA, 375 bp, Glycine max
agcagaacttggacataaccttgaggctctcgacgacgcctggaacgacctcgtgctcgagaccggagtactctccctcggtgttctcgcgaatgacgacgatgtcgacgttgtggtggcgggtgggcaagccgggcaagttgaagcaattgacgagggaagcgtagagatcgaggtcctttctgagctgaacgttgagggagctcacacccccacccaccggagtcctcaaaccacccttcaagcacaccttgttcttccgtatcgaatccagcacctcctccggcacacgcctcatgtccccgtgcacatcgtacttctcgaagtatatgggggcgtgcatcgcctccatcacctgctccaccgcatgagtca

SEQ ID NO: 232507 - DNA, 461 bp, Glycine max
aaagatgaagctcgagttcgcaaatgtgctacttctgtgccttgtccttagctcttctttcttgggaatctcaatggctggttctcctttctgtgactcaaagtgcgcgcagaggtgtgccaaagctggggttcaggacagatgcttgaggttttgcgggatctgctgcgagaagtgcaactgtgtcccatctgggacttacgggaacaaggacgagtgcccttgctacagggacatgaagaactccaagggcaagggcaaatggccttgaagaatatctaagttcatcatcacactccattccaatagactaacttgtagtgtatcgtcagccttccgtttcagagtattgcattatgccacggatctatgtacctacccttcaacttaagtattccgtctagttaattagcatagctacccttcaacttatggtgttcgacctagtttattagcttaat

SEQ ID NO: 232508 - DNA, 511 bp, Glycine max
tagctagccaaccagagtaagatctaaagatatttcttatatatcctatggtccgagagtgcccttgttctgcgccaaccctttcttccacatcttgcgtttcaacctcttcctctcttgagtccccttatcatcaaatacccttcttcttcaacctccaccaaattcaacccccacataacaaatctcctcccatcccatttttcagcaccaaagtttgaaacttttctcaattgggttgtagagagtttgactcagcaatttttagttttttagtttgagtttctctaaccaagtagaagtgcagtaagtaaatgtccaacatcgtcgtggtgttgatgtttgagattcatgtatccgattctcagtgaaatcttcttttccgggtgtatgatcaattccactgttaggcgcaggacccatttagttcaatccttctcagttgccttcctcgattggttgtactacgtttcatgaattctaacccttccttaacttaataatcatctat

SEQ ID NO: 232509 - DNA, 463 bp, Glycine max
atggagatcatttacagggctaggtgcttctgaaatttgcaaggttgaagaacttgagtatgcagagctaccaggctctggggatagctgttgtaaacttaaacttagatttctagatccttcttcgtgtgtgcatggcaaatcgtttaaattaactctacctgaattgattaacttcactgattttgttattgagaaaacatggtatgatactgccatgaagagaaattggtcgtcaagagataaatgcatgggctggtggggaaatgaagatgggaaaggtatcgggtccagtacaagactgatcccaccgagaatcatctgcaaaatccgtgggaactatatgattctgagatgctatgggagcatccccacattgatcatgagatcagagataagctgctttcctaattcaccaaattagaccgcagggagaggtttgatatccaagcactggaccaag

SEQ ID NO: 232510 - DNA, 379 bp, Glycine max
aacctaggaagttggaagtcatggcagcaacattgatggcagcaacaacaagttctggtactcttaaagcaactcctttccttggccaaggcaagggtgccaatgccaatgctcttagggatgttgtctccatgggaactgggaagtacaccatgggcaatgatttgtggtatggaccagacagagtgaaatacttgggacccttctcagctcagacgccttcatacttgaaaggagaattccctggggattatggatgggacactgctggcttatctggtgacccaagaacatttgccaaagaacaggggtcttgaggtgatccatggggcgatgggccaagcttggagcactaggatgcatcaccccagaggtgcta

SEQ ID NO: 232511 - DNA, 395 bp, Glycine max
tctcagagaaaaagaaacatcgacaaggatgtctggaagaggaaagggaggcaagggtctcggaaagggaggagccaaacgacaccgtaaggttctgagggataacattcagggaatcaccaagcccgcgattcgccgtctggccagacgtggtggcgtcaagcgtatcagtggtcttatctatgaagaaactcgcagtgttctcaagatctttctagagaacgtcattcgcgacggctgtcacctacactgaacaggctcgccgcaagaccgtcactgccatggacgttggttacgccctcagggaggaggggaggaccctctacgggattggcggttagacaattggggatttcagcactgcgtcctcgattagggtttcttatagtgtcaat

SEQ ID NO: 232512 - DNA, 455 bp, Glycine max
gtgcgcagaataaaatttctcatcgacgatggcgaataccttacaacgcgcccttcgcgccaccatggcccggccgttctccaccggcgcattggccgaaattaagcgaggcgagatcggaatggtttctggaattcctgaagaacaccttcgtaggagggttctaatttactctcctgctagaactgcatctcaacaaggatctggaaaggttggaagatggaagatcaacttcttatcaacccaaaagtgggaaaatccactgatgggctggacatccactggggacccctactctcatgttggtgattctgccttgacttttgatagcgaacaagcagcaaaagcatttgcagagaaacatggttgggagtaatcggtcaagaagccccacacaccattgctgaaggttaaatcatacgcggacaattttaaatgggaagggccccccaaat

SEQ ID NO: 232513 - DNA, 490 bp, Glycine max
ctcgagccgaatcggctcgagcggctcgagcgttcacataccacgtagaaacagttcaatcattcttagccctaagcagacttcacatactcatccacttagtggcagtgttgtctctctgttactaccgcatcacccacttcttcctccaacctccaacagcgccatggcttctcatgactgctgcggagcttcttctctcgctgctctggttcttcaaccaagccttccggtggcgaccggtgtcgcggagcgtcatgactgagaagcttccgagtgaggagaagctgccggggcttgacatcttcgtgtgcacgctcgatcccgagaaggagcccaccgtggaggtcattggcaccatcatctccgccgtgtccaaggattaaccctccgacaagctttccgtctatctctccgacgacggcgggtgcgacgtgactctctatgggatccgagaggctgctgagttcgccaaaggattgggttccgt

SEQ ID NO: 232514 - DNA, 726 bp, Glycine max
tgaataatgtggcggccttgaagagctatgacgtcgcatgcacgcgtacgtaagctcggcattcggctcgagcttcttccacaggagactatgttgcagacactcccttttgagagactaccccatcctcgggatgctgccacaattacgcttcaacctgtggagtgcccatgattttttcactgagatattgaaacgggatggaccaagaggtgagttcactggaccttggattaccagcatggactaattggtcacttgttagcccagcaaggtccaccagatgctgtccaggaatttccacaactacgtcaagggacccgagtttcgtcacatttttcatgccttcggagacgggattttcaccggctgactttgaagcatggcagtacaacagggaatatcttccattctctctttaaccagcatggctttcaagtgtctttagttgtcaccattcaaaccaatgtgcagaattgtcaccttcgaaccatggggtcagctagagcaccatggaagcattgtggctttgctagtaggtctgcaatcagcgtcacgttcggggattggaggtcgaaaagtatcgtggaactgacctcttgtgcacattcgacggccctttccctgagccgcaagatggaaccccatgggattccaaggtttcctgttatagggtcccattcccaatggcattgccgtatttatggtccaattgggtaaagtctg

SEQ ID NO: 232515 - DNA, 429 bp, Glycine max
gttcagttgagcatcaacgttgaatctcaaacatgaagcaccatcaacaaccatgtccggaacaggaaagggaagcaagggtcccgtcaagggaggagccaacccacaccgtaaagttctgatggacaacattcagggaatcaccaatcacacgaatcgccgtctggccacacgtggaggcgtcaatcgtatcaatggtctgatctatgaataaactcgcggtgttctcaagatccttcgatagaacgtcattcacgactctgtcacctacactgaacacgctcaccaggaaaccgtcactgccatggaacatgcttactcccccaagaagcaagggaggaccctctacggatttggcggttaaacatgtgacgatgtcaccactgcatcctcgattatggattcgtaaaggggcaccttcgatcttta

SEQ ID NO: 232516 - DNA, 319 bp, Glycine max; identical to SEQ ID NO: 232474

SEQ ID NO: 232517 - DNA, 325 bp, Glycine max
gcacgcatacgtaatctcgcgcattctgctcgactaagcatatacaacctcagaatgacgacaccttaagaaacatcactgggccatctaaaatgccttacactctgctctatcctactaatgaggatggattgactttcaaatgaattcccaacagtatcgctaactaaaggctctcgcattgaggttgctgtactacacaaggtgtttttcaataatggtaaatacgaggaatatgattctgtcatctacctacctatggtcaagttacatttggggtggttgaaagttctcgtgtttgctgtactctgtttatataacagat

SEQ ID NO: 232518 - DNA, 304 bp, Glycine max
cagaaggccgttgagaggctcgacgggagaatggttgatggtcgcgaaataacggtccagtttgcgaaatatgggcctaatgctgaaaggattcacaaaggaaggattattgaaacatccccaagatcaaggcgatcaaggagccgtatcccaaggaaaaggcatcgtgatgattacagagacagagattatatgagaagaagtcgcagcagaagttatgataggtatgaacgtgacaggcatcgcgggagagacaaagattatcgtcacagaagtaggagccgtagtgccaatcttgattaca

SEQ ID NO: 232519 - DNA, 324 bp, Glycine max
gctagtttatcgtgaggagaatatgaagttgtttgttttctttgttgctgcagtagttttggtagcatggccatgccatggcgcaggctaccaaaggttccctctccgaatgaaaactggctatggtgagcgttcttcggaggtaaaatgctcaagttttaggcttgctgtggaagcacacaacatcgcagcctttaaaaccattcctgaagagtgcgttgtcccaacagcggactacattaatggcgaacaacttagatcaaaccctaatacagttagccaacaagcgttcttttatgctagtgaacgcgaaatccatcacaa

SEQ ID NO: 232520 - DNA, 227 bp, Glycine max
agaaaatagctgttgattatatatatgcatttcttaggaagatatgcagggaaaattgtgtaatcttcaatgtccctcatgagagtctcttaaatgttggtcagattttctatgtatagcatagccccatatccttgtgattgccattttttttgcaaaatgagctgagtgtagcatatgaacaacactttgcttatggtaatcaagatacaattcggaattgactt

SEQ ID NO: 232521 - DNA, 452 bp, Glycine max
aatcaccgcagtctgctccaccccaaacactaattccctatcctaatccgctttctctcaaccatcatccgcagaggtaagtccacgacagaatctctcataaccgacgccaaaattgctgtgaataaaacaggggccgccatgaacacgaggaaaaccccccggtcagggaatgcagtgaaggatcagctcaccacacaaaggagttcaaataccttcccaaatggtacagacgcattcaggcatgtgttcaaccacgaacatcagtggatcagatcgtgatcagctataggacggttccacctgatcaaacaccctgttgcaattatttttgttttctcaaagtgtatgaggttccaacctgtagtttgagtgggaataggacttgttggactagggaccattttgttttgtttatatggtcccaccaaaccaaatttaaggtctctcct

SEQ ID NO: 232522 - DNA, 330 bp, Glycine max
ctcaaagaaaagttcaagcgcatgtgtgaaaagtccatgataaagaagcgatacatgcacctgacggaggagtttctgaaagagaacccgaacatgtgcgagtacatggcgccatcgctggacgtgagacaagacgtagtggtgatggaggtgccgaagctgggaaaacaagccgcaacgaaagcgattaatgagtggggtcaaccaaagtcaaagatcacacaccttgtgttctgcaccacttcaggcgtggacatgcccggagcagattaccagctcacgaagcttctcggcctgaggccctccgtgaagcgcctcatgatgtatcag

SEQ ID NO: 232523 - DNA, 437 bp, Glycine max
ttcagactgttttggacgttattaactcataccgcaagcatcatcagtgtagcaatgtcatctacatgaaggctgttaactagtgagtgagtacatgcaccgttgacaacatgaatcccaatcttctcagctacggtgatggcctctcaaagaccagcatcactgtgacgcatcaactttcacgatggtaccaataccatgagaagggccaccttcacgactgttgctgaacatttcatggccaaatcagttgcattcgagaacaccgctggtgcggttcgacaccgatcaatgacactccgcatgcaaggtgatcgttcactgttctttgattgccctatgcgtggttatgagtacacattggaatcccacgcctatcgtcaattctaccgcaactgcgaaatctctggaacaattgtcttcagcctcggctactc

SEQ ID NO: 232524 - DNA, 295 bp, Glycine max
aaattaagcaccacaccactctccaatatccccaacatggctcaagtgggttctctatcttccgaaatggggacactgaatcatgtcctagccctagtggaggcattccgagcatttgacgcggacaacgatggccgaatcacgcaggcagagctaggaggaatcttggggtcactcgggtacaaccctagcgagcaagaagttatggcaatgattgagcacggcgacaagaacagagacgggttggtgagcatcgacgacttcttggagatgattaccaaggatttgggaggtg

SEQ ID NO: 232525 - DNA, 548 bp, Glycine max
cgacctcgcatcgcaccttcaacttaacctattccacttgtaatcgtaaacgctttgctagaagaagagacaaagtgtgtctgtgtgtgtgagagagagagcaatggctggctcgtgggcacgccgttctctgattgttctagccatcatttccttcggatgtctatttgcgatttccattgctaaggaggaagccaccaagttagggacggtcatcggcattgatcttggaacaacctattcatgtgtcggtgtttacaagaatggccatgttgaaatcatagccaacgaccaaggtaaccgtatcaccccatcgtgggttgctttcaccgacagtgagagactcattggggatgctgccaagaatcatgcagctgtcaacccagaaatgaccatctttgatgtcaagagacttatcggaagaaagttcgaagataaggaagttcaaaaagacatgaaacttgttccttataagattgtcaacaaggatggaaaaacctacattcaggtgaaaattaaggatggtgagaccaaggtgttcaaccctg

SEQ ID NO: 232526 - DNA, 387 bp, Glycine max
gtggtgccttagcgctgtggttatcatcttcttcttcctcgttcttagatctcttctttctctaagccgcacgccgaaaccatggccggaaaaagagagggtcctgctatccggatcgatctcggtaccaactactcttgcgtcggtgtgtggcaacatgaccgcgttgaaatcatcgccaacgaccacaggaacacaaacacgccgtcttacgtccgattcactgagaccgagcgtctcatcggtgatgcggccaagatatcagtcgccaagaatcccatcaacaacgttcttcgatgccaaaaaggtgaattggtcctagattcagtgattcctctgttcagaatgatatcaaattgtggcctttcaaggtcattcctggtgctg

SEQ ID NO: 232527 - DNA, 547 bp, Glycine max
ctttgttattacctctttccaaagtccaaattttctagttccaccaaaccaaaccagaccaaaatggcagcagcctcagcctcatccatgatatcaacaccagccttatctccaaccatccaaaagcaccatcatttgaagccatccaacgtgtgcttccaaggtcttagacccctcgcaaggttcaccaaagcctcatcaaccaaagtgagcaccaccaccaaaagggttattccaaagggtggtgttagagctgaactcaactcagcccttgtgataagcctcagcactggcctctccctcttcttgggaaggtttgtgttcttcaacttccaaagggagaacgtggcaaagcaagtgcctgagcagaacgggctcacacagtttgaggctggtgatacacgtgccaaggagtatgtcagcctcctcaaattccaatgaccctgttggattcaacattgttgatgtcctggcttggggctccatttggcaggttgttgcttaatacatcttggccaccactaacaaggggtatgaccctgcattc

SEQ ID NO: 232528 - DNA, 560 bp, Glycine max
gagatactgtaattcttactcttattcatcgatgtcctgcatgtcgtccaaccattagtttcagggttttctcatcgagaattctaccaatcgtctccgcttcacatccttatcgggtatagttcgcactgaatcaatcacgtgacatatttcagatgatcgcttgtcgagaggtccgtcatctcactcaatggtattcagttcctggaccatgctagagagacagtactgactacgttctacgttaccaatgtaggtaagattgccagttcagttagcggacacgcttagttccaggctaaacccctcaagatcatcagtagcggaggtatttatcgttggccgttgactacactattcatctccagtctcgactaattttgctaagcagttgatttggtgtggtatcacacagtacgacggcatttaataaatgggttcttgatgacgaggcattctcactgacaaagactcttaaaatgtacaaaaaatcgtttgctctcgggatcaggattgtattcttatcagaagaaccactgagtcctagggatgtaacagcc

SEQ ID NO: 232529 - DNA, 457 bp, Glycine max
caatatagcccaagccctatacaaccaaaccctaacacacacccatttgattcagtttccatggctagcctcaaggttgcatttttggctgcagtgctctgcatggttgtggtgagtgcacccatggcacatgcagctatcacgtgcgggcaggtgacgaatagcctgatcaattgcatcggttacctccagaacggaggaacgccgccgtcgagatgctgcaacggagtgaagagcctcaatgccgccgccaagaccaccgccgaccgccagacggcgtgcaactgcctcaagtcggccgccagccaaatctccggcttcaaagccaacaacgccgcctcgctccccggcaaatgcggagtctccatcccctacaagatcagcacctcgaccagctgcgctaccatcaaggtttgaagaaaaagtcatggtcgcaggaaaccggaaactactcact

SEQ ID NO: 232530 - DNA, 411 bp, Glycine max
  unsure (1)..(411): unsure at all n locations
actttccacttgtctccgaattagttatcttgagaaacattattcccattgctatatattatggctagcatgaaggttacatgggtggttgtgatcatgtgcatggccgtggtgggtgcaccgatgatggcgcaagccatgacatgcaatgatgtgacggtgaacatggcacagtgcctatcctacctgatgcagggaggaacaccttcaacactttgctgcagcggagtcaagaacattcttggctctgctgtcaccaccgttgacaaacaaactgtgtgcaactgtcccaaagcggatgctgctangtacaacatcaatgaccagtatgctcaaggaatcccctggtttctgcaaagtcaatgtcccttacaagatcagccgctccactaactgtgcaagcatcaaggt

SEQ ID NO: 232531 - DNA, 384 bp, Glycine max
gccgcacatcacttcgttgtgtcatcttctttcaacaatcaatcaccgcttcctctctcactttccctaacttcgaagtcaccaacttcttatatttcaagacaaaaggaatggtgggtttatctcttggagaaacacatttcatccaaggtggcattgctcaagatcttcgttgtgatggtagaaagagattgacatatcgaccaatctctgttgaaactggagtgattccccagaccaatggttcagcaagagtcagaatgggtgccacagatgtcattgccagcgttaaggctgaacttgggaagccaagcttgttgcaacctgacaaaggaaaagtctctatatatgttgattgcagttcaacagcagagccagcttttg

SEQ ID NO: 232532 - DNA, 458 bp, Glycine max
aaggtgagaagaagatcaaggagcagtttcataccgataccttggacaatgttcagaaactcactggcatcatccttgacattgtgagtggtttgtcgaacatcctcgagaagttcgggttgaagtttaatcttaagcccgcgtctcgccgtcttctcggcaacgatgggttgcccacttggttctctgctgctgatcgtaagcttttgggtcgtggatggagatcacgtgtcaagcccaatgttgtggttgcccaggatggcactggtcagttcaaaaccgttgccgatgctattgcttcctacccaaaggataacaaaggtagatacattacctacgttaaggctggtgtccatgacgagtacatcaccgtttccaaaagttcaaagaacattctcatgttaggtgatggccctgctaataccaacatcaccggtcgcaagaaattcgtcgatggt

SEQ ID NO: 232533 - DNA, 368 bp, Glycine max
ggctgctgctgcattgaagggttcagatcatcgccgtgcaacaaatgtcagtgccagactggattctcaacaaaagaagctcaaccttccaatcctgccaaccaccactattggatccttccctcagactgtagaactgaggagggtacaccgtgaattcaaggctaacaagatctccgaggaagagtatgtaaagtcaattaaggaggaaattcgcagagttgttgagcttcaagaagagcttgatattgatgttcttgttcatggagaaccagagagaaatgatatggttgagtacttcggtgaacaattgtcaggctttgccttcaccgttaatggggtggtgcaatcctaagggtcccgttgcg

SEQ ID NO: 232534 - DNA, 374 bp, Glycine max
tgttggattacaagagcaggtttttgttcggaacgtgattgaactgcatgacaagtacctggcatatgtgaatgattgtttccaaaatcatacacttttccacaaggctcttaatgaggcttttgagatcatttgcaacaatggtgttgctggaagctcaagtgcagaaatgcttgccactttctgtgacaatattcttaagaaaggaggaagtgaaaaattgagtgatgaagcaattgaagaaactcttgaaaaggttgtcaagttgcttgcctatattagcgacaaagatttgtttgctgaattttataggaagaagcttgctcgaaagctcctttttgacaagagtgccaatgatgatcatgacagaagta

SEQ ID NO: 232535 - DNA, 373 bp, Glycine max
agaagccagagtatcacttttgggcacagagtttatcaaagttgcaacgaacattgatcctgactgttaaatgataatcaacgaaaaagggcgaaatgcaaaatgcgcaatgaggaaggcctttgtggatgaataaaatccttaactgccaaagcatattttatataaggaacatcaacaaatcactgatagagatggctaaggttgagactgatagccttaaagctcatgctgagaaaccttgacctgacagaatgattgcacaatgctgccaacattttccccttcaatactccaaccagcaagagaaacataccactatacaatgatcattgataggttcttccctcagaaatcaccaaggctcactgtt

SEQ ID NO: 232536 - DNA, 703 bp, Glycine max
ttaatgtaggcggccctatagaagagcaatgacgtcgcatcgcatcgttcgtctcggaattcggctcgaggtaaacaacatagaggaagaatgacaggaatatcctatcgagggaatcatatttgcttcggaagatatgctcttcaagcacttgagccagcttggataggatctagacaaatagtaacggcatcgaggccagtgtcaattcctgttcggtaacgggaggcgtatcaggtttccctatagtgagtcgtattagagcttggcgtaatcatggacatacctgtgtcttgaggaaaatggtcacccgctcacagttccacagaacatacgagccggaagcataaattgtgaaatgtgtggtgtaccaatgagatgatccaactcacagctatttgcgttaacatcatccaaaatgcctatacgaactcaattcattatttcagggtaataaattagaaccacaagaaagaggtctttaagattagaacaaaaaatgcaaatgtaggttcccttttttggacacaaaatatttttacttccaattttttgacggaaagaataacaagatgatatgattcaacctcaaactcattttaatgtaaccgagtatagcggagcatgcaaactgatgtgtattcgaatcctaagagctagtaatccacgatagcttaactggtgccattgttgttccgtaatg

SEQ ID NO: 232537 - DNA, 568 bp, Glycine max
  unsure (1)..(568): unsure at all n locations
aatgcatgctgtcgagcttttgttactttgtgacaaatggagggtccttagttctgtttctctttcttctctctgtgctttcaaccaagttctcaaatcactcttcttcttcaaccttctgatctgctaattctcaaggtattcaaaattgggtggttttcgattgaactgtgatgtccaagccactgctatgcatancggaagaggaaagtcaaagcaatgtcactttgttggtttcttcctcaaccaccaaggaaagtgtgtgcctgaatagctcaaaactgaaagagcgcaactacatggggttatctgattgttcatctgttgacagctccgcgccgtccttctcagattagactaagaacaatcctaacctcaaagctactgaactcagactgggggcttcgggggtcgcaatctcccgaacgagattcagatcttttgcttagaagttccatttcagtttgatgaaaagccactgtttcctttgcatcctgcaactgatgaacaccattcctcatcaaagcctgctgttttgggaaacaaaatagggttctcaaatgtcatg

SEQ ID NO: 232538 - DNA, 481 bp, Glycine max
gttctcacacactatactcacgacacacctcctgctccttactctcctctttcacgcggcggcatccagggtacactggtagctcctccacagcctcatcgggattgtcgccatgcacatgcaacttctccagaacgaacgagtcatcatcttcgagcgcaccgacttcggactctccaacctaagcctcgccgacggaagatgccgcagcaacccagacgagttggtcgtcaaacgcgactgcatcgtgcactcgatcgaactagacgtcgcaatcattatattccgcgctctcgttgtccaaaccaatgtctggtgctcctccggttcggtctatccggacggaacattaggccaaaccggtgggttcaacgacggctaccgtgcggtcagaaccttcaacccgtgccgctcgagcgactgggtagaagttcagcatggagtcccggggcagagattggtcgccaccaagcacatcttg

SEQ ID NO: 232539 - DNA, 128 bp, Glycine max
atctcatgatccagaaatgagatatgcaccatggatcatggcacaagacttgatcttgatcaactatattgcaaatcacgggggaagtgtttgaaattctttaaccaatgcttccggtcttaatccac

SEQ ID NO: 232540 - DNA, 320 bp, Glycine max
caccatggtaaacggaatccgtacaacacacatgaaactcaacatctcacatgtgtcatttctgtgtcatgacctgaactcttctttcctgggaatctcatgaggctggatctccgttctgtgagtcataatgctcgcagaagtatgccaaagcttgggatcaggacacatgattgaagttttgcgggatatgctgcgacaagtgcaactgtgtcccatctaggacttatcgaatcattgaccacagtccctgctacacggacatgattaataccaatggcaatgacaaatgcacttggacaagatacaagttcatcatc

SEQ ID NO: 232541 - DNA, 395 bp, Glycine max
gtcatattcattatctgaatcaggtccatggagatcatttacagggctaggtgcttctgaaatttgcaaggttgaagaacttgagtatgcagagctaccaggctctggggatagctgttgtaaacttaaacttagatttccagatccttcttcgtgtgtgcatggcaaatcgtttaaattaactctacctgaattgattaacttcactgattttgttattgagaaaacatggtatgatactgccatgaagagaaattggtcttcaagagataaatgcatggtctggtggagaaatgaagatgggaaaggtatcgggtccagtacaagactgatcccaccgagaatcatctgcaaaggccgtgggaactatatggttctgagatgctatgggagca

SEQ ID NO: 232542 - DNA, 401 bp, Glycine max
ctatttttcaagtaacttaacgtttcaaacctaagaagttggaagtcatggcagcaacattgatggcagcaacaacaagttctggtactcttaaagcaactcctttccttggccaaggcaatggtgccaatgccaatgctcttatggatgttgtctccatgggaactgggaagtacaccatgggcaatgatttgtggtatggaccaaacagagtgaaatacttgggacccttctcagctcagaccccttcatacttgaaaggagaattccctgaggattatggatgggacactgctggcttatctgctgacccagaagcatttgccaagaacagggctcttgaagtgatccatgggcgatgggccatgcttggagcactaggatgcatcaccccagaggtg

SEQ ID NO: 232543 - DNA, 719 bp, Glycine max
ataattagcggcactatagaaaactatgacgtcgcatgcacgcgtacgtaagctcggaattcggcgcgagcaaacattgattgcacccacggtagtaagtgagtttcccttataaaattcaatccccaaaacaagtctcacaaaattgagaaaaatttaaagaaatcaacacacacaaacacaacaacatatggaggtgctaagggtgcaaaccatagcttccaaatccaaagatgctgccatcccagccatgtttgttagggcagagacagagcaaccaggcatcacaaccgttcaaggggtgaaccttgaggtgccaattattgattttagtgacccagatgaaaggaaagtggtgcatgagattttggaggcaaatacggactggggcatgttccaaattgtgaaccatggccatacctaatgatgttattagaaaatttcacaactgttgggaaaaaggttccttgagttgccacaagaaggaagaagagttgattgctaagcctgcagggtccggattcattggaaggtagggcacaaagtttcacagacaaggaacatgggaaaaaaggtggagggattaattgttccagaatggtgtggagccccgtcgtccgaaaacagcgatattgtgaggccattaagcccccatcttacaggggaagtaaggcatggaaggtgcgagaacctcctgagcttggggggaccatgtgttt

SEQ ID NO: 232544 - DNA, 477 bp, Glycine max
caaaaacgtcatctgcagcaccaatgttcctgcaattcaaggtatagatgctctcataatcctcacaagtgctgttccacagataaaacctgggtttgatcctaccaaaggacaaagaccagagttctattttgatgatggtgcatatcctgagcaggttgactggattgggcagaaaaatcaaatagatgccgctaaggctgctggagtgaagcacattgtgttagtagggtctatgggtggaacagatcttaaccatcctttgaacagcttgggtaatgggaatataccggtttggaaaaggaaggctgagcaatatctggctgattccggcatcccatatacaattataagggctggtggcttgcaagacaaagatggaggtcttcgggaaccacttgtagggaaagatgattaccttctccaaactgaaaccagaaccagaactagatctgatgtttgcaaaagtctgcattc

SEQ ID NO: 232545 - DNA, 320 bp, Glycine max
gtgcgcagaataaaatttctcatcgacgatggcgaataccttacaacgcgcccttcgcgccaccatggcccggccgttctccaccggcgcattggccgaaattaagcgaggcgagatcggaatggtttctggaattcctgaagaacaccttcgtaggagggttctaatttactctcctgctagaactgcatctcaacaaggatctggaaaggttggaagatggaagatcaacttcttatcaacccaaaagtgggaaaatccactgatgggctggacatccactggggacccctactctcaggttggtgattcagccttga

SEQ ID NO: 232546 - DNA, 336 bp, Glycine max
atctattcctgcacctctctacacacaaatacacaaatgttggacatatttaatgagagcgtgagagcgtgagaggtgagacaaaggattgccaacctgaatgtgaataattttgcatgaaatgggttggtttaccaagttgcttaagggctctgatcataaaattttacgaggacaataccatggcaaatatggagaggacagaatttgggataatcatcatagttcaatggatgatttgactgatattgagaaagaagacattgaccgtgcaattgcactttctctgtcagaggaggatcataaagggaaaaaagttgttgatgaagaactttg

SEQ ID NO: 232547 - DNA, 345 bp, Glycine max
ctaattctcatttcttcatcgttcgattcttctcctcctaaagatgcagatcttcgtgaaaactttgaccggtaagaccatcacccttgaggtggagtcctccgacaccatcgataacgtgaaagctaagattcaagacaaggaagggatcccacctgaccagcagagacttatctttgcgggtaaacagcttgaggatggtcgaacccttgccgactacaacatccaaaaggaatccactctccacctcgtgcttcgcctcaggggtggcatgcaaatctttgtcaagactttgactggcaagaccaatcacctcgaggtcgaatcctcggacaccattgataa

SEQ ID NO: 232548 - DNA, 398 bp, Glycine max
cgtgttcgttctttagtctttacccaaaaaggcaatgagagggacacagatactgttcgttggtttgctttggttcttctgcgtttatgcaccttcttcgttttgcgcaaatgtcacgtatgaccacagagcattggtcatcgatggcaagcgccgtgtcttggtctctggttctattcattaccctcgtagcactccagagatgtggccagacctcattcagaaatccaaagatggaggacttgatgtgattgagacttatgttttctggaacttacatgagccagttcaaggccagtataattttgaaggaagggcagatttggttaaatttgtgaacgcagtagcagcagcaggtctatatgtgcatctccggattggtccatacgcatgtgctg

SEQ ID NO: 232549 - DNA, 396 bp, Glycine max
ggggggaagtggtcaagggtgcacctttggttgagccaggagatgaattgttctggttcaatcgaccccgcctcatcctctttttgattcatcttgttctctttcagaatgcatttcaactagcgttttttgcttggagcacatatgacaatgggttcaaaataaactcttgtttccacaaaactactgcagatattgtcattagacttacaatgggggttctcacacaagttctatgcagttatgtgactttgcctctttaggctctagtcacccagatgggttctaccatgaaacctactattttcaatgaaaatgttgcagtagccctgaagaactggcatcacactgctaaaaagcacatcaaacacaacaaggattctacttccaatacac

SEQ ID NO: 232550 - DNA, 415 bp, Glycine max
atgaacccttacttaacctcggaattcggtccaaggcaaaagaaaattcaccatgcattatttttataaatgaaattgatgcaattggtacaaaccgttttgatagtgaagtaagtggagacagagaggtacaacgaactatgttagaattgcttaatcagcttgatggttttagcagtgatgaccggatcaaggtgatagcagcaactaaccgtgcagatattcttgatcctgccctgatgcgttctggtcgtttggatcgtaaaattgagtttccacacccaagtgaagaagcaagagctcgaattctacagattcattcaaggaagatgaatgttcacccagatgtcaactttgaagaacttgcccggtccacagatgatttcaatggcgcacaactgaaggctgtctgtgt

SEQ ID NO: 232551 - DNA, 291 bp, Glycine max
aaaaaattgtagctgatgcatcggttgctttgtctcgagcagtttgcattgctacaagatatagtgctgttagaagacagtttggatcacataatggaggtctagaaacacaggtgattgattacaaaacacagcaggctaggctcttcccattgctggcttctgcttatgctttcagatttgtgggcgagtggctgaaatggctttatatggatgtgacgaaaagattgcaagctaatgatttttcaacattacctgaggctcatgcatgcactgctgggttgaaatcct

SEQ ID NO: 232552 - DNA, 358 bp, Glycine max
gtgcttgggactgaacttgaggccaccaaatcggggacgttcactgggtttgttaagaagcctggtgtgcttgttggggagcataagaaagtggctctggtgaaggagtttcagggtaatttacctgacttgggtctaggtgatagtaaaagtgattatgacttcatgtcaatttgcaaggaagggtacatggtgccaagaactaagtgtgaaccactaccaagaaacaagcttttaagtccaattatttttcatgagggtaggtttgctcaaaggccaactcctctagctgccctcttgaccttcctatggctgccaattggcatcatactctccatcttaagggtctaccttaaca

SEQ ID NO: 232553 - DNA, 374 bp, Glycine max
ctattgctgagttggatacactgggagaggagtcatacaaggatagcactctgatcatgcaactccttcgtgataacctcaccctttggacctctgacatgcaggatgatggagcagatgaaattaaagaagcagcaccgaaacaggatgaccagtaaaaatattttactgctaattagaattgaacttctcctccatatctttttgaagggagaaggtgtttgttgctaatatctctttggtactgagattttaggcattcatgtttgttatgattgtggatgtactgggccgtttttagtttgtccttccattttcaagtgttttccaaattgcctattttattaaggacgctgaagtttttactacatgga

SEQ ID NO: 232554 - DNA, 313 bp, Glycine max
aaggaactcaagaacggtcgcttggctatgttctccatgtttggtttctttgttcaggctattgtcactggcaagggccctattcagaacctttacgaccacgttgctgatcctgttgccaacaatgcttgggcttatgccactaactttgtccctggacaatgaggatgcctacatgcaatgcaatcttctgctcccttttgcagttcccttgtgtttaactccattttcactaatgtaactacacctgtgtagcagaaatatctgtatgagaaccattatatttttatatattagaaatttgggtccccag

SEQ ID NO: 232555 - DNA, 399 bp, Glycine max
gtagcacttcttcttctggcggaggtggggcccatggctgaggctgtgacatgcaccccaacagagttgagtccgtgtcttccagcaatcacttccggtgctaaaccttccaatgcttgttgcacgaagctgaagcagcaaaaaccatgcttatgtggctacctcaaaaacgctagcttgaagcagtatgttaactctcctaatgcccgaaaaaccgttgcttcttgtgggattccctttccaacttgttaattaattaagccttcttataattaaagtgtgggatatatatatatatatagataaacagtttaatttaaacacactttgattctacaaagcatcctggcacaagcattcaatacgatttcaacactttaacgcaacattttaacatga

SEQ ID NO: 232556 - DNA, 389 bp, Glycine max
aggaacccttacttaaccccggaattcggtccaaaattttccggtttccctctctctctctctctcatggcgaatctagcacacttctccaagagagccctaagaagcgcacacgcgctcgcaaggcaccacgtgcagccgcagctgctggcagcggaacgcgcttttgcgacggaggcggcgaaatcgatatccccgtcggcggatcgcgtgaagtgggactaccgagggcagaggaagataatcccgttagggcagtggctccccaaagtggccgtggatgcttacgtagcacccaacgtggtcctcgccggccaagtcaccgtctgggacggagcctccgtctggcccggttgcgtcctccgcggcgatctcaacaagatcagcgt

SEQ ID NO: 232557 - DNA, 480 bp, Glycine max
ggaattgaatttaggtggccctatgcaagagcaatgacgtcgcatgcacgcgtacttaagctcggaattcggctcaagttctcctaaaacatctcaatgggttcttcttctattacaacatcgcccgcaaccatgaccatggctgcgatcgtgctcctgttcacggtctttgccgtttcctccgccctagacatgtcgataatctcgtacgacagcgcccacgcggacaaggccgccacgttgcgcaccgaggaggagctgatgtccatgtacgagcagtggctcgtgaagcacgggaaggtgtacaacgcgctcggcgagaaggagaagcgcttccagatcttcaaggacaacctgcgattcatcgacgaccacaactccgcggaggaccgaacctacaagctcggactgaaccggttcgctgatctcaccaacgaggaatacagggccaagtacttgggaaacaagatcgatcccaac

SEQ ID NO: 232558 - DNA, 357 bp, Glycine max
cagaatctgagaaccagaccctctcaaaccggaaccgcaaatgaagcccaagagcattcgcatccgtaacttaccaacgcacctgctgctaatcgctgtttgtctgttcacctcttcgtccgcttccaagatcggagaaaattgtgggtcagacaacaaatgcgacgctggactcagctgccaaacatgtcctgccaatggaaatacccgaccaagatgttcgcggacacaacctttgagccccacctccaaggtgaaaggcttagcgtttaaccggtattcatgggtgacgactcataactcttatgctctggcggaggcgagatctgtcaccgggtctgtcaatgtggcccctat

SEQ ID NO: 232559 - DNA, 400 bp, Glycine max
atgacactcctcctgctccttattctcctctttcacgcggcggaagccaagggacagtggcagctcctccacaaaaacatcggcattgtcgccatgcacatgcagcttctccacaacgaccgcgtcatcatcttcgaccgcaccgacttcggactctccaacctaaccctccccgacggaagatgccgcaacaacccaaacgagttggtcgtcaaacgcgactgcaccgcgcactccatcgaatacgacgtcgcagccaacacattccgcgctctctttgtccaaaccaatgtctggtgctcctccggttcggtctctcccgacggaacattagtccaaaccggtggcttcaacgacggctaccgtgcggtcagaaacttcaacccgtgccgctcgtgcg

SEQ ID NO: 232560 - DNA, 383 bp, Glycine max
cacatccttcatattcagggagatagcatcaaaacataaacttcccgttcaggactttgtggtgcgcaatgacatgtcatgtggttcaaccattggtcctattcttgctagtggcgtaggtattcgcactgttgatgtaggtgcaccgcagttgtcaatgcatagcatacgagaaatttgtgctgttgatgatgtgaagtattcatatgagcacttcaaggcattttaccaagaattctctcatgttgatggtaagatggtcgtggatatataggaatatctctaatcacgaaatcctcattaatcctttgctctagaagctgttgctgaaatggtcgtgtttcgtaatttagtaccattataatgccgacgttattatgatg

SEQ ID NO: 232561 - DNA, 398 bp, Glycine max
gttctgcactcacagtagttaatgcctcattgtgtgtttcattattattccctaaccaactctcttgaccctgacttcttcacttgtgctttttttttttagatcaacaaattaaagtattaaactttgagcatcagattttggttcttgtaattataatgatggggggtgggaagtttagtagtttttttgttgtttttgtgttgttggtggggtcagggagtgggattggtgtgaattgggggacacagtcaacacaccctttgtcaccgtcgaaggtggtgaagatgctgaaggacaatggcattcagaaggtgaagctttttgatgctgatgctggtatcttggatgctctcaagaagtcggaatacaggttatggttgggattccaaatgaca

SEQ ID NO: 232562 - DNA, 393 bp, Glycine max
cagaaactcaatcaaaataaaaatttattatggatcataggttacgttgttttgtgacaatacccaaaattccttttctattgctactttctctgattctcgtcttcagttacgttaacgcagccttcgacctcgctactatacccttcaacgatggctattctccgctcttcggagatagcaacgttgttcgctccgaggatggcaacggcgtacaactccgcctcgatcgctacacaggttcgggtttcatttcctccagtatgtaccagtatggattcttcagcgcgagaatcaagttgccatcgaattatactgctggtatttgcgtggccttttatacatcaaacggtgatgtgttcgagaagtcccatgacgagttggactttgaat

SEQ ID NO: 232563 - DNA, 394 bp, Glycine max
gccaaaagaacaacatggacattgatctttctcctcagttgcccaagaaagtttacggtgccaatggtggctcctactacgcatggtccccctccgaccttcccatgctccaccaaggcaacattggtgccgctaagcttgctctcaacaaaaacgcctttgctcttcctcgttactctgactcttccaaagtcgcttatgttcttcaaggtagtggagtggctggaatagtgttgcctgaatcagaagagaaggttgttgcaataaagaagggtgatgccttggcactcccctttggtgttgtgacctggtggtataacaaggaagaaactgagttggttgttctgttccttggggacacttccaaggctcacaaggctggtgaattcactga

SEQ ID NO: 232564 - DNA, 373 bp, Glycine max
ctcgagccgaatcggctcgagtctcatggcatcttcttctggtagtttagacacctctgcaagtgcaaactccttcaccaacttcaccttctccacacaccctttcatgaccacttctttctctgacctccttgcttctcccttggacaacaacaagccaccacagggtggtttgtctgagagaactggctctggtgttcccaaattcaagtccacaccaccaccttctctgcctctctctccccctcccatttctccttcttcttactttgctattcctcctggtttgagccctgctgagcttcttgactcgccggttctccttaattcttccaacattctgccatctccaacaactggagcatttgttgct

SEQ ID NO: 232565 - DNA, 374 bp, Glycine max
ctcgagccgaatcggctcgagcttggctttgcatctgagcttggaaactatgctgaatacagcggtgcacccaaagaagaggaggtcttgcagtatgccagagttgtaattgattgtgcaactgcaaaccctgatggccagaagagagctcttgtgataggaggaggcatagccaactttactgatgttgctgccacatttagtggtataattcgggcattgaaggagaaggagtcgaaattgaaagcagcaaggatgcacatctttgtgaggagagggggtcccaactaccagaagggtctagctttgatgcgagcacttggagaggagattggcatccccattgaggtttatggacccgaagccacaatgac

SEQ ID NO: 232566 - DNA, 319 bp, Glycine max
cggatcaacagcgtttaatcttcgccggaaaacagctcgaagacggcagaaccctcgccgactacaacatccaaaaggagtccacgctccacctcgtcctccgcctccgcggcggcatgcaaatcttcgtcaaaacccttactggcaaaacaatcacgctagaggtggagtcctccgacacaatcgataacgtgaaagccaagattcaagataaggaagggattcctccggatcaacaacgtttgatcttcgccggaaaacaactcgaagacgggagaaccctcgccgattacaatatccagaaagaatcgactctgca

SEQ ID NO: 232567 - DNA, 390 bp, Glycine max
gttttgttctcattctgtgactctgtgcttagttaacgttaacagtgacttaagatggcggattctgcagatgtcacccacgatgttgtgtccctcctctcttctcctcaaagggactttcttcttcgaaacaacggcgatcaggttaaaattgacagcttgaagggtaagaaacttggtttgtatttttcggcatcctggtgtggtccatgtcaaacatttacgccaactttggtggatgtgtacaatgaggttgcaaaaaaaggtgacttccagatcgttttcattacggctgatgaagatgatgagtcctttaacggttacttttccaagatgccatggcttgcaatcccattttctgattcagacacacgcagccgccttgattaa

SEQ ID NO: 232568 - DNA, 397 bp, Glycine max
cgacaaattgggccgcatcgccgactggactcgcaacttcaacaacccgacccgctccaagaacccggcggacgccgtctttgacttcacgaacgacgactccttccccgcatccgccgacgacgacgcccccttccgcctcgtcgaccccaagcccccgccgcgccccaaatttggtcccaagtggcgcttccagcagccgcgccagctccctcagcgccgcgacgaagaagtcgaggcgaagaagcgcgagcaggagaaggaacgcgcccgccgagatcgtctctaccacatgaaccgctcaaaccctaatcagcagcgccgtgaagccgctgttttcaaatcctccgtcgatatccaacccgaatggaacatgcacgaccaagatcccttcagc

SEQ ID NO: 232569 - DNA, 395 bp, Glycine max
cttttctctcccgttatatatatagtatttgcttatatatatatatactactcattaggaactgtgattgcagttcctaatgcagattttaacgcggcgccaaggagcatttttgtgcttctggttgtctgtgctttttgtggtagtagacttttgctatggtgaccatagtacagtcgaggtagtagggttgggagaatgcgcagattgcaaggagaaaaacattcaaactagccaggctttctcaggtttacgtgtgacagtagactgcaaggcagcaagtggaaactttgaaaggagaggggtcggtgagcttgatgaatatggaaacttcaaagtttcccttcctcatgacactgtaaaagacgataaactgatagaagaatgctatgctc

SEQ ID NO: 232570 - DNA, 309 bp, Glycine max
cgtagcgtatgatcaggtccagtaacgtacaaatcacatacggttccacacagtcataaaggcgttgatgttaggggacatcattttgatctattaccaattgatggcggtggaaatctgtctcctgtaaaaggacttagccttcaaatggttcaattgcgtcttgctagtcgttctcaatcatatgcagtcctaaaaccatcacagtgagctatacggaggactgatcccgttgtcttacagcaatgcgtacagccactccacatttagagtttactttcaccaacgagttaccaatcgatgtggtat

SEQ ID NO: 232571 - DNA, 338 bp, Glycine max
  unsure (1)..(338): unsure at all n locations
gtttaggatgtatacattcaaagtgaagccttgttcgagggcgtattctcatgattggacagagtgcccctttgttcatccaggggaaaatgcaaggcggcgtgatccaaggaagtatcattacagctgcgtcccttgtcccgagtttaggaagggatcttgcagcaagggcgatgcctgtgagtatgcacatggcatttttgagtgctggcttcaccctgcccagtaccggactcggctttgcaaggatganggtggatgcacaaggagggtatgcttctttgctcacaagcttgaggagcttcgccccttgtatgcttctactggttctgctattc

SEQ ID NO: 232572 - DNA, 307 bp, Glycine max
  unsure (1)..(307): unsure at all n locations
aaaggtgttccgccagaaatttcatcttcaatggtttcacagacatttgaagtccctgatatgagcttcaattcaattgattctacaatagatggtagtggcttcttgaataggggtccatgggatctgccaccaccacctccaccacaacaacaacaggttcaacggattagaacatacaccaaggtatataaacgtggagctgtgggaaggtccatagacataacacgatattcaggttacgaggaccttaaacaggatctggctcttaggtttggtattganggacagctggaggatctacaaa

SEQ ID NO: 232573 - DNA, 402 bp, Glycine max
  unsure (1)..(402): unsure at all n locations
tctgaatcagagaatagataataatggctacaccggaccacctgttcaacctccgcaacaacttgtatctcggggcgtaccaagccgccatcaacagcggcgacgtcaccaacctctcccaagaagactccctcgagcgcgacaccctcgtccaccgctgctacatcgccctcggccagcttcagttcgtcatctccgagatccatgacgacgctcccacacctctccaagccgtcaaactcctcgctctctatttctcctcccccgacaccaaggattccgccatcgcgagtctcaaggagtggcttgccgatccgccatttcanacaacgccacgctgaggctcgtcgccggtctcgtcttcctccatgaaaatgatttcaacgaagccctcaaacacac

SEQ ID NO: 232574 - DNA, 366 bp, Glycine max
caagaacaagaacaacaaagtaacgtgaaagagagagagatggaggcgattgttccagtggtggatttccagaggctttcagaggaagaggagcgcaagaagctgagaaaaacatgtgagaaaccagggtgtttcagaatcatcaaccactcaattccactaacactcatggctgacatgaagtcagtggttaaatacttgcatgaccttcccacggaaatcaaaatgcgcaacaaaccctccgtccctgagagtggctatagggcggcaatgccaacaagtcctctatacgagggcatgggaatatatgacatgcatgcctcaccacaagcatttgaagatttctgctccaacttgaatgtgtca

SEQ ID NO: 232575 - DNA, 372 bp, Glycine max
ctgaaatgcttgttaatttgggaattccttgggttattattggtcactctgaacggaggcagcttttgaatgaatcaaatgagtttgtgggagataaagttgcctatgcacttcaacaaggtctgaaagttatagcatgcattggggaaactcttgaacagcgtgaagctggtacaacaacggctgttgttgctgagcaaacaaaagcaattgcagctaaaatatcaaattgggacaatgtcgttttggcctatgagccagtttgggccattggaacaggaaaggttgcaactcctgctcaggctcaagaggttcatgctgatttaaggaaatgggttcatgacaatgtgagtgctgaagttgctgcatctg

SEQ ID NO: 232576 - DNA, 407 bp, Glycine max
  unsure (1)..(407): unsure at all n locations
aggaacccttacttaaccccggaattcggtccaagcacacagacacacacatttcgtcggaatgggaagggtgattcgcgcacagcgtaagggtgcggggtcngtgttcaagtcccacacccaccaccgcaagggtccggcgaggttccgcagcctcgacttcggcgagcgcaacggctacctcaaaggggtcgtcaccgatatcatccacgaccctggtcgcggtgctcctctagccaaggtggcgttccgccaccccttccgctacaagaagcagatggagctcttcgtcgccgccgagggcctctacaccggccagttcatctactgcggcaagaaggccaccctcgtcgtcggcaacgtcttgcccctccgatccatccccgaaggtgccgttatctgcaacg

SEQ ID NO: 232577 - DNA, 289 bp, Glycine max
gtcacacctcccagatatacgccatcaggcagagcatagccaaggctctcgtcgcttactaccagaagtacgtcgacgagcagtccaagaaggagatcaaggacatcctcgtcaggtacgaccgcaccctcctcgtcgccgatccccgccgctgcgagcccaagaagttcggtggtcgcggtgctcgcgccaggtttcagaattccaaccgttgatttccccctttttttttaagctatccaccataatttgttaaagtacttccccggtttaatgggtccggccctga

SEQ ID NO: 232578 - DNA, 393 bp, Glycine max
cagaaagcaagctcatcctagagttttaaaaatggcagcagcctcctccatggctctctcttccccatccttggctggcaaggccgtgaagctgggcccatcagcccccgaagtcgggagggtcagcatgaggaagaccgtcaccaagcaggcctcctccggaagcccatggtacggcccagaccgcgtcaagtacttgggcccattctctggcgagcccccgtcctacctcactggcgagttcccaggtgactacggctgggacactgctgggctttcggccgacccagaaaccttcgccagaaaccgtgagctcgaagtgatccactccaggtgggccatgctcggggccttgggctgcgtcttccccgaactgttgtcccgcaaccgggt

SEQ ID NO: 232579 - DNA, 432 bp, Glycine max
aggaagccttagttaaccccggaatccggtccaaattcaaatgggaaaacaaaatggcaataacccgacaagggaaaaatttggaaccaacggtacaaatggaaagaaacgaaaactaattcttcatgggcttacaggttatgcccagccagggagacttttggctataattggtccttctggcagtggcaaatccacacttcttgatgctttagcaggaagattgacatcaaacataaagcaaacagggaagattctaatcaatggccacaaacaagaactggcttatggaacatcaggctatgtaacacaagatgatgctatgctgtcatgtttaaccgctggggaaactttatactactcagctatgctccaatttccaaacaccatgtctgtagaagagaagaaagaacgagcagatatgacactgag

SEQ ID NO: 232580 - DNA, 370 bp, Glycine max
gcatgtcatccaggacatgcttgttcctttgtacaaggtgggagaggctttagaatgggttcaccgtgagatggaggtataccccatttggctctgcccacacaaattgttcaagctgcctgtcaaaactatgatttacccagagccagggttcgaactacatcgcaggcaaggagacacccaaactgctcaaatgtacacagatgttggagtttactatgcaccaggtcctgtttttaggggtgaggtatttgatggggcagaagcagtgcgtaaaatggagaactggttgattgaaaatcatggttttcagccacagtatgctgtgtctgagctgtctgaaaaaaactttcggaggatgtttgatgct

SEQ ID NO: 232581 - DNA, 349 bp, Glycine max
aataattcctgtaatgtgcaccagtaaagaccaaagtatgattattgttacattatgctatatgattgtacttgtatatacatattttgtcccgcctttgtaaatacaattgggacactactaggattgggaagaagggtctttacatttttagtttggcaaatagatattgcaactacctttgtataaatctatttctgaagaagcaattacaactttcaagggatgatagcattttgtggcataaggattaaggaggcataaaggaccaattgctttggaatattcactcatgacaaggcacaaggtcatgcgtgtatgccaacacatagtaatgatgtgtgttttt

SEQ ID NO: 232582 - DNA, 400 bp, Glycine max
cgcacgaatatcttgttgtttggagcgatccgagaaaaactctgtaaacatgttggtttaccaggacctccttacaggtgatgagcttctctctgactccttccgttacaaggaaattgagaatggaatgctgtgggaagttgaggggaagtgggttgttaaaggagcagttgatgtagacattggtgcaaacccttctgctgagggtggaggagaagatgagggagttgatgatgcagctgttaaggttgttgacattgttgacacattcagacttcaggagcaacccgcattcgataagaagcagtttgttaccttcatgaagaggtttatcaagaatttgactcccaagctcgatgcagagcaacaggagttgtttaagaagcacatcgagggagca

SEQ ID NO: 232583 - DNA, 370 bp, Glycine max
ggccaattcggccactctcctctgagaaagcctccagcctctcctccaaagtcccctgcggttcgttcggttattcttcgaaccgttgtctgaagtttacaactcaaaacttcaccgaacgcatttcattcaccaattcgtccaagtctcgtatcaatcaatcagcctatccgtcttgcggttggagagatcggaggggagagcagccatggcgcatcgagtagaccacgagtatgactatctgttcaagatcgttttgatcggagactcaggtgtaggcaaatccaacatcctctccaggttcactcgaaacgagttctgtttggagtccaaatccactatcggagttgagttcgcaacagaactcttc

SEQ ID NO: 232584 - DNA, 391 bp, Glycine max
aaaagaaagaaagaaagaaagtgcaacttcctctgttttgctcccctgtttaagccttatcataagcttagaatggcacacaaggaattttccattgccctagtgactctcattgttctctttgtcaacacgaacctccaaggtgccacggctgactatggtggtggttggcagagtgctcatgccactttctatggtgggggtgatgcttctggcacaatgggtggagcatgtgggtatggaaatttgtatagccagggatatggaactgacactgtggctctaagcactgctttgttcaacaatggcttaagctgtggatcttgctatgaaatgagatgtgatgatgacccaagatggtgcaaacctggctctattaccgtcactgcta

SEQ ID NO: 232585 - DNA, 395 bp, Glycine max
gttcctcaacacacacacaaaaaaaactcccttgtatattgttgcagctctagctagggttttgcaagtgcgatcgaagaagaacaacgacgatggcgatggctgcagctctgcgtcgcgaaggaaggcgtttgacccaaccaatcaacgccctccactcttctctcaattcctccctcatctctcaagaccaagcccctcatggcgcgcgctccatttccactcaagttgtgaggaaccgaatgaagagtgtgaggaatatccagaagatcaccaaggccatgaagatggttgccgcgtccaagctgcgggccgttcagaccagaactgaaaattcccgcggcctctggcaaccgttcaccgctcttctcggtgacgattccagtgttgacgtt

SEQ ID NO: 232586 - DNA, 283 bp, Glycine max
gcagattaagttcatccttatatgcatgggaagctttgaaggcatgaatttggttgcagtgatggcaactataagaatgattgtgcaaactcatcacatttatattctctgctgatatgaatgatagcatcatcttatctttaatttattatagcttctgcattgcatatgtcagctaatgtaaaatagaattatgcgtgtcaatttactttcgattgttgtcagacattcaacatgaaaattatagtttgctgaactggttatgatttcatcaaggtttttg

SEQ ID NO: 232587 - DNA, 374 bp, Glycine max
aagaattatttgattttatagcatctaaactagcaaaattcgttagttctgagcctgaagagttacaccctccccctggcatgcaaagggaattgggttttaccatctcaattccagtgaggcaaacatcaattgcatctgggaatacaataaagtggactaaaggtttcaatattgaggatgcggttggagaagatgtggtgggtgaactgaccacgtccttagaacaaattggtctggatatgcatgttgcagctctagttaatgacacagttggaacagtggctacagcaagattcaccagtcaagatgtcattgctggagtgactcctggcactgggacaaatgcagcttatgtagagtgtgcacatgca

SEQ ID NO: 232588 - DNA, 415 bp, Glycine max
  unsure (1)..(415): unsure at all n locations
atgcacgcgtacgtaaactcgggaatccgctcggagaatttgcaaataagggcatccannaccagaacctaatcatccttttattgcaaacttttgcgcattgggatttggagggcataaaaaagatgcgatgctacacgcaaacaagtagttcaagtccaataagcaaagcaagatagaaagattggctagctcacacacctcaattgatacaacacccagttgctgatagttattatatagagttcaattcatgcttgcaagcttaaccatggaacggtatgagataattaaagatattgggtcagggaactttggtgtggcaaagctggtcaaggaaaaatggagtggtgaattgtatgctatcaagttcattgagagaggcttcaagattgatgaacacgtgcaaagagag

SEQ ID NO: 232589 - DNA, 392 bp, Glycine max
tgacattcgggttgttcctacgacgcaaggtgtcgttgataagggcgttgttgtacatggtggcacagtgtgccggtgctatctgtggtactggattggccaaggggttccaaaaagcatactacaacatgtaaggacgtggtgccaactctgttgctgatggctacaacaatggtactgctttgggtgctgagattattggtaccttcgttcttgtctacactgtcttctctgccactgaccctaagaggaacgctagggattcccatgttcctgtactggcgccacttcctattggatttgccgtgttcatggttcacttggctacaatcccaattactggtactggcattaacccagcaaggagtttcggagcagctgtaatctacaac

SEQ ID NO: 232590 - DNA, 324 bp, Glycine max
gaaaaacaaaaaacacagaacaacacagaaactcaataccaaggtaaaattattatggatcacattcataggttacgttgttttgggacaatacccaaaattccttttctattgctactttccctgcttctcttcagtttcgttaatccatccttcgacctcgctactatacccttcaaagacggctattctccgctcttctgacctagaaacgttgttcgcgccgatgatggctacggtgtacacctccgcctcgatcgctacacaggttcgggtttcatttcctccactatgtaccaatatggattcttcaacgccagaatc

SEQ ID NO: 232591 - DNA, 472 bp, Glycine max
ttgaattagtggcactatagaagagatatgacgtcgcatgcacgcgtacgtaacctcggaattcggtccaactccaagcgattcggctcgagtattttttgatataccttaccaaaacatagcttgctattagtatataaccattttctaaaaaaaaactgctagaaaaatattatatccctagaagtcgtttcttgttaaaaatggttatatactaatagcaagctatgttttggtaaggtattttttgatatacaaacttattttagaaacttattttctacaaattacttcaagtaatttattttcaaaagctacttgaagtaacttatagaaaataagctactttataaattattagcttttttttcttcatcacaattttatttttattattttatttgaaattttgtttaccattttattcaataaaattctcttatcttttttttgcttgaaaaaactcttatat

SEQ ID NO: 232592 - DNA, 357 bp, Glycine max
gtggggttggttgcctctgccaagtttgatgaactcttccagcccagttgggctatggaccatttcatccatgaaggagaacttctcaaactcaaacttgataactattctggtgctggatttggatctaagagcaaatatatgtttgggaaagtgaccatccagctcaagcttgtggagggtgactctgctggaactgtcactgctttctatatgtcatcagacggcccaactcacaacgaatttgatttcgagtttttgggcaacaccactggtgaaccttactcagtccaaaccaacgtgtatgtgaatggcgttggcaacagggagcaaagactcaacctctggttcgacccc

SEQ ID NO: 232593 - DNA, 317 bp, Glycine max
  unsure (1)..(317): unsure at all n locations
aaagcattcttgccatctgggccacccaagttatcttgatgggtgccgttgagggttaccgtattgctggtgggcctcttggtgaggtgactgacccaatctatccaggtggcagctttgacccattgggccttgctgatgacccagaggcttttgctgagttgaaggtgaaagagctcaagaatggtaggttggccatgttctccatgtttggtttctttgttcangcaattgtgacaggaaagggacccttggaaaaccttgctgattaccttgctgacccagtcaacaacaatgcttgggcttatgccacaaac

SEQ ID NO: 232594 - DNA, 385 bp, Glycine max
  unsure (1)..(385): unsure at all n locations
cattaattgcaagaatggcacttcgttgcttggtgatgtccctttctgttctcttcactcttggtcttgcgagagaaagccatgccagagacgaagatttttggcatgctgtttggccaaacactcccattccaagttcattgcgagatcttctaaagcctggccctgcaagtgttgaaatcgatgatcaccctatgcaaattgaagaaacacagtacccgaaaaccttcttctataaagaagaccttcatccaggcaaaacaatgaaagtacaattcagcaagcctccctttcaacaaccatggggtgttggtacatggttaaaggaaattaaagacactactanagaaggatatagttttgaagagctatgcatcaagaaaga

SEQ ID NO: 232595 - DNA, 312 bp, Glycine max
tattggcgcgagcaaagaaagattacaacgttagagatccttacatctcgcagagtggagcaactacagcatgttcgtgtctccgaagttcaaagttcgatcaaagagctcttcaatgtttggtcaagcaacaagaataatgagtctggctatgcgttgctggagctgaagcaatggttttctcaattgacatacaacatggttcttcgaatggtcgtcggaaagcgacttttcggtgctagaactatggatgatgagaaggctcagagatgtgtggaggctgtgaaggagttcatgcgtctgatgggggtg

SEQ ID NO: 232596 - DNA, 320 bp, Glycine max
gaccattccaaccctaatttctctgctaaatcctagatgtttggcacttccactcttctccctcgtaaatcttctcccattccctccggtagctttccatatccaaatacatcatggttttctgggtttttggctacggttcattggtgtagaagtctgtattcgattacgactagaagactattggattcatcaacgactacagacgcgtgtttgatttagcgtgcattgatcatccgagaacgactgataacccaacgggaacttgcacattggaggagataaaaggggctatttgctggagagctgcgtaatgtgtt

SEQ ID NO: 232597 - DNA, 339 bp, Glycine max
cgcaattcccaaattcatttcaatcctaattctgcacttcttgataattcgacttttctcctcaagatgcagacactcgtacaaactttgaccggcaagactatcacccttgaggtggaatccgccgacacgattgacaacgtaaaagctaagattcaggacaaggaagggatcccacctgacaagcagagacttatctttgcgggtaaacaacttgaggatggtcgcactcttcccgtgcaaaatctcaaaagggactcagctctatatcgtgtgttgcgacacaggggggacatgcatctctgtgtcaacattgtgagcgggaagaccatcaccctt

SEQ ID NO: 232598 - DNA, 468 bp, Glycine max
  unsure (1)..(468): unsure at all n locations
cgatgaattacgctagctaataaaagactatgacgtcgcatgcacgcgtacgtaagctcggaattcggctccgagtccatgcatcccctcctcctcaataccactacaaggttatttctgaagaatataagccaataaaaaacgttgttgatagcaggaagatgcacttcgcaattgcacaaggaaaacaacggaagccaagtttccgcgcattttgtcacataagaaaaacgaagtgtcaatccctttcntcctcgtttgtattgtttatgaattaataantacgttggatttagacagttgtatggcactgcctttgtcactgtcgttgaatgatatcacatgaatgcattttggtttgcaacctgctgcgctttcaaggggttgtgaaaccaattttataatgaataaaatcaaatatatgcgttgtatatttaattganaaaaaaaaaaaaaagggcgggcccn

SEQ ID NO: 232599 - DNA, 335 bp, Glycine max
  unsure (1)..(335): unsure at all n locations
caacgtcatcgcacgctcacgtggagctcatcaacaagngattacccgccggtcttctccccgccacaaccgtcttgggctacgccgtgaaccgtacctccggtgactttatcgtcaagctcggcggcacgtgcaagatcacgcgcccgctggacaactacgtcgccacctattccgacaccatcacacggaagatcgtgaacgggaaaatcgctgaactcgatgtgattagggttcgcgcgttcttcaagtggtggtccatcaccggaatccgctcctccggcgatgatatcgtcttcgaggtcggtatggtcacagcgaagtatccatcgaag

SEQ ID NO: 232600 - DNA, 339 bp, Glycine max
caagcgcacagctagcacctacattgatgatcaaggcaactggcacagaagcaccacgggtgcccctgagcatcttagtgaactttgtgaactcaagggacaggttttgaaacatgcccacaaggtcattgatgagtatgctactcgtggtttacattcattgggtgtttcacgccaaactgtttcaaaggagaataatgagagtgcaagggaatcatggcaattcgaggaacgcttgcgcctccttgatctgccaatgcacgacagtgctgagaccattcggcgagcacatgatcttggagtcaactttaagatgatcactgtatgaccaccttgcca

SEQ ID NO: 232601 - DNA, 404 bp, Glycine max
  unsure (1)..(404): unsure at all n locations
gtgagtgctgaatcgaatcgaatcgattctccgaacatggcggcgagcgatcgcacagtgttgcaattctcttcatcatcttcttcttcttcgcagatcttgtccgcgaaggtccaccctctggtcatcttcaacatctgcgattgctatgttcgacgccctgaccaagccgaccgcgtcatcggaaccctactcggctccgtccttcccgacggaaccgtcgatatccgaaattcctatgctgttcctcacaacgagtctatcgaacaggttgcattggatatagagtaccaccacaatatgttaatatcccaccanaaagtgaatccanaggaaatcatagtaggatggtattcaaccggtcttggagtaactggtggtagtgcattaatccacgagtttta

SEQ ID NO: 232602 - DNA, 341 bp, Glycine max
gtttgttgttgtaactcgttcttcttcttttgttgttctgtgtttgtgtttgttttttctctcacctgaaaatgtcttgctgcggtggtaactgtggttgccgaagctcctgcaattgcggcaacggttgcggaggctgcaaaatgtacccaaacttgagctacactgattcaaccaccaccgaaaccttggccatggaattggcacctgttagggctcaatttgagggtgctgaaatgggtgtgcccgctgagaacgatggctgcaaatgtggaccaaagtgctcctgcaacccgtgcatttgcatgtgatgtgttgagagagcaagcttcacgcagata

SEQ ID NO: 232603 - DNA, 401 bp, Glycine max
  unsure (1)..(401): unsure at all n locations
attccattctctctgtgtatttccctacctctcccttcaagatgcagatcttcgtcaagaccctcaccggcaagaccatcacccttgaggtggaaagctctgacaccatcgacaacgtcaaggccaagatccaggacaaggaaggaatccccccggaccagcaacgtctcattttcgccggaaagcaacttgaggacggccgtacccttgctgactacaacattcagaaggagagtactcttcacctcgtcctccgtctccgtggtggcatgcagatcttcgttaagacactcaccggcaagaccataaccctagaggttgaaagctccgacaccatcgataacgtcaaggccaagatccaggacaagganggtatccccccggaccagcaacgtctcatc

SEQ ID NO: 232604 - DNA, 359 bp, Glycine max
aacaacacaaggccatcatcatggcagctgcttctcctatggcaagccaactcaagtccaccttcactaaaactcttgtagctcccaagggcctctctgcctcttcaccactccacctcctgccttctaagaggcaatttagcttcactgttagggccatccaatcagaaaagccaacctatcaagtgattcaaccaatcaacggtgatcccttcattggaagccttgaaaccccagttacatccagccccttgattgcatggtacttatcgaacctccccgcatacaggaccgcagtgagcccactactaagagggatcgaggtgggcctggcccatggctaccttctggtgggccca

SEQ ID NO: 232605 - DNA, 398 bp, Glycine max
  unsure (1)..(398): unsure at all n locations
agcagagcagagatctagcgtattctctcgctctttctttcactgtcacagagccacatccatgggcttcccagccaacggcgcctctgcggcccagcccctaaacttcctcatctacggccgcacgggctggattggcggcctcctcggctccctctgccgggcccagggcatctccttccattacggctcgggccgcctcgagaaccgggcctccctcgaaaccgacatagccctcctcaagccctcccacgtcttcaacgccgccggcgtcacgggccgccccaacgtcgactggtgcgagtcncacaaagtcgagaacatccgaaccaacgtcgtcggaaccctcactctcgccgacgtctgccgcgaacacggcctcattctcatcaactacg

SEQ ID NO: 232606 - DNA, 375 bp, Glycine max
gtggtacacaatatggttccatcatataccctgtcaagaggactatcctgtcatgcctactgtatcatcaagttttgatttgaagcctgctaatttctttgagagaaatccaatccttggagtccctcccaatttcgaagatgatttacctgtttgcaaggctcgtgattcagcttgagatcccatcagttggtttttagtctaattagatacatgctttatttatgcatgtagcaaatgatgatgcccaaactgaactttaaacctaacttaaagtaaagagggtctagttctgttgattaaacagaatgtataaatattgtaaaaccttttgataccatgtttaattcctatgtataagaaaaaatatgatgt

SEQ ID NO: 232607 - DNA, 397 bp, Glycine max
tggaaagctctgacaccatcaacaacgtcaatgccaagatgcatgacatggaatgaatccccccggaccagcaacgtctcattttcgccggaaagcaacttgaggacggtcgtacccttgctgactataacattcacaaggagagtacacttcacctcgtcgtccgtctccgtggtggcatgcacatcatcgggaagacactcaccggcaagaccataaccctagaggttgaaagctccgacaccatcgataacgtcaaggccaagatccacgacaaggagggtatccccccggaccatcaacgtctcatcttcgccggaaagcagctcgacgactgccgcaccctcgccgactacaacatccagaaggaatcaacccttcacctcgtcatccgtct

SEQ ID NO: 232608 - DNA, 366 bp, Glycine max
  unsure (1)..(366): unsure at all n locations
aaattctctttagagagatagagagaggaagaaagaatggcagcttgcactgtctactcaacacaatctctgagcacaaattgctccatctcaaccccatcaaagacgcaactcagttttttccaccaaaagcaggtagttttctggaggaacagcaagaagggcagctgcagcagcagaagaagctatgtgataacatgtgcagcaggtgactcacagacagtggtgattggcctggctgcagactcanggtgtgggaagagcaccttcatgaggaggctgaccagtgtgtttggacgagcagcagagccaccaaagggtggcaaccctgactccaacactctcatcagtgacaccaccactgtc

SEQ ID NO: 232609 - DNA, 376 bp, Glycine max
aaatgagtgatttggagtttggagcgactgaactaatcattaatttgcactcgctgtttcagcttcatcaaccttcttttgcatcatttatatctcttgagaaatggcacaagaaacctttctattcacatctgaatctgtaaacgagggtcaccccgacaagctgtgcgaccagatctctgatgcagtacttgatgcgtgacttgaacaggaccctgacagcaacgttgcctgtgagacatgcaccaagaccaacatggtcatggtcttcggagagatcacaatcaaggccaacgtagactatgagaagattgtccgcgacacatgccgcgaaattggattcatctctgatgatgttggtcctgatgctgacaaa

SEQ ID NO: 232610 - DNA, 388 bp, Glycine max
cttattctcttcctctctctctactctgagacacaaaggaaaattataagaaattatggctggttattcaaaagcttcagctctttggatcctttttcttctctttggcttctctgtagctaaggaaattttggttggaggtaagactgatgcatggaaggtttcagcctctgaatcagattcactcaaccaatgggcagaaaagtctcgtttccaagttggagactatcttgtttggaaatatgatggtggaaaagactcagtgttgcaagtgagcaaagagaactatgtgaattgcagcatctcaaaccccataaaggagtacaatgatgataccacaaaggttcagcttgagcatccagggccattctacttcatcagtggtgca

SEQ ID NO: 232611 - DNA, 368 bp, Glycine max
ctctttaccagttgccacactacaccgagattccccctaaacccgtttgcgttgttgtttgcgaagaaatggcgactaagaggagcgtgggaacgttgaaggagggtgatttgaaagggaagagggtgttcgtgagggtcgatctgaacgtgcctttggatgacaaccttaacatcaccgatgacactagagtccgtgctgctgttcccaccatcaagtacttaactggtcatggagccaaagtgatcctttctagccacttgggacgtcctaaaggtgtaacacctaaatacagtttgaagcctcttgtgccaaggctgtctcaacttctcggaattgaggttacgatggcaaatgactctattggg

SEQ ID NO: 232612 - DNA, 398 bp, Glycine max
atcattttccaaacgaacatcatcgtaatttcctaagtcaagacaagaactgaagtgctgcttcaatggcttcaagtcaggaaaaggtgatacttttgggggttattggaatcccatttctgcacatggtgcagattgctctcaaattgaagggagttgaatacaaatatttggaagatgatttgaacaacaacagtgatttgctcctcaagtataacccagtttataaaatgattccagtgtttgttcacaatgaaaagcccatatccgagtcccttgtgattgttgagtacatcgatgacacatggaaaaacaagcccatcttgccttctgatccttaccatacaaccttggctcgtttctgggccaagttcattgatgacaagtgcgtggctcta

SEQ ID NO: 232613 - DNA, 363 bp, Glycine max
ctatgatgagtacatcaccgttgacaagaagaagcccaatcttctcatctacggtgatggcccctcaaagaccatcatcactggccgcaagaactttcacgatggtaccaagacaatgagaaccgccaccttctctactgttgctgaagatttcatggccaagtcaattgcattcgagaacaccgctggtgcagaatgacaccaagcagtggcactccgcgtgcaaggtgatcgttcagtgttctttgattgcgctatgcgtggttaccaagacacattgtatgcccacgctcatcgtcagttctaccgcaactgcgaaatctctggaacaattgacttcatcttcggctactccaccacctt

SEQ ID NO: 232614 - DNA, 398 bp, Glycine max
gtgatttgtatggtcaggaaagtaactattctgaaagagtgatgctgatttatgatggtctccactacgatgcattagtgatgtctccctttgaggaagctcctgaggagtttgatcagaccatatttgctgtacagagaaacagaagcattggacctgttgaggggcttgctctaacttttgtgaaggaccagcagaggaaacggagttacactgacacatccaacttcactctccgctgtggggtatgccaaattggagtaattggtgagaaggaggcagtggagcatgcacaagcaactggtcatgttaacttccaagagtacagataatgcactccgttgatttgaatgggatacaaattcatgtgtaatctccgttgatttgaatgagcatca

SEQ ID NO: 232615 - DNA, 357 bp, Glycine max
ctcagttccagattgggtactgccaacagtgccctgataaggttcaatggccctctcactttggtaccaaacctcctctatatttcaatgctggcatgtttgtttatgagcctaatctcaacacctaccgtcatcttctccaaactgtccatgtcatcaagcccacgtcctttgctgagcaggactttctgaacatgtacttcaaggacaagtacaagccaataccgaacgtgtacaaccttgtgctggccatgttgtggcgtcaccctgagaatgttgaacttgatcaagttcaagtggttcattactgtgctgctgggtctaagccttggaggttcactgggaatgaagagaaca

SEQ ID NO: 232616 - DNA, 396 bp, Glycine max
gactggggttgtgaagcctggtatggtggtgacttttggtcccactgggctgacaactgaggttaagtctgttgagatgcaccatgaggctctcacagaggctcttccaggtgacaatgttggatttaatgtgaagaatgttgcagtcaaggatctcaagcgtggttttgttgcatccaactccaaggacgaccctgccaaggaagctgccaacttcacatcccaagtcattatcatgaaccatcctggccagattggtaatggatacgcaccagtccttgactgccacacttctcacattgctgtgaagttttctgaaatcttgaccaagattgacaggcgatctggtaaggagcttgagaaggagcccaaatttttgaagaatggtgatgctgg

SEQ ID NO: 232617 - DNA, 395 bp, Glycine max
atcagtacaacaactcactcactaagctaaacaatttcatcaagcctgccatggcttcctcgtgtgcttcctctgccattgcagctgttgccatctccacaccaagttcccagaagaatggatcactcttgggaagcacaaaagcttcttttcttagtgggaggaaactgaaggtgaacagttttacagcaccagttggagcacgatccagcactacagtgtgtgcagttgctgagcctgataggcctctgtggttcccaggcagcacccctcctccatggctagatggcagtttgccaggagattttggctttgatcccctaggtcttggatctgatcctgagagcctgagatggaatgtccaagcagagcttgtgcactgcagatgggccatg

SEQ ID NO: 232618 - DNA, 385 bp, Glycine max
  unsure (1)..(385): unsure at all n locations
tcggggaattccaattccacattttcaagaaataaggaggcaaaaatgttcatatatgaattggaattatttgttttcttattaggcctatcctgaagccaaaggaaatgagatcggaattcctcggggaattccaattccacattttcaagaaataaggaggcaaaaatgttcatatatgaattggaattatttgttttcttattaggcctatcctgaagccaaaggaaatgagatcggaattcctcggggaattccaattccacattttcaagaaataaggaggcaaaaatgttcatatatgaattggaattatttgttttcttattaggcctatcctgaagccanaggaaatgagatcggaattcctcggnggtaccgagct

SEQ ID NO: 232619 - DNA, 337 bp, Glycine max
ctcaggcaaaagggcaccgagttccctggaacaggagagtatgacaagttctttgatgagggagtttacaactgtgctggttgtgggacacctctctacaggtccttaacaaaattcaattctggttgtggctggccagccttctatgaggggattcctggagccataaatcgcaatccggaccctgatgggatgaggacagaaataacgtgtgctgcttgtgggggacatctatgtcacgtctttaaaggagaaggatttccaacgcccactaacgaacgccattgtgtcaatagcatttcactgaaatttgcgccagccaattcctaataaaaat

SEQ ID NO: 232620 - DNA, 477 bp, Glycine max
  unsure (1)..(477): unsure at all n locations
gggccgttcgcgaatgaattacgtcgcctagcgaagactatgaagtcgcatgcacgcgtacgttaagactcggaattcggtccaaaatttcaaaaccccgtgctccgttccgttcaataacaatggctttaagggtgcaaaaccttgacttcggctttccaatcctccccccccccttgtcaaccatttcggcaaaggtcttcttcaaggaccttttcaataacggatggggaaatccgttgggttaaatcagatttggaaaaagatgagaacctggctggggagtggaaccacacctctggccaatggaatggagacgctaacgacaaaggtattcanaccagtgaggattacagattctacgctatttcagctcagtaccctgaattcagcaacaaggataagacactagtcttccaattttctgtcaagcaagaacaaaaacctgactgcngttggtggctacaataagtttcg

SEQ ID NO: 232621 - DNA, 473 bp, Glycine max
  unsure (1)..(473): unsure at all n locations
cgcccccccccgaatgaatgaagtgagcctgcagaagagctatgaagtcgcatgcacgcgtacgtaaactcggaattcggctcaagtcttgaagggcaattttggaaagttaaacttggaaaaagggattccagaactgccaactttacggctgctaacactggtgttattccacctcccacatctaacctcaccaaccttatcacaaggtttcgagatcaaggactctctgctanggacatggttgctttatctggagctcacacatttggcaaagcaaggtgtactagtttcagagatcgcatatacaatcaaaccaacattgatagaacatttgcattggccaggcagaggaagtgtcctangactaatggcacacgtgacaacaatctagcaaatctagacttcagaactccaaatcattttgacaacaactacttcaaaaaccttctcatcaaaaggggactcctgaa

SEQ ID NO: 232622 - DNA, 401 bp, Glycine max
caagcctccgccgcaattttccggccatgtacctcgaaatcgaggtttttgaccggctcttccggtaaacttaaccgggaagtgactatgcggccaatggggtgccctccttctgcctctttcaaggttgaagccaagaagggagagtggttacctggcttggcctccccaacttacctcaatggcactcttcctggtgacaatggatttgaccctctggggctagctgaggacccagagaacttgaggtggtacgttcaagccgagcttgtgaatggacgttgggccatgttgggtgttgcaggaatgttgcttcctgaggttttcaccaagtttggaatcatcaatgcccctcaatggtatgatgctgggaaatcagagtactttgcatcttcctcaac

SEQ ID NO: 232623 - DNA, 388 bp, Glycine max
  unsure (1)..(388): unsure at all n locations
tttggttccaagttttccatgttttgccaatatttacatgtctctcatggagaagccgcatgttgattttggactaaaactgcttggagctgatgcaatgtctatttctggcctttataggattgtccaggaaatcattaaagaccaagtcgcaaacatgtatctgtggccaaaggccttagaggtgcaaataatggatccaacaaaggccatgaaagttccagttggaatccttcatgtgaaagttgtgagggcagagaagcttaaaaagaaagatctactgggggcgtcagacccttatgtgaaactcaaactcacagaagagaaacttccttcanagaaaacaactgtganatacaagaatttgaatccggaatggaatgaagaa

SEQ ID NO: 232624 - DNA, 387 bp, Glycine max
tgcactgcttgtgtatgatgttaccagacatgtgacttttgaaaacgtggagagatggttaaaggagcttcgtgatcacacagatgccaacattgtaatcatgcttgtggggaacaaggcggatcttcgtcacttgcgtgctgtctccacagacgatgccaaggcatttgccgagagagaaaatacgtttttcatggaaacatctgctcttgagtccttgaatgtcgataatgccttcaccgaagtgctcactcagatatactgcgttgttagtaggaagactcttgagattggggatgaccctgcagccttgcccaaggggcagaccatcaatgttggcagtagggatgatgtctcagctgttaaaaagtctggatgctgctctgc

SEQ ID NO: 232625 - DNA, 382 bp, Glycine max
gggtaaaagtgttgtcccaaagaaagagcatctttctcctttctttcatcaccgttggaagagactgagatgggttcaaaaaccaagacttttacctttgaggaggtggctaagcacaatcacaggaaggattgctggattatagtcaaagggaaggtgtatgatgtcaccccatttttggatgatcatccaggaggtgatgaagttttagtgactgcaacagagaaggatgccaccactgattttgaagatattgggcacagtgattcagcaacagagatgatggaaaaatactttgttggtgaggttgacaccaacactcttccagcacaagttaccagcagcagcagtgtacgcccaccaacacaagcacctgtctata

SEQ ID NO: 232626 - DNA, 339 bp, Glycine max
tttgaaattatctctaaaatggctcattgatcattcaatgtgtatatgtgactttttttattcctgggaacccaaaccatttgcactatctcaatcattattcaatataacctaataatgaatgaacatattaattgaaccatgccagcacacattattgcaatgttttacccttcaaaagtgagtgtcctccaacgctttctccgccttttaacgcacaatgggttctttgcaaaaacaatattgccgtcaaagaacggtgtagaaggaggagaagaaatagcgtatgctcttactcctccttcgaagcttctaataagaaacaagtcaatatgtttg

SEQ ID NO: 232627 - DNA, 381 bp, Glycine max
ctcgagccgaaatacaattatacaaacacatattcattctcctcacataccaaaaataaattatttttcttgttattttccctttgctaacgaaaagccatgaaattcgggaagagcctgagcagccagatcgagaaaaccctgccagagtggcgcgacaagttcctctcctacaaggagctcaagaagaagctcaagcaattcgaccctcccgcccccgcctccgccgccgatgaacgccccggcaagcgcctcaagaccgacgccggcaacgccgacgccgacgccgtttccgacgcctccgacatgtcgaaggaggagagcgacttccggaacctgctggagaatgaactcgacaaattcaacaccttcttcgttgag

SEQ ID NO: 232628 - DNA, 371 bp, Glycine max
  unsure (1)..(371): unsure at all n locations
tgaattctccagagagaagaagaaacttaatcgatcatcacttcacttcactaatacatcatggcagacgagacccagaacaagtatgagagctctgaggttgaggtccaggatcgtggtgtttttgactttctcggtaagaaaaaggatgaagaagacaagcctcatcctcaggaggaggtcatcgccaccgagtttcaaaaagtcactgtctcagaccaaggagagaacaagcacagcctcttagaaaagcttcaccgatctgacagcagctctagctcttcangtgaggangaaggagaagatggagagaanaggaagaagaagaagaaagaaaagaaagggctgaaagagaagatcgaggagaaaat

SEQ ID NO: 232629 - DNA, 394 bp, Glycine max
catcaacttcgacgtgaagttgaaatacaaagtcatctccgacatccccacatcttgcgcctctatggatacttttatgaccagaaacgagtttatttgattttagagtatgcacccaaaggtgaactttacaaggaattgcaaaaatgcaaatatttcagtgaaaggcgtgcagctacttatgttgcatcattggcccgagcccttatatattgccatggaaagcatgtaatacatagggacattaaaccagagaacctgcttattggtgcacagggtgagttgaaaatagcagactttgggtggtcagtgcacacattcaatcgcaggcggaccatgtgtggcacactggattaccttcctcctgagatggtggagagtgtggaacatgatg

SEQ ID NO: 232630 - DNA, 385 bp, Glycine max
cgtttccgttccgttcaaacagttccttttttctcacacacttcctttgttcgtcaccgcagtttcaatctcagatccaacattgttcaatccaaattcaacgcattccatggcgaatcctgcatccgcaagattctccgctcttcttcttctcgtttctttgctagtcaacatcgccgccgaatcgccggctccggctccgactccgaagccggatttgcctccgtcgtcttctcctacttctgctcctgcttcgaacccttccccggccaattcgccgccatctccaactccggcgccttctcatcactcgccgccggctccttcgcccggtaccaatccttctccgtctccggctcctgctccggcggatgacgcacatgac

SEQ ID NO: 232631 - DNA, 361 bp, Glycine max
ttcagtctttcttggaactttgttactctcacacatgtctcgctccgtgcctttggtttcaaccatttttgtcttgcttctgcttctggtggccactgagatgatggggccaacaatggtggcagaagcaagaacttgtgagtctcagagccaccgtttcaaggggccatgtttgagtgacaccaactgtggctctgtttgccgaaccgaacgtttcactggaggacactgccgtggcttccgtcgcagatgcttctgcaccaaacattgttaattttaaaaaattaattaagagtgctttgatagaagatgatagatctatcatctttctactcgtgttgttaattaaccactttgtgtt

SEQ ID NO: 232632 - DNA, 370 bp, Glycine max
gacatgttgacgctgatccaagtacgtctcaccttctccgacgaaaacgggaaccttcccacctgcggcacggatagcccctgcatctggcaattcaacttccgcgagttcaacgtcagcgaagacatcttcgcgagcgactcgatcgagctgttgcgccagtgcggaatcgacttcatgaagaacagcgagaatggaatcgacgtgaaccggttcggggagctcctcatgtcctccgggatcgtgttgaacgactccgtgcgctgggttaccttccacagcggctacgatttcggctacctcctgaagctgttgacatgccggagcttgccggacacgcaggccgggttcttcgatctgatcaagatgt

SEQ ID NO: 232633 - DNA, 292 bp, Glycine max
tcgcatgccacccgtacgtaaactcggaattcggtccaagaatgacaacggtagctgcttctctggatgccaatcaggtgtcaacctcgaaaactgaccaaaaccagttgtgtgacggtgatccccagactagccatgtcttcaaatcataattaccagatatcccaatctcgaaccagatccctctcaacgcttactgctttcagaaactatcccaattctccgaacgcccatgcctcatcgtctgacccgccgccaagacctacacctagtccgagagatacctcatttc

SEQ ID NO: 232634 - DNA, 186 bp, Glycine max
cgatcaccttgctgaccctgtcaacaacaacgcctgggcctatgccaccaacttcgtccccggaaagtgagcgtcaaagaacgaaatgacttttgagagtttttagatttgtgtttggtgaagtacttcagataatgtgaattatcttgtgtatccgaatccaacttaatgttacttgctttttac

SEQ ID NO: 232635 - DNA, 390 bp, Glycine max
tgctcctcaaagttttcataataatctgactcaaactgcaagaggagttcacagtaactactctcaaagatccactccaacttttagggcttcttctagcttacgtttgggacgtgtggcaccttctgatgatggattgcatatggtgtccgaaagttactcttctagacagccaaggccattgaccaccgttggctggcagaacaataatagaaatggaagatcaagaatacctagtgacagatatcggtcattggatgatgagggtttcatgattgttgatcgcacttcactgtatggacctaggaatatgcttgatcgacatagagacatgaggatggacatagacaacatgagttatgaagaactacttgcacttggagagagaat

SEQ ID NO: 232636 - DNA, 344 bp, Glycine max
caaaaccaaaaccaaacaactgaagctggaaggcaccaagaggttggtcacaagagccttctccagagtgatgctctttaccagtatattctggagacaagtgtctacccaagagaacctgaatccatgaaagaactgagagagttgacagcaaaacacccatggaacatcatgacaacctctgcagacgaagggcagttcttgaacatgctccttaagctcatcaatgccaagaacaccatggaaattggtgtctacactgggtattcacttcttgccaccgctctcgctcttcctgaagatggaaagatcttggccatggacattaacagggagaattatga

SEQ ID NO: 232637 - DNA, 380 bp, Glycine max
ctttctctcgttttttctcagaaccttctgaggttaaagcaaaaaccaaagagagagagagagagaaaatgatgaagccatcgatgctcagatctctccactccgccgccacccgcggcgcctctcatctcttccgccgtgggtacgcctccgagccggtgccggagcgcaaggtacccgttctcggcgccgccggcgggatcgggcagcctctctcccttctcatgaagctcaatcccctcgtttcgagcctctccctttacgatatcgccggaactcccggcgtcgccgccgatatcagccacataaacaccagatctgaggtagtggggtaccaaggtgatgaagagcttggaaaagctttggagggtgccgatgtt

SEQ ID NO: 232638 - DNA, 370 bp, Glycine max
tacgtaaaccggaatcggcccaaggcaaggtaggccttaaagcaatccattgtgtggtgggttttggcggttgggtttgggtttggaggatgggcaaccatgaccaacttcattaggcaaattgacacatttgggccctttgccaattgctacaaatgcaaggcccaaactcaacaacccatggaagcagcacaacccccgcatgctcaacatcatcactgagtagtacaacccactcatgactcacaacttcaccaaaatattaatgaaactatgattcaattaaaattttgtatcaaacatgggcatccttagtaacaccccccttaaatttaaggtgtgccggttgtgttttgctgcaattttcttt

SEQ ID NO: 232639 - DNA, 373 bp, Glycine max
gagctagacagggtaattgggcttgaaagggtgatgactgaagcagacttctcaaatctcccttacctacaatgtgtgaccaaagaagcaatgaggcttcacccaccaaccccactaatgctcccacaccgtgccaatgccaatgtcaaagttggaggctatgacattcccaaagggtccaatgtgcatgtgaatgtgtgggcggtggcccgcgacccggccgtgtggaaggatccattggagttccgacccgaaaggttccttgaggaggatgtagacatgaagggccatgactttaggctacttccattcgggtcgggtcgacgagtatgcccgggtgcccaacttggtatcaacttggcagcatccatgt

SEQ ID NO: 232640 - DNA, 360 bp, Glycine max
  unsure (1)..(360): unsure at all n locations
tggatccaccaccctctaagttcgtaatcgaagcatcggaagcccttgccctggcggagtccgccgccgtgaccctcccggaactcctccccaccctggtccccgccgcccagcccctcgcccgaccccccatctccaagttctccgtggccgccgtgggcctggccccctccggccgcatcttcgtcggcgtcaacctggagttccctgggctccccctccaccactccgtccacgccgaacagttcctcatcaccaacctctccctgaatgcggagccccacctggtgtcnctggccgtctccgccgccccctgcgggcactgccgccaattcctccaagaactccgcgccgccgccg

SEQ ID NO: 232641 - DNA, 339 bp, Glycine max
tgcgattgcaatattacaacttttccattgcatggtccctcaagttcgaaagccagaattctggggtgtcccattcatgccgtggataccctctatatcaatctttctgaatgtgtttctgttgggatcactggatgggccatcctatgttcgatttggattcttttcggctgttgcggtgcttttctatgtcttctacagtgttcatgccagctttgatgctgaaggagatgattctttgactgcaaataagaatggggaaatccacgtggaatcaaaagaaattgaagaccaaagtttcgaagtgtagatagtcctttatttgtgttctttttctat

SEQ ID NO: 232642 - DNA, 389 bp, Glycine max
cactttcaacccaatccaatcctcgcacacatgcatgctgtctctgccaaagttggggccaagtcataactacatttccattgttacgattctttctttccatcccaaccacttattaagcgtctgatccaatttctttctctcaccatggatcatcgcaaaccattgttacccacttcctctgacgatgctccaaatccacgcactcggaaggaccttgttctaatgatttgcggtttgtttttgctctcttcccttgttgcctttggagggtacagggcctccaacgcgccacatgctgacgtgtcatcgccagcatcgaacgatgaacaacctagtcccacatcggtgccttctccgaaatgggtaccggttttcacggggtgttc

SEQ ID NO: 232643 - DNA, 308 bp, Glycine max
  unsure (1)..(308): unsure at all n locations
ctggaaaaggcatggggaacaatgaagaaggtaaaaaaaatggtaccaacttgaatgaaggcaaagtccccggaaaaaaagtcctaaaaattggtgggaaccccccctttgggttccctcccgttggtaaaaatttggcgcgccctgaattccaaggttccggaaaaaactgttgggttcgcaaaggtggtgcttataccggttaagttagtgctgaaatgcttgttaatttgggaatttcttgggttantattggtcactctgaaacgaagcagcttttaaatgaatcaaacgaatttgtgggaaat

SEQ ID NO: 232644 - DNA, 345 bp, Glycine max
acccgtacgtaagatcagaattcggtccaaggaaaattatgctggcaaggcaaacaggcttgaccagaaacaaggtggcaaattggttcaccaatgcaagggtgcgtccctggaacccattggttgaggaaatgtacaaagaggagtttggagattccgagatgaactgcaacctttcatctgagaacaacacggtcacaagtaaaagagatgatgttcaagagtctgataacattaacaataataataataaatgggaagagtcacaagacaatttaataactgttgacagtgtgcaagtccaacctcaagcaaaaatggataaaatggtccatgttgaaaatg

SEQ ID NO: 232645 - DNA, 387 bp, Glycine max
aaaaaatttaagtgaggagctagagaatgatgatgaagtctgctatgtgtggagtggtggttgtagcacttcttcttctggcggaggtggggcccatggctgaagctgtgacatgcaccccaacagagttgagtccgtgtcttccagcaatcacttccggtgctaaaccttccaatgcttgttgcacgaagctgaagcagcacacaccatgcttatgtggctacctcaaaaacgctagcttgaagcagtatgttaactctcctaatgcccgaaaaaccgttgcttcttgtgggattccctttccaacttgttaattaattaagccttcttataattaaagtgtgggatatatatatatatatagataaacagtttagtttatacaca

SEQ ID NO: 232646 - DNA, 386 bp, Glycine max
gccagactgagaggaagagagagggagattctttgtttgctaccttctctcggaaaaatggttacgttcaggtttcaccagtaccaggtggttgggagggctcttcccacggaatcagatcagcaccccaagatctaccgaatgaagctctgggccaccaacgaggttcgcgccaagtccaagttctggtattttctgaggaaactgaaaaaggtgacgaagagcaatggccaagtgcttgccatcaacgagatttttgagaagaacccaaccacaattaagaactatggtatatggttgcggtatcagagtacgactggttaccacaacatgtacaaggagtaccgtgacaccactctaaacggtgcagttgaggcaatgtacaa

SEQ ID NO: 232647 - DNA, 352 bp, Glycine max
gaacttttgatgatgcactgttctgcatgatttccaagccacgcaacaatgaccatactccgatcgttgggcatgctgatttgaatacattgattgctagtcttaatttgggggccgacatcccagccatgcaccacaacatggttgctaatgatcagtgcttgtcaggtactggatcctcacaagttggcgatgaacattaggttccacacaacaaacaacggcacatacacatgccagcattcacctggggcaatcacccgcaccgttttcaacttagcagcgcttgcctgtcaccctataccgcgactatgcactatgcagacgatgacttaactttcattgacgtctg

SEQ ID NO: 232648 - DNA, 376 bp, Glycine max
tggagttgcaggaaatgtgtttgcttttgggttgtttgtgtctcccatacccacatttaggaggattatcagaaatgggtcaacagagatgttctcagggttgccatatatttattcccttctgaactgcttgatctgcatgtggtatggcacacctctgatatctgctgataatttgttggttacaactgttaattcaattggagcagtctttcagtttgtgtacacaatcatcttcctgatgtatgctgagaaagcagagaacgtgagaatggttggattattgctggcagttcttggcatgtttgcaatcctattggttgggagcttgcagatagatgacgttataatgcgtcggttctttgtggggttcttg

SEQ ID NO: 232649 - DNA, 391 bp, Glycine max
cccctttctctgcaactccctccaatttagttagagttatagaggcattgttgctgtttggaaacagatctctgatctgaaaatgagtgcatcgaggttcattaagtgcgtcaccgtcggcgacggcgctgtcggcaaaacctgcttgttgatttcctacaccagcaacacttttcccacggactacgtgcccacggtttttgacaatttcagtgctaatgttgtggtggatggaagcaccgtaaacctggggttgtgggatactgctggtcaggaggattataataggcttagacccttgagttatcgaggagctgatgtatttatacttgccttttctctcataagcaaggctagctatgaaaatattgcaaaggagtggatccctgaa

SEQ ID NO: 232650 - DNA, 388 bp, Glycine max
ttcagcttttccctcgttgaaatgaaaatgggttcttctttgtggactttgtgtcgaattttggcttcactagcctcttctgcattctgtgcctttccacggaggccagtggatgttccattcggcagaaactacgttcccacttgggcttttgatcacatcaaatacttcaatggaggttctgagattcaacttcatcttgacaagtacactggtactggcttccagtccaaagggtcatacttgtttggtcacttcagcatgaacataaaaatggttcctggcgattcagctggcacagtcactgctttttatttatcttctcaaaatgcggagcacgatgagatagattttgagttcttggggaacagaacaggacaaccttaca

SEQ ID NO: 232651 - DNA, 334 bp, Glycine max
gacagtactaaacactatattgacacgaagaataggattcttgtagttgggggaactggttacattgggaagtatttggtgacggcaaatgtctctttaggccatccaactttggtatatacacgccctcttattgcacaaactccgccctcaaaggcacaactttgcaatgaattgaactccatacgggtcaaacgtgtccatggagaacttgaacatcagcagattctggctgtgattaaacacgtagacattgtgatatgtcctctggcatcaccaccacgtgattgatccacctcaaaattatatatgctatcacagttgctgggtaata

SEQ ID NO: 232652 - DNA, 390 bp, Glycine max
gttcaaagacacagactaggagctgcccaaaattgctctgccactcttaacggcaaccacaagctcaccgatgctgttcttcctccaacgaaagactggagaaaagaaggtatagtgagttcagttaaagatcaaggcagctgcggatcatgctggacattcagcacaactggggctttagaagcagcctatgcacaagcatttgggaagagtatctctctttctgagcagcagctagtggactgtgctggccctttcaacaactttggctgccatggtgggttgccatcacaagcctttgagtacattaaatacaatggtggactagagacagaggaagcatatccctacacaggaaaagatggtgtctgcaaattctcagctgaaaat

SEQ ID NO: 232653 - DNA, 370 bp, Glycine max
atcttcttcttttgttgtttgtgtgtttgttttttctctcacctgaaaatgtcttgctgctgtggtaactgtggttgcggaagcgcctgcaagtgcggcaacggctgcggaggctgcaagatgtacccagacttgagctacaccgagtcaaccaccaccgagaccttggtcatgggagtggcaccagttaaggctcaattcgagagtgctgaaatgggtgttcccgctgagaacgatggctgcaaatgtggagctaactgcacctgcaacccctgcacttgcaagtgaggtgttggagagctaaagcttcaagcagaaatggcccttagaaataatgataaaaactatatgtagtttcaaaacttcaaaa

SEQ ID NO: 232654 - DNA, 381 bp, Glycine max
gggatctgtagtcctgtgactccgaacaccctcctccctcgatatatctatatccaaatctcccttcaattctcaatctctgaaaacacaattcagaagcgaaacagtttccagctctctcacaaaatgacaacaatatcaaattgctcgcttctcttcctcgtcctcgtcctctccaccctccacatagcttccaccctctcaacccccagcaacttcatcaagtcctcctgcagcacgacccagtacccagccctctgcatccagtccctctccgtctacgcctcgaccatccagcaagacccccacgagctcgtccagacagccctctccctctcgctcaaccacaccgatgccaccaaaaccttcgtcgcaaaatgc

SEQ ID NO: 232655 - DNA, 378 bp, Glycine max
tgaaggcagaaaagtctgcacttattacagactggattcaattcctgttgtacttgttattgatcccatcactggccaaaagatgcgctcttggattggaatggttcaacctgaaagcttattggaaggtctactagcattccttgatgcagggcctaaggatcatcatattaccatgtctcacaagcgtcctagaggaagttctagcccaccaaaatctaaagccttggtagaatcagatgagaataaagaggagtatgaggaagttcaaagagctctggcagcttctatggagagcatgaaagaatcaactgctatggctggaagagacaataaagatgcagatgttgcagtcaatgggcaagaaacaccatggct

SEQ ID NO: 232656 - DNA, 375 bp, Glycine max
attgcagtgagtatgatgttgatggggctgaagaagagccgaacttcgatgttgaggaccggaagcccgaccatcttcatccatcaaaccttgggatggagagaatgatgggaaggatgccaattcagcaaccttctcatcccatgaagggagatgttgtcacaaacctagatttcatccggaagaggaagatttctagtgacttcaacatgatgatggatcagaaaatctacacatgcgagcatccccaatgcccttacagcgaagttcgccttggtttccatgataggtctgctagggacaatcatcaattgaattgtgcatatagaaacagttctgcagattatggtggtggtcccaatttccatgctactg

SEQ ID NO: 232657 - DNA, 383 bp, Glycine max
gattgggccacaaggggtgggcttgtgaaaacggattggagcaaggccccattcacagcctcatacagaaacttcaattcccaaacttcttcctccactggccaatcactggacgccacggggcaggcaaagatccgttgggtgcaaaagaattacatgatttacaattattgcactgatatcagacgtttccctcaaggccttcctccagaatgctccattgcatgagaatatttaattcaatgttgcatatcattataaaatgatcctcatgaacgtgacacacatgtgttgcctattacgttaatttactttcttgtgtaaattaatgcaactaaaactgttattattgttggtttgtgctttgttgagcactactccat

SEQ ID NO: 232658 - DNA, 361 bp, Glycine max
ctgaggatataaaggaaactggatacacctatattatgccaaagagttcacatatatatggttcacacgaaggtataaatttgaactctgaggatataaaggaaactggatacacctatattatgccaaagaacattttgaaaaagtttatatgcatagcagatcttcgaacacaaatttctgggtacatgtatggcgtaagtcctccagataatcctcaggttaaagaaattcgctgcattgtgatgccaccacaatgggggacacatcaacaagttcatctgccatcagctcttccagagcatgatttcttgaatgatttggagcctttaggatggatgcatactcaaccaaatgaact

SEQ ID NO: 232659 - DNA, 381 bp, Glycine max
gtgagtcagaaaaccaagcgctctgagtttgtacagcgtcgaaccaggagaccattctctgtgactgaggtagaagcacttgttcacgcagttgaggaacttggaactgggaggtggcgtgatgttaagttgcgagcttttgagaatgcagaccataggacttatgtagacttaaaggataaatggaaaacattagtgcacactgcaacaatctccccccaacagaggaggggagaaccagtacctcaggagctcttggacagagttttggctgctcatgccttctggtctcagcaccaagccaagcaacatggcaagcatcaagctggaccaggaaccttgaagattacagaagcctcagctgaaagaccttgtgtgtgt

SEQ ID NO: 232660 - DNA, 362 bp, Glycine max
ctaaatttcagaaatgttactgcagacattatctaaccccacaatactccatgagacactcatatgggtgtggcaaccaatgcaccgtcatgggaagattgcaccaggtcccaatgcgttgccaattagtggcaacctccacatgctacggaaactcccgcaacgcacccttcaaacctttgcaagaaaatatggaccccaaatgtccttgaaactacggcaagtccagaccatagatggattcctccccctgaaacgctgaacgattcctcaagactcatgacactgtttttgcaagcatgccaaagattcaagcctctgaatatctctctcatggcaccaaaggcttggagttttccgag

SEQ ID NO: 232661 - DNA, 458 bp, Glycine max
tgaattaggtgcatagacaagacaatgaagtcgcatgcacgcgtacgtaagctcggaattcggctcgaggggcaatgccgcttgtaaagctctttcgtcgagtgcgcgatcatgacaggactcgaggaagaagccccggctaactccgtgccagcagccgcggtaagacggggggggcaagtgttcttcggaatgactgggcgtaaagggcacgtaggcggtgaatcgggttgaaagtgaaagtcgccaaaaactggtggaatgctctcgaaaccaattcacttgagtgagacagaggagagtggaatttcgtgtgtaggggtgaaatccgcagatctacgaaggaacgccaaaagcgaatgcagctctctgggtccctaccgacgctggagtgcgaaagcatggggagcgaacgggattagataccctggtagtcgatgccgtaaacgatgagtgtt

SEQ ID NO: 232662 - DNA, 379 bp, Glycine max
cggctcgagcattctccctttcctctccgaaccctcgatcactctcacgcgctcctatattcgctcctccaccgtcgctctctcgaacaaccacaacaccatcttcatcacatggcaaacgcagcatctggtatggcagtccatgatgactgcaagttgaggtttttggagctgaaggcaaaaaggacacaccgtttcatagtttttaagattgaggagcagcagaagcaggtcattgtggagaagcttggtgagcctgcccagggctatgaagatttcactgccagccttcctgctgacgagtgccgttatgctgtttatgattttgagtatctgactgaagggaatgtccctaaaagcagaatttttttcattgcgt

SEQ ID NO: 232663 - DNA, 380 bp, Glycine max
gcaataaagacagggtgggttcatcccaatatcaatttagaaaacccagatgaaggagtggataccaatgttcttgtcggctctaagaaagagacactagatatcaaggcggccatgtctaattcattcggctttggtggccaaaattcctctatcatatttgcccctttcaaatgcaatagattttagaaaatattacttgtttattactttaaagaagaataaccagacaatgtattggatactcacactactcctttggttgaacaaaaatgattataggggggattgctttcttggatgatcacttatgttcaaaaacattgaagtaatcctctagaatcaatatttctagacttgtttgttcaaggttttagtgt

SEQ ID NO: 232664 - DNA, 387 bp, Glycine max
  unsure (1)..(387): unsure at all n locations
aacattctgagctacaacctcggcggaatggggtgcagcgcggggatcattggtgtggacttggccaaggatattctccaggcgaaccctaataactacgcggtggtggtgagcacggagatggtggggtacaactggtaccaggggaaggacaggtctatgcttatcccgaatagcttcttccgcatggggtgttctgctgttctgctttccaaccgtcgaagggactatagccgcgaaaagtaccgtcttgaacacattgttcgcacgcataagggtgccgatgaccgcagcttcaggtgtgtttaccaagaggaagatgagcaaaaactcaagggactaaagatcagcanagacttgattgagattggtggtgatgctctaaaa

SEQ ID NO: 232665 - DNA, 357 bp, Glycine max
attatctccaaatacatggatttctctgaagtctttccaatttagtccctgcacgagcttctttatatagtaagactgtgtcttccttcatcacactaaacaagttaaaagaacagcatcactgaactaacaaagcaaccctatgtcaaaggtggtttgtgtcaccggagccagcggcgccatcggatcatgggtggtcctactcctcctccagcgtggttacaccgtccatgccaccgtccaagatatcaaggatgaaaatgagacgaaacatttggaggaaatggaaggagcatagagtcatctccatttttttgaaatggatcttcttgacatcgactccattgtcgctgccat

SEQ ID NO: 232666 - DNA, 371 bp, Glycine max
cattttcaagctctcaacgccatctccagctgcttccttatcagaagcgcttcgccccagagattctcgcttcctctccttcaatccttcttccaacgctattaattacaaaattaacctctccgcttccctccgatccattcactccctccctcttaaaacctccttgcggatcaaatgctcccaaacagatgggaatggaagtcctgcaaagaggacagtgcttcatgatctttatgagaaagaagggcagagtccatggtatgataatctctgcagacctgttacagaccttcttcctcttatagcaagtggtgtcagaggcgtcactagcaaccctgcgatttttcagaaagctatctcatcatcga

SEQ ID NO: 232667 - DNA, 384 bp, Glycine max
caaggattcacccaattccaagaaggttatactcggtggctctttcgttctcacaaggcaaccgtgtccttctattggtccccttttcttgtagatggtgttccaagaaaaaatccgggactcccttataacaaaattcatttggatcgtgctaatatgaagtgggaaaaggatttggatcaaatagacatcatagtgttgtccttagggcattggtttttagttccttcggtattctattggcgtgacaaagttataggatgtgtgagccatcctgtttctaattgcaccaaagacattggtgtttatgttccaataagaagggccttaaggactgctcttaatagcataattaagaggaaggtgaaaagaggaaatggaatt

SEQ ID NO: 232668 - DNA, 379 bp, Glycine max
ctcgagccgaatcggctcgaggtggcatctatctaagacaggcaccatgtcacttcttaaccagctctttaacagaggcgttttcggcactcgatgcaaaacatgcctgaacctggcaatttcacgcattaagctgctgcaaaacaagagagatatgcaactgaaacaaatgtgcaaggagattagccaattcttgcaggctggccaagaggcaattgctagaatcagggtggagcatatcatacgggaacaaaatacatgggctgcatatgaaattttggagttgttctgtgaatttgttcttgcacgtgtacctataattgagaatcagagggagtgccccacgggattgcgagaagcattgcaagtataatttttg

SEQ ID NO: 232669 - DNA, 275 bp, Glycine max
caagaacggacgattggccatgttctctatgtttggcttctttgttcaggccattgtcaccggaaagggtccattggagaacctcgccgatcaccttgctgaccctgtcaacaacaacgcctgggcctatgccaccaacttcgtccccggaaagtgagcgtcaaagaacgaaatgacttttgagagtttttagatttgtgtttggtgaagtacttcagataatgtgaattatcttgtgtatccgaatccaacttaatgttacttgctttttacaa

SEQ ID NO: 232670 - DNA, 387 bp, Glycine max
agagaatcagaatcagaagatgaagaaagaagacacagtgaagctgatcagttccgaaggtttcgaatttgtggtcgacaaagaagctgcaatagtttcacagaccatacataacatgcttacttctccagggagtttcgctgagaggcagcacggcgaagttacctttcctgagatcagcaccaccattctcgagaagatttgccagtacttttattggcatctccaattcgccagtgggaaggagacggaattttccattgaacctgaattaactctggagctaatgatggccgccaattacctccatacataagcattttgacttccccaagggtgatagttcttcgtcctcataatggaactattgcttagttgtgcattcaa

SEQ ID NO: 232671 - DNA, 359 bp, Glycine max
ctgacatggcttcttcactcagaatttcaagactcatctctcgctccttttcttctacctccttcttttcacgaggtgggaatggtttccttggttcaagacactgcaaatacagcacttcttctgccattgaagaagaacccgttaaaccatcagtgcaagtagaacacacccaactcttaattgatggaaaatttgtagatgctgcttctggtaaaacttttccaactttagatcctaggacaggtgaagtaattgctcatgttgctgagggtcactctgaggatgttgatcgagcagttgcagctgcactaaaagcatttgatcatggaccatggcctaagatgacggcttatgaa

SEQ ID NO: 232672 - DNA, 360 bp, Glycine max
agccaccaaatgtctgtgacaactactacagctgtgctgatagtgctacttgttgctgtattttcgagttcggaaatgcttgctttgagtggggttgctgtcctcttgagggtgctacctgctgtgatgaccactacagttgctgccctaacgactatcccatctgcaacacttatgctggaacttgtctcaagagcaagaacaacccattcggagtgaaggcattgaggcgtactccggctaaaccccattggacctttgggcgtaagaacaaggtcagcagtgcttaagcagataaaggaaatgtgaacgtgcaggaaggagccaatgatgaagtaaatgaaagacgaagaattaaaa

SEQ ID NO: 232673 - DNA, 372 bp, Glycine max
gtactagtgttgggaaggaggaaaggaaacaagaagaggaggggtttttgttttggtgattgaattggggatttagggattgtgtacggtaacaatgaatttcaagatggattccgatagagcgaagctgttcgtaggaggcatttctcgcgacaccaccgaagacgttctcaaactccacttcgccaagtacggcgtcgtttccgactccacaatatccgtagaccgcaccacccgaagccctagaggttttggctttgtcactttctccgacctctccgcagctgataaagccctccaagacacccacgtcatcctcggaagaacggtagaagtgaaaaaagcgattcccaggagtgaacaacatcaaca

SEQ ID NO: 232674 - DNA, 380 bp, Glycine max
gatggaatcaacatttgcaccctgggccttcatgatgtgaggtctagatttggaattattcctcaagagcctgtcctctttcaaggaacagtacgaagcaacattgacccccttggactgtattcagaggaagaaatttggaagagtcttgagcgctgccaactgaaagatgtggtggctgcaaagccagagaaacttgaggctccagtggttgatggtggagacaattggagtgtggggcaaagacagcttctttgcttgggaaggatcatgctaaaaagcagcaaaatattgttcatggatgaggcaacagcatccgttgattcgcaaactgacgctgtgatacaaaagatcatccgtgaggactttgcggatcgtac

SEQ ID NO: 232675 - DNA, 387 bp, Glycine max
gctggatatggacttcagattggagcaattccgtgatcacgaacaccagtgcagtccttgatggatatggacttcagattggactgcactggtgttagtgatcacggaattgctggattgctttcttcaacttctttggttctatcaaaggtgaagctccaggcattgactgtttcagatctctctctagctgttattggtcattatggcaagtcagttactgatcttgtccttaattgcctcccaaatgtcagcgagagggggttctgggtcatgggtaatggtaatggattgcagaagctaaaatcacttacagttgcatcttgcaaaggagtaacagatattgggcttgaagctgtaggaaacggttgtccaaatctgaaaatt

SEQ ID NO: 232676 - DNA, 346 bp, Glycine max
agtcatctttgtcataatccaggattaagcctgcattaatcaccagaatggctaattcatatgaaaacaacttcccccctcagaagcaagacactcagcctggcaaagagtacctcatgaatccaccaccccaatacaacagctcccaatacaagccatcaaataaacttcagggaaagatagctgtagtaaccgggggtgattctggaattggacgagccgtgtgcaacttgttttcattagaaggtgctactgtgatcttcacctacgtgaaggggcaagaggacagggacgcgagtgacacgcttgagattataagaaaagctaagactgaagatgctaaaga

SEQ ID NO: 232677 - DNA, 387 bp, Glycine max
tatcatcttcgacataaaatagaagcaagacagatgaaggagataggaaagggttaattgaatccaaaaaaaatgaagagaaaaacacaatgggcacggtttggacttcgatgatagcattgttgctttgcctgatgacatcatcggttcggggcgaggacccttacatttactacacatggaacgtgacctacggcaccattgccccattgggtgtcccccaacagggtatcctcatcaatggtcagtttcccggccccgaaatcaactccaccagcaacaacaacgtggtcatcaatgtcttcaacaacctcgatgagcctctcttgttcacatggcatggtgtccaacaagagaagaactcttggcaagatggcacattgggtg

SEQ ID NO: 232678 - DNA, 458 bp, Glycine max
aatgatttagtgcatagccaagacatagaagtcgcatgcacgcgtacgtaagctcagaattcggctgagctatgttcttcacatgatgtttgggtatcagttttactcacaaggcaagttagaagttgcagtgtcatgtgctgttattagcgtggttgcagttgtcaagttcggtgttatgaagccttgtttttatggactggctgtggcagcaagttatacaggtctgccataaccacgaccttttttcccctttgggaagggttgtgtttttttaccaagtcctagtttttttaaagcttcattttttttgaacttggcactgcacctccttattgtcgaatgatattcatacctgcccttgtgctgtatgttatgaaatgtaatgaaataaataaaattcagtctcagtcctagttgcgtgaacagatgtgatgaatatatatttctctatactg

SEQ ID NO: 232679 - DNA, 374 bp, Glycine max
ctcgagccgattcggctcgaggagaaagagatcacatagcagaatggcttctactcaatgtttcttgcaccaccatgctcttaccacccctgccagatccccatcacaacgcatcatggttagcaccaagcctaaccagcttgtttgcaaggcacagaagcaagaggatattgatgtcagcccaatctctcgccggttagctctaaccgtgctcattggtgctgctgctgttggctccaaagtccaacctgctgatgcagcttatggggaagctgccaatgtgtttggaaagccaaagacagacacagatttcctgccatacaatggagatggattcaaactatcgattccctcaaagtggaacccaagcaaag

SEQ ID NO: 232680 - DNA, 341 bp, Glycine max
gtctcttcgttggtggcattcctctgcttacttgcagcatcttacataataggacaaaccatttgtgttgatggcggcctcaccgtgaacggtctctacataagctaggcctactgtgacagtttcaatgttttgtttagtctgttacacgctacttgtaataatttcactttaagttgtggacagtgcacaccccatatctgtttttaatgacctgataagaatgagtactcagtgataagtttgtttttcgtgtcatgatttagtcacatgtcccatgagtctaggagcactataatcgtgggcagtttatcctacttcccgttggttgtaacgctttc

SEQ ID NO: 232681 - DNA, 383 bp, Glycine max
caccattcaccaacctgcttctctgttctcttctttcccttcccaagaagaagaagaagaagatgccttcttcagaatcatcaacaggcttctccgaaaccatttgtgtgaccggcgctggtggcttcatcgcctcttggatggtcaaactcctcttggagaaaggctacactgtccgaggaaccctcagaaacccagatgatcccaagaacgggcacttaaaagagtttgaaggagcttcccagagactaactctgcataaggttgacctccttcatcttgactccgttagatctgttattaacggctgtcatggtgtctttcacactgcttctcccgtcaccgataaccccgaagaaatggtggagcctgcggtgaatgga

SEQ ID NO: 232682 - DNA, 386 bp, Glycine max
aagaaaggtaataagaaaggtcctccagctgcatcagtgacagaaaacaaggtgacaggcttgatatatgtaaatgaacagtttgatggtttggaagccgattgcctgagtatccttcagaacaaatttaacagagatacgcgaacttttgctccagactcagagatattgcaggctttacaacagagttctgtaggtcaatcttctaattataaacaaatccaaaagcgttgtatgcctttcttgaggtttaagaaagaggaagcaattgcacttgggcctcaagccctggatttgagattgccgtttggtgaaattgaggttcttaaggaaaacttggacttgatcaagagacagataggtctagaagatgtggaaattttatc

SEQ ID NO: 232683 - DNA, 356 bp, Glycine max
gcacaacgaaccactctgaaaccgctcacgttatccacaacactctcaaacctccttaaaccctaaccaatccaaccatggcttcttcttccaacttcactgcaatgtccgcctgcaagctctcctcctccgccgccatctcctccttcacctcccgccgccgctccaacgccgtcgttctgtcgaggcgcagccgcgccgccagggtctccgccatggccaatgagttgcacttcaacatagaccgcaccgcaattaagaagctccagagcggtgtgaacaagctcgcggatctggttggggtcacgcttggtcccaagggaagaaatgttgttctcgagagcaagtatggctcg

SEQ ID NO: 232684 - DNA, 373 bp, Glycine max
ggctcgagatcgacgcttcactcaggtcgcaaccagcgaagatgaggacgaagcaccgccgcctcctcctcctcccaagcagcaatcgtcggtcagtgcccccgaagagaaccgttcgaagcagcagcagcgcaagaggaagagaatgaagcttcaagaagaagaggaagaggaagaggagaaagaggaagagaagaagaagaagaagagaaagatcaaagacaagcaagaagagagatcgaacgaagaagaggaaccgccgcaggaagacgcaaagcccattggcgaaccggttaggttatccggaaagggaaggggccgcaaaaagcattacgaatccttcgagtacgacggaaaccaatacatgctggag

SEQ ID NO: 232685 - DNA, 330 bp, Glycine max
  unsure (1)..(330): unsure at all n locations
ggctcgacatctacgcttcacgcaagtctcaataatttcagataacgattacacaccacattgtcctctggcctccgctaaacaatcgatctgtcaatttactggagtggaatcgttcggatcagcaccacttcatgcaggttatgttgcatcttcagtgatcatgatgacacgattaagttatagacggagtgttttgggatgagacttttgaataaaagacatattccagaagagatctatgcaagtgcatgtcttggatatggagatgcacagtccaatgttgatgtggttatgttatcaggttatggaangggcctcatatgacat

SEQ ID NO: 232686 - DNA, 356 bp, Glycine max
ggtgccttatcgctgtggttatcatcttcttcttcctctttcttagatctcttctttctctacgccgcacgccgaaaccatggccggaaaaggagagggtcctgctatcggaatcgatctcggaaccacctactcttgcgtcggtgtgtggcaacatgaccgcgttgaaatcatcgccaacgaccaagggaacagaaccacgccgtcttacgtcggattcactgacaccgagcgtctcatcggtgatgcggccaagaatcaagtcgccatgaaccccatcaacaccgtcttcgatgccaagaggttgattgggcgtagattcagtgattcctctgttcagagtgatatcaaattgt

SEQ ID NO: 232687 - DNA, 384 bp, Glycine max
tttgctcctaagccctcatctggaccacacaaatcgagggaatgcctgccactcatactcattttgcgaaaccggctgaagtatgctctaacataccgtgaagtcattgctattctgatgcagcgacatgtccttgttgatggcaaagtcaggactgacaaaacataccctgctggttttatggatgttgtatcaatccctaaaacaaatgagaacttccgcctgctgtatgacaccaaaggtcgattccgtctccactcagtcagggatgacgaggctaagttcaagctttgcaaagttcgctcagtgcagtttgggcaaaagggtatcccatacttaaatacctacgacggtcacactatccgctacccagaccctctcatc

SEQ ID NO: 232688 - DNA, 386 bp, Glycine max
  unsure (1)..(386): unsure at all n locations
ataagcttgttgtgtccacctcctcctcccttcttcacactgctgttgatcttgttaacgagaccaagttggatgacgagatcaagtcatggctagcatttgctgcacaaaaaattgttgaagttaacgcattggctaaggcattgtctggcaacaaggatgtggccttcttctctgctaatgctgcagctcaggcttcaaggaagtcctctccaagagtgaccaacgaggctgttcagaaggctgctgctgcattgaagggttcagatcatcgccgtgcaacaaatgtcagtgccagactggatgctcaacanaagaagctcaaccttccaatccttccaaccaccactattggatccttccctcagactgtagaactgaggagg

SEQ ID NO: 232689 - DNA, 382 bp, Glycine max
gttttcccagtgccaggaggacccttctggccaaggcactttgcaactgaaagcttgtgcaaaatttatcagcataactggttcgacccttacttcaaagtggttcggagatgccgaaaaactaaccaaagctcttttctcatttgccagcaagcttgctcctgtcattgtaattgtcgatgaggttgacaattttgcttggtgctcgaggtggtgcttttgagcattagggcactagaagaaatgagaacgagtttatggcagcttgggatggattgaggtcaaaagaaaaccaaagaatccttattctaggtgcaacaaaccggccatttgaccttgatgatgctgttattcgtcgcttaccaagaaggatatatgttga

SEQ ID NO: 232690 - DNA, 356 bp, Glycine max
  unsure (1)..(356): unsure at all n locations
cctgttcatggtggcggctaccctggccgtggtggtggatactgtangcatggctgttgcggtggccggacatacaacggaggttgcagaaggtgctgctataacgctggcgaagctgttgctgcacaaactcaagataagactcacgattaagacgatgcagttctacttaattagtacttttgatattttaatttcatgaaataaaacagcttgtgactggagaggcatggattctcatcatgcatgagtccatgatctttcataccactagagatatttcgcaagtagaaattaagagtgttgttgaatgtataataatacacgtcttcgtgcctgtgtgatgagtttaagag

SEQ ID NO: 232691 - DNA, 380 bp, Glycine max
cggctcgagaacaaactcattaattagcggggataataagggtgcagctgcacgatttatggaagactggtttgagcgaaaggggtctgtaagaatggatttggttagatttgaaaatgatggagtcccccgaagaatttcaaacataattcccagtcttcatgataattaccatgaattactggaacttgctgcctcattccgatctcctcttggtaaacctgcaaccaaaacttcaagcattgctagacgtgttagaggtgtccttaggcaggttgacaagcctagatttgtttctgcattttgtcaaacaaattgtggtgatgttagtccaaatgtactcggaactttttgtatagacactggactaccttgtgact

SEQ ID NO: 232692 - DNA, 386 bp, Glycine max
  unsure (1)..(386): unsure at all n locations
cacaacagtgggagggagatccaaaaagagagagtggaaaagatggcgcggttgatcacagtggtgtggtgcgcggtggcggtgctattatgcgccgcggccggtgcgtcgtgggtggaggaggcggcgaacccgatacgaatggtgtctggcgtggaggcggaggtggttcgggtgatcggggagtgccggcgtgcgttgaagtttgctaggttcgtgagcaggttcgggaagagttaccaaagcgaggaagagatgaaggagaggtacgagatattctcgcagaatctcaggttcatccgctcccacaacaagaagcgtttgccctatactctctctgttaatcattttgctgattggacttgggaagagttcanaagacacag

SEQ ID NO: 232693 - DNA, 330 bp, Glycine max
caagcattggcagagagggaaggtctctcgtttcttgagacatctgcactggaagcaaccaacattgagaaggcattccaaaccattttgacagagatttatcatattgttagcaaaaaggcgctcgctgctcaggaagcagctgttggtaccatacttcctggtcaaggtaccaccatcaatgttggggatgcatctgggaatacaacgagaggctgctgctccgcttaatgtgacatgtgaggaaaaagcgatggtagcagatagtattttttccccccaattctgttttgcccctttctcttttcatcttttttttttcctcctttc

SEQ ID NO: 232694 - DNA, 383 bp, Glycine max
ggcgacgccgagctccacgatgctttcaacctgtacgatcatgacaagaacggccatatctccgccacggagctctgccaggtgctgaaccgcctcggaatgaagtgctccgtcgaggaatgccacaacatgatcaaatccgtggattccgacggcgacggcaacgtcaacttccccgagttcaagcggatgatgagcaacaatcgtgaaaatgctagcagtggcgaagaaaaaaccgattaggcgctttggatttgatgtttatagctaggctgggcaaaggcaattccctcctgaatactaaatctatgcctgtttgttatgatcgatttgttattacttttacccctcgtttcctcttttttttttctataaatataaat

SEQ ID NO: 232695 - DNA, 382 bp, Glycine max
gttagggttcacaacttttccttttccttttgcttgcgaatctgaatcaaataatcaatcatccattcattattcatcatgtcgtcggcgaagaaaatcacgctgaagagttcggacggcgaggctttcgaggtggaggaggcggtggcgctggagtcgcagacgataaagcacatgatcgaggacgactgcgccgacagcggcatccctctgccgaacgtgacgagcaagatcctggcgaaggttatcgagtactgcaagaagcacgtcgaggccgcgaatcccgaagacaaaccctccgaggacgatctcaaggcctgggacgctgaattcgtcaaggtcgaccaggccacgctcttcgatctcatcctggctgctaact

SEQ ID NO: 232696 - DNA, 415 bp, Glycine max
tgcacgcctacgtaaacatgaacttcggattcggctcgagctcgagccgaatcggctcgagaagtaagcttgctcatgagaacagcagcattaaaactcgtgtcaggaatgaaggcgggattccaccgcttgttcatttgcttgaatttgcggatacaaaggtgcaaagagcagctgctggtgcattgcgaacccttgcttttaaaaatgatgaaaataaaaatcagattgttgaatgcaatgcccttccaactcttattctaatgcttcgctcagaagatgctgctattcattatgaagcggttggtgtcattgtaaatctggtccactcttcccctgatataaagaaagaagttcatcttgctggagccttgcaacctgttattggactacttagctcctgttgctctgaaag

SEQ ID NO: 232697 - DNA, 408 bp, Glycine max
caaagagccattgaactttgactataatattcagagttcagattactcactctaatcttctaagttttcattttggggtttaagtttctgaaggaaaaaaaaaaatgataaagtttgttctatttttgttctgctttgcctctgcactgaccctttcagtatcggagtccaaatcagcttcagtgcaacctcatgctgctgaatctttctctgttggatatattcagatgaagactgcagcgaactgttcttacctggtagttatatctacgagttgttcatcgcctaagttcacaacggataagatcggtatcacgtttggggatgctaatggcaaccaggtatatgaaccaagactggatgatccaatttcaaggacatttgagcagtgttcttcagatacatttc

SEQ ID NO: 232698 - DNA, 412 bp, Glycine max
gagaagagagtttcaagaatggggagcgaagaggagaagggtgaattctacttgcgatactacgtgggccacaagggcaagttcgggcacgagtttctggagttcgagttcagacccgatggcaagctccgctacgcgaacaactccaactacaaaaacgacaccatcatccgcaaggaggtttacctcaaccctgccgttttgcgtgagtgccgccgtatcatcgccgagagcgaaatcatgaaggaagacgacaacaactggcccgaaccggaccgagttggacggcaggagctggagattgtgatggggaacgagcacatttccttcaccacttccaagattggatctctcgtcgatgttcagagcagtgcagattccgacgggctacgcatattttactatcttgttc

SEQ ID NO: 232699 - DNA, 346 bp, Glycine max
gattcctaatacaaacatggcaatgaagaagctcttgtgggttgtcctgtctctatctttggttcttggagtggccaatagctttgattttcacgacaaggatttggcgtccgaggaaagcttttgggacttgtacgagagatggaggagtcaccacacggtttcgcgaagcctcggtgacaagcacaagcggtttaacgtgtttaaagcaaatgtgatgcatgtccataacactaacaagatggataagccttacaagctgaaactaaacaagtttgctgacatgaccaaccatgaatttaggagtacctatgctggctcaaaggttaatcaccacagaatgttc

SEQ ID NO: 232700 - DNA, 318 bp, Glycine max
  unsure (1)..(318): unsure at all n locations
caaaatcagcctctaatatttttctcactgtctctccagagaacttgatacagagatggcagctgcaacatctggtgctgtgttaaatgggttgggatcttccttcttgagtggaggaaacaggagccaaacccttctggcctctgctattggaggcaaagttggtgctgctgttactgttaatcccagaagactcattgtggtagctgctgctgcaccacagaagtcatggctccctggtgttagaggtggtggcaatctcgtcgacccagaatggcttgatggatcgctaccangtgactatggttttgatccact

SEQ ID NO: 232701 - DNA, 319 bp, Glycine max
caatcttctctatctaaaatggagtttgttctaaattacctaaatgccactgccattggagttctttctataaccctcatctttttgtatttgtataatcccttcaaatttgcattacgtaaaaaagaggctcccaaagttgcaggtgcatggccaatacttggtcacctaccactattgagtggttcagagacacctgatagggttttgggtgctttggctgataagtatggacccatattcaccatcaactatggtgtcaaaaaggctttggtaatcagcaactgggacattgctaacgaatgcttcaccaaaaacg

SEQ ID NO: 232702 - DNA, 369 bp, Glycine max
aaggtataccatttgaaaatggcttcttgtgtgtcatccatgtcttctaccatcctcatcctaattgccatctgcacactgtcctcacttctgtcagctgcatctgcagcaacagaggagggacgaacaaggcccttcaaaagggtctatgcctttggagactctttcacagacactggcaacaccaaaaatgccgaaggtccaagtggctttggtcatgtttcaaactctccctacggcaccactttcttcaaccactccacaaacaggtactcagatggtatgcctgtgattgattttgtagctgaagcactttcactgccttacttgcccccctagcgtcacatcaaaggcaatgacacttttggt

SEQ ID NO: 232703 - DNA, 397 bp, Glycine max
  unsure (1)..(397): unsure at all n locations
cagcgtgcatcattgcacttactgatcagggccttaatgctatcaatttgggagacagtgggtttatggtggtccgggatgggtgcaccatattccggtccccagtgcagcaacatgatttcaatttcacttatcagctggaatgtggtagtaatggtgatttacctagttctggtcaggtttttaccattcccgttgcacccggtgatgtcatagttgctggtacagatgggctatttgataacttgtacaataatgagattacagcagtggtggttcatgccatgagaaccggattaagccctcaggtgacagcccagaagatagctgcattggcacgtcaacgggcactggatanagacaggcagactcctttttcaaccgctgctcaagatgc

SEQ ID NO: 232704 - DNA, 397 bp, Glycine max
tgagaagcagagaaagaaggctgctttgcaagctattcaagcacagaaagagaaagccaatgaagctgctgagctgaataaggtcgttgagagtaatacgagcagcgtggagaatactaatactaataatactcaaaataggtctatggtgtcttcttctactgtgaatccggcggtgtttcagggtgttttctgccgcgatcttacggtggtggggaacttgctttctcaggcggggtttaaccggtccatgccggtgaagtatgaagcgttgagctgttgattgaatcgaaattggtcggaaatggaaatgtttggttggggggctgttggagatggtaccggcagagggaatctctggttcgttcgttcacttttgtttgtacaaaattatgca

SEQ ID NO: 232705 - DNA, 371 bp, Glycine max
ctccgcagcagccacacttcttcgccgtttcagctgaagagccatccgcaggtaagcaatggttaagcataataatgttatccccaatgggcacttccggaaacactggcaaaactatgtgaagacttggtttaatcaaccagcccgaaagaccagaagacggttggctcggcagaagaaggctgtcaagattttccccaggcctactgctggatctctcaggcctattgttcatggccagactctgaaatacaacatgaaagtcagagccgggagaggattttcactggaagaattgaaggctgcaggaattcccaagaaacttgctccaactattgggatttctgttgatcacgcagaaagaatcgttc

SEQ ID NO: 232706 - DNA, 437 bp, Glycine max
cgcctacgtaaactcggaattcggctgaggctgccgattggtcaaaatatataaatccatttgttgaaatttgttactgtattgcattgcgtttgctgcacccatcaatggcaggcgtttctctcaagtgcggtgactgcggtgctctgctgagaaccgtataagaagcgcaagagcacgctgaactcacctcccactccaacttctccggatccaccgaaccggttctcaacctcatctgcatcgcttgcgccaaaccctgccgatccaaaaccgagagtgatttgcacacgaaaagaaccggccataccgagttcgttgacaatacttccgaggccgttaaaccgattagtttggatgctccgaaggtggatgcaactgcttcatcggaaaaaccttccgctgctgcatccacggaccaaagtgcagaaatggtt

SEQ ID NO: 232707 - DNA, 409 bp, Glycine max
cggctcgagcggctcgagctacgttaaggctggtatctacgacgagtacatcaccgttgacaagaagaagcccaatcttttcatctacggtgatggccccacaaataccatcatcactggccgcaagaactttcacgagggtaccaagacaatgagaaccgccaccttctctactgttgccgaggatttcatggcgaagtcaattgcatttgagaacaccgctggtgcagaaggacaccaagcagtggcacttcgcgtgcaaggtgatcgttcagtgttctttgattgtgctatgcgcggttaccaagacacattgtatgcccacgcccatcgtcagttctaccgcaattgcgaaatctctggaacaattgatttcattttcggatactccaccaccttgattcaaaac

SEQ ID NO: 232708 - DNA, 409 bp, Glycine max
gaaacgtgaaccagaaccagaatggatcttcaacaacgaccactgaaacttcactttattccttacctgtcaccggggcatgtgatccctctctgcggcattgcaacactcttcgcctcacgcgggcagcacgtgacggtgatcaccactccctactacgcccaaatcctccgcaagtcaagcccctccctccaactccacgtcgttgactttcccgccaaagatgtgggccttcccgacggcgtcgaaatcaagtccgctgtcaccgacctcgctgacactgcaaagttctaccaagccgccatgctcctccgcagacccatctcccatttcatggaccagcacccacctgattgcatcgtcgccgacaccatgtattcctgggcggatgacgtggccaacaacctcc

SEQ ID NO: 232709 - DNA, 378 bp, Glycine max
gagaaatagagagagaacttcaagtgagggtgagagtgacacaaatctagagagagcactagtactctaaaagtctattatattcttcaaaatatgaccatgcatcgcgagtcttgggcttttgtcttcggcgttatgggcaacatcatctcctttggagtgttccttgctccattgccaaccttttaccaaatctacaagaagaaatccactgaaggtttccagtcacttccttatgttgttgcactgttcagtgcaatgctttggatttactatgctttcgtgaaaagggaaactgccctccttctcattaccattaacacatttggaattgttgtggagtcaatttacctttctatcttcctaatttatgcccca

SEQ ID NO: 232710 - DNA, 361 bp, Glycine max
  unsure (1)..(361): unsure at all n locations
ttcggatataaacaataaaataaaataaaacagaagagaaggaaacagaagtaaaaaaaataaaatgggttacacaagatcttctcttctgtccgtggctcttgtcttggcattctgttcaagcattcagggtttggacatcaccaaattgttgggcgaatatcccgaatatgcacagttcaacaaatacctaactgaaaccaagctggcggaccaaatcaacagccgtaacgccgttacagtccttgcccttgacgacgccgcaatggcttcnctctccggcaagtcgcaagacgccgttaaggccatccttagcaaccatgtgctcgtcaacttctacgacgagaagaagctgatggaa

SEQ ID NO: 232711 - DNA, 396 bp, Glycine max
cgcaagcaaaaagaaagaatcccaggcgaggagaaagatggaggggaaggagcaggatgtgtccgttgggagccaacaagttccccgagagacagccgattgggacggccgcgcagagccaagacgacggcaaggactaccaggagccggcgccggcgccgctggttgacccgacggagtttacgtcatggtcgttttacagaccacggataccagagtttgtggccactttcctgtttccctacatcaccgtcttaaccgttatgggagtccccgggggcaattcgaattgtagtaccgttgggattcacggaatcccttgggccttcggtggcacaatcttcgacctcgtttaactgcccgctggcctctcagggggacacataaccccggcgg

SEQ ID NO: 232712 - DNA, 385 bp, Glycine max
ctcaatttttctctcaaccggcccaatttagcataagcccagcatggccaccgcaacagcagcagccacctcgtccttcatggggacgcgcctcgtggaggcccactccggggcggggcgggtgcatgcccggttcgggtttggcaagacgaaagccgccgccccgatgaaagtttccagggggtcgggctctagctccgataggcccctgtggtatccgggcgccaaggcgcccgagtacctggatcggagccttgtccgagactacggattcgacccatttgggctatggaagcccgccgagtacctgcagttccagttggactccctggaccagagccttgcgaagaacctggctggggacatcattgggaccaggatccga

SEQ ID NO: 232713 - DNA, 409 bp, Glycine max
ctcaaaccatgttgctcatgtctagtgtctctagcagttattccgtggatttgaagaaagaccttttcctccaattgcagagtcaaagtttaaggcctaagttctctcaactctcattcaacccacttccaccatcaacttcttccttttcttcaccccgtacattcacaaccctggctctcttcaaatctaagacaaaagccgctcctgctaagactaaggttacaaagccaaagcaaaaggttgaagatggtatctttggcacttctggaggatttggttttactaagcagaacgagctctttgtgggtcgtgttgctatgcttggttttgcagcatcattgttgggtgaaggaataactgggataggaatcctagcacaattaaaacctggaaactggaaatccca

SEQ ID NO: 232714 - DNA, 380 bp, Glycine max
gtagccttggtgaagggcttgcaatttgtcttcggacagattcagattcttaagaaagagataagcaaagcacgaataagattaatggagtctttggtgaaggggtctgctggtctggactaccttaggaatgcctttgctaacaaatatggatctccatctgatgccaatacctctctgccttcaacattgagatggatttcatctgtttggaattgcaaagatcaggaatgggaagaacatgtgagttcctcatcagcattggcttctaattcatcccaagaatggcttccttcaactactctcagaactgggggaagtattctgctcaaaacaactggcagtccgatggccttttctcctgatagtgcaaatgctaa

SEQ ID NO: 232715 - DNA, 369 bp, Glycine max
  unsure (1)..(369): unsure at all n locations
tggctatcaggtttatgttccaagactggatgatcctggttcaggtacattcgagcggtgctctacggatacatttgagatatacggtccatgtacgtaccagacatgttatctgtatctataccggagtggatacgacggttggatgccagagaaagtgaccgtatacagctattactaccaacctgttacattttactacaacacttacatacctaatgatatttggtatggctttgactattgtcgcggttatttaccctccggtactgccgcacagtanaggctagagtagtgtgtacccttctcagttctcatcacanattactacaataaaacaagtacaagtccaaatatgaaccctgctat

SEQ ID NO: 232716 - DNA, 322 bp, Glycine max
acgcctacttaacatcggaatccggtccaattccgggtcccaaggaaaacaaaaccggacctccagaagccaaggaaaagggggccttgctaaccttccattctccggaatacaaccaaaattcgaacggtccacccaaaaccaatcaaagcaattaatccctcctccgtccaacacgacatcatgggacgcgtggctccattctacgaccggtggtctcgcgcgtatgggaaaactttcttgtactggttcggttcgacgccgcggttggcggtaaccgaaccggacatgattaaggaggtgctcatgaacacgcgcgggg

SEQ ID NO: 232717 - DNA, 353 bp, Glycine max
ggctttcggaccacgaaagtgcaattttgaaaaacagctagtgcattaccgaacacaaagtagaaaagagatacaacaaccatctggaatagtaatccaagggggatccattgtgtctgatcctgaattctactcagtgagatttgagaacaaggcttacctagctcgtccatggaagaattactctaggaccattatcatggacacatacattgatgatttgattgacgcggatgggtatttgccatggcaaggactagagggtccttctggtatggatacatgcttctatgccgagtaccacaacattggccctggttcagacaaatccaagcgtgtgaaatgggctggga

SEQ ID NO: 232718 - DNA, 396 bp, Glycine max
ctccaagatgcttgtttggctcagcaagccttggtgagattgcaatattagctggtgggtgtgattcagagggacacatccttgactctgctgagttatataattccgagactcaaacgtgggaaacactcccaagaatgaaaaaacccaggaagatgtcctctggggtatttatggatggaaagttttatgttataggggggattggggggagtgactctaagctcctcacatgtggagaggagtacaatttacagactaggacatggactgagattcctaacatgtcccccggacgtagtagtacgggtcctgagatgcctgcaacagctgaggcaccacctctggttgccgttgtaaatgatgaattgtaggctgctgaatatgctgacatgg

SEQ ID NO: 232719 - DNA, 406 bp, Glycine max
acttaaaacccgctcttttgatgcaataagggctgagctgagggcattctttgatgtgcatgatcaagaaggaagctacccaggaggggttcatttagagatgacagggcagaacgtgacagaatgtgttggaggctcaaggactattacttatgatgacttgagctcacgctaccacacacattgtgatccaaggcttaatgcttctcaatctctcgagcttgcatttaatattgcggacaggttgcgcaagagaaggctcaattcaactcgatcacttggaatttagacaagacggggtctgtcttcctttgtacctggatcacaatactggtcaaacatgtgttgagttttcttgagcacagtgaacaaatactctactgtgagccactctaccgagtttcat

SEQ ID NO: 232720 - DNA, 404 bp, Glycine max
  unsure (1)..(404): unsure at all n locations
gcaggttgtggggtcgcctgaggaaactagtagactcttgctatgtgaagcgacggtgactgtgatgagacactgcttttatctccttggaattgaacctgtatacaggctatgacatataagagcttcatatgcaaattatttatcagatttttttgggatatacaagtataggaaacttcacaatgaaaattgttcaggcaaattcgatcacctcttcccctcttccattttgttaattgtatttgagttgtaacttttacgaaggaaagtaaataatttatagcaatattgttgacaaggtcncatgaaatttatttagatgagttatattttgctttacttgtgttccaagagaaattactagaaaatggacgttatggagtccattgtacatttgtact

SEQ ID NO: 232721 - DNA, 392 bp, Glycine max
gccagcgagtgagcgagcgagcgaggtagggttttcgttgttcccccgtctttgaattcagttcgcgacgatggggtccatccccgatccaggcgagttgagcgagttgactcagccgagcttcgacgagttccagcgccaaacttccctcatgaccagctgcaccctcctctggaaggagctctccgaccacttctcctccctcgagcaagacctcaaccacaaatccgaagccctcaaacgcaagattcgcaccctcgacaacactacttccgactccctccgcctcctcgatcgccgcgaaacctccctcgacgccacgctccagatcgccctccgcacgctcgacacgcgccgcaccgctgccctctccggcctcctcaacgacgccg

SEQ ID NO: 232722 - DNA, 381 bp, Glycine max
gggaattcttgaacaggagtgtggcccttgtcatcaggatactcttggggtgtacagcaatcttgcagctacatatgatgctatgggaagagtgggagatgcgattgaaatcttagaatatgtgctcaagttgagggaggaaaagcttggaatagcaaatcctgattttgaagatgagaagcgtcgtctggccgagcttctgaaagaagcaggcaagacacgggacagaaaagcataatctctggaaaaccttattgatcctggctcaaagaggacaaagaaggagggggcaaagaggtggcctggtttggggtttagaatttaaccatatttttgttcattaatatatatattgaatgcacattctgtaacataggatat

SEQ ID NO: 232723 - DNA, 403 bp, Glycine max
attcactgctatgttcaggaggaaggccttcttgcattggtataccggggaaggcatggacgagatggagttcactgaggctgagagcaacatgaacgatcttgtgtcagagtatcaacagtaccaggatgccactgctgatgaggatgagtatgaggaggaagaggaggaggaggagtatggccaacatgatatgtgattttgaacttggtaatgtattgcggtggcttgaagatgtataacatgccgcaacttcctgttgccggttgattgtctcttttgaggggatggttctgttccggctagatctagtttccattactgttctataaaactggttctgtttgtttccgtttttatgtaacctgttgtttgtatggaagacaatatgaaactgctatta

SEQ ID NO: 232724 - DNA, 381 bp, Glycine max
aaggaaatttggcttgcaaatcaataaaccctttccttttttcaaaaaaggtttcaaaggatttgttccccaagcagttggagaacatgatgtctctggtctctcctcgtactggcaggcatttgcagcgctatgacaaaggctgtcgccaagttgtgggatgcattccttacagatacaagaacaatggaacacaggataaggaattagaggttcttgtgattagtgctcagaagggtcatggaatgcagttcccaaagggtggttgggaaactgatgaatccatggaacaagctgctttaagggaaaccatagaagaagctggggttgttggcagtgttgaacgtaaattgggaaaatggtattacaagagcaaacgcc

SEQ ID NO: 232725 - DNA, 411 bp, Glycine max
ggcatacatgcaagggtatgacaaagaaggccaccctgtgtgctacaatgcctatggggtgttcaaggacaaggaaatgtatgaaagggtctttggtgatgaggagaagctgaagaagttcctaaggtggagggttcaggttcttgagagaggcatcaaggtgcttcatttcaagcctggtggggtcaattccctcattcaggtcacagacctcaaggacatgccaaagagagagcttagggtggcgtccaaccagatcctctccttgttccaagacaactacccggaaatggtggctcgcaagattttcatcaacgtgccatggtacttcagcatgttgtattcaatgttcagcccgtttctgactcagagaaccaagagcaagtttgtgatctctaaggaaggaaatgc

SEQ ID NO: 232726 - DNA, 409 bp, Glycine max
caacaacgacaccgtatcataccgtaacatgttcacagcaccttttcctacatccactgttactctctccggtgaaagcgtaacctcaccgccgcgccacgtcagattccggtcagtagtatcgttcgccaccgccactttcacggaggagcaacaacataaggcagctccgtatctgagacctcatcacgggatggctttgagcgcgacgctgtacgacattctggggatccgcgccacggcgtccggcgaggaaatcagggcggcgtaccggcgactggcgagggtgtgccaccctgacgtggcgccggtggagcgaaaggaatcctctgcgggcgagttcatgaagatccatgctgcgtactgcacgctctcggattccgataagcgccacagctacgatagaagc

SEQ ID NO: 232727 - DNA, 387 bp, Glycine max
agaagattgagaaaggtaaaggtccttgttgttccggtgtgctgctagagaatctggtgaaggatgtcaattgttccaatcaaccaaggtcactcccaggactcttgggatcaattcatcgattttcctctccctccttccatctccagcttcttccccggcttcgaattcggattcggctcatcggtggttaacacacgtgtggactggagggagactcccagagcccacgtgtggaaggtcgtgcttcctggcttcacaaacgaggacgtgctggttgagctacaagaccagagggtgctccaggtcagcgtggagagtggtaacttcctgacgacgtttaagatccccgacaacggttacctcgaacaactcaaaaccaacatg

SEQ ID NO: 232728 - DNA, 401 bp, Glycine max
caagaaaccaagcaaatcattgttctctctgtcctgtgttttgtgatttcccccttcaagccaccaccaatggccaacaacgagatgcaagttgagaggggtttggacttggaaaggtacatggggcgttggtatgagatagcctctttcccttcaaggaaccagcccaaggatggcgtgaacaccagagccacatacactcttaggaatgatggcactgtgcaagtgctcaacgagacttggagtaatggcaagagagggcacatagagggaactgcttttaagtctaaccgcacaagtgatgaggccaagttcaaggtcaagtttttatgtcctccctttttgcctatcattcctgtaacaggggactactgggttttgttcattgatggtgattacca

SEQ ID NO: 232729 - DNA, 388 bp, Glycine max
  unsure (1)..(388): unsure at all n locations
gtggttcttcctggtctccatgacgcagtccttcgtcaacggcggaggacttcccggacaggccttcttcaactccgctccggtgtgggtcaccgggggcgaccgtctctctgcctcggcctgcgagagggcgaggcagggacacgtgttcgggctgcaaaccctggtttgcataccgtccgcgaacggcgtcgttgagctggggtccaccgagttaattttccagaacccggatctgatgaacaaggtgaaggttctgttcaatttcagcaacaacaacttcgacatgggttcttcttggcccgccaccagcgccgattagggcgaaaacgacccttcctcgctctggctcagcgattccgaagttangggattcattaacactgtt

SEQ ID NO: 232730 - DNA, 328 bp, Glycine max
  unsure (1)..(328): unsure at all n locations
ggtccaacaaaacctcaaataaaccaagaatccccccaaacctaaaagtggcttccctcctggcntcgcttctcctcctcaaccttgttaaggcggttcaaccggaacatgtacaaacgcaggggtcccttctgcaaaaaataaattgtaatggaccatgtgctgcaaggtgtcgtttatcacctcggccacgtctctgcaaaagagcctgtggaacttgttgtagacgctgcaactgcgtgccacctggcactgctggaaaccaagaagtgtgtccctgctatgctagtttgactactcatggtggcaaaggcaagtgcccttagac

SEQ ID NO: 232731 - DNA, 408 bp, Glycine max
  unsure (1)..(408): unsure at all n locations
cgcgtgtatgttggtaacttggattcacgagtcactgagagagatctcgaagacgaattccgcgttttcggagttattcggagtgtttgggttgcacgtagaccacctggttatgcttttattgactttgatgaccgcagagacgcacaggatgctatccgtgaattggatggcaagaatggttggagggttgagctttctcacaactctagaggtggaggtggtggtcgtggtggtcgctctggtggttctgatttgaaatgttacgagtgtggtgaacctggtcattttgctcgtgaatgccgcatgcgtggtggttcaggaagacgccgtagccgtagtccgcccagattccgtanggagccaagttatgggcgaaagagttacagtcctcgtgggcggtcccct

SEQ ID NO: 232732 - DNA, 411 bp, Glycine max
  unsure (1)..(411): unsure at all n locations
gaaaaacactgcaactgatagaacactaagcagttgctaccatggtcaccttcaggtttcaccagtaccaggttgttgggagggctcttcccactgaaactgatgtgcatcctaagatctacaggatgaagctgtgggccaccaatgaggtccgtgccaaatccaagttctggtatttcttgagaaagctaaagaaggtcaagaaaagcaatggccaaatgctagccatcaatgagatttttgagaaaaatcctaccaagatcaagaattatggaatttggctgcgatatcagagccgaactggttatcacaacatgtacaaggaatatcgcgatactactctaaacggcgctgttgaacacatgtacaacgaaatggcatctcgtcatanagtcaggtctccatgcatcc

SEQ ID NO: 232733 - DNA, 395 bp, Glycine max
atttgatgaatctgaaaggtactagctagctagctagtagttctacactgttaggtagcatcatgaggaagcgccaagtagttgtgatgaagagaggagcctcaaatgagcgctatgacggtgaaatacagctagtgccagaagaatcacgccgcgaatgtgggacggtatgctgttgacggctgcagggagttcatggcgagtggcgccaccggagaacgaacaagtgctgctctcacttgtgccgcctgtggttgccacatgaacttccacaggagacatgaaaccgatgtggtgagtgagtgctcctcgcctacctccaatggaacttaatcagagctagcttcgtcataatgtgtatacctcaacaagtatgctgctacactcgatatcat

SEQ ID NO: 232734 - DNA, 412 bp, Glycine max
ctcaaatcatggatttcttgcaagcacaagaaaatcagatacttgtgggtgtggccgtggccgttgtagccattgggcttggtgcagtatatctctattcatccaagaagaccaaaggttgcttggacccagagaactttaaggcattcaaacttgttaagcgtgcacagctgagccataatgttgcaaagttcacatttgcactcccaacacctacatctgttttgggtcttccaattgggcaacacataagttgcaggggtaaagatgctcaaggtgaagaggttatcaaaccatatactcctactactttggattccgatgttggacattttgaactagttattaagatgtacccacaaggaaggatgtcacaccatttccgtgagatgcgtgttggtgactaactttc

SEQ ID NO: 232735 - DNA, 395 bp, Glycine max
ggcttcatcgctgagaagagatgcgctcctctaatgctccgtttggcatggcactctgctggaacttacgacgtgagctcgaagaccggtggtcccttcggaaccataaagcacccctccgaactcgctcacggcgctaacaacggtcttgacatcgctgttaggcttttggagccactcaaagcggagtttcctattttgagctacgccgatttctaccagttggctggcgttgttgccgttgaggtcaccggtggacctgaagttcccttccatcctggaagagaggacaaacctgagccaccaccagagggtcgcttgcccgatgccactaagggttctgaccatttgagagatgtgtttggcaaagctatggggcttagtgaccgagatat

SEQ ID NO: 232736 - DNA, 398 bp, Glycine max
  unsure (1)..(398): unsure at all n locations
gccgtatttatcacttactgcccgaagaaagctaggatgtcgacattgaggatgattgttttgttaaattttgggggattttgcacaattgtcctcttaacccacctactagcaaaaggagaagaagcccgtgtcaagcttctaggatggatttgcgtagtctttgccactagtgtttttgcagcacctttaagcattattagggtggtaattcggacgaaaagcgtagagttccttcctttccctctttcacttctccttctgataagcgcaattatgtggctcttatacggtatttccctgaaggatatctatgttacactcccgaacgttgttgggttaacatttggagtcattcanatcggtctctatgcaatgtacagaaacaacaaacccat

SEQ ID NO: 232737 - DNA, 395 bp, Glycine max
ctggcctttgttacggatatcaatgtccaggttcaagaggctataaactactactcaattgagtcatcagttgcacttttagtaacattggtgatcaatctgtttgtgataaccgttttcgctagggtgttctacggtacagaacaggcgaaaggcataggattggtaaatgcagggcagtatcttcaggagaggtatggaggagggttgtttccaattctctatatatggggtattggtttgttagcagctggacaaagtagtaccatcacaggcacatatgcagggcagtttataactgagggctttcttaagctcaatataaagaagtggttgagggcattgatcactagaagttgtgcaattgttccaactatgatttgtgcaattgtttt

SEQ ID NO: 232738 - DNA, 332 bp, Glycine max
cacacatgccacgtcactagactcacaccagaaactctcaatggctgaaactcccacaatccgtttcggcgtcatcggctgcgccgacatcgcgcgcaaggtctcgcgcgccatctccctcgcccccaacgccgccctttacgccgtcggcagccgctccctcgacaaggcgcgtgccttcgccgccgccaacggcttccccgccgccgccaaggtgcacggctcctacgaggcggtcctcgacgattccgacgtcgacgccgtgtacgtaccgctccccaataacctccacgttcgctgggccgtgctcgccgcgcagaagaagaagcacg

SEQ ID NO: 232739 - DNA, 320 bp, Glycine max
cctacgtaagatcggaattcggctccaagcaaataattctttgtttgagcatttaaaatttcaaggttacaaagagggctttgttcttatggaacaatgatcacattgagaacctaatcaagcagaactgcaaaattattcttcctattgtattgcctgctctagagaaaaatgctcgaaaccactggaatcaggcagtccaaagtttgacaataaatgtacgcaagatctttgctgataccgatcctgaactcttggaggagtgcctgcgcaagttcaaggaagatgaagcacaagagaaagctttgaagttgaagcga

SEQ ID NO: 232740 - DNA, 401 bp, Glycine max
  unsure (1)..(401): unsure at all n locations
aaagaacataaatagtatatacgagtcctagtttcatataatagttccatataacaaacattatggaagaagattatccacccgggtttcgtttcttcccaacagaagaagagcttgttggcttctacctacacaacaagctagaaggccaaagaaatgccatagccatagccatagacagagttatcccagttattgacatcaatggagttgagccttggaaccttccaacacttgctggggagctttgtcgtggggacacggagcaatggtttttcttttcgcccggtcaagagagggaaaccaggggaggcagacccagcaaaaccacagcttgtgggtaatggaaagctacaggttccccttgctatgtttactcttctcacaacanagtcattggg

SEQ ID NO: 232741 - DNA, 379 bp, Glycine max
ctcgtttgttaccttgtgggcttcatattattggtgagcctccctcagccttggaagcagttgctacactggtcaacattgctgcacttgatcgtcctgaagatggtatttcttctcttccatcaatattagctgacactgtaggaagagatatagaagatgtgtatagaggaagtaacaaaggaatattgaaggatgtagagcttcttagacaaataaccgaggcatcacgtggagcaatcactgcctttgtggagcgcactactaataataagggtcaagttgttgatgtagctgataagcttagttcaatccttggatttggcataaatgagccatggatacagtacttatcaaacaccaaatttttacgaactga

SEQ ID NO: 232742 - DNA, 387 bp, Glycine max
gtgccaaagttcatattaagagagaaagagagagagagatagaagggaaaaaagcatcaaagatcatgaaacccaacttttcctttttatctaagcttttgatactgcaatatctatcagttttatgcatttctcaggaatttgatttcttctactttgttcagcagtggccaggagcatactgtgacacaaagcagagctgctgctatcctaagactgggaaacctgctgctgatttcagcattcatggactctggcctaacttcaaggatggctcatggccctcaaactgtgaccctgacagtgtctttgataaatctcagatctcagacctcattagcaacatggagaaggattggccatccctgagctgcccaagtagcaatg

SEQ ID NO: 232743 - DNA, 393 bp, Glycine max
tctcttggttgatgacaccaagagacagcacaaagacccttcgtttcaatcccacaacacactcattcctcattcttccactcccgcacaagaatggcgtctttgcagcaccccacagcttccctccaatccaaacacgtcctaatcccccgaaacactcttacgcagaaactcatcctcaacctctcctccctcgcgggcagcaccttcaccgtcctcaagctcaaattcttcagcggcggcgccgtctgccgctccaccggcgcctcgggagccagaatgtcagccaacgcagcctccagttacgcggctgccctgaacgacgtggctgccgcgaacaacacgctcgacgcgacaaccgcgggcatccagaacatcgaccagatattctcg

SEQ ID NO: 232744 - DNA, 359 bp, Glycine max
attaaaaaagaccatgaactccaagcatggtggaaagaagttgttgagaagggacatggtgacttgaaagacaagccttggtggcctaaaatgcagactcttcaagagcttattcaatcatgttctactatcatatggattgcttcagctctccatgcagctgttaattttggacaatacccttatggtggttttatcctaaaccgtccaactcttagcaggagatggattccagaagaaggaactccagaatatgacgagatgacaaagaatcctcaaaaggcttatttgagaacaatcaagccaaagtttcaggctcttgttgatccttcagtgatagagatattgtcaggacatgc

SEQ ID NO: 232745 - DNA, 399 bp, Glycine max
  unsure (1)..(399): unsure at all n locations
gagcgagtgggagaggcagaaagaagagaaaaaaggggaatggcatggttgcagttgcagagaatcgtgaccaagggaggtgctaatttgatctcaccactcccactttcacgattcttctcgaaatcttcttccccctatgttgtgaaagttggaattccagagtttctaaacgggattgggaagggggttgagtcccacgttcctaagcttgaatccgaaatcggtgatttccagaagcttctcctcactcgcaccctcaaactcaagaagcttggcattccttgcaaacacaggaagttaatattganatacacacacaagtacaggctgggattatgganggcacgtgttgagtccatcaatgcctgattggtttctaattagtaagtagtcgct

SEQ ID NO: 232746 - DNA, 385 bp, Glycine max
cttcgacccgtcggattcaatcccgaagctgcacacggactcgagctgttcggagcaggtggtatcgccggaattcgcgagcgaggtgcaaagcgagcccaagtggaacgagtgggagaaaagcctcgaatttccatttaattacgtggatgccactctcaacaacagcttcatggcccaattccagggcaataatcagatgttgtcgccgctgcaggacatgttcatgtactggcccaacaagtccttttgagcacatcatgatggttttaaattagcatccgcaattgctcttaagattttctgactcaccatgcgaccacaatcgtaatttaaaaccatgtcacataaaatccacgcgcgccgcccattcgcatttgcacgg

SEQ ID NO: 232747 - DNA, 393 bp, Glycine max
acgtcgcatgcatgcgtacgtaactcggaactaggtcccaagcagcaagaaagaatcccaggcgaggagaaagatggaggggaaggagcaggatgtgtctttggaaccaaaaagttcccccaaaaaaaacccaattggacggcggcgcagagccaagacgacggcaaggactaccaggaaccggcgccggcgccgctggttgacccgacggagtttacgtcatggtcgttttacagagcagggatagcagagtttgtggccacttttctgtgtctctacatcaccgtcttaaccgttatgggagtcgccggggcgaagtctaagtgtagtaccgttgggattcaaggaatcgcttgggccttcggtggcatgatcttgcgcctcctttactgc

SEQ ID NO: 232748 - DNA, 332 bp, Glycine max
caagctgcagctaccttcatgcaacccaccaaggttggcatagcctctcgcaacctcaaatctacacaatgcatttctaaggcttttggcttggaacctgctgcagctaaactcacttgctcccttcagcctgatctcaaagaatttgctcaaaaatgtgtcgacgctaccaaaattgcaggattcgcccttgccacctctgctctcgttgtttctggagcaagtgcagaatgtgttccaaaaaggctaaccttcgacgaaatccagagcaggacgtacttggaagtgaagggaactggaactgctaaccagtgcccaaccattgaaggtgg

SEQ ID NO: 232749 - DNA, 367 bp, Glycine max
  unsure (1)..(367): unsure at all n locations
cagagaacatttagaacaaagaagagagtttgagaaatggggaggggtaagattgagatcaagaggatagagaactcaagcaacaggcaagttacatactcaaagagaaagaatgggatcctaaagaaggccaaggaaatcactgttctatgtgatgctcaagtttcgcttatcatctttgctgcatctggaaagatgcatgactacatcagcccttctaccacgttgattgacatattggagaggtaccacaagacctcacggaagaggctttnggacgccaagcatgagaacctaaacggcgaaattgagagactcaagaaagagaatgacagcatgcaaatttagctcaggcactttaagggtg

SEQ ID NO: 232750 - DNA, 338 bp, Glycine max
gagctcctcgctgatataccttatgggtataaatctgatatgtggtctcttggttgctgcatgtttgagattgctgcacatcaaccagcttttcgtgctccagacatggctggacttatcaataaaataaacagatcctccatttctccactgccaattgtttattcttccacactgaaacaacttatcaagagcatgcttaggaaaaacccagaacataggccaaccgcagctgaattgttaaggcatccgcttttacaaccttaggttctgcgctgtcataatgcatcatctaatgttcttcctgtatatcccctagttaatccagaggattaagc

SEQ ID NO: 232751 - DNA, 383 bp, Glycine max
atttctttctattcatttcttcattccaccatcaccatggtcaaggagaagaagaacgtggtggtcaagaacaagaagccaaacagcaatgccgacgagcttcactttcgcggcgtccggaagcgaccatggggccgctacgccgccgagatccgtgaccccggcaagaagacccgcgtctggctcggcaccttcgacaccgccgaggacgccgcccgcgcctatgacgccgccgcccgcaacttccgcggccccaaagccaaaaccaacttccccgtgccccccgacgacaacaacatcaacaacgttaacgtgaacaacaacaagagtgttaacgttaaatctcacagtcacagccagagcatcaccgtggagtccgccac

SEQ ID NO: 232752 - DNA, 317 bp, Glycine max
cacatattctttgttgcaatatcacaaagaccgcgtccgtcacaatgcagctagctgtggcggccaacgctgtcgtttcagcgtcgccgttccgacctcatccccttctccggtcatccttctccggcgtctccgttaagctcactccgcaatccataacgttgtcacgcttgaagcccctcaccgtcgtcgccgccatcaagaaggccgtcgctgtcctcaaggggacctccgccgtcgaaggcgtcgccacgctcagccaacgagacgagcgggcgaccacagtttctgttaccatcactgggccttagccgggg

SEQ ID NO: 232753 - DNA, 379 bp, Glycine max
  unsure (1)..(379): unsure at all n locations
cttgtctccgaattagttatcttgagaaacattattcccattgctatatattatggctagcatgaaggttacatgggtggttgtgatcatgtgcatggccgtggtgggtgcaccgatgatggcgcaagccatgacatgcaatgatgtgacggtgaacatggcacagtgcctatcctacctgatgcagggaggaacaccttcaacactttgctgcagcggagtcaagaacattcttggctctgctgtcaccaccgttgacaaacaaactgtgtgcaactgtctcaaggcggatgctgctangtacaacatcaatgaccagtatgctcaggcactccctggtttctgcaaggtcaatgtcccttacaagatcagccgctca

SEQ ID NO: 232754 - DNA, 373 bp, Glycine max
  unsure (1)..(373): unsure at all n locations
cttagctcaaacctcacctcaataatctttcgtgctagctagcttaatcatattccaattccaacagaaccaaattctgctagctagctagtacgtcaaaggaaataaaataatatggcattcagcgggacccaacagaaatgcaaggcttgcgacaaaactgttcacttggtcgaaggtttatctgtcgatggggctgcttatcacaagaattgcttcagatgcagccattgcaatggccttcttgcgataagcaactactcatccaccgaaggggttttgtactgcaaggtgcactttgagcagcttttcaaggaaactggcgcctaccccaagaaatcccagtcgtctggaaaagcctcnactcgagctg

SEQ ID NO: 232755 - DNA, 218 bp, Glycine max
gttgtcactcggtggtatagggcaccagagctcctaggctgctgtgacgactatgggacatctattgatgtttggtcagttggatgcagctttgcagagcttcttggccgaagaccgattttccctggttcagagtgtcgcatgcatctgaagttgagtatcaatatccgtgggagtcagagggaggaggaggttcaattcattgataagccataggc

SEQ ID NO: 232756 - DNA, 381 bp, Glycine max
gagaggtccaccaaccttgactggtacaagggaccaactctccttgaggctcttgaccaaatcaatgagcccaagaggccctcagacaagccactcaggcttccattgcaggatgtctacaaaattggtggtattggtaccgtgccagtgggacgtgttgagactggtgtcgtgaagcccggtatggtggtgacttttggtcccactgggctgacaactgaggttaagtctgttgagatgcaccatgaggctctcacagaggctcttccaggtgacaatgttggctttaatgtgaagaatgttgcagtcaaggatctcaagcgtggttttgttgcatccaactccaaggatgaccctgccaaggaagctgccaacttcaca

SEQ ID NO: 232757 - DNA, 370 bp, Glycine max
taaagatgaaattcgaacaatgattttttcatattctttttaatacttttttggtttagactccctaagaatctgtcgatatttccaattaaatcatcttgttcctgtgaaagtcctataaaaaaaagggctatgccctttctttactcagaagggccttaatccaagttccaccaaacaagtttttattcatttgaaacatcattttttccgaatacaagaaaaaattcatttcaatttcaattatttctataagataaaatcgatatagatagattttatcttatagaaataattgagaaatacattcagttatgtcttcgcgtatcaaatattttcttttcatatcgatgcgtacgatatttttcca

SEQ ID NO: 232758 - DNA, 377 bp, Glycine max
ggtagggttcaggacaatgcttttgatgctgaggttgaaactttgggtaaaatcaggcacaagaatattgttaagctgtggtgttgctgcaccactatggattgcaagctcttggtttatgaatatatgcctaatggaagtcttggtgatttgcttcatagcagtaagggagggtcgttggattggccaacaaggtacaagatagctgtggatgctgcagaaggcctctcttatctgcatcatgactgtgttcccgcaattgttcatagagatgtgaaatctaacaatattttgttggatggggacttcggtgcgagggtggctgattttggagtagctaaggcggttgatacacaccgataggaactaaatccatg

SEQ ID NO: 232759 - DNA, 370 bp, Glycine max
ctccctctcgattttaacaaccaactgccaaataattaataatacaataacctaaataaaccgaactctggttaatcattgtgacacgttattttaatttttggtagaaagtaaacaacaaaaaattaaatttgattgttgcttattaaagagagggggagggagacaagatacaccaaagtcgtcgctcatggaagacttactcggccttttaaggattcacatcaagcgcggtgtcaacctcgccgttcgtgatgtcaatactagcgatccatacgtcgtcgttaagatgggcaagcagaagctgaagactcgtgtgattaaaaaggatgttaatcctgagtggaaggaagatcttacgctttctgtt

SEQ ID NO: 232760 - DNA, 336 bp, Glycine max
gagaaaaatgaagtctttccatctcacagtgacagctttgtgctgtgtagtggttgtgcttggagtgcttccactctccctagatgcacaactagatccctccttttacagagacacttgtcccagggttcactccattgttcgtgaagtcgtcaggaacgtttcaaagaaagatccccgtatgcttgctagtctcattagacttcactttcatgactgctttgttcaaggatgtgatgcatcagttttgttgaacaacactgccaccatagagagcgagcaacaagctctgccaaacaacaactcactaagaaggtttggatgttgtgaacgaca

SEQ ID NO: 232761 - DNA, 323 bp, Glycine max
gatctgtccatcgccgttgatttcgtccgagttgagtcctacggtttcggaaccgtttccaatggcgcacccagcatttccttcgatttgaaggtcgacgtcaacgcccgtcacgtcatcgtggttgaagacattgtagatactggacataccttatctaaagtcattgggcacttgaaatcaaagggagtagcctctgtttctgtatgcactttccttgataaacctgcaaggagaaaagttcattttcagttgctgggtgaagggaaatactacgcgggatttgagtgtccagaccagttcgttgtaggtaatggacggga

SEQ ID NO: 232762 - DNA, 313 bp, Glycine max
ccaggttgtgcctggatatggacatggggttttacgccagacagatccaagatacacatgtcagagggagtttgctttgaagcatttgcctaatgatccatatttccagctggtgtctaaaataaaagaggttgtgccgcccattcttaccaagttaggcaaggttagaaatccatggccgaatgttgatgcgcacagtggagtgctactgaactactatggtctaactgaggaaaactattatacggttctctttggtgtagcagcgagcgcgggagttggccctcagttgatatgggatagggctcttgga

SEQ ID NO: 232763 - DNA, 364 bp, Glycine max
ggaacatcgggacaaggaagaacatttactacagaggtgattgaggcaatggcttctattaacgagagacctattattctttctctttccaaccctacgtcacagtcagaatgcactgctgaagaagcttacaagtggagccagggacgtgccatttttgcaagtgggagcccatttcctcccgttgagtatgaggggaaagtgtttgtgcctggccaggccaatagtgcatacatatttcctggatttggtcttggtttactaatgtctgggaccattcgagtgcatgatgacctgcttctggctgcctctgacgctttggctgcacaagtgagccaagagaactttgataaggggaccatat

SEQ ID NO: 232764 - DNA, 373 bp, Glycine max
  unsure (1)..(373): unsure at all n locations
cttgctccctcagaagcgaagaagaagccacagagaactagtctcctactctcacccgcaagaaaaaatggcatctcacatcgttggatacccccgtatgggtcccaagagagagctcaagttcgctctcgagtctttctgggatggcaagagcagcgccgaggatttgcagaaggtgtcttctgatctcagggcatccatctggaagcagatggctgatgctgggatcaagtacatccccagcaacactttctctcactatgaccaggttctcgacgccaccgccaacctcggtgccgttccancaaggtacggctggaccggcggcgagattgggtttgatacctaagtctccatggccagaggtaatact

SEQ ID NO: 232765 - DNA, 239 bp, Glycine max
ctttccacttgtctccgaattagttatcttgagaaacattattcccattgctatatattatggctagcatgaaggttacatgggtggttgtgatcatgtgcatggccgtggtgggtgcaccgatgatggcgcaagccatgacatgcaatgatgtgacggtgaacatgggacagtgcctatcctacctgatgcagggaggaacaccttcaacactttgctgcagcggactcaagaacatt

SEQ ID NO: 232766 - DNA, 341 bp, Glycine max
ccaaatctacgttgcactgctttggctgcatgtgctcatcccttctttgacgatctgcgggacccaaatgcatgcttgccgaacggccgaccactacctcctttgttcaacttcacatctcaagaactggcgaatgcacctgaagagttgcggcaacgcctcattcctgagtatgcaaggagttgaatcaattccaaagttgaaacatctctagggcattgtaaatgggttttgaattattggacaccctcttggtcatcgcccctgaccagcctgttctgttctgttcctcagcctcttctctgcacaagtcacatctgtgactatacaacgtgagaaac

SEQ ID NO: 232767 - DNA, 374 bp, Glycine max
ctcgagccgaatcggctcgagtgacgttgaagccacagtcgctcttttaggagctcactcagtgggaagagttcactgcaagaatctggtgcacagattataccccaccatagattcaacactggaccctgcacatgctgagtacctaagacgtcggtgcccaacacccaatcccgatccaaaagctgttctgtattcaaggaatgaccttaaaacgccaatgatcattgacaacaactactacaagaacatcttgcaacacaagggtcttctcactgtggatgaagagcttgccactgacccaagaaccgcatcttatgtccaaaagatggccaatgacaatgaatatttcaaccaacagttctcaagggcca

SEQ ID NO: 232768 - DNA, 376 bp, Glycine max
aggaaagaaatggtcatccttggcacacaatatgctggggaaatgaagaaaggtctctttggtttaatgcactacctcatgcccaagcgcaatattctctccctacattctgggtgcaatatgggcaaagatggcgatgttgcactcttttttggattatcaggtactggaaagacaactctgtctaccgatcataaccggtacttaattggagatgatgagcattgctggagtgaaaatggagtggcaaatattgaaggaggttgctatgcaaagtgtgtcgatctttcaaaggataaagaaccagacatctggaatgccatcaaatttgggacagtactcgaaaatgttgtttttgatgagcatactcgagagg

SEQ ID NO: 232769 - DNA, 319 bp, Glycine max
gccatttccatttttttctggttttctttcaccatggcctccgccgccgccgtcgccgccgaagacgacgctgtcaacggcttcactcggtcggagatgtactcggaaaatctcgccggcacagtcgacacctacgaccgacacgtgttcctctgctacaagagctacgtgtcatgaccggcactcatcgaggcatccgatgccgatttcttgcgtaagcgcgtcggtgccacctgtcaagcccgcaagaacgacttgcggcgcatgacgaatatcgggtgtgcgaggcgcgcgaggaagctggcttctccgacggtga

SEQ ID NO: 232770 - DNA, 359 bp, Glycine max
ggcaaagattttgagcacaatggcctccacacaatgctttttgcaccaccacgccctcaccactccagcgagagcttcaacacagcgcctagttgtgagcaccaaaccataccacattgtttgcaaggcagcacagaagcaggttactgtccaagagggtgaggacactactactggccttgtctctcgcaggttggccctcactgtgctcattggtgctgctgctgttggctctaatgtggcacctgctgatgcagcctatggagaagctgtgaatgtgtttggaaaaccaaagacaaacacagacttcctttcatacaatgggaatggattcaagctctcaattccctcaaagtgga

SEQ ID NO: 232771 - DNA, 351 bp, Glycine max
tgagaaacatggcttccttaagctccttagtgctgctccttgcagctctaattctatcccctcaagttcttgcaaactatgagaatcccccagtgtacaagcctcccactgagaaaccaccagtttataagcccccagttgagaagcctcctgtttacaaacctccagttgaaaaccccccaatttataagcctccagtagagaagccaccagtgtacaagcccccagttgagaaacccccagtgtacaagcccccagttgacaaaccaccagtgtaaaagcccccagttgagacagcagcagtgtacaagcccccagttgatcaagccccagtttacacgcccccagttg

SEQ ID NO: 232772 - DNA, 372 bp, Glycine max
gtacaactcaacatgcaaagatgtaatcttagcacaaaccaaggctaaggagattaaccaatggaaggaggaacgtatagctgaggaagctactaagttgcctaaagaggcagctctagaactggcagaaaaggagaaagttaaagctcaagctgccttggaagcatatgaggaagccattaagatggttgaaaaggaagcacaaagaagaattcaggcagaggtgaaggctaggagagaggcgcaagaaaaggatcgagcattaaatctgttgattatcaacgatactcggtacagaaaatacagtataaaggatattgaagaggccactcagaagttttccccatcattgacagtaagtgaaggtggata

SEQ ID NO: 232773 - DNA, 206 bp, Glycine max
agaacttggtgataggcccgcctttgttgaatcttcatttatggtctttctttctattagttgttcttgtttgcgatatctttaaagctcttgcttttgttttgcttcaaggtgtggtgtgtttcacatttgaagtaacactgagacgagaggaaagtgaagttgagagttgaagaagatcatgaaatgggggttggttcccagga

SEQ ID NO: 232774 - DNA, 225 bp, Glycine max
cttacctcattggcactcttcctggtgacaatggatttgaccctctgggactagctgaggacccagagaacttgaggtggtacgttcaagccgagcttgtaatgggacgttgggccatgttgggtgttgcacgaatgctacttcctgaggttttcaccacgattggaatcatcagggcccctcaatggtatgatgctgggaaatcggagtactttgcatcaacgt

SEQ ID NO: 232775 - DNA, 353 bp, Glycine max
atcgtagccgtcgcactctgtgttttcagcgccgtctccgatctccgacaatggcgacccaaatgagcaggaagagaaagttcgtagctgatggagtgttcttcgctgaactgaacgaggttctgacaagagagttggccgaggacggttactccggcgtggaagttagggttacgccgatgcgcaccgaaatcataattagagccaccagaacccaagctgttctcggtgagaagggaaggagaataagggaacttacctctgtggttcagaagaggttcaagtttcccgagaacagtgtcgaactttatgctgaaaacgtcaacaataggggtctttgcgctattgctcag

SEQ ID NO: 232776 - DNA, 378 bp, Glycine max
cttctcttttctctttctgttttttcctggttactttctatgcctgctgtacgtcagggaaacgtgttatccattctgagttaactgaaagaaaattcattgaagtccagaaagctctaagtgctactgaagctatggatgttgatcactgtgaaccaaacagcaagttcaaaaaaactggtttccatttaaatggaagcaactatgacgtgtctacatgtggggttctccactccattggatcagatttaacaagaatgaaagtgacatctgagacaaactatagtgactccgggagtggacagaaaactataaaggcaaaagagcccgggaacactcccataagcatgccagttatctcaagagagagttttgcgc

SEQ ID NO: 232777 - DNA, 377 bp, Glycine max
atgatatttgagaggttcttccctcagaactcagccaggctgagtgttcctggaggaccaagtgttgcatgtagcacagccaaagctgtagagtgggatgctgcttggtctaacaaccttgatccatctggtagggcagcacttggagtgcatgcatcagcttatggaaatcaggtcaaagctgtagaaccagagaagatcataccaaagatggaagtttccccactaggagttgccatatagagctagtatgagccatagcaaaaactagtagttgccctagaaccaaaatatattattatactagtcatcaatcactcattaatcatcataaatgaaaatttggcctgctgtgtagtttattcaggcaaggctat

SEQ ID NO: 232778 - DNA, 377 bp, Glycine max
gtaaagagaagggcgtggagagatagagagggaagaaaaatgagtgtatcattgactgtgatgaccttcaatctccatgatgatgagccacaagacagtcctaattcgtgggagaagagaagggatatgtgcataagcgttattaccagttactcacccatcatcctctgtacccaacaaggagtgaaagcacaattggattttctccagcatggtttgctaggttatgatcaatttgggatatcacggatagggccccaagacactactgatcagcattgcactatcttctatgataaggaaaaggtcgagcttctagaaggtggaaccttttggttgtctgagtctccctctgtacctggaagcaggtcaggggg

SEQ ID NO: 232779 - DNA, 240 bp, Glycine max
agctactactcctcctccaccaccacctgttgcatcattggagcatggtgaaggtgctcatcatgaaggagaggccaaggagaagaaaggtatattagaagagatgaaagagaagcttcctggttatcactccaagacataggaagagaaggaaaatgaaaaagaaagtggtgctcattgatatttaagattgagacaaggcttttttgtttggttggagatccatgattgtggtgtgct

SEQ ID NO: 232780 - DNA, 351 bp, Glycine max
ctgataagatggaggtgatgattaaagattttctcaaggagaactcaatggacattacagaataaagtcttttaaagctcaagtatgacccaaagtctagttggggttatgttgaggttcacattgagcagggtcctgtgctagaatacgttggtttcccacattgagtgtggttaaaggcatatctgggcagacacgattgaaggttacagttagaggttcacaaggtgatgctggaactgttccactgtccatgcgccatgatcttatggcgtgtgctgcggaataaattgtagtcttggaaagcctctgtaaacaccctgaagtataacgttctgtatgatggtcatt

SEQ ID NO: 232781 - DNA, 343 bp, Glycine max
cgcattttccggctgcgttcactctcacgttttccgcttcagtttgcacgggaaaatcatggtgaaaggtcgaggcctctactctgacattggcacgagagctcgcgatcttctgtgcaaggattatcagaatgacgacacgtgcaccatcaggacttacacttccagcggagtggaaatcacttcagctggagtcaggaaaggtgagatatatttggccgatgtcagcactagggtgaagaacaagagcatcacaactgatgtcgaagtggacactaagtgacatctgcgtagaatcattactgtggatgaacctgcccctggactcaagacagtttttagc

SEQ ID NO: 232782 - DNA, 354 bp, Glycine max
  unsure (1)..(354): unsure at all n locations
attcatctgaagcttctatcaaagattccaagcttgtgatatctgcaaaaagcattaattatgggcttaacattctacagggcattcaaaatgagaacaaaaacttaaaaaaatcactgaaggatgtggttactgagaatgaatttgagaaaaaacttcttgctgatgttattccgccaaccgatattggggtcacatttgatgatattggagctttagaaaatgtgaaggacaccttgaaggaattggttatgcttcctcttcagaggcctgagttgttttgcaaaggacagctgaccaagccttgcaagggaatattgctttttgggccccctggcacagganaaacaatgc

SEQ ID NO: 232783 - DNA, 382 bp, Glycine max
gatcgagataactagaaacagtgtgatgaaaatgaaggtccttgttttcttcgttgctacaattttggtagcatggcaatgccatgcgtacgatatgttccctctccgaatgaacactggctatggtgcccgtactccggaggtgaaatgcgcaagttggaggcttgctgtggaagcacacaacatctttggctttgagaccattcctgaagagtgcgttgaagcaacaaaggaatacatccatggcgaacaatatagatcagactccaaaacagttaaccaacaagcttacttttatgccagagacctcgaagtccatcccaaggacacatttgtgttcagtatagatggcaccgtactctctaatattccatactacaaa

SEQ ID NO: 232784 - DNA, 381 bp, Glycine max
aagaattccagactatgtacgaatcagtaaagagtgtaggcaccttttgtctagaatatttgtggccaacccggaaaagagaattaccataccagagattaaaatgcacccttggttcctaaagaatttgccactagaatttatggacgagggcgaatgggtgttgcagaatgatgatcatgtgaatgaagagtcatctgaaatcactcaaagcattgaagaaatactggccatagttcaagaggctaggaaaccgggtgagggcccaaaagttggtgagcaatttgttgggggcagcatggacctcgatgatattgatgcggatgctgacatcgatgacattgagacaagcggtgattttgtctgtgcattgtgaatgat

SEQ ID NO: 232785 - DNA, 387 bp, Glycine max
gttcttaaagcagctatggccataaatgctcaaactctatcagaaatggagatccctgaaagctatattgaatccctacccaagaatggaagatcaagtcttggggacttgatctacaggagcattacagatgattttttcgatcctgatcagctcctatcagccatggacatgtcatcagaacataaaatcgtagatctcaaggacagaattgaggcatccattgtgatttggagacggaagatgaaccaaaaagatagcagcaaatcagcttggggttctgctgtgagtatggagaaaagagaaatctttgaagacagggccgaaaccatcttacttctcctaaagcatcgttttcccgggactccccaatctgcattggatata

SEQ ID NO: 232786 - DNA, 273 bp, Glycine max
gtcaacctcaacgccattaaccaggtcaatgggaagaagccatggtcactctctttctcctttggaagggcacttcaacagagcacccttaaggcatggggcggaaaagaagagaatgtgaagaatgctcatgaagcccttttggtaagagccacagctaactcaaaggcaactctgggaacctacaagggtaactcacaccttgctgatggtgcctcaaaaagcctccatgtttcgaactacagctactgatcaatcaagtttggtgttgtt

SEQ ID NO: 232787 - DNA, 352 bp, Glycine max
tgacctcgcacgcacgcgtacgtaagctctcggttcgggatttcatcgtgcattcaatggccaccacagcagctctatccggaacaatggtgagcacctccttcatgaggaggcaacctatgaccaccacaggcctaaggacattccccaacgttggggaaactctttttggtctgaaaattggacgaggtggtcgtgtcacttgcatggcctcgtaaaaggtgaagctcataaccccacaaggagaagtggagtttgaatgcccacatgatgttttcaatgttgacaaagcagacgacgaaggcattgaacttccctactcgtgcaaggccggttcttgcgtttcctgtgt

SEQ ID NO: 232788 - DNA, 397 bp, Glycine max
gaaccaagacaaagaaagggttaagtacattaactcaaggatctcaaagaacttgggccaagatagtagtgtgagtgaattggactcagttacactaccagccaagtctggtagccttattgggtctgggaattactttgtggttgttggtcttggaacacccaagagggacttgtcactcatctttgacactggcagtgatctcacttggactcagtgtgaaccatgtgctcgttcttgctacaagcaacaagatgctatctttgatccatcaaagtctacatcatattccaatattacatgcacatctacgctttgcacccagctctctactgctacagggaatgagccgggatgttcagcctccacaaaagcatgcatatacggcatccagtac

SEQ ID NO: 232789 - DNA, 376 bp, Glycine max
cgaggccgggctcatcgccggtggcatcggcgccgccgtgggaaaccccgccgacgtggagatggtccgaatgcatgccgtcggccgcctcactccggcacaacggtgcagctacaagtctgttgcggacgccatcattctaatggctaatcatgagggcgtcactaggcagtggagaggctcatcgcttacggtgaaccgctccatgctcgtgacagtgtcgcagatggcttcctacgagcaattcacagaaatgagtcaccagaactgcatgatgctcgacagcctcgggacccacgtcacggagagcttcgcggtggagttcgtggtcgaggtcgcgtcgaaccgcatcgacatgatcaagaccacagtgatg

SEQ ID NO: 232790 - DNA, 246 bp, Glycine max
aaacactcataacacaaagcacaaagcaaagctcatccttgagttaaaaaatggcagcagcttcttccatggctctctcatccccatccttggctggcaaggccgtgaagctgggcccatcagccccagaagtgggaagggtgagcatgaggaagaccgtcaccaagcaggtctcctcaggaagcccatggtacgggccagaccgagtcaagtacttggggccattctctggcgaacccccgttct

SEQ ID NO: 232791 - DNA, 368 bp, Glycine max
tatctacacacttctcaaccaacaatggcaatggaaactcaagcctctctcttcaccccacttctctccggtctcaaacccagcgaccgagcatcgcgcgatggtaacaatcctccaacctctccttctccacctcgaggcccctcaagttctcgcgatcaatcagagcatcagccaccgaccagaccacagaggcaccggttgggttcactccatcggaactggacccaaacaccccttctccgatcttcggaggcagcaccggcgggctcctgcgcaaggcccaagtggacgagttttatgtcatcacatgggactccccgaaagaacagatctttgaaatgcccactggcggcgctgccatcatg

SEQ ID NO: 232792 - DNA, 387 bp, Glycine max
aatatccaccaggagttggatactggtcgtgctagctagcgggccaaagtagtgcctaagtcttcctcatatcttccaccctttggcttattagtgggagcaatacatatcattcattcagaggcaacaaaggagttgtaaattaagagcatggctgcacaagctcttgtatcatcatcatctcttaccttctcagccgaggctacaagacaaagtcttggaccaagatcactccaatctccatttggcttctcaagaaaagcctcctttcttgttaagggagctgctactccccctgttaagcaaaggatcagacagacctttgtggtttgcatcaaagcatagtccttcctacttggatggcagccttccgggtgactatggatt

SEQ ID NO: 232793 - DNA, 343 bp, Glycine max
  unsure (1)..(343): unsure at all n locations
ctctggaactctcattacngagaatatgcaagagaacttgaagaaactgaaagaggtgaatacgaatcttcgtaaggagattatgcagagaatgggagattgtctgaacgagctgggcatggaagatctcaagctccttgaggaagaaatggacaaggccgccaaggttgttcgtgagcgtaagtataaggtgataacaaatcagattgacacccagaggaaaaagtttaataacgagaaagaagtgcacaacacgctcctgcatgacttggatgcaaaagcagaagattcacgttttgcattgatagataatggangggagtatgagtctgtgatcggattc

SEQ ID NO: 232794 - DNA, 386 bp, Glycine max
ggaactgggcttgcacttgttggagttttcttgtactcaagggcaaagaggatcaagtcagtccaaaagacaaattgaggctgcataacccttcaaaaaagaaaggaaacaggcagagggaaaagtaaatattgtagacacataacagccattgattttttttttctttctttttacattttgtgagggtatcactactccttgttaattggccatcctatgcgactaaatcttagtaaataatataggagtttaatagacatgtactgtaagtttaattttttttacaaatattcagaaatctttattgacatgactatagttattataaaatttaattaacttaatatatatatatatatatatatatatatatatatatatat

SEQ ID NO: 232795 - DNA, 390 bp, Glycine max
acaagagcgagtcatcatcacagctcaacgtcaagtgaccaaaaaagcttcaattttcgcatccaattcgcatacccatttgacttttcttctttccctcttctccattcttcgcattttcaagatccattcagaaatagcacaattgttaaagttggttgaagttcaatataattgtagctttattagcaatggaagaagaaaatgccatagagcttctccagagataccggagggaccggagagtgcttcttgattttatactctcagggagcttaatcaagaaagttgtaatgccacctggtgcagttacactggatgatgtggatctagatcaagtcagtgttgattatgtcctcaactgtgccaaaaagagcacattgcttgagc

SEQ ID NO: 232796 - DNA, 396 bp, Glycine max
tggttggtaaacacttgcaaggggaatggctgtcaacaaggtcagtggagatgttgaatgcaatccaactcttaaatatagcagtgaaaggaaagtacgttggcatggttgatttgctcatccactattctataccaagcaacaatggtacatccaggaaatacgtatttccaccgaatcttgagggtcctggtggtattacacccttgcacttggcagcatgcacatctggttctgagagtgtcgttgactcgttaacaagtgatccacaagagattgggttgaagtgttgggaatcacttgtggatgcaaacggacagactccacatgcctatgccatgatgatgaataatgactcatataatgcgctggttgcccataaacttgctgatagac

SEQ ID NO: 232797 - DNA, 358 bp, Glycine max
gcaatgtagggataaagaatgagcaaatggctgaggcctctgcacaagcttgtgtctctattccttccaatccttggagttctctgcaaaggggtttcagtgcataataattcctgtaatgtgcaccagtaaagaccaaagtatgattattgttacattatgctatatgattgtacttgtatatacatattttgtcccgcctttgtaaatacaattgggacactactaggattgggaagaagggtctttacatttttagtttggcaaatagatattgcaactacctttgtataaatctatttctgaagaagcaattacaactttcaagggatgatagcattttgtggcataaagatta

SEQ ID NO: 232798 - DNA, 399 bp, Glycine max
  unsure (1)..(399): unsure at all n locations
ataacacaaggcagaaagcaagctcatcctagagttttaaaaatggcagcagcctcctccatggctctctcttccccatccttggctggcaaggccgtgaagctgggcccatcagcccccgaagtcgggagggtcagcatgaggaagaccgtcaccaagcaggcctcctccggaagcccatggtacggcccagaccgcgtcaagtacttgggcccattctctggcgagcccccgtcctacctcactggcgagttcccaggtgactacggctgggacactgctgggctttcggccgacccagaaaccttcgccagaaaccgtgagctcgaagtgatccactccaagtgggccatgctcggggccttgggctgcgtcttcnccgaactgttgtcncgcaac

SEQ ID NO: 232799 - DNA, 384 bp, Glycine max
gttttggtcattgtgaaattattattatttactattctgggcctacttgtaccaccgtgtaggtgtgtaaccccaaaaggagagaaaaattgggggaaacagaaagagtgagggagcggtcgaaacagcgtgctgtggaattgtgcggtctaaggatatggtcattagaagaagggatttggtgggtctccaatgttttgtaccagtttgacctatcatcttttgttttgttgggtatgacctatatattagttactagttaggtgtttttttttattcagtttatagtattacttaacttttccccctctaaacagagactttgtgtaaagtgcaattatctagttaaattatatagggtttggttcccgtggcctatttcac

SEQ ID NO: 232800 - DNA, 383 bp, Glycine max
aaaacatggcacttttgcaacaaaaactaggcttctcatatctactaatcctttgcttagccactcttgtttcttcacacaggccttatacaactccaagtgtcacacgcttgactgattcttttcctcgtgtccaagttgatagtgctttttctaagacctttggggccaaaaatatccagtttcttagtaatgggtccacggtcacactggctcttgacaaaatctcaggctcaggcttggtatcacaaagcagatactcctatggattcttcagtgctgcaatcaaactaccttctggtttgtcacctggagttgttgttgcattttatttgtctaattcagataaatttcctcacaaccatgatgagatagacattgaa

SEQ ID NO: 232801 - DNA, 376 bp, Glycine max
ctcatgacacggtacttaccccctatcaatttgttgaatgtatgattaacataggaattcgcgtggcacgcacacggcatatgatcaagaataaggacaacaatgataagacaattgagctgctacatgagtttgcacgcacacactttccatccgcgacctacatggcatatgctgttcaagttgacacctacacactcacacaggcacataatttaattcctaacgtagattgtgcaattggatctcgtctcctggatctccatgctggtagttcgctgttcaccagacacaatattgacgaaactctcgatattggctatctgaatggcctctttgtgctggaactctccattggtctcattggacacacctt

SEQ ID NO: 232802 - DNA, 337 bp, Glycine max
cacaaatcaattaactgaatgcttagagagagaaagaggagaaggagtagtgataaggtgatcatagagcatattataagagagtgaaaactaatggaggttggcctcaagaaggagaacatggggtttgaggaaactgagttaaggcttggactgcctggaaacggaggcactgaagaagtgctcatcaggaagaggggtttctctgagactgaaactggtcatgaagatgagtctgccaccactgtggatttgatgcttaatctttcttctaaggaggccgcaaccactgctgctgctgctgcagattcaactgataagcacaagactttgccta

SEQ ID NO: 232803 - DNA, 376 bp, Glycine max
  unsure (1)..(376): unsure at all n locations
gtacgtaaactcagaattcngctccacctttgctattacctctttttcaaaactctaaaaatttttagttccacaaaaccaaaccaaaatggcagcagcctcggcctcatcaacaatgatatcaaaacaagccttatctccaagcacaagcatccaaaagcaccatcatttgaagccatccaacgtgtgctttcaaggccttagacccctcacaaggttcacaaccaaagtgagcagcaccaccaaaagggttattccaaagggtggtgtcngtgttagagctgaactcaactcagcacttgtcataaacctcagcactgggctccccctcttcttggggaaggtttgtgttcttcaacttccaaaggggagaacg

SEQ ID NO: 232804 - DNA, 394 bp, Glycine max
gcaaggtgaacaacaggatgtggggaactgtgaaaggaggaggaaatgatgaagatggtttaaggactttgaacattagccaatgcactgcactcaccccatctgctgttcaagctgtttgtgactcattcccttctctccacacatgctcagggaggcactcactcatcatgagtggctgcctcaacttgacatcagtgcattgtgcctgtgctgtccatgcgcaccgtgcattcaccactttcccttatcctgcccattaagaagctcatgcttttgatgttgaacacacttcgaggatgtgccccttgaaagggctcagagaagtgaaagaagtgaaatccaccccccttgtagatgtatgcctgcataagagagacttgaatctagctga

SEQ ID NO: 232805 - DNA, 403 bp, Glycine max
gtctcaagcaaccatggcaatggcaacccaagcctctctcttaaccccacccctctccggtctcaaagccagcgaccgcgcctccgtgccatggaagcaaaactccagcctctccttctccagcccgaagcccctcaagttctccagaacaatcagagcagcagccgccgacgagaccacagaggcaccagcaaaagtagaggctgcaccggtcgggttcaccccaccagaacttgacccaaacaccccttccccgatcttcgggggcagcaccggcgggctcctgcgcaaggcacaagtggaggagttttatgtcattacgtgggactcacccaaagaacagatctttgaaatgcccactggcggcgccgctatcatgagggaaggtcctaaccttctcaag

SEQ ID NO: 232806 - DNA, 380 bp, Glycine max
gcgtcttccctatcgcgcaggagaatgtgttggcttcttctccccgacgaactgtggaggcgaattctggagatcggaatcgagagcaacggtttcagttacaaggatctctgctgcgtctcaatctcatgccgccgccttcatcgcctctcctcggaagaacctctttggaaccgtcttctcttctctgactatccccaatcccaatctcacccttcttcttcttcttcttcttcttcttctaaatctctttacagattaaggtaccaattcattcgattctgcattttcaaattaaagttttttgtgtgattttcttgttcagatttttatcatttattggcttaattatatatttggtcacttgattataattaaag

SEQ ID NO: 232807 - DNA, 394 bp, Glycine max
cagagtgagaaagagaaagagagaattcgtaaaccctaatttcggaaagatcggcgatgactgcctccaaggatcgcgagaacttcgtctacatcgccaaactcgccgagcaggccgagcgttacgaagagatggtggaatcaatgaagaacgttgcgaatctcgacgttgaactgacggtggaggagcggaatttgctttctgttgggtacaagaatgtgattggtgctcgcagagcgtcctggaggatcctgtcttccattgagcagaaggaagaaacaaaagggaacgagttgaatgcgaagcggattaaggagtacagacagaaggttgaattggagctatcgaacatctgtaatgatgttatgagagtgattgatgagcaccttatccc

SEQ ID NO: 232808 - DNA, 345 bp, Glycine max
attcattttccgatggcttctgcagatgttgagtaccgttgctttgtcggtgggctcgcttgggccactgacgaccatgccctcgagagagccttctctcagtacggcgaaatcgttgaaacgaagattatcaacgatcgtgagactggcagatccaggggttttggatttgtgaccttcgcctcggagcagtccatgaaagatgcgatcggagcgatgaatggacagaacttggacggccgtaatatcactgtcaatgaagctcagtcccgcggtggcggcggcggcggcggcggaggaggaggaggatacaatcgtggtggcggtggatatggtggtcgtaat

SEQ ID NO: 232809 - DNA, 387 bp, Glycine max
  unsure (1)..(387): unsure at all n locations
cttcaatgtagaaacttgatttggacaagctcaagagcattccatcagtgtcttgagctccaaatggagaacacctggatcctgacttttcaccttctcctcctcctgctccatccaaatgcagcaaaaggggccattggtgttggtgttggtgttggtggcagaggtggcatangtgttggcattggcattgggggcagtgttaacaccccagggccctctggatcaaacctcaagagtgccttcacagcactccaggcatggaaatctgccatgaccgatgacccattgaagattctggatacttgggttggtcccaatgtgtgttcctacagaggtgtcttctgtgcaaactctcaagatgataatggaattgtcacaacagca

SEQ ID NO: 232810 - DNA, 387 bp, Glycine max
tgaacaacagcaacaacatcacaatcttcgctcccagaaacgaagccctcgaacgcgatctcgaccccgatttcaagcgtttcctcctcgaaccccgcaatctccattccctccaaaccctcctgttgtcccacatcgtccccaaaagaatcaccaaacccgaattcaaaaccgggtcgacccgacacagaactttagcgtctcaccaccacctcactctccaagccctgaatttgactcactggaatgttgagtcttcccgggttattaacccgaattcggtaacccgacccgacggagtgatccacggcatcgacactctcctcatccctcgctcagtccaagacgaattcaaacgtcgccggaatctgatctccatcgccgcgg

SEQ ID NO: 232811 - DNA, 396 bp, Glycine max
  unsure (1)..(396): unsure at all n locations
tttttattctacctaacaccacatggatacgttgccggaggattgtgtttccaaaattctgtcttacacatctccaccagacgcatgtagattctctatggtctcttcaaccctacgctcttccgctgactctgaccttctctggcgaactttctttccttctgattactctgacattgtctcaaaggctctcaaacccctcccccttaattcctcttcttcatacaaacaccttttctatgctctttgtcatccactcctcctagatggaggcaacatgagcttcanattagacaagtcttcgggtaagaaatcttatatcctatctgcaaggcagctttctataacgtggagcaatgaccctttgtattggagctggagaacagttcctgaatc

SEQ ID NO: 232812 - DNA, 495 bp, Glycine max
  unsure (1)..(495): unsure at all n locations
agacttnagaatgaataaatcgcgtgtactatagaagagatatgacgtcgcacgcacgcgtacgtaaactcggaattcggctcgaggaagtttgtacttgtttttaggctgactgaattaatgcaaaaaaaaaaaaaaaaaaaaaaaaaaaaaaaaaaaaaaaaaaaaaaaaaaaaaaaaaaaaaaaaaaaaaaaaaaaaaaaaaaaaaaaaaaaaaaaaaaaaaaaaaaaaaaaaaaaaaaaggggggcccccaaaaattaacctcttcaacccggaaattaattccggaccgtaacctgaagggttaaaaattttcccaaaagtaattcgtataaaaccttggctaaacaagggcaaaaactttttcctgtttaaaattgttacccgccaaaaattcaaaaaaaaatacaacccggaacaaaaaattttaaaccctggggtgccaaataattgaccaaacccaaataaattgctttgcccaaaatgcccgctt

SEQ ID NO: 232813 - DNA, 387 bp, Glycine max
gacaggtttggcattgttgagggtttgatgaccactgttcattccatcactggtgagcctattgctcgcaatttgattggttgcatgccttttactgtgttacctattatgatatgtcttgcatatccggtttatgtttttgttttgtaaaccagctacccagaagactgttgatgggccatcagccaaggactggagaggtggaagagctgcttcatttaacatcattcctagcagcactggagctgccaaggctgttgggaaagtccttcctgctttgaatggaaaattgactggtatggcattccgtgttcccaccgtggatgtctctgttgttgacctcacggtgaggctggagaaggaagcctcatatgatgaaattaaaaa

SEQ ID NO: 232814 - DNA, 398 bp, Glycine max
attggtcttgaattcagtgatgtatatacagcacttggaagtgaggttacttttatagaagctttagatcaacttatgcctggatttgatcctgaaattagcaagttggctcagagggtccttataaatccccggaatattgactatcatactggagtttttgcaaccaagatcacgcctgcaagggatggaaaacctgtcttgattgaacttattgatgcgaaaaccaaggagccgaaagacacgctggaggtggatgctgcactaatagcaactggaagggctccgttcacacaaggtcttggattggagaatattgatgtggtaacacagcgtggttttgttccagtggatgagcacatgcgagtaattgatgcgaatggcaagctggtgcctca

SEQ ID NO: 232815 - DNA, 331 bp, Glycine max
ctggccttgtttacgaggttgtctttatcagccacacccacgagcagcttcccaccactgactactagagggggggaaatgaaaataaaaaaaaaaaaattgtgtattattgaatttctctggaatcttcttctgtgtatggttttccttccttgtgttttcttcctaattcactttcgagggttgtacttgttcctttcgtcttaaatccttggatggttgatgatcatgaagttctctttaaagttaaattattatcattttgtgcatgctctctctctctcacttggtccacaacaattgaattgaatgtagtatcattattcgggtc

SEQ ID NO: 232816 - DNA, 239 bp, Glycine max
ctccagagagaagaagaaacttaatcgatcatcacttcacttcactaatacatcatggcagacgagacccagaacaagtatgagagctctgaggttgaggtccaggatcgtggtgtttttgactttctcggtaagaaaaaggatgaagaagacaagcctcatcctcaagaggagggcatcgccaccgagtttcaaagagtcactgtctcagaccaatgagagaattagcacaacctctt

SEQ ID NO: 232817 - DNA, 383 bp, Glycine max
aaacgctggagaggtaccagaaatgcaactatggagcgcctgaggacaatgtggcaacaaaggaagccttggagttaagcagtcaacaagaatacttgaggctgaaagcacgttatgaagctctacaacgttctcaaaggaaccttatgggagaagatcttggccctctaagcagcaaagagcttgaatcacttgaaaggcagctagattcgtctttgaagcaaatcagatcaataaggacccaattcatgctggatcagctttctgatctacaacgtaaggtatgaggtcaattatcctttttctttaattaatttgtcaatgtttaactgctattcttcttcttccgcatatttcccttgctcaccggttcaattatgcat

SEQ ID NO: 232818 - DNA, 382 bp, Glycine max
cttttgcgaacagctgttagacttgagttgagtcacagtcatcgtctgttcaggatcatattcacgccccctctctctctctctctctctctctctctcttactttgtgtctttctatctctctcttcaattccaaaaccctacccccatccaattccaattcaccctcaatcatgggttctgaaggttccactgtcgtcgttcctatgaacttcagattattggaagagcttgagagatgtgagaagggaattggagatggaactgttagctatggaatggatgatgctgatgatatctacatgcagtcctggactgggactattattggcccccctggtactgttcatgaagggcgtatataccagctgaaattattttg

SEQ ID NO: 232819 - DNA, 375 bp, Glycine max
  unsure (1)..(375): unsure at all n locations
cgacgacctcgttggttttcctttgtaagttgtaagcatttggcaccagcaagccctgtcttcttcttcgatcagattanggcatttcatttctgcgatggccgcagcacccgctagagctcgtgccgattacgattacctcatcaagcttcttcttatcggcgacagcggtgtcgggaagagttgtctgcttttgagattttctgatggctcattcacaaccagttttatcaccaccattggtatcgattttaagataagaaccattgaactagacggcaaacggattaagttacaaatctgggatactgctggtcaggaacggtttcngaactattacacagctttattacgtggagccatgggtatcttgct

SEQ ID NO: 232820 - DNA, 344 bp, Glycine max
ctcctattgctgctgttatagtttttcatgataagatgaatggggtgaagataatttctatgcttttggctctatggggttttgcctcttatatttatcagaattatcttgatgattcaaagacaagacatgcacaagctgctactaagtcccaaaatgattcttcatgttgagaatattcaatttggtcatacctttgtcgaagtttccttttttctttttagatttaaatccttcagtacaccatttggcagctttagattttaattttccttcagtctcactgaacttgtgaggtagtatagttatgaagttattggtcattctagattattgttctctca

SEQ ID NO: 232821 - DNA, 380 bp, Glycine max
gcgttggttgcgattgaaacggtacgatgggaagaggaaaattcaagagcaagcccaccggtcgccgccagttctccaccccggaagatatgcttgctggaacctctaaccgtcctcgaacttttagacagaaagaagctgagcatgaagaggagcctgaggaagtatctggggatgaatctggagaagaatcagaagaggaaacttctaagaaaaaaggaacacaaggagttattgagattgaaaatcctaacttggtaaagccaaagagcttgaaagctagagatgttgatgttggaaaaacaacagaactttcaaggcgtgaaagagaggagatagagaaacagagagcccatgagcgctatatgaggctgcaagag

SEQ ID NO: 232822 - DNA, 257 bp, Glycine max
aaggactaaagataacaatttgttgggcaaatttggactttcctgcattccccctggccccaaggggggtccccaaaataacgggtgccttgacaatgatgccaatgggaatttggacgtccccggcgaagattagaccaatgggcaaaaaaattagattaccaaccacaattgcaagggttaaccggccaagggaaaattccgaaaaaagggttaaaagggctgaaatttaaaactcaggggttaaagcacacaaa

SEQ ID NO: 232823 - DNA, 368 bp, Glycine max
gagactgaagattgaagaacagtcgtcggctcctcgctcgcccttcgctgctgcgccatcaccgtgcccttctcaaagcgattttaacctaaccgcgttctttttttcttcagaaatcgagcataaggatttgaggattgaagtattgaacaccaaatcctttatacttgttgggcaagaagggagggaaaaaggagaaacacaaaaatgtttttccacatagtgctggagcgaaatatgcagctgcatccacgctactttggtcgcaaccttcgtgataatctcgtttccaagctaatgaaagatgtggaaggcacttgcagcggccgacatggatttgtggtggcagttacagggatagaaaacat

SEQ ID NO: 232824 - DNA, 385 bp, Glycine max
  unsure (1)..(385): unsure at all n locations
aaaagaagatgacaatttatgtgttagcattatggctgcaattgtagctatatttactgagacaaatgcaggcgcttggaaaataggagtggatacagcattggcttccatagtttgctctggaatttttggttcattcgtgaacaatgtagttcacacatgggtactgcgtataaaggggcctgtctatgtagcaatgttcaagccactctcaattgccatagctgttgccttgggagtcatgttcctgggtgatacactccaccttgggagtatagttggagccacaattaaaaccaatgggttttatactgtaatgtggggaaaaacaaccganagagaatgtgggggaagatgtcnctggccagcaatcaccaaccacaga

SEQ ID NO: 232825 - DNA, 399 bp, Glycine max
  unsure (1)..(399): unsure at all n locations
cggcggcggccccgacctcatcgtcgacgacggaggcgacgccaccctcctcatccacgagggcgtcaaggccgaggagctctatgagaagaccggggaactccccgaccctaactccactgacaacgccgagttccagatcgtgcttaccatcatcagagatgggttgaagaccgatcccaccaggtaccgcaagatgaaggagcgtctcgttggggtttctgaggaaaccaccactggtgttaagaggctatatcagatgcaggcgaatgggactctactcttccctgctattaatgtcaatgactctgttaccaagagcaagtttgacaacttgtacgggtgccgtcactctctcnctgatggtctgatganggctactgatgtgatgattgctgg

SEQ ID NO: 232826 - DNA, 397 bp, Glycine max
gccacgctgaggcctaagatctccgaattccaagcgcctcttgatagggtctcccaccctaaccaagccagatcccgttttcaattccttctcagtttccttttctctgaaaaaacatgttgagggttgcagctagaaggctctcttcttctctctcatcttcttctccgttgcggcccaatcacgccgcttccgcttttctctctcgaaacgacgtcgtcgtcgatgaccgcagatctgctccttcctcccatccccttcttcccttcagaggttatgctactgaatccctgatccacacaaaagaaaacagcattactcctgagattccgccaactgttactgctgttaagaaccctacttctaagattgtctatgatgatcacaaccatgaaag

SEQ ID NO: 232827 - DNA, 328 bp, Glycine max
gagaacgagaggaggggttcgggtgtgagagcgagaatcagaagatgaagaaggaagacacattgaacctgataattgccaaaggttttgaatttgtggccaacaaagaacctgcaatggttccacagcccatacataacaggctaatttctccagagatttcctcagagaggcaacacggcgaatttacctttcctgatatcagcaccaccattctcgagaagatttgccagtacttttagtggcatctccaattcgccagtgaaaaggacacggaatttcccattgaacctgaattaactctggagctaatgatggctgccaatta

SEQ ID NO: 232828 - DNA, 404 bp, Glycine max
cgaagaagacagtgaggatgaaagtgaggaggaaccctccaaaactcctcagaaaagagacagggatgtggagatggttgatgctgcctcgtctggaaagaaagcgcctaagaccccagttacacccaaagaagaaactggcgcttcaaagacactatttgttgggaacttgccatttagtgttgaacgagctgacgtggaagatttcttcaaggatgctggagaagttgttgatgttcgatttgctacagatgatactgggaagtttaaaggatttggacatgttgagtttgcaacagcagcggctgctcaaaaggcccttggattgaatggacaacaattgtttaatcgtgaactccgacttgatttagctcgggaaaggggtgcatatacccccaacagca

SEQ ID NO: 232829 - DNA, 381 bp, Glycine max
cgtaacagcaatggagctgtcttcaagtgcatttgtggtaatattgttggcagtcgcagctacagcagtactctcaaatgggttggatctatctttcttgcccagcgatttcctctttggcattgcttcttcctcttaccagtatgaaggagcttacaagagtgacggcaaaggactgagcaactgggataactacactcacggaccaggtagaagtgtaataatggatggaagcaatggggatatcgcgattgatcattatcatcgctacctggaggatatagatttaatggaaactttgggagtaaacagctaccggctatccctgtcatgggcaagaattctaccaaagggtagattcggagaagccaacatgctggt

SEQ ID NO: 232830 - DNA, 307 bp, Glycine max
ctgaatctgagtcgaaactcactcaccggtatcattccctgggaaatctcagctctcccttccatcaccgacgttgatctctctcacaattcactcaccggaaccattccttcgaacttcaacaactgctcaacgctcgagaatttcaacgtcagcttcaactccctcaccggtccaattccgtcgaccggcattttcccgaacctacatccttcctcctactccggcaaccagggcctatgcggcggcgtgttggccaaaccctgcgcagccgaaggccctctccgccgccgacaaccaggtcgac

SEQ ID NO: 232831 - DNA, 406 bp, Glycine max
  unsure (1)..(406): unsure at all n locations
gggatgtgtcttcacatatgatgctgttggttcctatgagagggttggatatagctctcagggttctggatccacacttattatgccatttcttgataaccagctgaagtctcctagcccactcctgttacctgcgcaggatgctgttactccattgtctgaagcagaagcagttgatctggtcaaaactgtttttgcatctgcaactgagagagatatatacactggagataaggttgaaatcgtcgtcctaaatgccagtggtattcgtcgtgaatacatggacctaaggaaagattaatgctttacagaaatttactgttggagatnacagacttggattgagaatgtttgaaatgcttctagaattttaaatgacatagtgggtttttcacatgaggtgaaa

SEQ ID NO: 232832 - DNA, 305 bp, Glycine max
agagtcttcagtttctcctcgttgttcttcgctttcctgttttcaatttcgattctttcgttaatttaataagatgtttgggagggcaccgaagaagagcgataatacgaggtactacgaaatcctcggcgtctccaagaacgcttcgcaggatgatctgaagaaggcttacaagaaagccgccattaagaatcaccccgacaagggcggtgatcccgagaagtttaaagagctggcgcaagcttataaggttctgagtgaccctgagaagcgtgagatatatgatcagtatggtgaagatgcgc

SEQ ID NO: 232833 - DNA, 390 bp, Glycine max
attgaaatctagttatatggatgataaggacaaccttgcaatatactatgtggtaataccttgtgctgtgctgtccttgttaattcatccaacaacccggcatcatccacttaataggattctctgggcattttgtgtttatcttgaagctgtttctgttctccctcagctgcgggtcatgcagaacactaagattgttgaaccattcacagcacactatgtttttgctcttggagttgcaaggttcttgagttgtgcacattgggtcctccaggtattagatactcgtggacgtctactgactgcattgggttatggattgtggccttctatggttcttctatcagaaattgtccaaactttcattctggcagatttttgctactacta

SEQ ID NO: 232834 - DNA, 357 bp, Glycine max
cgaccttattttggagccgcggtggcggtagcggtggccggcgattgtagcggcgtaggagcaagaaatggttttatgttgtgaggaagattgttaagctgtgggaatatgtcattgagaagcatagtccgtgaactcaaggagatgagagatggaataggaagcacatcaaagcggggtgcagaaagcaagcatcggctcagtcggacaaagtcacatgtagctccagatgttcttgcaactccatttgaacctattcaacagggacaatgggcaaatctaccatcagaattgcttttggacataatccagagggtcgaagagagtgagacatcttggcctgcccgtgctgttgtt

SEQ ID NO: 232835 - DNA, 396 bp, Glycine max
gccttgtgtcaaggcaactaaagcttctctcgctttgcaagagagggaggagtgagtgagatggaaggagtgatacacagaacagtggaagtgaatggcataaaaatgcacatagcagagaaaggagagggtccagtggtgttgttcctccacggcttccctgagctctggtactcatggcgccaccagattctctctctcagctccctcggctaccgcgccgtcgctcccgatctccgtggctacggtgacaccgaggcaccaccttcaatagacagctacacttgctttcacatagtgggtgatctcgttgcgcttatagactctctgggtgtccaacaagtgttccttgtggctcatgactggggagccctcatgggttggtatctgtgcatg

SEQ ID NO: 232836 - DNA, 368 bp, Glycine max
  unsure (1)..(368): unsure at all n locations
ctccgccctagacatgtcgataatctcgtacgacagcgcccacgcggacaaggccgccacgttgcgcaccgangangagctgatgtccatgtacgagcagtggctcgtgaagcacgggaaggtgtacaacgcgctcggcgagaaggagaagcgcttccagatcttcaaggacaacctgcgattcatcgacgaccacaactccgcggaggaccgaacctacaagctcggactgaaccggttcgctgatctcaccaacgaggaatacagggccaagtacttgggaaccaagatcgattccaaccggaggctcggaaagaccccgagcaaccgctacgcgccacgtgtcggcgacaaattgcctgattccg

SEQ ID NO: 232837 - DNA, 418 bp, Glycine max
  unsure (1)..(418): unsure at all n locations
tacgcattaactcaactctgaattcggctctagaaaatggcggtgcctctactctcgaagaagatcgtgaagaaaagggtgaagaagttcaagaggcctcagagtgacaggaaaatttctgtcaagacaaactggcgcagaccaaagggtatcgattcccgtgttaggagaaagttcaagggatgcactttgatgccaaacattggttatggttcagacaagaagacccgccactatctccctaatggttttaagaaatttgttgttcacaatgtgaaggacttggaactgctcatgatgcacaacaggacttactgtgctgagattgcccacaatatatccacaagaaagaggaaagatatagttgagagagccgcgcagcttgatgttgttgtgacanacaaaacagccagattac

SEQ ID NO: 232838 - DNA, 357 bp, Glycine max
gaaaaatgtcgaagctgatcttcgtgttcctttcgctcattcctcttctctgcacctccttctccccagagagaccctcagatcgacgcgtcctcgttttgctcgatgacttcgccatcaaatcctctcattctctcttcttcaactccctcaaatctcgcggcttcgatctccaattccacctcgcagacgaccccaaaattgcgctccagagatacggccagtacctctacgacgccctaattctcttttcccccaccattgaacgttttggaggatccattgacgcggctgcaattttggattttgttgattcgggtcatgatttgatcgttgctgctgatagcaatgcatctg

SEQ ID NO: 232839 - DNA, 395 bp, Glycine max
  unsure (1)..(395): unsure at all n locations
agttcattctctttgcgcagttccctacctctcctttcaagatgcagatcttcgtcaagaccctcaccggaaagaccatcacccttgaggtggaaagctctgacaccatcgacaacgtcaaggccaagatccaggacaacgaaggaattcccccggatcagcaacgtctcatcttcgccggaaagcagctcgaggacggccgtaccctcgccgactacaacatccagaaggagtcaacccttcaacttgtccttcgtctccgtggtggcatgcagatcttcgtcaagactctcactggcanaaccataaccctagaggtcgaaagctctgacaccattgacaacgtcaagggccaagattcangacaacgacggaatccccccagaacagcaacg

SEQ ID NO: 232840 - DNA, 391 bp, Glycine max
cgtgacttgcagcaattcccaatggcttccgtttccaagctctcaacgccaaatccacttgcttccttatcagaagcgcttcgcccccgagattctcgcttcctcaccttcaaaccttcttccatcgcttttaatcacaaaactaacctatccgcttccctccgatccattcactcgctccctcttaaaacctccttacggatcaaatgctcccaaacagatgggaatggaagtcctgcaaagaggacagtgcttcatgatctttatgagaaagaagggcagagtccatggtatgataatctctgcagacctgttacagacctgcttcctcttatagcaagtggtgtcagaggcgtcactagcaaccctgcgatctttcagaaagctatct

SEQ ID NO: 232841 - DNA, 292 bp, Glycine max
ttaagaatggcactttctcctattcgttcttctactttctcttcatcatcagctattggtacattacctgtgtaattcctcctaacagggactccttaactatcctcccaaaggacttctaatccaagacatgtccaaacgttttcaacacggtgaaatctgtattaaaatctgctgtggccaaagaacctcgcattggagcttctattgttcgcctcttcttccatgactgcgttgttcaaagttgtgatgggtcaatactacatgatgacactccaaacttccacggggg

SEQ ID NO: 232842 - DNA, 375 bp, Glycine max
ctcgagccgctcgaactgcagggaaattccatcaacggtacgattccttgggacgttggacactgccagaagttgattttactgaatctgagtcgaaactcactcaccggtatcattccctgggaaatctcagctctcccttccatcaccgacgttgatctctctcacaattcactcaccggaaccattccttcgaacttcaacaactgctcaacgctcgagaatttcaacgtcagcttcaactccctcaccggtccaattccgtcgaccggcattttcccgaacctacatccttcctcctactccggcaaccagggcctatgcggcggcgtgttggccaaaccctgcgcagccgacgccctctccgccgccgac

SEQ ID NO: 232843 - DNA, 380 bp, Glycine max
ggacgagatccctctctctcccattccagatctcgccatcagattcaccctttcattttaagcaaagtcataacttgaagaaggttcatggctgctccaccggcaagggctcgtgccgattacgattatctcataaagcttctcttgatcggtgacagcggtgttggaaaaagttgcctcctcctgcgtttctccgatgggtctttcaccactagtttcatcacaactataggcattgattttaagataagaaccattgagcttgatggaaaacggatcaagctccaaatttgggatactgcggggcaagagcggtttcggacaattacaactgcttactatcgcggtgctatgggcatattgctagtctatgatgttac

SEQ ID NO: 232844 - DNA, 370 bp, Glycine max
tggagacttgcagatagacttcatgtattatgtgaattccgaactcctggtggcatttcagtgtgatcatcaagcttctttcaagtacaaatataagttcctcagagcaacaacttctaatatgcctagcagtgttattaaagaaaatagaggaagtaagttaagcattgggagaggtggaatgttaaaagtccagcatctggtttcaattgccaaaccatctgtgtcacacccatatgctgattcggttggctatcagcaaccaagtagaatagctcatattgaattctttgtgaaaccagatgaaagtgaggactgagtgaatgattattagttactataaagactccgtcaagttttgctatgcaaa

SEQ ID NO: 232845 - DNA, 374 bp, Glycine max
tgaggagatgatgataacgtgacgaattatgtgaagtccgaactcgtggtggtatttcaatgtgaatatcatgcttcgttcaagtataggtatgagttcctcagagcatcaacttctcatatgcctagcagtgttattaaacatgatagaggaagtaagttaagcattgggacaggtggaatgtgaacagtccagcatctggtttcagttgccaaaccatctgtgtcacagccatatgctgattcggttggctatcagcaaccaagtagaatagctcatattgaagtctttgtgaaaccagaggaaagtgaggactgagtgaatgattagtaattactataaagagtccgtcaagttttgcgatgcaaaccatt

SEQ ID NO: 232846 - DNA, 278 bp, Glycine max
aaaggaaggggctttttggttaagtcatgggctccgcagccacaggttctggcccatcaatcaacgggaggattcttgagccattgcggctggaactctatactggagagcgtggtgaacggcgtgcctttaatagcctggcctctgttcgcggagcagaggaccaacgcgtttatgctcatgcatgaagtcaaggtggcgctgaggcccaaagttgccgaggacactggacttgtccagagccaggaaatagccagcgttgtcaagtgcctcatgga

SEQ ID NO: 232847 - DNA, 466 bp, Glycine max
agtatgaatgcggtgtcgtataaaagataatgacgtcggacgcacgcgtacgtaagctcggaattcgctcgagaacgcagagataataagctccatactgcaaaaggcgactctgaaggaaacaaccttgtagaagatatgtcaactgaattgcacatttatactgacttcttgaggcttgtactagaaataataaatgcaatcctgacttatgcactacctcggaatcccgaggtagtgtatgcaataatgcacaggcaggaagtctttcagccattcaagaatcatccacgcttcaatgaactgattgataacatttatactgtattagattttttcaatagtcgtatggatgctcaaagagaggatggtgactggtcagtccacgaagtgctacaagtcataattgtcaattgtcgttcttggaggggtgatggaatgaagatgtttactcaactgcgcttca

SEQ ID NO: 232848 - DNA, 381 bp, Glycine max
gtgttgtgtccctcttttaagctatttccttctcttaacacaattggttgtgccaattgccatagtcaccaaccaattaacaaaggtatatatatcatcatatcatcaccaaatgaaaaatattgggttgttttttcttgtggtggtggctacttttgtggtggcagccacagctggtagcttttaccaagactttgaaataacgtggggtggtgagcgtgccaaaatctatgagaatggaaaccttctcacactctcccttgacagagcctctggctctggctttcgttccaaaaaagagtacttgttcggaaaaattgacatgcagctcaagcttgtgcctggtaactctgctggaacagtaactgcctattatttatc

SEQ ID NO: 232849 - DNA, 384 bp, Glycine max
agaagagggggtggaaggtgctggatttgatgatgagaaatcactacttatgtcacaaatgagcctcgagaaaaggtttggtcagtctgctgtctttgttgcctctacactcatggagaatggtggcgttcctcagtctgcaactccagaaactcttcttaaggaagctattcatgttatcagttgtggttacgaggataaatcagaatggggaagtgagataggatggatctatggttctgtcacagaagatattcttactggattcaagatgcatgcccgaagttggaggtctaattactgcatgcccaagctcccagcgtttaaaggttctgctcctatcaatctttcagatcgtctgaaccaagtgcttcgatgggcttt

SEQ ID NO: 232850 - DNA, 383 bp, Glycine max
ggcggggctacccgctgagtttaagcatatcaataagcggaggaaaagaaaaaaaaaaaaaaaagaagggaacttattgcaagcgagggaaagaaaagaaaaagaagcaaagtcaacttttgctatgtttggtttggctgggacctttgtggaccaaaagaatcgtctactagatggatagggaccttttctgtaaatttgacacaaaaaaaaaaaactatgaaatagtagtactatacttactttttttttattcttgtttttccaacttaatttactagacattcatttactctcagcaatcaaaaaataatttaaatttttataaaattggataaatggcatgaaattggttggactttaggccacccacctatttattg

SEQ ID NO: 232851 - DNA, 289 bp, Glycine max
ctctgctgagacaacaatggcgatggctttcaaaatggccactactgggatgtgggtgacggatgagtgcaagaactctttcatggaaatgaagtggaagaaggttcatagatacatagtcttcaagatcgatgagaagtcaaggcttgtcaccgttgataaggtgggtggtcccggcgagagctatggtgatctcgccgcctccttgcccgacgatgattgtagatatgccgtattcgactttgatttcgtcaccgtcgataactgccgcaagagcaagattttcttc

SEQ ID NO: 232852 - DNA, 396 bp, Glycine max
tggggatcgaagccggggagcggaggtgcggcgtcggcgcagaacgaagccatagaccggcgagagcgtctccggcgactggctctggagaccatagacttggcgaaggatccctatttcatgcgcaaccacctcggaagctacgaatgcaaactctgtctcactctccacaacaacgagggtaactacttggcccacactcagggcaagcgccaccaaaccaacttggccaaacgtgccgctcgcgaggccaaggacgcccccgcccagccccaaccccacaagcgcaaagtcactcttcgaaaaacagtgaagattggacgccctgggtatcgtgtgaccaagcagtatgacccggagacaaaacaaagatctctcctattccagattgaatat

SEQ ID NO: 232853 - DNA, 372 bp, Glycine max
  unsure (1)..(372): unsure at all n locations
aaatacgggtaccgtacttcaagtaggcgacggtattgctcgtatttatggtcttgatgaagtaatggcgggtgaattagtggaatttgaagagggtactataggcattgctttgaatttggaatccaaaaatgttggtgttgtattaatgggtgatggtttgatgatacaagagggaagttcagtaaaagcaacaggaagaattgctcagatacctgtaagtgaggcttatttgggtcgtgttattaaatgccctggctaaacaattgatggtcgaggagaaatttcagcttcggaatctcgattaatcgaatctcctgctcncggtattatttcgagacgttccgtatatgagcctctccaaacaagact

SEQ ID NO: 232854 - DNA, 304 bp, Glycine max
  unsure (1)..(304): unsure at all n locations
tctcaaccggcccaatttagcataagcccagcatggccaccgcaacagcagcagccacctcgtccttcatggggacgcgcctcctggaggcccactccggggcggggcgggtgcaggcccggttcgggtttggcaagaagaaagccgccgccccgaagaaagttttccagggggtcgggctctagctccgataggcccctgtggtatccgggcgccaaggcgcccgagtacctggatgggagccttgtcggagactacggattcgacccatttgggctanggaaagcccgccgagtacctgcag

SEQ ID NO: 232855 - DNA, 365 bp, Glycine max
gtttctctctcttagttcaaatttcgaattcggaagcagcaaaactaaagcccaaaaacccataccaagatgctcctccgaagccactgttgctacctcggcataatcgccgggctagcagtgttcctcgcaacgacgtcgttcgccgacgcgcaatcctgcaacggcatcctcgtctcatacgcctacaccggcggcctgcggttgccgcccaacgtctccgactcggctaagcagccgtaccggttcgagtcgacggtgacggttctcaacaacggcctcgacgagctcaagtcgtggaaggtcttcgttgggttcgaccacgacgagttgttggtctccgcctccaatgctgtgctcgccga

SEQ ID NO: 232856 - DNA, 352 bp, Glycine max
gtaactgaaaagtttgagactgtcaagaatgaagatagggaaaacacacaaacattcaatggtcgttaagcaaataacgtaccacttgttcatggatgccttcacccatatatccggcaatatacatcaaatttacaaacaacgtacaaagagcaacacacatccactgggtggaacagcatacctaaacttgataaatgatgatgatccctttctacatggcatcaactacactgctatgcgcccatcatagcgcttccgtgatatggatcatctatctggtggggaaaagacagttgctgcacttgcattgctattctccatccatacttcatagccttcaccattcttt

SEQ ID NO: 232857 - DNA, 309 bp, Glycine max
  unsure (1)..(309): unsure at all n locations
gcctctctgttccaaaaccctaatccttcgtcttccaaggagatggctgattctcccctcgcaaggaactcaaggtcaccttccccatggaaagctcagtcgagatcgagatctaggtcaaggtcgagatctaggtcgaggtctaggcctagacaaaggccaagatcgcgttctagaagtcgtggcaagtcaaggtcaccaattcgtggnaggtcaaggtcaccaattcatggaatgtctgaacctacaaatcctggtgacacactttatgtaactggtctatcctcgagggtcaccgaaagagaccta

SEQ ID NO: 232858 - DNA, 287 bp, Glycine max
cttcagcttccattctacgctctcccaaccgccagtctctgaccagaagagcgaaccacaacggaagagtaaattaccgtcaaccgaatagccgtttctccgtcaaagcctccgccaaagagattgcctttgaccagcattcccgctctgctatgcaggccggcattgacaagctcgccgacgccgtcgggctcactcttgggcccacggggaggaatgttgtgttggatgagtttggaagtcctaaagtggttaacgaaggggtcacaattgctcgcgccatcgag

SEQ ID NO: 232859 - DNA, 378 bp, Glycine max
cgctcgagcgccgcccgataaaccacctctccgttctcctctcccccaaaattcaaattccaaatacctaagattcgctaaaatcccttccccgtcgccacatcgcatgaacccttgaattccgattcggataggcatgtccggagcggccttgtcgccgccgacgaattcgaagtcgctgacgcagacggtgagcgggtcgcacaagttcgtgatcgagggctattcgctggcgaaggggatgggagtggggaagcacattgcaagcgacgtgttcaccgtcggaggttaccactgggcgatctacttctaccccgacggcaagaatcccgaggacaattccgcctacgtctccgtcttcatcgccttggccagcga

SEQ ID NO: 232860 - DNA, 381 bp, Glycine max
caaggtttctgattttggcctggccaaattattgggtgctgggaagagttatgtcacaacaagagttatgggaacttttggatatgtggctcctgaatatgcaaatactggccttctaaatgagaagagtgatgtttatagctttggtgttttgctattggaaggaattactggtagagatccagttgactatggtcgaccagcaaatgaagtgaaccttgttgattggctgaaaatgatggttggaaacaggagatcagaagaagtggtggaccccaacattgaggtgaagccatccaccagagctttaaaacgggctctcttaactgctttaagatgtgtagatccagattctgagaaaaggcccaagatgggccaagt

SEQ ID NO: 232861 - DNA, 378 bp, Glycine max
ttcagttccaaacaaaacccatcaaagtctttctccctcagtgatcatatattcattcagttctatacaaaatcctcaaaaactcttcctctctgccatgaccatggaatacagaaccttagaactcaacatcatatccgcaaaggacatcaagaatgttaatctcttctccaagatggacgtatacgccgccgtttcgctctccggtgaccctctccaccctcagggcgccaccacccacgtccacaaagacgccggcagcaaccccacgtggaactaccccgtgaaattctctgtcaacgaatcgctggcgaaggaaaatcgtttatctcttgagatcaagctcatctccgaccgcaccctcggcgacaccgtcat

SEQ ID NO: 232862 - DNA, 391 bp, Glycine max
ctctctctatctctcacacacactttctctctctctctctctcacccagatcttgtagcaatggcgagcgctcccactccacgcgaagagttcgtgtacatggcgaagctggcggagcaggccgagcgctacgaggagatggtggagttcatggagaaggtctccgcctccgccgagagcgaggagctgaccgtggaggagcgtaacctcctctccgtcgcctacaagaacgtgatcggcgctcgccgcgcctcctggcgcatcatctcctcaatcgagcagaaggaggagagccgcggcaacgaggaccacgtcgccgtcatccgcgactaccgctccaagatcgaggccgagctctccaacatctgcgacggaatcctcaaactcctcg

SEQ ID NO: 232863 - DNA, 384 bp, Glycine max
  unsure (1)..(384): unsure at all n locations
gtcccaaagagctaacaagagattcaagaccggcatggctaatgaagaggaacagaaaaaccacctcttcggcatcaaagatctcggtcacaagactctccttcagagtgatgcactctatcagtatatacttgaaaccagtgtctatccaagagagcacgagtgcttgaaagagatacgcaagatgactgcaaaacacccactgaacatcatggcaacaccagcagacgaaggacaacttctgagcatgcttgttaagctcacgaattcaaagaacgccttggaaattggtgtattcactggttactctctgctctccactgccctggctcttcnccctgatggaaagatcttggctttggatgtgaatcgcgaatactatga

SEQ ID NO: 232864 - DNA, 396 bp, Glycine max
aggagctggtgcaaggctcaaacattgtatcatccttgatgacgttgaaatcaaggaaaatgctcttgttggtcatgcaattgttggatggaaatcatctattggtcgatgggcctgtgttgaggctagtggagattacaatgcaaagctcggggtcacaatacttggtgaatctgtgactgttgaggatgaggtagtggtttttaatagcattattttgccacataagaccctaaatgtgggtgttcaggatgagattcttttatagaacctccacagctcccattgttggctttctaatttccttttgattgtatttgcagtgacttatgttttaatatctagtttggaggccccaaaacagtggatataatcgatttttgtctcaaaattgaa

SEQ ID NO: 232865 - DNA, 330 bp, Glycine max
cccacgggcatttatgctccccctaaccgtgatcacattgctctggcgttggcaatggcttaccaagaggtcaccaatcaccataaacagcgccctcctatcaacgatctcgggccaaatgataagcttcctagctgattcacttactgctacttaccctctcagggttttgggcttgggtccttaagcaacttgttagaacagcttcagcatgcatattgcatatatggatgtaatcattttcacatggagttaaaaagaggtagaggagatcgagttgtaggaaataaactacttttgcaaataataacataccacattaatcttcac

SEQ ID NO: 232866 - DNA, 381 bp, Glycine max
aaacaataccaactggaaaaagaagggatttcaaaaaccgtgattggttggaaaccacctttttcttctacgatgagaacaagaaccttgtgagtgtgaaagtgaaagattcccttgactcgaaaaagatggggtatgtttaccaagatgttgacattccatggctccagaaaaggactaaacccaaaagaactagaaaagctaagcaggtggcgttcacacaacagtttggcggcattggtgcagcaatcgctgctgagactgggccaagttccaagtttcctctcactttattggactcaaaggtaactctacttgttaaaaggccaaagcagttgaggagcaagaaggacaaggaggaagacgaagaagtgttggtga

SEQ ID NO: 232867 - DNA, 373 bp, Glycine max
  unsure (1)..(373): unsure at all n locations
agaaagcacttccgacatacactccagagagcccagcggatgccaccagaaacctgtctcaaacaaaccttaatgcccttgcaaaggttcttcccggtctgcttggtggcagtgcagatcttgcttcttccaacatgaccttgctcaaaatgttcggggacttccaaaaggatactccagcagagcgtaatgttagattcggtgttagagaacacggaatgggagctatctgcaatggcattgctcttcacagccctggactgattccatattgtgcaaccttctttgtattcactgactacatgagaagtgccataaggctttctgcgctgtctgaagctggggttatttatgtcatgacncatgattcaat

SEQ ID NO: 232868 - DNA, 368 bp, Glycine max
cagcaacaaacaaacatcttttaccttaaacaacaatggccgatgccgaggatattcaacccctcgtttgcgataatggaaccggaatggtcaaggctggttttgctggagatgatgcaccgagggctgtgttccctagcattgtggggcgtccacgtcacactggggtgatggttgggatggggcagaaggatgcgtatgttggggacgaggctcaatccaagatgggtattttgactctcaaatacccaattgagcatggaattgtgagcaattgggacgacatggagaagatctggcatcacactttctacaacgagcttcgtgtggctcctgaggaacaccctgtgcttctcaccgaggcacct

SEQ ID NO: 232869 - DNA, 388 bp, Glycine max
ggtttctcaattaagaggtgaaaattctaccttgttaaagcgccttactgatgttagtcagaaatacagcgactctgctgttgacaacagagttttaaaagctgatgttgaaacattaagaacaaaggtgaagatggccgaagagaccgtcaaaagaattactggattgaacccattgcttcatgccatgtctgatatatcatcactgggcctgccatcatttgatggaagaagcccttcagacacttcagctgatgcagctgttcctgtgcaagatgatccacatcatcacttctatcaacccacatctactaatcctattcgcagtcatgattcgatagtcaacaatggattggggggcatttcttcaattgaaaatgtgcagcag

SEQ ID NO: 232870 - DNA, 372 bp, Glycine max
atttcacccaaatataaatagcaatggaagcatttgccttgacatattgaaggagcagtggagccctgcgctaactatttcaaaggtgttgctctcaatttgttccctgttgacggaccctaatcctgacgatcctttggtccctgaaattgcccacatgtacaagacagacaggaacaagtacgagtcaactgccagaagctggacccagaaatatgccatgggttaagtgaccttgtggtatgtttgagggagagcctttctactctcagtgtttaggtctctcagcccttgtaggaatatttgtcgttttaaatcatgattaaggcccctccagttgaagatgaatgggggaaaacgtttctcctgctg

SEQ ID NO: 232871 - DNA, 334 bp, Glycine max
aagaactctaggatttggaagaatgctcaacctttcattgattggcttcagaatgcagaatcagaaaccgaggaagaataatttgtcctacattctccgttacttatgtttgcttgcttgtgttatgtcctttatttccaattaagggtcttgttggccccatgtgttgttcaactactatacttgctaaaaacttggtgtgaggggtgcatggttgctggactagtatagcatgtacgcgtcagtgagttttgtgttgtgttgttctaatgtattttggtttttggttggtgatgattatgttttctgttttaataaaacgtgtcttgataat

SEQ ID NO: 232872 - DNA, 334 bp, Glycine max
gcaaaacaatgatggctggtgttagtggcagtagcactactcccttattgtgctctttgttctttatttcttccttactttttgcttcctgcacccatgcctcctcccaggcacctcctccaattgtggatggactttcatgggatttctataggacgagctgtcccatgcttgaagggatagtgagcaagcatctccagaaggtgttcaagaaggacaatggtcaagctcctgccttactcaggatcttcttccatgactgctttgttcagggttgcgatgggtcgatattgttggatggaagtccaaatgaaaaggatcaaccggcaaacat

SEQ ID NO: 232873 - DNA, 388 bp, Glycine max
tgatagttgtgtgcaattatttgaattcaagaatgtctcaacccgactcgttggtggctgagattgaggtgaaaacctctgctgatcacttttacgacaccttgaagggtaagaaacagcatcgtattcatgatgttgcccctcatcatatccataaggtggaagttcatgaaggtgagtgggataaatctggcaatatcaaggtgcttacattcgctgatggggacactgttgagaccttaaaggagagagttgattttgatgatgaaaacaagaagataacctacaccatattggagggtgtcatgttgaagtactataagagctacaaggttatcgttcatgttttaccaaaaggtgatgagcacagccttgtgaagtggacttt

SEQ ID NO: 232874 - DNA, 384 bp, Glycine max
tttgcaacaaaaactaggcttctcatatctactaatcctttgcttagccactcttgtttcttcacacaggccttatacaactccaagtgtcacacgcttgactgattcttttcctcgtgtccaagttgatagtgctttttctaagacctttggggccaaaaatatccagtttcttagtaatgggtccacggtcacactggctcttgacaaaatctcaggctcaggcttggtatcacaaagcagatactcctatggattcttcagtgctgcaatcaaactaccttctggtttgtcacctggagttgttgttgcattttatttgtctaattcagataaatttcctcacaaccatgatgagatagacattgaactgcttggtcatga

SEQ ID NO: 232875 - DNA, 381 bp, Glycine max
  unsure (1)..(381): unsure at all n locations
gttatccattcacatttcacagttagcacttagcagactctgctgcagtgaggtgaggggaggtttgtttgttgtttcgtttttcctttcctttccgccagaatccgttgagaatggcgttgccggtagtcgtcgatgcagagtacctcaaggaggtcgacaaggctcgccgcgatctccgcgcactcatcgctaacaggaactgcgctcctctcatgctccgattagcctggcacgatgccggaacttacgatgctaagaccaagaccggtggacctaacggttcgatccggaacgaggaagagtattctcacggagccaataatggcttgaagaaagctattgatttctgcaaggaagtgaaggcanaatatcctaaaa

SEQ ID NO: 232876 - DNA, 382 bp, Glycine max
cgaatcagaacacgggcatttcgatccacaattgtaggatcatggccacgccggatcttgaagcatccaagggtagctaccccacttatctgggacgtccttggaaactttacgctagaaccgtcttcatgctgtcctacataggggaccacgtgcatccacgtggctggctcgagtggaacacttcctcctttgctttagacacgtgttattatggtgaatacatgaattatgggccgggttcagctctgggccaacgggttaattgggccggctatcgggccatcaattcgacggtggaagcgtctagattcacggtgggccagtttatatcgggctcgtcctggttgccctctaccggagtggcgttcattgctgggtt

SEQ ID NO: 232877 - DNA, 372 bp, Glycine max
acgcgtacgtaaactcggagtttcagcgccacatagtcggcattttctcatcggcgctcttcgacctgactatgcatcacatttcgacttcttctccattgtcattaagtaggatgtttgggaaggcaccgaatgatatcaatcgtttcacgtagtaagatctcttctgcgtctccaagaacgcatcgcacgatgttctggataacgcttagactatagccgctattgaaactcagcgctatatggcggtgatgccgataagtttatagatctggtgcaagcttatcacgttctgagtgactctgagaagcatgagatatatgatcactatggttaagatgcacttagtgaatgaatgcgtgatgtcagtgg

SEQ ID NO: 232878 - DNA, 356 bp, Glycine max
gaacaaatggctgaggcttcagcacaagcttgtgtcagtattccttccaatccctggagttctctgcaaaggggtttcagtgcataataactccctgtaatgtgcactagtaaagaccaaagtatgattattgttacattatgttacatggttgtacttgtatatacatatcttgtcccacctttgtaaatacaattgggacactactaggattgggaagaatggtctttacatttataatttggcaaatagatattgcaactacctttgtataattctatttctgaagaagcaattacaatttacaagggatggtgccatttacggcataccgattaacgacggataaagggacc

SEQ ID NO: 232879 - DNA, 382 bp, Glycine max
gcggctatggttttagcgcagcttcttctagatttaatgaacatgggtaacgaaaaagttcacatcagtattgtggtcattggccatgtcgactctgggaaatccactaccactggtcacctgatttacaagcttggaggcattgacaagcgtgttattgagaggtttgagaatgaagctgctgagatgaacaagatgtcattcaagtatgcctgggtgctggacacacttaaggctgagcgtgaaagaagaatcaccattgatattgctttgtggaagtttgatacaacaaagtattactgcacagttattgatgcgcctggacatacggatttcattaggaatatgattactgggacatcccaagctgactgtgctgttc

SEQ ID NO: 232880 - DNA, 372 bp, Glycine max
  unsure (1)..(372): unsure at all n locations
caaacatggcaatgaagaagctcttgtgggttgtcctgtctctatctttggttcttggagtggccaatagctttgattttcacgacaaggatttggcgtccgaggaaagcttttgggacttgtacgagagatggaggagtcaccacacggtttcgcgaagcctcggtgacaagcacaagcggtttaacgtgtttaaagcaaatgtgatgcatgtccataacactaacaagatggataagccttacaagctgaaactaaacaagtttgctgacatgaccaaccatgaatttaggagtacctatgctggctcanaggttaatcaccacagaatgttcccaggcacgccacgtgggaacgggaccttcatgtatg

SEQ ID NO: 232881 - DNA, 388 bp, Glycine max
tactgttgttgttgttgttggagaagaatgaattctgagaacaagagactcacaagaagaagcatttagaatcgaaattggaagagaagagggtatgaatgattacaaaggaagagaaggagaaagtagcgttgttgttgttcggaagcgattcaaggaaaagcaacaaccctgtccttccacaaggcccatcatcaaccaacaacaccgtcgctctgcttccctccctaacactcaatacgaggaatctgaaacagatgtcgaagtatctgatgttagtgtttcagaaggggatgacacatcttggatctcatggttttgcaatttgagaagaaatgaattcttttgcgaagttgatgatgatttcgtgcaagatgatttcaacctc

SEQ ID NO: 232882 - DNA, 385 bp, Glycine max
tttgagtcttcttgatccttctttttctccttgaactcaaacatggcagatgaggtggttctgctagatttctggccaagtccatttgggatgagggtcaggattgcacttgctgaaaagggtatcaaatatgagtacaaagaagaggacttgaggaacaagagtcctcttctcctccaaatgaacccggttcacaagaagattccggttctcatccacaatggcaaacccatttgtgaatccctcattgctgttcagtacattgaggacgtttggaatgacagaaatcccttgttgccttctgacccttaccagagagctcaagctagattctgggctgattatgttgataagaagatatatgatcttggaaggaagatttggg

SEQ ID NO: 232883 - DNA, 382 bp, Glycine max
tgttcccagagagagacattattttccaccatttgggtcgctacctgtttcacccttccaacgatgcatgggaactaatcagcagttactatcaggcacacttggccagtgcaagtgaacggataggcttacagataagagtatttaatgctgctactactccaaagcaagcaatcatgaatctagttttaagctgcacattacagcaaaagatactgccagaagtggatttgaaaacttcagtgtcttctgctggaaaaaacatgactactgtaaaagcagttcttgtggcatctttacataaagagtacggggataatttacggagtatgtatctgaagaaaccaacagttagtggggaagtcatagaagtttatcagcc

SEQ ID NO: 232884 - DNA, 367 bp, Glycine max
  unsure (1)..(367): unsure at all n locations
gcanaactcattgttgtactgacacgtggcgggtctacagctaagttggttgctaagtatacgccagcggttccaatattatcggtggtggttccagtgttgagcacagactcatttgattggacatgcagtgatgagacgccagcaaggcacagcttgatatataggggcttgattccaatattgggggagggatccgccaaggctactgatgcagaatctacagaggtcattctcgaagctgctcttaagtccgcaacacanaggagcctttgtaagcctggtgatgcagttgttgccctgcatcgtattggcactgcctctgtcatanagatctgcatagtcaaataatatttcatgctcaact

SEQ ID NO: 232885 - DNA, 328 bp, Glycine max
agaagaggcaatttagcttgcacatactcaagcattccaccattgtggcatagccaaggtcattttacactccaccaaatgatcatgatcatacgatcaatccccttaattttatcttttttcttatcccttttcgttactctgtaatggatcaatgcttgataatggggttgttctacaaatgtcatagatatatggcctgctgatgggtattgataatctctgaagttgaactgatgcacggttttgagatggctttctaatagagctacacttttgtcgctaatacagttgatgccctgcattcttcttggactagcgctgtcat

SEQ ID NO: 232886 - DNA, 156 bp, Glycine max
taactttcaattcggctaatggacaaccattggtgttaaccttaaggaggcttaaaccaaagctgatagctccggcaagaccaacccctcgcgaagtgaagctactatccgacatagatgaccaagatgggttacggttccaaattccggtgatac

SEQ ID NO: 232887 - DNA, 373 bp, Glycine max
cacactttctctctctctctctctcacccagatcttgtagcaatggcgagcgctcccactccacgcgaagagttcgtgtacatggcgaagctggcggagcatgccgagcgctacgaggagatggtggagttcatggagaaggtctccgcctccgccgagagcgaggagctgaccgtggaggagcgtaacctcctctccgtcgcctacaagaacgtgatcggcgctcgccgcgcctcctggggcatcatctcctcaatcgaccagaaggaggagagccgcggcaacgaggaccacgtcgccgtcatccgcgactaccgctccaggatcgaggccgagctctccaacatctgcgacggaatcctcaaactcctcg

SEQ ID NO: 232888 - DNA, 336 bp, Glycine max
aaaccctacgtagagagctcttcctcactctcattcgcaatggccgcagcagcacgtcctctcgtcaccgtgcaggccctcgacagtgacatggcaacggaggcctcggcaaccgtcccaatcccggacttcatgaattcttcaatcggcccggccatcgtcaacttcgtaaactcaaacatctccaagaccagccgacatccctatgcattcagccgccgcgctggccaccagacttcggccaattcctggggaaccggtcatgccgtctcccgtatcccccgtgttcccggcggcggaaccaatcgcgccggccagggagccttcggaaacatg

SEQ ID NO: 232889 - DNA, 312 bp, Glycine max
gacatcggatccacgcgtacgtaaaacccggaatccggtccaaggaaaggttaaacccggagcaaaaaaacttgtaacgatggtttcttccgacaaggatccacgaaaggaagtccttcaagcatggtaaatggatgatagtgatgaagatcaaagactcccccaccacagagaacccaaggagtttgtctcgttggaccaacttgctgaacttggagtccttagctggaaattagatgctgataaccatgaaaatgatccagagctgaaaaagattcgtgaagagcgtggctacacctacatggatgtttg

SEQ ID NO: 232890 - DNA, 376 bp, Glycine max
gggaggcgtaaattcagtgcaaattttcaacttgtcttccgactaatcaagggaatgatattcctcacttttgtctcgattcttgtcattttgattgctcttccgcatatgacagtgcaggacattgttgtttgcattcttgctttcatgccaactggttggggaatgctgcagattgctcaagcattaaaacctgtagtacgccgggctgggttttggggatcagtgaaaactcttgctcgaggttatgagattgtcatgggtttgctattgttcactcctgttgcttttctggcttggtttccatttgtttcagaatttcaaacccgtatgctgttcaaccaagcattcagcagaggtttgcaaatttctcgta

SEQ ID NO: 232891 - DNA, 350 bp, Glycine max
catacattgtagtatcacttttgtctcggaatttgttcttttgagttatggcaagcttaaacgttgcatgtgtggttttgactgtgcatggctgtgatgagtgcaccaatgatggtgcaagccgtgtcatgcaatgatgtttctgtgaacctagcaccgtgcctatcttacctgatgcacggtggagatgttccataatcgtgctgtagcggagtgatgaacattctgggttctgccagcaccacctttgacaaacaaaccgtgtgcaaatgtcttcagcaagctgctaataactatggcatcaacgacgaatacgctcaggcactccccgcccgctgcaatgtcagcgt

SEQ ID NO: 232892 - DNA, 476 bp, Glycine max
  unsure (1)..(476): unsure at all n locations
ngatgagaggggtgagaatgaatcaggtatcggaggcgtattatagagactgacctcggacgcacgcgtacgtaaactcggaattcggctcgagcaagcctctcaccttctcaagtacgattcgatcctcggaaccttcgatgctgatgtcaagcctgttggcagcgacatcatctctgtcgatggaaaggaaatcaaagttgtctctgaccgcaaccctgccaaccttccttggaaggatttggggatagacttggtgattgaaggaactggggtgtttgtagacagagaaggtgcagggaaacacattcaagcaggagctaagaaggtgctcattactgctcctggtaaaggagacatccccacatatgtggttggtgtcaatgagtatgattacagccctgatgaacccatcatcagcaatgcatcttgcaccactaactgcctttgcacctttgtcaaggtccttgattaaa

SEQ ID NO: 232893 - DNA, 373 bp, Glycine max
ctcactcacaaacacacactgaactaaaaaacatcaaaagagacatggctgagcaaaccttcatcatgatcaagcctgatggcgtccaaagaggccttattggcgagatcattagcagatttgagaagaaaggtttctacttgaaaggtttgaaacttgttactgtggaccgtccttttgctgagaagcactatgctgatttgtctgccaagcctttctttagtggtttggtggattacattatctctggccctgttgttgccatgatctgggagggcaagaatgttgttacaactggccgaaagattatcggagccacaaacccagctcaatctgagcctggaactatccgtggtgactttgccattgacat

SEQ ID NO: 232894 - DNA, 318 bp, Glycine max
cgtacgtaaactcggaattcggttcaagcagttctcttctcactttcatttctacatccctggctcggttccgtcgatgacgatggcgtttagggtgcgaaaccctgacctccgctttctcattcttctctctctcttgtccatcacttctgccaaggtcttcttcgaggagcgtttcgatgacggatggggaaatcgttgggttaaatcacattggaaaaaagatgggaacctggctggggattggaaccagacctctggccaatggaatggagacgctaacaacaaaggtattcaaaccaatgaggattacagatt

SEQ ID NO: 232895 - DNA, 280 bp, Glycine max
acgcgtacgtaaactcggaattcggctccaagaaaatggtgcaacctccctttcaaccctgacaaccccattattggaaaggaggatgcaccaaacaactttgcccgtggcaacaataccattggaaaggaaattgttgacctttgcttggaccgcatcagaaagcttgctgacaactgcacaggtctccaaggttttctggttttcaatgctgtgggtgggggaactggctctggacttggttcccttttgctggaacgcctttcattggactatggca

SEQ ID NO: 232896 - DNA, 373 bp, Glycine max
  unsure (1)..(373): unsure at all n locations
tatgatgctggtaatatacctctcgtctctcattagaagtgtaatagcactccacaacttgattaacaacaagatgcttaacaaggaacatgaacgggcagaagactcgaaaacagttacagtgccaagtgcagctgcataagttttgaggggtttgtgatggccggagctctaaatgtcatttgaatacatggatttgagattattacaccttttttctatttctgctangagtagagaacttacacctaacatggcataacgatccttttatgctgttccggtgcttaatgtattttactcttcaatactttgctcattttccttgtttggtagctttggtgacagccgttaaaagaattcaatattagat

SEQ ID NO: 232897 - DNA, 179 bp, Glycine max
gtccgtgattttagttttgtgattaagctttcgataagaggagagaaagagaaggaaaaaaaaagttgctttttttttgttgttgcatgatttggatcttgattggaaaagcttcgaattggggtagttttacccatcaattcaattttaagccgtgccttcttcactttgccgtgtct

SEQ ID NO: 232898 - DNA, 374 bp, Glycine max
  unsure (1)..(374): unsure at all n locations
ctcaaaacctgtcacagaatttctcaccagctctggcacatcagggggtgagagaaagttgatgccaacaattgaagaggagctaggaaggaggtgtatgttgtacagcctcttgatgccaataatgaatcaatttgtccccgacctagaaaagggcaaaggaatgtacctaatgttcataaaatgcgagtccaaaacacccggaggcatagtggctcgcccagtcctcacaagctattacaaaagcccttactttagggacagatcctacgacccatatacaaactacacaagcccaaatgagaccgtcctatgtcttgattcctaccanagcatgtactcccaacttctatgtgacctttgccaacacaaag

SEQ ID NO: 232899 - DNA, 382 bp, Glycine max
gtgagggcaagaactttgcagcataccagcatgagcatgaagctcttccagctcttctccctactcccattcttcctctacttctacacaatagaagcagccgttggcccattgcaactgacacacccactggaccccttaactcagcaagaaatcaccctcgtcaaaaccatagtcctaaaaaagtaccccaagccagccaaccgcgtcttcttccactacgtcggcctcgacgatcctgacaaggccgccgtcctcaaatggctctcctccggcgcccggacgccgcgcaacgccttttccatcgccctcatcaatggccaaatccacgagctcaccgtcaaccttctctccccgcgaaacgttgtcttggacaaaatcc

SEQ ID NO: 232900 - DNA, 377 bp, Glycine max
  unsure (1)..(377): unsure at all n locations
gatgtgttagagctgcatccgatactgcattacaggctattggacaatactgcaatcagctacaatctttgaaccttggatggtgtgataatgttggcgatgttggagtgactactttagcatatgggtgtcctgatcttaggatagttgacttgtgtggctgtgtccgtataacagatgacagtgtgattgctttggcgactagatgcccccatctgaggtccctaggactgtactactgcaagaacatcacagatagagcaatgtattccttggcacacagcaaggtgaacaacaggatgtggggaactgtgaaaggangaggaaatgatgaagatggtttaaggactttgaacattagccaatgcactgcactc

SEQ ID NO: 232901 - DNA, 365 bp, Glycine max
  unsure (1)..(365): unsure at all n locations
gagccattcgtcatagcaacaaacaggcatctgagcgtggttcaccctatttacaaacttttgtttcctcactatcgtgacaccatgaacattaattcacttgcccgcaaatccttggtcaatgcagacggtattatagagaaaacattcttgtggggtaggtactctttggaaatgtctgctgttatttacaaggactgggttttcactgatcaagcattgcctaatgatcttgtcaagagaggagttgcggttaaggatccatctgctcnccatggagttcggcttttgattgaggactatccttatgcttctgatgggctanagatatgggatgccatcaagtcctgggtgcatgaatatgt

SEQ ID NO: 232902 - DNA, 276 bp, Glycine max
cgtacttaaacccgaaatccggtccaaaatggaacttgtaagggtgcttccaattgaaaaaaacaaggtcaatgtggcatgctttcacccttttgctggggaaggacaattttatggaacaaaggaaggaaagcttagggcccccaattatgacggtgcccatgcattgaatggaactggaccaagttactttcctgaggaaacaaccgttggggtcattcattgaccaaggtttaaacaaatgattggccatgtaattcaaacatcggcttcaaa

SEQ ID NO: 232903 - DNA, 377 bp, Glycine max
  unsure (1)..(377): unsure at all n locations
ctctcctctatccttcgtgcccacagtcaataatgtctcttccaactccatcgctcccccttctccgttgcatccattttcacgattccaatccattaaaaatagaaagccaaaaccccatcatattcctagaatcacatgcagtggaaaccaaaacaatccaacaccaaaccctaattcccagggagaacctccacatattgtaggacataggaggaacgttctacttggcctaagagggctttgtggtgctgttactcttaacaacaacaacccttttgcctttgcagctccaatatctcctcctgacctaaacacgtgcggtccaacagacctacccgcaggtgtaaaacccaccaattgttgcnccccatctt

SEQ ID NO: 232904 - DNA, 375 bp, Glycine max
  unsure (1)..(375): unsure at all n locations
ccccaaaaccctaggtagagagctcttcctcactctcattcgcaatggccgcagcagcacgtcctctcgtcaccgtgcaggccctcgacagtgacatggccaccgacgcctccgccaccgtccctatccctgacgtcatgaagtcctccatccgcccggacatcgtcaacttcgtacactccaacatctccaagaacagccgacaaccctatgcagtcagccgccgcgctggccaccagacttccgccgagtcctgnggaaccggtcgtgccgtctcccgtatcccccgtgttcccggcggcggaacccatcgcgccggccacggagccttcggaaacatgtgtcgtggaggacgcatgtttgccccgaccaaga

SEQ ID NO: 232905 - DNA, 341 bp, Glycine max
attgaacgtttcatggaggaggcacctgaaagactgaaaaggaaagatttagatatgtttggaaggcgatggttcaaacctcaagaggcgtccaatttgagagtgaaaatccttaaattgcttttagaaaaattacagaattcaataacggataattgtaactcggaatcttctccttcgtcatctgctggccctgcaactgattgtgttgagactgccagggattctgttactggccctgtgactgattgtgtagagaccgcccaggattctgtgacgtaacatggcagcatgaattgcaattctcatttccttgaacaaacaatctgttgatattcata

SEQ ID NO: 232906 - DNA, 379 bp, Glycine max
atcacacacacatactaagaagcaacaattcttctacaatggatctcctccttctggaaaagaccctcataggtctcttcctcgctgcggtggtcgccatcgccgtctccaccctccgcggccggaaattcaagctcccaccgggcccactccccgtcccaatcttcggcaactggctccaagtcggcgacgacctcaaccaccgcaacctcaccgatttggccaaaaaattcggtgacatcttcctcctccgcatggggcagcgcaacctcgtcgtggtttcttcacctgagctcgccaaagaggttctccacacgcagggcgtggagttcggctcccgcacccgcaacgtcgtcttcgacatcttcaccggaaaggg

SEQ ID NO: 232907 - DNA, 376 bp, Glycine max
aaatgtatttggtggagagcaaaggaggtgccataacatgcatgttcttggctcttttcttcttggggacatggcctgctcttttgactatgttagaaaggcgtggtcgtcttcctcagcatacctaccttgattactcaatcaccaatttcttgtctgctttactcattgcttttacacttggtgggataggcaagggcactcatgatcagccaaatttcttagttcaacttgctcaggataattggccctccgttctttttgcaatggggggtggtctgttccttagccttgggaatctgtcaagccaatatgcatttgcttttgttgggctatctgttactgaagtgatcacggcaagcataactgttgttat

SEQ ID NO: 232908 - DNA, 399 bp, Glycine max
caaacctaacgcagcatcgctattctcttcattccatggctttgcccaaccagcaaaccgtggattaccctagtttcaaactcgttatcgtcggcgatggtggcacaggaaagacaacctttgtgaaaaggcatctcaccggagaattcgagaagaaatatgagccaaccatcggtgtggaggttcacccattggattttttcacaaactgtggaaagattcgattttactgctgggatactgctggacaggagaaatttggtggcctcagagatggatactatatccatggacaatgtgctattatcatgtttgatgttactgcccggctaacatacaaaaatgttcccacctggcaccgtgatctttgcagggtctgtgagaacatcccaattgttc

SEQ ID NO: 232909 - DNA, 308 bp, Glycine max
cccgattcaagaagaaccgcaagaagcgcggccacgtgagcgccggtcatggccgtatcggaaagcaccgtaagcaccccggcggccggggaaacgccggtggcatgcatcaccacaggatcctgttcgacaagtaccatccgggcttcttcggtaaggtgggaatgaggtacttccataagcttcgcaataaattctactcccccatcgtcaacgtcgaaaagctatggtctctcataccccaagacgcgaaggaaaaagccctaaaatcgaaggacactgcccctctaatcgacgtcacacagcac

SEQ ID NO: 232910 - DNA, 252 bp, Glycine max
aaaactggcagaagggaattgcagagttctacgacgagtcgtctggcatatgggagaacatttggggcgatcacatgcaccacggcttttatgacccggattccaccgtttctgtttctgatcatcgcgctgctcagatccgaatgatccaagaatctcttcgttttgcctctttgctttctgagaacccttctaaatggcccaagagtatagttgatgttgggtgtggcataaggggcagctccagatacc

SEQ ID NO: 232911 - DNA, 385 bp, Glycine max
cgcgcagttgataaaaccataaccggaatggagcagaatctggtggactgggcaaaaccatatttgagcgataaacgaagactgttcaggattatggataccaagttggagggccagtacccacaaaagggggccttcacggctgccacacttgctctacaatgcctaaacagtgaggccaaggcaaggcctccaatgacagaggttttagcaactctggaacagatagaggcccccaagacagcaggcagaaactcgcattcagaacaccatagacttcagactcctgtgagaaagtctcctgcgcgaaaccggtcatcgttaaatctaactcctactgcgtttcctcctcccagctcaccggcaatcgcctcgtgtgcactaa

SEQ ID NO: 232912 - DNA, 378 bp, Glycine max
gcgcaatctgcttctgcttcaaggaaggagagcttgttactctctatcagcacgtaaaatgtcatgtgaagagggtgtcattgcagttgggccagctgctgctgctgctgcgatcacaggcgagccaatggggatcatgactgccttacaacttgtgctcagagaatctctggcttagggtggtttgtcgcgtggccttcatgagtgtgcaaaagtgattgagaagcatgctgcacaactctgtgttcatgcagaagaatgtgaccaacctgactattgttaactggttaaggccctttgtgcagagcacaatgttagcctgctgacagttccgagtgcaaagacccttggagaataggctggtttgtgcaatattga

SEQ ID NO: 232913 - DNA, 365 bp, Glycine max
caattggtggctctcaaattgtgaaccgcacatatacccaccctgcttcccacgccacatcgatctcacgttctctctctttcttttttcttgttgaaactgtgagtctatgttatttgtggcggagcatgaactcctccaccaacacctcgaattctcagtcaatggctgcagcagccagtgatgggtctgggaagaaggtaagaaaaccttagaccataaccaagtccagggagagttggactgaggaagagcacgacaagtttctcgaagctcttcaattatttgacagggactggaagaaaattgaagattttgtaggttcaaaaacagttattcagatttcaagccatgctcagaagtac

SEQ ID NO: 232914 - DNA, 381 bp, Glycine max
cgaattgtgaaagtaagcaaagatggctttcacggaatcgtctctcctccttccttcggtttcaggaaccaacaagaacaagaacaaggttccagaagacaaatggtatttagcctacattgtgtattttaccctgggtctcggttaccttctcccatggaacgctttcatcaccgccgttgattacttctcctttctctaccctgacgccagcgttgaccgcatcgtcgccgtggtttacatgatagtcgggctggtggggatctccctcataatcctctacagccacaagtctgacgcctatgtgaggatcaacgttggattggccctattcgtcgtttcgcttctcgtcgttcccctccttgatgccttttacataaa

SEQ ID NO: 232915 - DNA, 330 bp, Glycine max
caattataagcatgggtttgtggaacacaacgaatgcactgtcttgccgctttcacaagtttggtgatgaccaaaagaatctggtcttccaaagtgatgccacgtcttcttccaggggcatagaactcacaaagttagacggtggaggaaaaccattgggtggcattgtggggagagtgttatactcttctcaagtgcacctttgggaaagctctacagtggtcgcaggctttgaaaccgacttcaccttttccatctcatcagactctactactcaagttgatggccttgccttcttcattgccacatttgacacgataatccctccaa

SEQ ID NO: 232916 - DNA, 373 bp, Glycine max
gtggattcgaggttattgacaacattaaatcagccgtggagaaagtgtgtccaggagttgtttcctgcgcagatatctttgccatcgctgccagagactctgttcagattcttggaggccctacatggaatgttaaacttggaagaagagacgctagaactgctagccaatctgctgctaacaatggcatccctgcacccacttcaaaccttaaccaattcatctcaagatttaccgcccttggactttcaacaaaggacttggcccccttgtccggtggccaaacatttggcaagccaaggtgacaaactttaaaacccggatccacaacgagaccaacattgaaaccggaattgccagggctaaggaacaa

SEQ ID NO: 232917 - DNA, 490 bp, Glycine max
  unsure (1)..(490): unsure at all n locations
aggtcctggggctttccgaatgaatttagtgcatagacaagacaatgacatcgcatgcacgcgtacgtaaactcggaattcggctcganggcattgattgggaccagaaagatggccttctcctgattgaagccgatagactcttaaaaccgggtggatactttgtttggacatcaccactcacaaatgctcgtaacaaagagaatcagaaaaggtggaagtttatacaggattttacattaacactttgctgggagcttctgtcacagcaagatgaaactgtcgtatggaagaaaactagtaaaaaaagttgctatgcatcaagaaagtctggttctggcccttccttgtgtggtagaggtaatgatgtggagactccctattatcgagaattgctaaactgcataagtggaacacagagcagccgtgggtttcaattgaaaaaanggaaanatggcctctccgggctaacttgacaacaacgagttgg

SEQ ID NO: 232918 - DNA, 330 bp, Glycine max
cacattttaaatgtagccactactaactttatcataccactcactcttacatcattgtccctaaatggcggaaaccctgatccaaatcggcgtggttgggtgcgccgacatagcccggaaggtctcccgcgccatcacgctcgcccccaacgccgccctctgcgccgtggcgagccgctctcacgacaaggcagccgcattcgccgccgccaacggcttccctctctcagccaaagtgtacggctcctacgagtctcttctggaggaccccgacgtggacgccgtctacatgccactccccaacaggctccatcttcactgggccgtgct

SEQ ID NO: 232919 - DNA, 383 bp, Glycine max
  unsure (1)..(383): unsure at all n locations
atggcactgatgtggatgaggatgaagatgatgatgatgatgaagatgatgatgatgaggaggatgaggatgaagatgcatttgatgtccatgctcatgctagtgctggagaacatgataatcccactattgaatttgacccagatgtattttcaagtgatgaagcatatgcaagagcattacaagaagctgaagagagggaaatggcagctagactattggcttttgctgggataaatgatcgggaagaagaggacatanaggagcatggtgctaattctcaagatgcttgggaggatgttgatccagatgaactttcatatgaggaattactggccttgggtgaagcagttggaactganagcagaggtctttcaactgat

SEQ ID NO: 232920 - DNA, 366 bp, Glycine max
ctcgctcacaacgccggtggcaaagagaggaccgaagagaactggaagtggctgttcaaggaaaccggtttcgcgcgttacaacatcatcaagatcaacgctctcccttccatcattgaggcgtttccaatctgaagaagatgccactaccacaactgcatgtggtttttatgttgcatgtgttgttgttattattaacagctatatgatcttcgttttaattttgtggttttccttcctgcccttgttatgtttgtgcattaaataaaagtaagaaatgccccaccactaagtaatgctatatggattatgtatgtgttccatatatgtcaagtgagtggtgtgtggttgtgaagaatctattgc

SEQ ID NO: 232921 - DNA, 376 bp, Glycine max
aaggcagcagtgcgaagagaaagaaagagaagaagcgcttatcgaactcggacggaagcactgagttaactcagagcgagtgaaagtgttgctgcgtgatgtctggtggtatcgcccgtggacgcctcaccgaggagcgcaagtcgtggcggaagaaccatccccatggttttgttgcgaagccggagacgctgcccgatggaaccgtgaacttgatggtgtggcattgcactattcccgggaagactgggactgattgggagggtggctacttcccgcttacgctgcactttagtgaagactacccaagcaagcctccaaagtgtaaattcccacaaggtttcttctcacctaaaggtttatccctctgggactg

SEQ ID NO: 232922 - DNA, 377 bp, Glycine max
gctgcaagagtcttccttgaaactactaccattgccccctccaactaccacacactgttcttctaaaaagcactctcatgaagaaacaaggattaggaaaaagaattcaatacaaagtgttttccaaagggatcctttctttgctgcacttgttgaatgctcaaaggatgataatgaagaaattacaagtagaaatttgtggaatggagctaaggtgccaataaggagtattagtgatcgttttgggtttattagcctttatgcctcttgcaagagaacttgtgctgtttctgaatctttagtctaccttccaagctcaagaagaagcacctgtgagcatgttagtcccaggtccctctaagcttgtgatgatgcat

SEQ ID NO: 232923 - DNA, 334 bp, Glycine max
gtgatttcagtgagtgatcggtgttcacttgatctcatcataatcgtcagcgtcaattgaagaagatgccgatcagaaacatcgccgtcggaaggcctgaagaggcgactcaccccgacacgttgaaggcggctttggctgagttcatctcaaccttcatcttcgtgttcgccggctcaggctccggcatcgcctacaacaagctcaccgacaacggcgctgccacccctgccggcctcatctccgcctccatcgcccatgcattcgccctcttcgtcgccgtctccgtcggcgccaacatctccgggcgggcacgtcaaccccgccgtcacct

SEQ ID NO: 232924 - DNA, 358 bp, Glycine max
gttggtacgaaaaatgtcgaagctgatcttcgtgttcctttcgcttattcctcttctctgcacctccttctccccagagagaccctcagatcgacgcgtcctcgttttgctcgatgacttcgccatcaaatcctctcattctctcttcttcaactccctcaaatctcgcggcttcgatctccaattccacctcgcagacgacccccaaattgcgctccagagatacggccagtacctctacgacgccctaattctcttttcccccaccattgaacgttttggaggatccattgacgcggctgcaattttggattttgttgattcgggtcatgatttgatcgttgctgctgatagcaat

SEQ ID NO: 232925 - DNA, 377 bp, Glycine max
  unsure (1)..(377): unsure at all n locations
ggacaaaggtggagtatgaactgcgagtcatatataattccaggcaccagcttctttaaggggaaacaattgctgttgccagactcaagtctcccaacaattgaggtctacattgcgggctccttcttgagtactccaattatcttgacaaaaaccttgcagctttctcagaaaaagcatgcaaagaagggggtgttggatgcaattccagagcatgaggccagtgaaaatgggaaagatacttcttcaaccctttctttgcangccccagattacctttacgacaaacatgaagatgaagattataacagcgtctacccaggaacagcatatgctgatggagaagatggagaactctcatggttcaatgctggtgt

SEQ ID NO: 232926 - DNA, 371 bp, Glycine max
ggctaattgccaaggcatatgttgttgtcaatgactcctgctatcatcaactcatgagccactggttaaatactcatgctgtgattgaaccatttgtcatatcaacaaacaggcatcttagtgtgctccaccctatttataaacttttgttgcctcactatcgtgacaccatgaacatcaatggactcgcaagacaatcactcatcaatgcaggtggcattattgagcaatcatttctgcctgggccatttgctgtggagatgtcttcggcagtttacaaggggtgggttttcactgatcaagcccttcctgcggatcttatcaagagaggaatggcagtggaggattcatcctctccctatggccttcgc

SEQ ID NO: 232927 - DNA, 379 bp, Glycine max
ggagcagctgatcagcggcaaggaagacgccgccaacaacttcgcgcgtggccactacaccatcgggaaggagatcgtcgatctctgcctcgacaggatccgaaagctcgccgacaactgcaccggtctccagggtttcctcgtcttcaacgccgtcggtggcggcaccggttctggcttgggctcgcttctcttggagcgtctctccgttgactatggaaaaaagtcaaagctcggtttcaccgtttatccatcccctcaagtttcgacctcggtcctggaaccctacaacagcgtcctttcaacgcattctctcctcgaacacaccgatgttgctgtgcttctcgacaacgaggcaatctacgacatttgcaggaga

SEQ ID NO: 232928 - DNA, 381 bp, Glycine max
cagaaacaccagaggccgctaaaaggttctacttctacaagccatggacatcaaaatagaaagtgatgattctcagaatgaggagaatgaagaaaggctaccactcctgagaaatagtgaggtgccagaagcagagaggaatctgattcagaaagccattagccagacatttcagagcaccgcacatttgggcaaccttttaccaactggcacagtccttgctttccaacttctgtccccaatcttcacaaatgttggcaactgtgactctgtcagcaaggccatgactgctgcacttgtatctctctgtggtgcctcatgcttcatgtcatgtttaactgatagcttccgagacagaaaagggagcatctgttatgggtt

SEQ ID NO: 232929 - DNA, 379 bp, Glycine max
gagaaacaaagttagaagtaaagaagatcatggcttctctagcaaccttggctgctgttcaaccagctacgatcaatggccttgctggaagttccctctctggaactaagctctctttcaagccctctcgccacagtgtcaaatccaagaactttaggagtggtgccgtggtagcaaagtatggtgacaagagtgtgtactttgatttggaggatctgggcaacactacagggcagtgggacttgtatggctcagatgcaccttcaccctacaaccctcttcagagcaagttcttcgagacatttgctgctccattcacaaagaggggattgttactcaagtttctgatattgggaggtggttccacccttgcatactt

SEQ ID NO: 232930 - DNA, 360 bp, Glycine max
accaaacgaaccgtagataacgccgcgtttggttgttaagttgttccgtttcagccatggtggagaacaatctcttcgaggatatctttagggtcgaaaaattaaaccccgatgacaaaaaattattcgataaagtcactcgcattgaagcaagaagtgaaaagtttgacatgtttatgcacctggacattaattctgaggtatatccattaaaggtgggtcagaagtttgctcttgtgcttgtttcatcgcttaatcctgatggaacaccagacactggctattatacccagattagtcgacaatcactggccaacaattttgaatatgtcatgtatgggaagctctacaggataacag

SEQ ID NO: 232931 - DNA, 377 bp, Glycine max
ctcatcaacgcagatggcgttatcgagcgatcatttttgcccggcaaatactctctggagatgtcttcggcagtttacaagagttgggttttcactgatcaagcccttcctgcagatcttatcaagagaggaatggcaattgaggatccctgtgccccccacggccttcgccttgtgatagaggactacccttatgctgttgatggactagaaatatgggatgctattcagacatgggttaagaactatgtctccttgtattacccaacagatgatgcaattaagaaagactctgagctccaagcttggtggaaggaagctgttgagacgggtcacggtgacttgaaagacaagccatggtggcctaagttgaacac

SEQ ID NO: 232932 - DNA, 446 bp, Glycine max
  unsure (1)..(446): unsure at all n locations
gacatcgcatccacgcgtacgtaaactcggaattcggctccaaggaaaaagaaaaaaaacatgggaataacactcaacaatgggttcaagaagcctaacattggattgggcctttggcgcatggaaaggaacgaaatcaggggaccaattctcaattccatcaaaattgggtatcgccattttgattgtgctgctgactacaaaaacgaagcagaagttggagatgcgcttaaggaagcttttgatagtggccttgtgaagagagaagatctcttcattaccaccaagctttggaattctgatcaaaggcacgttcttgaggcgtgtaaagacagtctcaagaagcttcagttaacgtatctagaattatatcttgttcactttcctgttgccgtaaggcatactngggttggtaatacttctagtcctttgggtgatgatggggt

SEQ ID NO: 232933 - DNA, 382 bp, Glycine max
  unsure (1)..(382): unsure at all n locations
ggcgcaatcggcttctgcttcaaggaaggagcttgttattctctatcaacaagtaaaatgtcaggtgaagagggtgtcattgcagttgagccagctgctgctgctgctgccatcccaggcgagccaatggatatcatgactgccttacaacttgtgctcagaaaatctctggcttatggtggtttgtcgcgtggccttcatgaaggtgcaaaagtgattgagaagcatgctgcacaactctgtgttcttgcagaagactgtgaccagcctgactatgttaaactggttaaggccctttgtgcagagcacaatgttagcctgctgacagttccgagtgcanagacccttggagaatgggctggtttgtgcaagattgattccg

SEQ ID NO: 232934 - DNA, 371 bp, Glycine max
gtccagtatttgaatgaaatcaaggattctgtggttgctggattccagtgggcatcaaaagaaggtgctttggctgaagaaaacatgagagccatctgctttgaagtatgtgatgttgtgctgcacgctgatgctatccacagaggaggtggtcaaatcattcctactgccaggagagtcttctatgcttcccagattactgccaaacccaggcttcttgagcctgtctacctggttgaaatacaggctcctgaacaagctcttggtggaatctacagtgttcttaaccagaagcgtggacacgtgttcgaggaaatgcagaggccaaggtacccactatacaacatcaaaggcaatactccctgtcatcg

SEQ ID NO: 232935 - DNA, 282 bp, Glycine max
  unsure (1)..(282): unsure at all n locations
cccgtggcttcaagaagagaatctcaatggaggcccaggagctgaagcgcgtgttccagatgttcgaccgcaacggcgacgggagaataacgaagaaggagctgaacgactcgctggagaacctgtgcatcttcatctctgacaaggacctgagccaaatgatccagaggatcgacgtcaacggcgacggttgcgtggacatggacgagtttggggagctgtatcagaccataatggacgagcgcgacaatgaggaggacatganggaagccttcaacgtct

SEQ ID NO: 232936 - DNA, 348 bp, Glycine max
agaaaacattcttgtggggtacgtactctttggaaatgtctgctgttatttacaaggactgggttttcactgatcaagcattgcctaatgatcttgtcaagagaggagttgcggttaaagatccatctgctccccatggagttcggcttttgattgaggactatccttatgcttctgatgggctagagatatgggatgccatcaagtcctgggtgcatgaatatgtctcattctactacaagtcagatgcagcaattcatcaagataccgagctccaagcttggtggaaagaacttgtccaactgggtcatggtgatttgaaagataatccatggtggcaacagatgc

SEQ ID NO: 232937 - DNA, 348 bp, Glycine max
cgtaaactcggaattcggctcaaaatatgctcctatctaccagttttcacaagctttaacagaaccaaaggaggcttgattcaattaaaccatggtatgcctcagcctctccaatatgtggtcaatgcggcctttttggctgcgctatatagtgactatcttgatgctgctgatacacctggatggtattgtggacctaagttcgtttcaaccgacgtgctccgtacctttgctaagtcccagattgattacatccctggaaataatccaatgaaaatgagttatgtcgtacgttgtggtaatcattacccaaaacacgtctaccattgaggaacatctgtttcgaag

SEQ ID NO: 232938 - DNA, 376 bp, Glycine max
ctcgagccgcaaagagcatggtggtatcctgagatttattcaagtttcttgtttaggtgcatctccttcatctccatctaggatgctcagaactaaatcagctgctgaggaaatgattttaagggaactacctgaggccacaatcttgaaacctgctgtaatgattggtacagaggatcggattttgaatccatgggctcattttgctaaaaagtatggctttcttccgttgtttggagatgggagcacaaagatccaacctgtttatgttattgatgttgctgctgcactcacttcactcttgaaggatgatggcactagcatgggaaaaatttatgaactgggtggtccagagatctttactgtgcatgaattg

SEQ ID NO: 232939 - DNA, 373 bp, Glycine max
atcctgtctaacttggaaccttgcctgtgagaacaacataacaagtaagacaggatataactggagacaggagacaccattacaaatgtacatgggatgctattattaagatgatccgctatgagggggttaatgggttttacaaaggcatgggcacaaaaatcgtacaaagtgtgctggctgctgctgttttgttcatgatgaaggaagaattagttaggggggttcgtttcttgcttgccaaggatgctgtaaagccaaagaatctgtgaatggaggccactagcttgatcaagatttcatgtaccatcttcagttagcaaattagttcaaatggtatgggaattatagtgaatcaaacaacatattgaaa

SEQ ID NO: 232940 - DNA, 310 bp, Glycine max
caatttcaacaacagcctcagcctcaagggcagagttttggagcttcggctccggctaacggtggcggttcgggtcagccgaagcacatggttagagccatgagaggacaagccacggacccacacagcatcgccgaaaggttacggagggagagaatcgcagagcgaatgaaggccctacaagaactagttcctaatgccaacaagactgacaaggcctccatgctggatgagatcatcgagtatgtgaagttcctacagctccaagtcaaggttttaagcatgagcatattgggcggtgcagcagctg

SEQ ID NO: 232941 - DNA, 295 bp, Glycine max
gtgagtgtttgtgtttgttgggttgtgccggggagatggaagtgtctttgctggaggaagtagagaatattctaaggtacagatttcgaaacaagaagcttttagaagaagccttgactcactcctccttccttgacggtgtctcctacgagcgtctcgagttcgtgggagaccccgttctgagtctcgccatcagtaactacttgtttctcgcgtaccctgatctagattccgtgcagctctccggcctccgcgccggcaacgtcagcaccgagaagctcgcccgtgtcgctgt

SEQ ID NO: 232942 - DNA, 353 bp, Glycine max
gtacattgagaccatcaaagaagctttggaaagagaatgccctggagttgtttcatgtgctgatatcctcgttctctctgccagagatggcattgtttcgctaggaggtccccatatccctcttaagactggaagaagggatggtagaaggagcagagctgatgtggttgagcagttcctcccagaccacaatgagtccatttctgcagttcttgacaagtttggtgccatgggaattgacacccctggcgtcgttgcactgcttggagcacacagtgttggtcgaacccattgtgtgaagttggtgcaccgtttgtacccagagattgattcagctctgaaccctgaacacg

SEQ ID NO: 232943 - DNA, 377 bp, Glycine max
gcaaaaagaaagaatcccaggcgaggagaaagatggaggggaaggagcaggatgtgtcgttgggagcgaacaagttccccgagagacagccgattgggacggcggcgcagagccaagacgacggcaaggactaccaggagccggcgccggcgccgctggttgacccgacggagtttacgtcatggtcgttttacagagcacggatagcagagtttgtggccacttttctgtttctctacatcaccgtcttaaccgttatgggagtcgccggggctaagtcgaagtgtagtaccgttgggattcaaggaatcgcttgggccttcggtggcatgatcttcgccctcgtttactgcaccgctggcatctcagggggacac

SEQ ID NO: 232944 - DNA, 363 bp, Glycine max
cttcatgctggtttagatccagcaacttcatctagtgagttctgttgcacgacagctggtattatgcactgtattttacacctcaccaacaatttttaaattgattgatcagagaagctagttgaagaaggaagaacattcgatgcagttatggccttggacgtgattgagcacgtggcagatcctgctgagttctgcaaatctctgtcagcaggaagagttccagatggagccactgtgatatccacaatcaatccattcatgagagcctacacaactgccattgttgctgcagaatacattctccgctggcttccgagaagcacacatcaatgggccagttttctcactccagaggaactc

SEQ ID NO: 232945 - DNA, 286 bp, Glycine max
gataactagaaacagtgtgatgaaaatgaaggtccttgttttcttcgttgctacaattttggtagcatggcaatgccatgcgtacgatatgttccctctccgaatgaacactggctatggtgcccgtactccggaggtgaaatgcgcaagttggaggcttgctgtggaagcacacaacatctttggctttgagaccattcctgaagagtgcgttaaagcaacaaaggaatacatccatggcgaacaatatagatcagactccagaacagttaaccaacaggcttac

SEQ ID NO: 232946 - DNA, 398 bp, Glycine max
  unsure (1)..(398): unsure at all n locations
gtctgatgaagcaagagcaatgtacaacggtggacaggctggtttgacgtattggagtcctaatgtgaacattttccgtgacccacggtggggccgtggccaagagactcccggcgaggacccgacattggccgcagaatacgccgccagctatgtcaaaggactccaaggcgatggtgccggaaatcgcctcaaggttgctgcttgttggtaacactacactgcctatgatcttgataattggaatggtgtggacaggtttcatttcaacgccaaggtgagtaaacaggatttggaggacacttatgatggtacatttanagcgtgcgtgttggaagggcaagtggcaagtgtgatgtgctcctacaatcaggtgaatggcaggcccacgtttgctg

SEQ ID NO: 232947 - DNA, 339 bp, Glycine max
gggtcacataaacccagcagtgacatttgggctcttcttggctcgcaaggtgtctttgattagagcaataatgtacatggtggctcagtgcttgggagccatatgtggagttgggttggttaaggccttccaaaaggcttactacaacaggtatggtggtggggccaatgagctcagtgaggggtacagcacgggtgttggattgggtgctgagatcattggaacctttgttttggtctacactgtgttctctgcaactgaccccaagaggaatgctagagattctcatgtgccggttttggctccacttccaattggctttgctgtgttcatgggtca

SEQ ID NO: 232948 - DNA, 334 bp, Glycine max
ccaaatcatattaagccatggccacctccaacttctcaattgttctctctctctccctagccttctttctagtgctactcaccaaggcaaactcaaccaacaccgtttctttcaccgtcagcaagttttccccacgccaacaaaaccttatcttccaaggagatgctgctatctcaccctccggggtgttacgactcaccaaggttgacagcaacgacgtgccaacgacgggatccctaggacgtgccctttatgctgccccaatccagatttgggacagtgaaacaggcaaggtagctagctgggctacatcgtttaaattcaaagttttctc

SEQ ID NO: 232949 - DNA, 359 bp, Glycine max
gtttgggtggcttttttcattgttcagattgttaaggaatacaccaagccctgttccatccagttctggcttcttaattttttgcaggttcctgtcgcagtctctgttacactttttgaagccataggcttatacaaaggaactagagtgattgcatcaaagggaaaggaagtcaccaattggaagattcatcagatttgtctctactgttccactggaataatggctggtatggttggtggactgcttggtctaggaggtggtttcattttggggccattgtttctagaattgggaattcctcctcaggtagcaagtgccacatcaacttttgccatggttttttcatcctcaatgtc

SEQ ID NO: 232950 - DNA, 383 bp, Glycine max
ctcgagccgattcggctcgaggaacgacaattcccacgggcatttatgctccccctaaccgtgatcacattgctctggcgttggcaatggcttaccaagaggtcaccaatcaccataaacagcgccctcctatcaacgatctcgggccaaatgataagcttcctagctgattcacttactgctacttaccctctcagggttttgggcttgggtccttaagcaacttgttagaacagcttcagcatgcatattgcatatatggatgtaatcattttcacatggagttaaaaagaggtagaggagatcgagttgtaggaaataaactacttttgcaaataataacataccacattaatcttcaaatctattcttatatcacaccc

SEQ ID NO: 232951 - DNA, 297 bp, Glycine max
aaaacactcataacacaaagcacagagcaaggctcatccttgagttaaaaaatggcagcagcttcttccatggctctctcatccccatccttggctggcaaggccgtgaagctgggcccatcagccccagaagtgggaagggtgagcatgaggaagagcgtcagcaagcaagtctcctcaggaagcccatggtacggcccagaccgagtcaagtacgtgggcccattctctggcgagcccccgtcctacctaaccggtgagttcccaggggactacggctgggacactgcggggctt

SEQ ID NO: 232952 - DNA, 303 bp, Glycine max
gaagagaatggctcccaagggtttaacctttctggctgtgttaatatgcgtttcagcactgtcactgagtccttctgttgcgggggaagggcaaaataatggccttgttatgaacttctacaaggaatcatgccctcaggctgaagacatcatcacagaacaagtcaagcttctctacaagcgccacaagaacactgctttctcctggctcatgaacatcttccatgactgtgctgttcagagttgtgatgcttcactgttgctggactccacaagaaagagcttgtctgagaaggaaacaga

SEQ ID NO: 232953 - DNA, 331 bp, Glycine max
cttaactcaacttctgctagccactctctgcttcgaagtccaaccacgcttttctctacagtcatgggcaaggtcaagatcggaatcaacggatttggaagaattggccgtttggttgccagagtcgctctgcaaacagacgatgtggagctcgttgccgttagcgaccctttcagtaccaccgattacatgacatacatgtttaaatacgacagtgttcacggacactggaagcatcacgatgtcaccgttaaggacgagaagacccttctcttcggtgacaagccagtcactgtttttggacacaggaaccctgaagagatcccatggg

SEQ ID NO: 232954 - DNA, 329 bp, Glycine max
cggctttctgagctcattggtatccaggttgtcaaggctgaagacagtattggtccagaagtagaaaagttggtggcttctcttccagatggaggtgttcttcttctagaaaatgtgaggttttacaaggaggaagaaaagaatgatcccgagcatgcaaaaaggcttgcctctctggcagatctgtttgtggatgatgcatttggtactgctcaaaggggacatgcatcaacagagggtgttactaaatacctgaagccatctgttgctgggttttcttttgcaaaaggagactgattaccttgttggggcggtaacaaggcccaaaa

SEQ ID NO: 232955 - DNA, 350 bp, Glycine max
tgagaagatggtgtttgaggaaactgagctgaggctgggactgggactatgtctccctggaaatggaaccacggcaacaactgaagctgctgctgcggaattaggagtgaggaagagagggttctctgagactgaaactgatgaaacagccaccgttgatttgatgcttaacctctcacccaaggaagctgctgctgctgatggtgcagatccacgtgagaagccaaagacttcgccgaaggagaagacccttctgcttcccgattccgccaagcctcctgccaaggcgcaagtggtgggatggccacccgtgaggtctttccggaagaacatgttcgcagcccaaaaga

SEQ ID NO: 232956 - DNA, 338 bp, Glycine max
aaagaacattgttcaaaggagtaagaacaatgagggcgaaaaagccgccacaagtagtagcaacaatgtgaacacgggagcagctttcgtgaaggtgagcatggatggtgctccttatttacgcaaggtggatttggagttgtacaagagctaccaagagttgttggatgcgctggctaaaatgttcagttcattcaccattgacaagtgtggatcgcaaggcatgaaagacttcatgaacgagagcaaattgattgatcttctcaacggctctgattacgtagcaacctatgaagacaaagatgctgactggatgctcgttggtgacgtaacgtggg

SEQ ID NO: 232957 - DNA, 327 bp, Glycine max
gtctgggtgtgacaaccttaggaagctggagatcagggactgcccctttggtgacaaagcccttttggccaatgctgcaaagctggagacaatgcgatccctttggatgtcctcttgcttggtgagttatggagcatgtaaattgctgggtcagaaaatgccaagacttaatgttgaagtcattgatgaaagaggacctccagattcaaggccggagagtagtcctgttgagaagttatacatatacaggactgtttctgggccaagattggacatgccaggctatgtatggagaatgcaagatgattctgcattaaggatttcttg

SEQ ID NO: 232958 - DNA, 385 bp, Glycine max
  unsure (1)..(385): unsure at all n locations
attctccctttcctctccgaaccctcgatcactctcacgcgctcctatattcgctcctccaccgtcgctctctcgaacaaccacaacaccatcttcatcacatggcaaacgcagcatctggtatggcagtccatgatgactgcaagttgaggtttttggagctgaaggcaaaaaggacacaccgtttcatagtttttaagattgaggagcagcagaagcaggtcattgtggagaagcttggtgagcctgcccagggctatgaagatttcactgccagccttcctgctgacgagtgccgttatgctgtttatgattttgagtatctgactgaagggaatgtcnctaaaagcagaatttttttcattgcgtggtcccctgacacatc

SEQ ID NO: 232959 - DNA, 356 bp, Glycine max
agagataccacttctcttgccaattcacagctgatctatttgccatgaaccacacagatttcattatcaccagtaccttccaggagattgctggaagcaaggacactgttggacagtatgagtctcaaacagcctttaaccctcctggaacccaacgtggtgtgcaaggcattgatgtctttgatccaaaattcaacattgtctcccctggagctgatcaaaccatttacttcccccccaacgaaactagccgtagggtggactccttccaacccgaaatcgaagaacttctttacagctctgtggagaatgaagaacacatatgcgtgctgaaggaccgcagcaagccgattatc

SEQ ID NO: 232960 - DNA, 370 bp, Glycine max
  unsure (1)..(370): unsure at all n locations
cttggtatctggggaggcaagaatgagaggaaccttgatgttgggcagggtcatgaagttcttggtatctggggaggcaagggacaaggaaaatctttccaatgtgagcttgtctttgccaagatgggaatcaaccccatcatgatgagtgctggagagttggaaagtggaaatgcaggagagccagcaaaactgatcaggcagagataccgtgaagctgcagacatgatcaagaagggaaagatgtgcgctctcttcatcaacgatcttgatgcangagctggtcgtcttggtggaaccacacaatacactgtgaacaaccagatggtgaatgccactctcatgaacattgctgataaccccaccaatg

SEQ ID NO: 232961 - DNA, 332 bp, Glycine max
ggctcttcaaccactacattcactttattggcctagacccaaccaccaaagcaccaagagaccttaggtgaaccttttctctctagctctgtttgcagaaattcaagcgcaagaatggaggttgcaacaaacacaaccgcgaccacgtcaaattcattcgatgctctaactgtggaaaatgctgccctaaggtttttttattttactttcttatacctttaaagttttgtgcaaggcatttcagttaaagtttttgcgctttgtggattttttttttcttcaaattaataacaggacaaagctattaagaggtttctggtgaggaacattgt

SEQ ID NO: 232962 - DNA, 140 bp, Glycine max
gtatttcacccaaatataaatagcaatgggagcatttgccttgacatattgaaggagcagtggagccctgcgctaactatttcaaaggtgttgctctcgatttgttccctgttgacggaccctaatcctgatgatccttt

SEQ ID NO: 232963 - DNA, 305 bp, Glycine max
gccgcaccgacaacgccatcaagagccattggaattccaccctcaagaggaagtgctccgagcctctctccgagcctcggcctctgaagagatccgccaccgtttcgggtagtcaatccggatcggatttgagcgatgcgggtttacccattattcgtgcaagaagcgtgagcgtgacggtagctcgctctaaccaccttgcggaaaccgcgtcggcgtcagtaagtgatcctgccacgttattgagtttgtctctaccggggagtcgattcgtgcgatggggctgataatggggctgggccgaa

SEQ ID NO: 232964 - DNA, 359 bp, Glycine max
catttctccatttccattttctctctcacttttcaagaatcgtaagctatgggaaagtcttacccaactgtgagtgctgattaccagaaggccgttgagaaggcgaagaagaagctcagaggcttcatcgctgagaagagatgcgctcctctaatgctccgtttggcatggcactctgctggaacctttgacaagggcacgaagaccggtggacccttcggaaccatcaagcaccctgccgaactggctcacagcgctaacaacggtcttgacatcgctgttaggcttttggagccactcaaggcggagttccctattttgagctacgccgatttctaccagttggctggcgttgttgc

SEQ ID NO: 232965 - DNA, 332 bp, Glycine max
gattgctcttttctccttcgctcttccctttcccattcccattcctattcctcctttccctctcctctccgctcctccaattccccccaaactttctccctccgccgcttcgccgccgcctcgctcgcttgccctcgaccggcgccgccgcccctcgacgccataggccagaaaatcggaaagtcgaggcgccgccccgggtgcccttcaagggccgggttaaggcgaagtgtaagtctttcggcccaagggatattgggacaatgaatctctcaacgtccagttgggggagcaagatgattatgaggtggtgagaaaggtgggtacgggga

SEQ ID NO: 232966 - DNA, 311 bp, Glycine max
gtgggatcggtttcatccaacttatgcagtgaatgccattctgacagacaatatatggaatggctggcacacttaaatgtgctatcctatgagcttggaggacatggtaaataggatgccaaaatgatattgtgatgttagattactccactttttgcacataagtgtttgatactcaatggctctacttataagtaggttttttttttttttttttgcacatgttgctgaagagagttagtgtatatacatataacgttgtaaatttacaatgtaatcaaatattaatactaccaaaaacttctccgtgc

SEQ ID NO: 232967 - DNA, 356 bp, Glycine max
ctttgggagatcaaatcatatctatctatcagcggcaaggcaattcaagttgtgaaatggagaccctctgctctgcattggtgttcccatctttcagaatcagaacttcagctttctccaaatgtggcatcagggcttccattgccgttgagcaacaaacttcccagactaaggttgctctcctcagaattggtaccagaggaagtccactagctctggctcaggcatatgagaccagagacaagctcatggcatcacatgcagagctagcacaagaaagggctattcagattgtaataataaaaacaactggtgacaaaatactatcacagccacatgtacacattggtgggaaa

SEQ ID NO: 232968 - DNA, 378 bp, Glycine max
ttttgctacattctgaatggagctttctgcaccttcttcaccctctcttctaagatgtccttcatccctgcttctgaattctagggttagggttttccatacaatactcaaccccacacgcccacctttccaagcttcaatcttttcactcaaccaacgcattctcactccaatggatcttcccagaaacgtctcctccgctgccttggtgggagacaacgcttcggccacgaccactttgccaattgactcagatgctagaatcggagaggttaaaagggtcaccaaggagaccaatgtatcagtcaaaataaacttggatggttctggggtggctgatagtagtactggaattcccttcctcgatcatatgcttga

SEQ ID NO: 232969 - DNA, 329 bp, Glycine max
gtgaaccgacagtctgtgttgggagccattacttctgctcagcagaggttgaaactatataacaaggtccctccaaatggtttggttctttacactggaaccattgtcactgaagatggcaaggaaaagaaggtgacaattgattttgagcctttcaagcctatcaatgcatcactgtacctctgtgataacaagtttcacacagaagctctaaatgaacttttagaatctgatgacaagtttggtttcattgtgatggatggaaatggcaccctttttgggactttaagtggaaacactcgtgaggtacttcacaaatttactgttga

SEQ ID NO: 232970 - DNA, 384 bp, Glycine max
ccttagccgaggtcacgaggagcactagctagtttcacaatttccaaatggctaggggattgaagaagcatctcaagaggctcaatgctcctaagcattggatgcttgacaaactgggtggtgcatttgcgcccaaaccctcatctggaccacacaaatctagggagtgccttcccctcatactcatcctacgaaaccggctaaagtatgctctgacttaccgtgaagtcatcgctattctgatgcagagacatgttcttgttgatggaaaagtcaggaatgacaagacttaccctgctggtttcatggatgttgtttcaatcccaaaaaccaatgagaacttccgcctgctctatgacactaaaggccgattccgtctccatt

SEQ ID NO: 232971 - DNA, 370 bp, Glycine max
ccaagatttgttcattgttgggtcaattgaagtctaagaaagaaaacagagagcgaagaaggagaagagatcagaaaaatggcgtccaaagctccaaagaaggccaatctcctcgatcaccactccatcaagcacatcctcgacgagtcagtctccgaggtggtaacgagtcgtgggtttgtggaagacgtgagattgagcaatgtgaggcttctcattggggcaatcatcatcgtcattgctctcttcgcccaattctacaagaagaagttccctgaaaatagggattttctcatcgcctgcatcgccttgtatgtgatcttcaatgggttgttgcagctgatcatatacactagggagaaaaatgcca

SEQ ID NO: 232972 - DNA, 370 bp, Glycine max
gggtggcactaacgtctgccaaagaagtctcaccgctgaagggatatttcacaatatttttaggcacaaggttactcacatggggggtgcaccgacagttttaaacatgataatcaattcaccacccaaagtccggaagccgcttccgggaaaggtctaagtgatgacaggtggtgcaccaccgcctccggatgtgattatcaggatggaagaactaggatttaatgtgactcattcatatggtttgacagaaacctatggtccaggatcaatttgcacatggaaaccagaatgggacaatctgtctcgagatgcacaagcaaaactcaaggcacgtcgagggggtggcccatgttgggaatgaagacct

SEQ ID NO: 232973 - DNA, 289 bp, Glycine max
  unsure (1)..(289): unsure at all n locations
ctgaattggagcagcagagaaacaatgaagaatcaagtgtgtacaggacttcacatttgatagacaaatgccgtagttcactagagcttttctttgccatatggttcgtgatgggcaatgtatgggcctttgactcacgttttggatccttcccacaagccccaaaactccaagtgctctgcatcatcttgctttcttggaatgcaatatgctactcgttccctttccaantgtttttgcttttgtgttgttgtgtgccactaatgaacaccctccttggatacaacat

SEQ ID NO: 232974 - DNA, 313 bp, Glycine max
cccttctctaacatgccatacgacagcgttctgagtcttttcttcttcgttaccctcttcacatgccttctctctgctaattcccacgatgaccatattttcctaccgagtcaactccatgacgatgactcagtgagttgcactgctaccgacccaaaccttaactacaagccggtgatcggaatcctgacccaccccggcgacggtgcctctggccggctcagcaacgccaccggggtttcttacatcgccgcctcctacgttaaattcgtggagtccggtggtgctagagttattccccttatccacaatg

SEQ ID NO: 232975 - DNA, 387 bp, Glycine max
tgtacttggaagtaagggagaagcaatacgacaagaaggaataccttgatttttatactgaccttaccgctacatctccagccgtttctggagtgatggtatatatagcaactcccgacaagaaatctaatgtaaattatttgggccctgcatcgattgaagacattgcaaggcaaataattcaagctaaaggtcccgcaggacctaacagagattatcttttcaaccttgaaaaggctcttcatgaaataggatgcaaagacaaacatgtcattgatcttgcaaatgaagtcaggcgtattcttgcagaggaacactgaatgcatctgtgtgttatgtagttatttatgctgatcagtatgttagtaagcacaacattctgagaca

SEQ ID NO: 232976 - DNA, 260 bp, Glycine max
gattgttctgaggttgcaatgccagggttgcaagcatgtctcccaacacgctattaagaggtgcaagcactttgagattggtggtgacaagaagggcaagggaacatcactcttctagtttgagaattaggatttagagctttatgtttcagcaatgttggaatgttttgtttctctctggattttttctgctagttatattttattattttgcaacaccttggtaatgagaaattaaaactaatttggcccatttcacc

SEQ ID NO: 232977 - DNA, 359 bp, Glycine max
  unsure (1)..(359): unsure at all n locations
aagctgcaaaagttgcgcgttcagttgcatcatcttcacttgtaaaggctgctatatatggtagagaccccaattggggacgcattgctgctgcagctggttactcgggggtttcattccatcaagatttacttagggtagagctgggggatattttactaatggatggacgggaaccacaattatttgaccggcacgcggctagtagttatcttagaaaggctggggagactcacgacacggttaaaattcagatatcagttggcaatggaccaggacgtggacaagcatggggatgtgatttaagctacgattatgttaanataaatgctgagtacacaacataggcaaaaggaaac

SEQ ID NO: 232978 - DNA, 357 bp, Glycine max
gaagaagaagatgtcgtacctgttgcctcacttgcactctggatgggccgtcgatcaagcaatcctcgccgaagaggagcgtctcgtcgtcatccgtttcggccacgactgggacgaaacctgcatgcagatggacgaggtgttggcgtcagtggcggagacgatgaagaactttgcggtgatatacctggtggacataacggaggtgccggatttcaacaccatgtacgagctctacgacccttccacggtgatgttcttcttcaggaacaagcacatcatgattgatctcggaaccggtaacaacaacaagatcaactgggctctcaaggacaagcaggagttcatcgacattgt

SEQ ID NO: 232979 - DNA, 310 bp, Glycine max
ctaacccttccatcgtagtttccacatttctcctaccgaaaagtcaaaactacccactcacccaggtaggcacaggcagcgatggacgtaggagccggcgacgatcattccccggaagccgtcatatcgcggtggaaattcgcggtgtcgcagcagtaccagcacatgctggacaaaacgacgccgcacgttctccggcggtggatcgggtggctggtggttgccgccgtgtacgtgctccgcgtgtacttggtccaaggcttctacatcgtctcctacgccctcggcatttacatcctcaacctcctca

SEQ ID NO: 232980 - DNA, 322 bp, Glycine max
cataaatattccgttttgcgtttctctgcctaaaaggattgaaagatgggtcaagcactaggttgctatcaagttgatcagtcaaatgtggctatcaaggagcattttggaaaatttgatgatgtcctagaacctggatgtcattgcctgccttggtgtcttgggtaccagattgctggtagtttgtcactgcgtgtgcagcaacttgatgttcgatgtgagacgaaaaccaaggacaatgtctttgtcactgtggttgcatctgtgcaataccgagctgtgtctgagaaagcatctgatgcattctataggcttaccaaca

SEQ ID NO: 232981 - DNA, 376 bp, Glycine max
gcattctgctatttaattccactacgtacacgcacattctcctcaaagacaacaatggcaccaacagccaagactctgacttacctggcccaggagaaaaccctagaatcgagcttcgttcgggacgaggaggagcgtcccaaggttgcctacaacgaattcagcgacgagatcccagtgatttctcttgccggaatcgacgaggtggatggacgcagaagagagatttgtgagaagatcgtggaggcttgcgagaattggggtaaattccaggttgttgatcacggtgtggatcaacaactcgtggccgagatgacccgtctcgccaaagagttctttgctttgccaccggacgagaagcttcgttttgatatgt

SEQ ID NO: 232982 - DNA, 378 bp, Glycine max
ggctgaaaaagatgactcctgtaaacagtgcatttgcttggaagtcatacaatgaaaaacttgcttcatcaattcaacctgattcaattgcagcatatgcactttgggagcaggtcaacgtgacccgcgattcttcagattatttgtggtatatgacagatgtcaacgttaatgctaatgaaggatttctaaagaatggacaatctcctcttctaactgtaatgtcagctggccatgttctccatgtgttcattaacggtcaacttgcaggaactgtgtgggggggattgggaaatcctaaattgacatttagtgacaatgtgaacctgagggctggcaataacaagctttctttacttagcgttgcagttggtctcc

SEQ ID NO: 232983 - DNA, 378 bp, Glycine max
ctcgagccgaatcggctcgagcacccttctttgactgttctcccacaccacacccatgacactccttctgctccttattctcctctttcacgcggcggaagccaagggacagtggcagctcctccacaaaaacatcggcattgtcgccatgcacatgcagcttctccacaacgaccgcgtcatcatcttcgaccgcaccgacttcggactctccaacctaaccctccccgacggaagatgccgcaacaacccaaacgagttggtcgtcaaacgcgactgcaccgcgcactccatcgaatacgacgtcgcagccaacacattccgcgctctctttgtccaaaccaatgtctggtgctcctccggttcggtctctcccga

SEQ ID NO: 232984 - DNA, 322 bp, Glycine max
aaatgaatcaagtgtggaccgtcttatgaagcaggttacaaatttcatgtctgatattgctgatgagttcaaaattgttgttgttgaagcaataagatcactatgcttgaaattccctttaagagagagatctctgaggaatttccgaagtaacagtcttagggaagaacgtggctttgattacaagagaacaattgtagattcaattgtgagtcgtagtagagatatccctgatgctaaggaaagtgggttgcttcatctttgtgagtttattgaagattgtgggttcacttatttgtccacacagatactgcacgtcctg

SEQ ID NO: 232985 - DNA, 246 bp, Glycine max
gtgtatttccctacctctcccttcaagatgcagatcttcgtcaagaccctcaccggcaagaccatcacccttgaggtggaaagctctgacaccatcgacaacgtcaaggccaagatccaggacatcgaaggaatccccccggaccagcaacgtctcattttcgccggaaagcaacttgaggacggccgtacccttgctgactacaacattcagaacgagagtagtcttcacctcgtcctccgtctc

SEQ ID NO: 232986 - DNA, 368 bp, Glycine max
gcctgctgggccatctccaacgtctcggtttgagtatgtagaaaatgtccaatcatctgagttgaacactggaggttcacatttgcttagtcatgtgtctccaccaaagtcatcaagcttctttgcagactttggaatggatagtggctttccaaagaaatctgggccaagctcctcgaaagtgcaaattcaggaaactgatgaagcaagaaggaagttctcaaatgctaaatctatttcttcatcccaatattttggagatcagaacaaggctgcagatgtggattctcaagctacattgtctaagttttcgggttcaagtgccatctccagtgctgatggttttggtgactcaagagacaacaaca

SEQ ID NO: 232987 - DNA, 338 bp, Glycine max
gttcgtcgaagtactgatggccatataattcatgccaatattgacacagatgtcattatcgctgaagaacctccttatggttccacacaaaagcctgaagatatgtacaggattattgagcactttgcccttggaaggaggagactataactatttggtgaagaccacaatatccgagccggttggctgactgttggtaaagaattatcatcttcaaattttaataaagaggcatatgtgaaaagttttgccgacaaagatgggaaagtttggcaacgacgtgggggaagaaatccaccgccagaggcacctcatctggtggtgactactcctgatat

SEQ ID NO: 232988 - DNA, 353 bp, Glycine max
accgcctcacgcgacaaatccatcatcctctggcatcttaccaaggaggacatgacttacggtgtcccccgccgccgcctcatcggccattctcattttgtccaggacgtcgtcctctcttctgacggccagtttgccctatccggctcctgagacggcgagctccgcctctgggaccttgctgctggcacctccgctcgccgctttgtgggccacaccattgacgtgctctccgtggccttttccattgacaaccgtcagatcgtgtctgcctctcgtgaccgcacgatcaagctgtggaacaccctgggacagtgtaagtacacaatccaagacggcgatgcgcattctga

SEQ ID NO: 232989 - DNA, 699 bp, Glycine max
  unsure (1)..(699): unsure at all n locations
cgaatgaattangtgacctatagaagactatgacgtcgcatgcacgcgttacttagctccgaaatcggctcgagcacaaatctcggcagtataccgacactgaaaaccagagaaaagaaaagcaccttttttccgccattaatggcccttcttgaaacttggtcatcaattgcgatgaaggactcaacatcttgacaccaccccatttcctaattgatttggattagtcgtgttggacctggatgctgctgctaatacagttgatccacaaatgagattccgcattgcattgtttctctttttggcttctcttcaagccactttaagtcaagatattgaacatggttcacttctagtagatggagctcagactaaggctgaaacaggtgataactttatttgtgccactattgattggtggcctcatgataagtgtgactataaccattgcccttggggatattcctctgttgtaaatttggacttgtctcatcctttcctagccaaagcaatccaagccctcaagccattgtaggatagacttggaggttctttgcaagaacgggtgctgtaagatgtaggaagtttgaagtctcctttgcatccccttcaaagtgttaaaggtgaaattgtttggatttcaaaaagatgtttacacatgaaaaagtgggaataactgaaacagtttttcacgagacg

SEQ ID NO: 232990 - DNA, 701 bp, Glycine max
  unsure (1)..(701): unsure at all n locations
cgaaatgaattaggtgagctatagaagagctatgacgtcgcatgcacgcgtacgtaagctcggaattgacataccttctccagccatgtcttggtggggattccaaaactttgatgtttgtgaacatctcacctgatccatcttcaactggagagtcactttgctctcttcggtttgctgctggagtgaatgcctgcgagattggtatcccgcggcgtcagacatccacacggtcccttgattctcgtttgagcagcggctaaaagagaggccacactcattatccataataaccaaagtaactgtcatttgtaatgctttggatgggataaaagttgtctttgacccatgtaactgtgttaacttttagagaaatgagcttgtataaaattgattgtagaggctaagctttagcctcaggggtgcaacaactgattatcatttagttgtgacattattatattcaatttattgaaacananngaaaaaaaaagggcggccgccgactagtgagctcgtcgacccgggaattaattccggaccggtacctgcaggcgtaccagctttccctatagtgagtcgtaataaagcttggcgtaatcatggtcatagctgtttcctggtgtgaaatgttatccggtcacaattccacacaacatacgagccgggaagcataaagtgtaagcctggggttcctaata

SEQ ID NO: 232991 - DNA, 450 bp, Glycine max
ttttacttcccctatggctcgtcactccttgctcttagccctcctcctcttcgccgccgtggccaccgccgcgatggcggtggccgcgtccgacgccgacgacatcctgatccgtcaggtggtgccagatgttggcgaagccgaagaggaggacaagctgctgaacgccgagcatcacatcgcgagcttcaaggcgaagttcgccaagacctacgccaccaaggaggagcacgatcatcgcttcggcgtcgtcaagtccaatctccgcagagccaggctgcatgccaagcacagatacaccggagtgtaagatgtcggttgttcctacgatccaaggccggccgagttccgccgccagttcctcggcctcaaacagtacagcatcccggtgcacgctaagaaagcgcccatcctccccaccaaggatctccccaaggatttcgattggag

SEQ ID NO: 232992 - DNA, 399 bp, Glycine max
cgtctcgcgcacgcgtatgtaaactcggaattctgatatcgtctccagccatgtcttggtggggattccaaaaccttgatgtttgtgagcatctcacctgatgtatcttcaactggagagtcactttgctctcttcggtttgctgctggagtgaatgcctgcgagattggtatcccgcggcgtcatacatccacacggtcccttgattctcgtttgagcagcggctataatagaggccacactcattatccataataaccaaagttactggcaattgtaatgccttggatgggataaaaattgtctttgacccacagttctgtgttaacttttatagaaatgagcttgtataaaattgaatgtataggctaagctttatcctcacgggtgtaacaactg

SEQ ID NO: 232993 - DNA, 559 bp, Glycine max
  unsure (1)..(559): unsure at all n locations
ggcgagcaccgtctcaacccaacactcctcgattccatccaatcctccctccgccgcgtccgccaagaagccaccgcctcctccgccctcgtcaccaccgcgcacggcaaattcttctccaacggctacgacatcgcctgggcccgatcctccgatgaggtcaaagagcgcatgatcctcatggactccctcctccgctccgtcgtctccgatctcctcaccctcccgatgccgaccatcgccgccgtcaccggccacgcctccgccgccggctacaccctcgccctcgcccacgaccacgttctcatgcgcagcgacaggggattcctctacatgagcgagcttgacatcaacctcgttattcccgcgtggttcgtggctctcctcgaagccaaaatcggctcgcccgcggctcggcgccacgttgtcctgaacgcggctaagctcactgccaaggangcgctgcggctcggcgccatcgactcggctcacgacagcgccgctgagaccgttgaagctgcgctcgctttaccgcggatttggtgaagagaggatgggt

SEQ ID NO: 232994 - DNA, 536 bp, Glycine max
  unsure (1)..(536): unsure at all n locations
gagagaacttcaactgagggtgagagtgacacaaatctagggagcactactctaaaagttctattagattcttcaaaacatgaccatgcatcgcgagtcttgggcttttgtcttcggcgttatgggcaacatcatctcctttggagtgttccttgctccattgccaaccttttatcaaatctacaagaagaaatccactgaagggttccagtcacttccttatgttgttgcactgttcagtgcaatgctttggatttactatgctttcgtcaaaagggaagctgccctccttctcattaccattaacacatttggaattgttgtggagtcaatttaccttgcaatcttcctactttatgctccaaggaagcctatgcttacaatcatcaagcttcttctcttactgaatgtgtttgggtttggagccatgcttctatcaactctctagctgtcaaagggagcanagcgtcttgctatcatacgatggatttgccttgttttcaacatcagtgtctttgctgcgcctctcttcatta

SEQ ID NO: 232995 - DNA, 562 bp, Glycine max
gcaaggaggagagtactctgccaaagactaccatgaccctcctccagcacctttgttcgacccagaggagctcacacagtggtccttctatagagccctcatcgctgagttcatagcaacccttctcttcctttatgtcactgtgctcaccattattggctacaaaaggcagactgatacaacggtaggtggcaccgactgtgatggggttggcattttgggcatcgcttgggcctttggtggcatgatcttcatccttgtttactgcaccgccggtatttcaggaggacacataaacccggcggtgacattcgggttgttcctaggacgcaaggtgtcgttgataagggcgttgttgtacatggtggcacagtgtgccggtgctatctgtggtactggattggccaaggggttccaaaaagcatactacaacaggtatggacgtggtgccaactctgttgctgatggctacaacaatggtactgctttgggtgctgagaatattggtaccttcgttcttgtctacactgtcttccctgccactgaccctaagaggaacgct

SEQ ID NO: 232996 - DNA, 365 bp, Glycine max
aaacttttctcaattgggttgaggagagtttgactcaaatttttatttttctaacgaagcagtagcgattagaagtgcaaaaattaaatgtccaacatcttcttgttgatgtttgagattcatgtatccgattctcagtgaaatcgtcttttccgggtgtatgatcaattccactgttaggcgcaggacccatttagttcaatccttctcagttgctttcctcgattggttgtactacgtttcatgatttctaaagcttccttagtcgaataatcatctactactagctattattattagtagtattattatcatcatcatcatatataataaaatctatctgcaatattatttttctgactttg

SEQ ID NO: 232997 - DNA, 463 bp, Glycine max
aattgctcaccattcattgtgcctattatatctcccttttgggttaggatgctcaagcaggaagatataattgctcaccattcattgtgcctattgaagagattgctgaaattatttcagccaaatacccagaatatcaaataccagcactagaagaggtgaaggaaattaaaggtgccaagttaccacatttaacctcccagaaacttgtggatgctggttttgagttcaagtatagcgttgaggacatatttacggatgcaattgaatgctgcaaggaaaagggttacctttaatcgattttagccacgaagttgaaaaaataaaattgtcgaagatgattgttagttcgtactattttcagattcctggcaatgatgcctcttgacatgtactccatttaatgcatgatgttttcttaataaattgaccagggaaataattcttttggtttgtctgaata

SEQ ID NO: 232998 - DNA, 493 bp, Glycine max
  unsure (1)..(493): unsure at all n locations
cacgttccagttaccttatcttccacctcagatacctctcttcactcttccatcatcttcctctccctccagacaaaacatcaccaccaccttcaacttaatttcccagttacactgccaccactttgattccaaataaccaccatcaccatgttcacggctagtaagctagccttcacattaacaccacctcgtccatgcactgcacctttgacaccaatctcttccttgtcctcttcttcttcttcttcttctgcttcagcttctggtatcaacttcattcagttcaatggacgccacttatgcctccgacgcaggctgtttctactctctcctaaggccactgcagatcaacaagggaaggttgaagaatttgaagatgattcaaatgttgttgatagtaaaatcctcccatattgtagcatagataaaanagagaagaaatcaattggtgaacttgaacaggaatttcttcaagcactgcaagcattct

SEQ ID NO: 232999 - DNA, 607 bp, Glycine max
  unsure (1)..(607): unsure at all n locations
ctcgagccgcagtcttcctttcctctctctcttgtttgcattcatgtgagggtgattttgcagagagttaacagcacaaaccactcactctcttaacttgagattattttttttctttccccaaacccaaagaggcatgagttgcaacgggtgccgcgtccttcgaaagggttgcagcgagtcttgtatcctgcggccgtgtctacagtggatcgatacgcccgaagcacaaggccatgccactgtcttcgttgccaaattctttggccgtgccgacctcatgtccttcatttccaacgtccctgaaccccaaaggcccgctctgtttcaatctctgttgttcgaagcgtgtggaagaacggtgaaccctgtcaacggtgctgttgggcttttatggaccggaaactggcacgtgtgccaggcggcggttgagacggtgctccgcggcggcaccgtcaggcccatgccggagcttctcggcctagacgctcncactcccactgccgatgacgcttccgaaggggaagttacctgtaccgacaagtggagagtccgagatccgaacccgaatttcccgggaaaccggttcccgggtttgaggtccgat

SEQ ID NO: 233000 - DNA, 587 bp, Glycine max
gatagagggatcttttggggaggagcggtgcaacaacacgactgatttaattggttgagcaagatgtcgacctcgacgaacgtggtagtcctggacaacggcggcgggctgatcaaggcgggcatcggcggcgagcgcgacccctccgccatagtcccgaactgcctctaccgccccccgtcgtcgaagaagtggctccacctccactccggcgacgaggacctcacctccgccgccgtgcgccgccccatggaccgcggctacctcataaaccccgacctccagcgcgaaatctggtcccacctcttctcttccgtcctccacataaacccttcccagtcctcgctcctcctcacggagcctctcttcactcacccctccatccagcgctcggtggacgagctcgtcttcgaggacttcaacttccgggccctgtacgtggcccactccccctccctcgtccacctccacgaggccagccgcaacaacgccaacgggctcctctcaaggcccagtgcagcctcgtcctcgacgccgggttctccttcaaccaggcctcccccgtcttccacaacttcgccctcaac

SEQ ID NO: 233001 - DNA, 611 bp, Glycine max
ctacaatctatccctgaagaacgtccttctatgaaagatgtagttgaggcattggaagccattgaagctatccaaaattagggatggaaatgagtcaagtcgcttgtcaagggcctatggctcggcctatttaaggctcggctcggcttggcttgtttactataaatgtcaagctcaagctttttaaaaagtttttttagataaaaaggccaaagccaaactataaaaaaagcttgttaagtttctttttttagttagtattttactaggttttaaaataattaattggttaaagaggtttttaagcagacttttaaataggcttgtaggccaagccagacttttatgtaagccaagccgagcctttaaaaaaagcttatgacaggtaatgagccaagctcaagctttgcgtattcaactcaagccaagctcaagcctagtaaaacttggcatggcttgactcatttctacccctatccaaacccacaattcgcagtgtacatctcatccaccccctcgacagggtcgtaagagtatacacaaatttatatggacaaaattactagaaatcgagattgattatccatagtaatgtgctcaatttaatgggt

SEQ ID NO: 233002 - DNA, 589 bp, Glycine max
atgcacgcgtacgtaagctccgaatcggctcgagctccgcactccgtcttcatcaatcagcatcaccaccgctccaacacaggggaaaatgagggagatccttcacgttcagggagggcaatgcgggaaccagatcggttcgaagttctgggaagtggtgtgcgacgagcacggcatagatccgacggggaagtacgtcggaaactcagatctacaactcgagcgcgtgaacgtgtactacaacgaagcttcctgcgggcggtttgtcccacgcgcagtgctgatggacctggagcccggaaccatggacagcgtgcggactgggccgtacgggcagatattccggcccgacaacttcgtgttcgggcagtccggcgcgggcaacaactgggccaaggggcactacacggagggcgccgagctcatcgactccgtccttgacgtcgtgcgcaaggaggccgagaactgcgactgcctccaggggttccaggtctgccactcgctcggcggaggaaccggctccgggatggggacgcttttgatttcaaagatcagagaggagtaccctgacagaatgatgctcaccttc

SEQ ID NO: 233003 - DNA, 347 bp, Glycine max
agcgaatccctctctctatctctcacacacactttctctctctctctctctcacccagatcttgtagcaatggcgagcgctcccactccacgcgaagagttcgtgtacatggcgaagctggcggagcaggccgagcgctacgaggagatggtggagttcatggagaaggtctccgcctccgccgagagcgaggagctgaccgtggaggagcgtaacctcctcgccgtcgcctacaagaacgtgatcggcgctcgccgcgcctcctggtgcatcatctcctcaatcgagcagaaggaggagagtcgcggcaacgaggaccacgtcgccgtcatccgcgactaccgccc

SEQ ID NO: 233004 - DNA, 694 bp, Glycine max
cgaaatgatttaggtgccactatagaagactatgacgtcgcatgcacgcgtacgtaagctcggaattcggctcgaggaagaggtcactgccggaagaagggagcaacaccatctttcattttccggcgatctcttgtttcttccatcatcaccgttttccggcgatccctaatcctcgcaaacagaaatgacgacatcaaggcgccttgcggacaggaaggtggagaagtttgagaagaacatcacaaaaagaggatttgtgccagacactaccactaagaagggaaaagactaccctgttggcccagtgctgctcggtttcttcgtctttgttgtcattggatcatctctcttccagataatcaggacagcaacgagtggaggcatggcttaaatggagctttgttttggattttgtgtcatcttctctttcttagcctcctcgtataaaatgctaatacttctctacatgtactgtacttgtactagaccctgttcctgttcatgttttaatgaactttataagaattttgaattaaaacaagtgaaaaagggcggccgccgactagtgagctcgtcgacccgggaattaattccggaccggtacctgcaggcgtaccagctttccctatagtgagtcgtattagaacttggcgtaatcatggtcatagcggtttcccgtgtgaaattgtaa

SEQ ID NO: 233005 - DNA, 581 bp, Glycine max
gagctattggacaactagtaatgaagttgttaagactgaatctgatgcaaagacaaaactagggttcagtccagctgagatagtaattgtgaaccctaataagaagacttccactggaaatgaagtagggtaccgtttggtttcaaatgcagcggttcatcctcttctcacagatgatgattaccctcaaacacgtggtgctttcaccagttacaatgtttgggttacaccttacaacaagactgagaaatgggctggtggactttatgttgatcagagccgtggagatgatactttggctgtttggactaagcagaatagggggattgagaacaaggatattgtgatgtggtacgtggtgggaatccaccatgttccgtgccaggaagattttccaataatgcccttgttgagcaccggatttgaattgaggccaactaatttctttgagagaaatccagtccttaagaccctttctcctggcattgttaaatttccaggttgtgagaaaccctagatttgcttttgagctttgtcactttaagtacaatattgttgatcgatagattcggagaaacatt

SEQ ID NO: 233006 - DNA, 366 bp, Glycine max
tgaggtcagtgtttgatctccttgaccgcagaactgaaattgagcctgatgatcaagatgctactcctgttcctgatcgtcttcgtggtgaagttgaacttaagcatgtagacttctcttatccaactcgcccggatatgccagtttttcgtgacctcagtcttcgtgcgaaggctggtaaaactcttgcccttgtacgacctactggctgtggtaagagctcagttattgcacttatacaaagattctatgattcaacatctggtcgggtcatgattgatggcaaggacattaggaaatacaagctcaagtccttaagaaggcacatttctgtggtaccacaggagccttgtttgtttgccacta

SEQ ID NO: 233007 - DNA, 418 bp, Glycine max
cagcgcaagggttgttttcttgaatgagaggcctcagccaaggcctggtaaaggtgtcaccaacacttgtgaagtctgcgagcgcagccttcttgattccttccgattctgttctcttggttgcaagattgttgggacttcaaggaacttccagaagaagaaaaagtcagcggcaatgggatcagacacagaggattcttcgtacagcagcaacagcagccatgggaagaagaacagcttcacaccgtccacaccgcctccaacttctgttaattacagaacggccaagagaagaaagggaattccacaccgtgccccaatgggtgggctagtcatagaatactagaaattaagttagtagtaactttacggtacttggcaataaggccccctgataaattttacctcaaaacgcaac

SEQ ID NO: 233008 - DNA, 540 bp, Glycine max
  unsure (1)..(540): unsure at all n locations
gagctattggtcaactactaatcccttgttgattcattcggttggtcatggcttcttcatcgattagcggattgacgttcaagctgcaccctctggtgatcgtaaacatctcggaccactacaccagggtcaagtcgcatatgaatccaaccgatcagccaccgcacaaggacgatgattcaactcgaggcgatggcgtcgtttcgccgctctccccgcgggtctatggctgcgtcataggggtccagaagggccgcaccgtggagatcttcaacagcttcgaactcctctacgatccttcctcccactccctcgatcgcaccttcctcgagaagaagcaagaactctataagaaggtgttcccgcacttctatatactggggtggtattcgactgggagtgatgcagaggaatcagacatgcatattcacaaagctttgatggatatcaatgaaagtccagtttatgttcttctcaatccttctatcaatcattctcagaaggatcntactgtcagtatttttgaaagtgaactgcatg

SEQ ID NO: 233009 - DNA, 116 bp, Glycine max
tggggaatttgctatacctatggtacattgttttctgtaaaagggttaacagactgtggaaaaaactaccgtaatagtcctgccttgcgtaaagcttgcaatttttgttgtcaaag

SEQ ID NO: 233010 - DNA, 600 bp, Glycine max
attctcctctctgaattcctcttattcaggaatttggagagtattgatatatcaaggtaggataaaccagtagccaaggaagatatggagttttctatgattttcattgttagcaacattatgctgcttttcagttcagcatttgccaaaactgctagtcctccctctctgagcccaactccagcagcagccccggcaccagacttcgtgaacctcactgagttactcagtgttgctggtccgtttcacaccttccttggataccttgagtccactaaagtgattgacactttccataaccaagccaacatagactgaggaaggaattaccatctttgttcctaaggacagtgccttcaatgctataaataaaactaccctatccaacctcacctctaaccagctaaagcaagtgatcctcttccatgccttgccacatccctattctcgggctgaggttaggagccttagccaaaccagctctactcgcacattcgccggaggagattacactttgaatttcactgatgattctgggacagtgcacattaattcaggatggtcaaagaccagggtgagcagtgctgttcattccacaga

SEQ ID NO: 233011 - DNA, 554 bp, Glycine max
gaaggtttcgggggctgttttttgtattttgccccgattctcttctctctccctctggtgttgtgttttctcctttccctttctctcttctctgtcctttgagtttttctatactctagttcgcgtcgcccaaggctcaacagcatgacaaacgattgacaactcggcaaggtacatagtgctgaacgcacgctttaatttattttaatttcgttgtttatacttaccgtattcaattttacaatatataaattaacatgatgactcgcatgtaataagtttatagtctggtaattaaagcaaaaggcaatcgatacaatttacttcatatttaggtatttgttcatagtatatttttattttatggttttagtaaacaaatggtttatttgctcgtatgtatattgtcatgttgtttaatatttttgtgattagaattgaattgaaagtcttacaattaattgactatacaatcaatttccttcagaagagattaatgtagattactactagctgtataatatatataaactatgacgtgtttattttcatga

SEQ ID NO: 233012 - DNA, 407 bp, Glycine max
tccaagggaaaaccatcgacgtgtaccagatgcaggaggggaagcaggtggcccgtgacttcacctacatcgacgacatcgttaaaggctgcctgggagccctggacaccgcccagaagagcaccgggagcggcggcaagaagaagggccccgcccagctcagagtatacaatctggggaacacttcaccggtgccggttgggaccttggtgtccattctggaaggtctgctaagcaccaaggccaagaagcacgtcattaagatgccatcaaacggcgacgttcccttcacacacgccaatgtcagcttggcctacagggatttctcttacaatcccaccaccgatctcgccaccggtctcaggaacgttcgtcaagtgctaaccccggtaataacggcctccagc

SEQ ID NO: 233013 - DNA, 349 bp, Glycine max
ctagaggaaagatccagatcaagaggatagagaataacagcaatcgccaggtcacttactctaaacgacggaatggccttttcaagaaggccaacgagcttaccgttctctgcgatgccaaggtttctattactaagttctccagcactggaaaactccaccagtacatcagcccctctacctcaacagagcagttcttcgatcactaccagatgactctgggagttgatctctggaactctcattatgagaatatgcaggagaacttgaagaaactgaacgaggtgaataggaatcttcgtaaggagattacgcagacaatgggagattgtctgaacgagctgggcat

SEQ ID NO: 233014 - DNA, 457 bp, Glycine max
gctgacagaatcaacaagatgctggcagtgctcgagaagaacatcttgtgggtgaaccctgactgtgggctcaagacccgtaagtacactgaggtgaagccagccctcacaaacatggttgccgcagcaaaactcatccgcaacgaacttgccaagtgaatggtataagaaagtagaatcttccaagtcatttggttctgctttatattataatacaccaaagaaaaattttctctatattgggttgtttcaataactgtgtgtggaatatttaggtgtcttagcatgctctgtgagcaattgattcttcctcaacccctccccccttatttttccccactcctgttttccctaatgaatgttgtatctttgcggcttcgccgcaatccttattgatctggaattttaccagttttgtgcaaataactatgagcatctatatcgagtatttcaaaat

SEQ ID NO: 233015 - DNA, 567 bp, Glycine max
  unsure (1)..(567): unsure at all n locations
aaacatcttctctctttaccttccttgtctcaagtgaaccttttttctcaaaagcttcccttttgagttatatgttcaccaccaccattttgaattgaaactcgagaatgggagacaaagaggtaaaggaagaagaacaaaaaggtggattcagggcttccatgtttatttttgtgttatcagcattggacaacatgggttttgtggcaaacatggtgagcttggttctatacttttatggggtgatgcactttgatctgtccaactctgccaacaccctgacaaactttatgggctcaactttcttgctctcactcgttggtggcttcatctcggacacttacttcaacagactaaccacatgtttgctttttggatcactcgaagttctggctttggtaatgctgacggttcaagctggtctggaccatttacacccagattattgtggcaagtcaagctgtgtcaaaggtggcatagctgtcatgtnttactcatcattgtaattgttggctttgggcatgggaagagtgagaggctccttgactgcatttggtgctgaccaat

SEQ ID NO: 233016 - DNA, 350 bp, Glycine max
attttaaacctctgggcgtggctagcttcaacctttaacattaacatggccattccctacccccatttcatcgccaccgagaaagccgccatggacgccggcctcctccacccctcctccccctccgtcatcctcacccaagacgatttgaagaaaatcgccgcctacaaggccgtcgagtacgtggagtccggcatggtcctcggcctaggcaccggctccaccgccaagcatgccgtcgaccgcatcggcgagctcctccgccagggcaagctcaaggacatcgtcggaatccccacctccacaaaaacccacgaacaagccctctccctcgggatccccctctccga

SEQ ID NO: 233017 - DNA, 346 bp, Glycine max
ctacactatacttgtcaaccctttgagagttagaatggctgctgctattgaaatccccacaatagtgtttccaaactcctctgcccaacagaggatgccagtggttggaatgggatctgcccctgacttcacatgcaagaaagacacaaaggaggctatcattgaggccgtgaaacagggttacagacacttcgacactgctgctgcttatggctctgaacaggctctcggtgaagctctcaaggaagctatccatcttggcctcgtctcccgccaagacctctttgtcacttccaagctttgggtcaccgaaaatcatcctcatcttgtccttcctgctttgcgc

SEQ ID NO: 233018 - DNA, 365 bp, Glycine max
ctcgagccggtcttcctcctcatctctacactactccacatagagcccagcctctcaagcccaagcccaagcccaagcccaagcccgttcataaaatcctcctgcagcagcacccagtacccagccctctgcgtctcatccctctccgtctacgcctccagcatccaacaggaccctcaccaactggttcagacagcactctccctctccctgaaccgcacccaagccaccaaaaccttcgtggctaactgcaacaaattcagaggcctgaaacccagagagcacgctgcactcaaggactgcgccgaggaaatcagcgacagcgttgaccgcctcagccggtcgctgaaggagctcaagctatg

SEQ ID NO: 233019 - DNA, 562 bp, Glycine max
ctcaatcgttttctacataatacaaacctctctaatttttgaagcttattatacccaatctcgatatgcagatcttcgtgaaaaccctaactggcaagacgatcaccttggaggtggagtcctctgacaccatcgacaacgtgaaggccaaaatccaagacaaggagggcattcctccggatcaacagcgtttaatcttcgccggaaaacagctcgaagacggcagaaccctcgccgactacaacatccaaaaggagtccacgctccacctcgtcctccgcctccgcggcggcatgcaaatcttcgtcaaaacccttactggcaaaacaatcacgctagaggtggagtcctccgacacaatcgataacgtgaaagccaagattcaagataaggaagggattcctccggattaacaacgtttgatcttcgccggaaaacaactcgaagacggcagaaccctcgccgattacaatatccagaaagaatcgactctgcatttggtgcttcgtctccgcggagggatgcagatcttcgtgaaaaacctaaccgggaaaacgattac

SEQ ID NO: 233020 - DNA, 558 bp, Glycine max
agtagaagtgcttttcaaagatcagcactacaccaagactcctgaagaagctgcagccgaaaccattctggcagggttggatttgaactgtggaaattatcttggccaatacacagaaggggcagtgaagcaagggctattggatgaagcatccattaacaatgctgtctcaaacaattttgccacattgatgcgtcttggtttctttgatggcgatccaagcaagcaaacttatggtaaccttggtccaaatgatgtatgcacttcagagaaccgggagctcgcccgtgaagcagcaagacaagggattgtgttgcttaaaaatagtctgggatcattgcctctcaatgccaaagccattaaatcattggcagttatagggcccaatgctaatgctaccagggtcatgattggaaactacgaaggcattccttgcaactatatatcacccttgcaagcactaacagccttagttcctacgagctatgctgccggctgccccaatgtgcaatgtgcgaatgcagagttagatgatgccacacagatagcagcatctgc

SEQ ID NO: 233021 - DNA, 350 bp, Glycine max
gtgggcctggcccatggctaccttctggtgggcccattcgtgaaggccgggcctctgaggaacaccgagatcgccgggcaagcaggctctctcgccgctggtgggcttgtggtgatcctcagcctttgcctcacaatctatgggatttcatcttttaacgaaggagacccatccactgccccgtcactgaccttgacgggccgcaagaaggagcccgatcagctccaaactgctgatgggtgggccaagttcaccggaggcttcttcttcggaggcatttcgggtgttacttgggcctacttcctcctctacgtcttggaccttccttactacatcaagtgaagaaagtg

SEQ ID NO: 233022 - DNA, 387 bp, Glycine max
ggctcgaggatggcttctcctcttcttactccttacaagatgggcaaattcaatctgtcccatagagttgttttggcaccgctgaccagacagaggtcttacgacaacgtcccacaaccccatgccatcctctactactcccagagaacttccaacggaggccttctcattactgaagccactggcgtctctgacacggctcaaggctatccgcaaacccctggcatatggactaaagaccatgttcaagcttggaaacccattgtcgatgccgtccacgccaaaggcggtgttttcttctgtcagatttggcacgttggaagagtttcagattcagtttatcagccaaatggacaagcacccatatcttctacggacaagcaactc

SEQ ID NO: 233023 - DNA, 608 bp, Glycine max
  unsure (1)..(608): unsure at all n locations
cgatgntttcctcctctaagggtccaattttttcttaaaccctagaacacacactctctctcacagaagaagaagctgctgcagaagagaatttccaaaatgtcgatgtcgaagagttccaagatgcttcagtacatcaactaccgtatgcgtgtcaccattcaggacggtcgccagctcgtcggaaaattcatggccttcgaccgccacatgaacctcgtcctcggcgactgtgaggagttccgcaagcttcctccggccaagggcaagaagccagccgaaggcgccgaccgcgaggaccgccgcacgctcggcctcgtcctcctccgcggcgaggaggtcatctccatgaccgtcgagggccctcctccgccggaagagtcncgctccaaggccgtcggtgccgccgctctggcaggccccggcatcggacgtgctgccggtagaggtatcccgcccgcccccgtcgtccaggcccagcccggactcgccggccctgtccgcggagtcggggggccccgccccggcatgattcaacggcagatctcggccggcctcagctcaacgcaccaccggtgtcttaacccggcggtggaccgcctgttgat

SEQ ID NO: 233024 - DNA, 598 bp, Glycine max
ctcgagccgattatcataccctttaagatgaaaccgtacctacgtccaatattcctattattccttatccttctcgaccaatccacttcggcgagtgcttctaatagtaggtttatagaattcttttcaaaattaaagaattcttttaatcctaagtctgaagaactaaaatcaaaagatataaagaagctcccgagcgtcgaatttttgaagaagaaacatgacggagttaaggacttctctcaagaagctatcctgaaactaccaattatacactggccgttcccgataccaaaaataccaaaaaacttctggaaaccaaagtcccagaaaccaaagcaccctcccccaccgccagactaccgtgtacaactaaagtccgatcccccagcgccaaacgcaccaccgaagcaaatcaatattaagggcctgtccgtcgtcaaaaattacttatctgactacggctacattgaatcctctgggccatttaacgattctttcgaccaggaaataatatcagccattaagacctaccagaatttttccaatcttaatgttaccggcgacctgaacaaacagcttaatcagcaaatgttgt

SEQ ID NO: 233025 - DNA, 419 bp, Glycine max
accaagtgaaaaagcaactaagcatagtgtgtaagaaagggagaaaaacaagtgctgtgtagagagaaaaatggctaggtggtgcatgatcttggtggttcttgctcttgccgtggttgcaagtgccagaaacatgcccaatgacgctggtttggaggaccagaagaacttccttgggtatgggttttcgggagttggcaacaatggccttccctttggtggagtgggttctgggtttgatggtaatatgggtgggccttctgggctcggaagacttggaggattcggtgggcctggtgggcttggcggactcggaggtcctggtaacggtgaaggacccagtcttcatctcccttgagacttgagaccacacaccttcgtgtctctttcggtcgctactttgctattatagcctatat

SEQ ID NO: 233026 - DNA, 366 bp, Glycine max
ggcaacagcagatgtgttcaatgccattggattgctagaattcttctatgatcaatcccctgaagacatgcaaagtcttggaactacattcttcactagtgggatcggtgttgggaacttcttgaacagctttttggtgacaatggttgataaaataacaggaaggggtgacaaaaagagctggataggggacaacttgaatgattgtcacttggactactattatgggtttttgttggtcatgtcaagtgtcaatatggtggtttttctttgggtttcaagtagatacatttataagagggaatcaataagggtcaaggacggtctttgtgttcaaatggagggaggaaacccaactttggacgc

SEQ ID NO: 233027 - DNA, 351 bp, Glycine max
ggaggttttacctgcagaggcataggtttgccggttaccagtcagagattgcacgttcggtgttttgtttatgtcctctggggtgggccccatggagtccgaggctggtcgagtccgtcgccttgggttgcgtgccagttgtcatagcggacggtattcggttgccgtttgtctccgcggtgaagtggtcggagatatcggtgacggtggcggagaaagacgtggggaggctggctgagatactggagcgcgtggcggcgagaaacctgagcacaattcaaaggaacctgtgggacccagcaacgaggagggccctacttttcaacagccaggttcaggtaggggatgcca

SEQ ID NO: 233028 - DNA, 365 bp, Glycine max
aaacaaagaaaaaaaaaaacccttagccaacacaaccatcatgggcacctctgctattcagcaatcagcattcactggtcaaactgctctgaagcagctcaatgagttcgtccgcaagaccggtggcgccggcaaaggtcgcactaacatgcgccgcaccgtcaagagtgctcctcagagcatttggtatggccctgaccgtcccaagtacttgggtccattctcggagcagattccatcatacctgaccggagaattccctggtgactacggatgggacactgctggattatcagctgacccggaaaccttcgccaggaaccgggagctggaggtgattcacagcagatgggcaatgcttggtg

SEQ ID NO: 233029 - DNA, 644 bp, Glycine max
cgcgtacgtaagctcggaaatcggctcgagaagaatctagatcagggtcactgtggttcttgttgggcatttggtgctgttgaatcattgtcagatcgcttttgcattcattttgatgttaatatctctctctctgttaatgaccttcttgcatgctgtggctttctgtgtggatctggctgtgatggaggatatcccttatatgcatggcgatacttagcccaccatggtgttgtcactgaagagtgtgacccatattttgatcaaattggctgttctcatcctggttgtgagccagcttatcggactcccaagtgtgttaaaaagtgtgtaagtggaaaccaagtttggaagaagtcaaagcactatagtgttagtgcatacagagtcaactctgatccccatgatatcatggcggaagtttacaagaatgggccagttgaagttgcatttaccgtttatgaggattttgcttactacaaatcaggagtttacaaacacatcactggttatgaactaagtggtcatgcagtaaagctaattgggtggggaacaactgatgatggggaagactattggcttctcgcaaatcagtggaacagagaatggggagatgatggttacttcaagattcgaagagggac

SEQ ID NO: 233030 - DNA, 611 bp, Glycine max
agcagattttacctccataaacccttcgttcttcttcgtctccctttgcttctctcacttcccatgtctgagtggcttcgacgccttccctcgccagaatgctaacacatctccgccgcgcggctgccgcatgcggtggtgctacctccgaccacttcctcgctctcaggcagttcagctccgccgtcgtcgccgtttcctccgtgtctgattccgatccaacacttccctcttcttccgattcacagagaaaagcatctagatggttgctatttctacctggggcaatcacatttggccttgggacttggcagattggtagaagagaagaaaagattaaaatgttggaatatcgagagaagaggttgcaaatggaaccattaaaattcagtagtgcttattcatcagatgaggaattagattctctggaatttaggaaggtggtgtgcaaaggatattttgatgataaaaaatcagtctatgtgggaccacgttcaagaagtatttcaggagtcactgaaaatggctactatattataacacctcttatgccagttcccaattgtcctgacagtgtaagcattccaattttagtcaacagagggtgggtt

SEQ ID NO: 233031 - DNA, 639 bp, Glycine max
  unsure (1)..(639): unsure at all n locations
cccttcttaacctcggaattcggctcaagctccaagccgaatcggctcgagcanaacactcataacacaaagcacaaagcaaagctcatccttgagttaaaaaatggcagcagcttcttccatggctctctcatccccatccttggctggcaaggccgtgaagctgggcccatcagccccagaagtgggaacggtgagcatgaggaagaccgtcaccaagcaggtctcctcaggaagcccatggtacggtccagaccgagtcaagtacttgggcccattctctggcgagcccccgtcctacctaaccggtgagttcccaggcgactacggctgggacactgctgggctttccgcagacccagaaaccttcgccaagaaccgtgaactcgaagtgatccactccaggtgggccatgctcggagccttgggctgcgtcttcccggagttgctgtcncgcaacggggtgaagttcggagaagccgtgtggttcaaggccgggtcccagatcttcancganggtgggctcgactacttgggcaacccaagcctgatccacgcccagagcatcctcgccatctgggccacacaagttatcctaatgggtgccgttgaaggtttacgtattgctggtggccccct

SEQ ID NO: 233032 - DNA, 694 bp, Glycine max
  unsure (1)..(694): unsure at all n locations
cgaattgatataggtgcactatagaagaatatgacgtcgcatgcacgcgtacgtaagctcggaattcggctcgagcaaaaatgcaatctatgtccctgacgctgagcaagaggctctccaattcaaagcctctcttcagaatctcttccaacctcgtcgctcacgcatcctccgccacaacctctccgccgccaccttcgccgccagtcccctctccatccgccctcaacagcctcctcaccgctccgtggtccgccactcagtcacgcggaatcacgctctctggatctgatgttcgagtcgggaatctcattggaaaccgaggacgcgctcacgaggttctcaaactgtatcgccctcttgaaggaacgggcaaagccactcttgaggttccgcctcaaagtgtagctggttatgccacagttgctactacagaggatggcgccgaaaggaaggaacgaaacagtggattgagtaaggcaacgaagacaaagagagagcagctcctaaaagctactgcagttgcctctcttcttcgaatatacccgaacacttattcattgctcttcgcaaatttctttgtgttctggcacttatatgcagggatcggagagattttggcagactatgttcaccatganatgagcagagaatttgtcatgatttctctcaggttgttcttgataatggcatt

SEQ ID NO: 233033 - DNA, 576 bp, Glycine max
ggcatattgtgccctccctctttctagctatttccctctcttaacacaattaacaaagatatatcatatcatattaactccaaatgatgaaaaatattgggttgtttcttcttgtggtggtggctacttttgtggtggcagccacagctggtagcttttaccaagactttgatttaacatggggtggtgagcgtgccaaaatctatgaaaatggaaatcttctcaccctctccctagacagagcctctggctctggctttcgttccaaaaaagaatacttgttcggaaaaattgacatgcagctcaagctcgtgcctggtaactctgctggaacagtcactgcctattatttatcttctctggggcctactcatgacgaaatagacttcgagtttttgggtaacttgagtggtgatccttatactctccagatgaacgtattcagccaagggaaagggaacagagaacaacagttccatctatggttcgaccccaccaatgacttccacacatactccgtccaatggaatcctgcaagcatcatattctctgtggatgggacaccaataacggagt

SEQ ID NO: 233034 - DNA, 376 bp, Glycine max
acaagtttttgaaatgttgtcaccccttcttctatttctatgcctaactcttcctttgtttttgttgtccttcttcaaataccgtcaaaccttcacgaatcgagcacttccaccaggtcctagaggccttcccagaatagggaatcttcatcaactagatagtccttcacttcaggagcagctatggcatctcgcaaagacatatggtcctttattttcccgtcaatttggattaaggccagccatagttgtttcctctccaaaattggccaaagaggtaatgaaagacaatgaccttgagtgctgtggacgacctaaattactaggccaacagatactaacctatcatgggttagacatgggattttctcatacg

SEQ ID NO: 233035 - DNA, 482 bp, Glycine max
  unsure (1)..(482): unsure at all n locations
aggagttgaatttaggtggccctatagaagagatatgacgtcgcatgcacgcgtacgtaagctcggaagtcggctcgaggtcaattaattgataaaacatgggagagcttccatgatgtccaggtgaaggaccgcagtttaatctggaactccgacttgattgagactattgaattggaaaatcttttgataaatgcatgcatcacagtgtacgctgctgaagctaggagggagagtagaggagctcatgcccgtgaagacttcaggggtagagatgatgggaactggatgaaacacactgtgggattctggcagaacgagaaggtccaggtggactacaggccgggggagttggatggagtgggtgatgagggtgaatcaattcggtccaaggcgcggagggggggagagacgagggggagcggtgggttaagacttgtggcgtcagagttgagggggagggaggagatgggggaggggtn

SEQ ID NO: 233036 - DNA, 324 bp, Glycine max
ctttagtcttgttcttagagatggcttgtgaaaccaagtcatggttggttatgtttcttgttttcttggttgctaattgcatgcaacattgtgtccacggggtgtctcaagtgccttgcctttttatctttggggactctatgtctgagagtggaaacaacaatgaacttccaaccacttcaaaatctaatttcagaccagatgggatcgactttccattaggacgaactgggagatataccagtgggcgaacaggaattgagataatcacgcaatttcgtgggatttgggaaatttatcccaccctttgcaaacacgagtggt

SEQ ID NO: 233037 - DNA, 212 bp, Glycine max
acaatgcaactcttggggctgttagacaggaacttaaagaattacacccacatgatccccaaattgttgtcctcaagcactgggtgtggtgagtaaaaggcattattcaggtttcaagatctataggtgacgtagatttgaaacatgcacagtttaaccggtaaccacttaatgcatgagtcaggacttcctgaggcaatggacatgcccat

SEQ ID NO: 233038 - DNA, 340 bp, Glycine max
gatcgagataactagaaacagtgtgatgaaaatgaaggtccttgttttcttcgttgctacaattttggtagcatggcaatgccatgcgtacgatatgttccctctccgaatgaacactggctatggtgcccgtactccggaggtgaaatgcgcaagttggaggcttgctgtggaagcacacaacatctttggctttgagaccattcctgaagagtgcgttgaagcagcaaaggaatacatccatggcgaacaatatagatcagactccaatacagttaaccaacaagcttacttttatgccaaagacctcgaaatccatcccaaggacacatttgtgttc

SEQ ID NO: 233039 - DNA, 390 bp, Glycine max
ccttcatatgcatttgatatgtaaattgtttcattgtttatgattttgatgaggtatgtcaatttgcagaaacaatatcaaagtttggctcgggcatgtttcttcttgttcaagtcatgctcttgttggattttgttcatggatggaatgacaaatgggttggatatgatgaacaattctggtacattgctctatttgttgtttcccttgtttgttatgtggcaacatttgcattctcaggagttctctttcacttcttcacgccatctggacaagactgtggactcaatgtctttttcattactatgaccatgattcttgcatttgtttttgccatagtggcattgcatcctgcagtaagtttgttatttgattttcattgtagctaac

SEQ ID NO: 233040 - DNA, 254 bp, Glycine max
gtgaagtgaaagcaaatttgaagaaaggtgttggagcaaatgaattgctgtcgcaacttgcagcacatcctgtacctgctcaagaaaagatgagtgctctggttgaagctttgttcgagggaactgagaaaggttttgctaaagaaggctgataaagagaagaactacttttctgttgctgttgcggatgagggatcgcagccgttgttgcttcatgcgattgaagagttttcttgcaagtcgaggtcaaaggc

SEQ ID NO: 233041 - DNA, 390 bp, Glycine max
catacttagaaacagcaactatgtctctcatgcagcttactagctcccctgttggctcactggtccgtttcattgtaatatttgctttatggtacagaaccatggctttggccaagttgccaccaaacgcttcatcagttccagcagttttagcgtttggagattccatcgtggacccaggcaacaacaacaacataaaaacattgatcaagtgcaacttcccaccttatggaaaggattttcagggaggaaacccaacgggtcgattttgcaatggaaaaattccttctgacttaatagttgaacaattgggtattaaggagtatttgcctgcatatttggatccgaatctcaaatctagtgatcttgttaccggcgtctgctttgcct

SEQ ID NO: 233042 - DNA, 392 bp, Glycine max
cggcgacaatggaggtagctgcgaacgcgcggaaccccgccgctaagcgaaaattcgacgacgccgtttctaacggcgtcgccgcccccgccgacgtcgatctctccctcctcgaagccatcgagaagtcgcagaacgcggtcgaagccctcgatctccgagccctaaagaagcacgtgctctccttcgagcgtcgcctgaaggataacatcgaagcgcgccttaaataccctaaccaaccggaccgcttcgccgattccgaagtagaactccacgaagagcttcagaagctgaaggtcctcgccggcgcgccggagctctacccggacctcgtcaacctcaacgtggttccctccatcgtcgacctcctcaaccacgacaacaccgacatc

SEQ ID NO: 233043 - DNA, 303 bp, Glycine max
ctcttgtctcacgatctcaacggagcacctctcttcaggtcgccatctagactgcaatcatggctgatggaccacagcatccatcagttgttcagaagctagctggacagtcttacctgggtgtccaggctaagccccaactttaactctgggaattagtcctcgactggttcttacttcaatggaggactgcactcttctgggttggctgttgtgtcgcctggatctccagttactgtgcatgctccagcagacaggggagtgagtgggtgtcgagtggattttctgatgggtggagtgtct

SEQ ID NO: 233044 - DNA, 310 bp, Glycine max
attctctttgcctgcctagtttcaattctgtccaatttccaaaaccaaaacaagccacacaagttcatggcaactcccaataacaaactctctcttgccatggagagaactgggcaatgggttttctctcaagacataccaactgatgttatagtggaagttggagaaacaactttctctctgcacaagttcatgctagtggcaaaaagcaactacataagaaaactggtattgggatcagatgacagcgaactcaacagaatcgagctctctggacataccaggaggcccttcaatcttcgagaaaacc

SEQ ID NO: 233045 - DNA, 217 bp, Glycine max
attttgataagacgaccctttggtaattggatcttcaagaaagagagacccttgggatttcgtcaccatgagtctcttcggtcttgggaacagaaaccaaaaaacatttcgtccaaaaaagagcgctccatctggaagtaagggtgctcaacttcaaaaacacatagatgccacgttgggtagtgggaacttgagggaggctgttaaactgccccct

SEQ ID NO: 233046 - DNA, 227 bp, Glycine max
cttcaacttccaaagggagaacgtggcaaagcaagtgcctgagcagaacggcctcacacactttgaggctggtgatacacgtgccaaggagtatgtcagcctcctcaaatccaatgaccctgttggattcaacattgttgatgtcttggcttggggctccattggccatgttgttgcttactacatcttgggcagcactggcagtggctatgaccctgcattcgttg

SEQ ID NO: 233047 - DNA, 224 bp, Glycine max
gcaaaaagaaagaatcccaggcgaggagaaagatggaggggaaggagcaggatgtgtcgttgggagcgaacaagttccccgagagacagccgattgggacggcggcgcagagccaagacgacggcgaggactaccaggagccggcgccggcgccgctggttgacccgacggagtgtaggtcatggtcgtttgacagaggagggatagcagagtttgtggccacg

SEQ ID NO: 233048 - DNA, 389 bp, Glycine max
  unsure (1)..(389): unsure at all n locations
gagttctcagtgttagttgatcgtgccactggtggagccagcatcaaagatggtgaggtggaattgatgcttcacaggcgtattctccatgatgatagtcgaggagttggggaaccacttgatgaacaagtttgcgtgaacaataataatacttgcgaaggactaacagtcagaggaaattattatatcagcatccacaagcttggagttggttcacgctggcgtcgtacaactggtcaggaaatttattctccattcttagtggcttttacacatgagatctcggaaaattggaagtcctctcatttgacgaaaggaactatcatggatccaaattacagcttgcctcncaatattgctttgataactcttgaggagttggatggtgg

SEQ ID NO: 233049 - DNA, 390 bp, Glycine max
agcgtctccattttctttcgcgatggccgcgcgagccctgttgaccagaaaaaccctagccaccgttctccgcaacgacgcgaagcccataatcggagctggcatagctgcagctactcattctcgtgggttgcacgtgtacacgctccccgatctggattacgactatggcgctctggagccagccatcagcggcgaaatcatgcagctgcaccaccagaagcaccaccagacttacatcaccaacttcaacaaggccctcgagcagctccaagacgccgtcgccaagaaagattcctccgccgtcgttaagctccagggcgccatcaagttcaacggcggaggtcacgtcaaccattctattttctggaaaaatctagctcctgttcg

SEQ ID NO: 233050 - DNA, 174 bp, Glycine max
atctagcctgtggtgtggccataacaagaagggagagaaaacaaaataatttaaggttgagatgaggaagtgtgagctctgtaacagtcccgcgaagttgttctgcgaatcagatcaagccagcctctgttggaaatgcgatgctaaggttcagaatgcgaacgtccacgtcac

SEQ ID NO: 233051 - DNA, 232 bp, Glycine max
  unsure (1)..(232): unsure at all n locations
gtggcggtggtgccgggcttgaacaactgttgcagcctcatcacttcccatctccaatggaacaacaacaacaacgttccaggtggaaacccagcgtcgaggtggcacccaattgccctcgctgcgccgccaccaacaccaaattctgttactacaacaactacagcttgtcccagccgaagtacttctgcagaggctgcangcgatactggaccaaaggcggctctctccg

SEQ ID NO: 233052 - DNA, 253 bp, Glycine max
aaaaaaacccttagccaacacaaccatcatggccacctctgctattcagcaatcagcattcactggtcaaactgctctgaagcagctcaatgagttcgtccgcaagaccggtggcgccggcaaaggtcgcactaacatgcgccgcaccgtcaggaatgctcctcagagcatttggtatggccctgagcgtcccaagtacgtgggtccattctcggagcagattccatcatggctggccggggaagtccctggt

SEQ ID NO: 233053 - DNA, 195 bp, Glycine max
cattaatggcttcatgggagggacagcagtaattctcatcctccaacaactaaagggtgtatttggcatgagacatttttcaaccagggcgaacttggtggcagtggtgaagagcagagtcaacaatagacacgagattaggtgggagcctaccattcttggcgtgatctttggtgggttcttgcgattgaccag

SEQ ID NO: 233054 - DNA, 389 bp, Glycine max
gttaacaagggcgacgcaccggcattgccagagactcttaaaaattacaacaagctgttgtctcttggcttcaagattgtattcttgtcaggaagatatcttgacaaaatggccgtaacagaagcaaacctaaagaaggctggcttccacacatgggagcagttaattctcaaggatccacatcttatcactccaaatgcactttcatacaaatcagcaatgagagagaatctgttgaggcagggatacagaattgttggaatcattggagaccaatggagcgatctgcttggagaccacagaggcgaaagcaggacctttaagcttcctaatcccatgtactacattgagtagtaccttcacctctctcaacaatctagctagagttt

SEQ ID NO: 233055 - DNA, 390 bp, Glycine max
  unsure (1)..(390): unsure at all n locations
gctacttaccaaggcacactcgaccgataccgtttctttcaccttcaacaagttcaacccagtccaaccaaacattatgctccaaaaagatgctagtatttcatcctctggggtgttacaactcaccaaagttggcagcaacggcgtgcccacctcgggatctctcggtcgtgccctttacgctgccccaatccagatttgggacagcgaaaccggcaaggtagccagctgggctacatcctttaaattcaacattttcgcacccaacaaatcaaactcagctgacgggcttgccttcttcttggcacccgtcgggtctcagccccaatccgacgatggatttcttcgtcttttcaacagtcncttaaaggacaagtctctccaaaccgt

SEQ ID NO: 233056 - DNA, 389 bp, Glycine max
aaggattccaagtggctcctgctgagcttgaagcattgttgattgcccacccaaacatttctgatgctgccgttgtaggcatgaaagatgaagctgcaggggaaattccagttgcatttgttgtaaggtcaaatggttctgagatcgccgaggatgaaatcaagaaatacatttcacaacaggtggttttttacaagagaataggtagagttttcttcacggactctattcctaaagcaccctcaggcaaaattctgcgaaaggtattaactgcaagacttaacgaaggtttggtggtggccaattaggtccataattgtgacagaggaaaatcgtggctgttttacttaccgtaccacaggcccttcctgttgtggtttttgttccaa

SEQ ID NO: 233057 - DNA, 230 bp, Glycine max
ctctggatctcgtctcgatcgatcgatctcgaacatgagcactggggagcttctcaacatcgaacctctcgaactcaagttcccctttgagctgaagaagcagatctcatgttctcttcaattgtcgaagaagaccgagagctatgtgggcgtcaaggtgaaaacaaccaatccggagaagtattgtgttcgtccgaagactgggagtgtcacgccacgatctacgtgtg

SEQ ID NO: 233058 - DNA, 240 bp, Glycine max
gcactagctaagttcacaatttcaaaatggctaggggactaaagaagcatttgaaaaggctcaatgctcctaagcattggatgcttgacaaactgggtggtgcatttgcgcctaaaccctcatctggagcacacagatcgagggagtgccgccccctcattcttattctgcgaaaccggctgaagtatgctctgacatagcgtgaagtcattgcgattctgatgcagcgccatgttcgtg

SEQ ID NO: 233059 - DNA, 303 bp, Glycine max
gtatttgtaggggtatgatgacatcccaaaagagctcccagaccccgaagccaagaagcctgaagattgggatgatgaggaagatggtgagtggacaccccctaccattgccaaccctgagtacaagggcccatggaaggcagacaagatcaagaaccccaactataaaggaaaatggaaggcaccattgattgataacccaggtttcaaggatgaccccgacctctaggttttccccaacttgaagtacgtggggattgaattgtgggaggtggaatcgggtactttgtttggcaatgtctt

SEQ ID NO: 233060 - DNA, 246 bp, Glycine max
agaatttgctaggcaacagggtgtggaggttgtggacaacgagtactttatcacacctgacaacgttggcatgctcaagctggcaaaggaagcaaacacaatcctgtttgattaccgaatcccagcatcggggtacgagacgtgcggatccggtgtggagagtccactgcaaaggagtggactcccaggaagcatgtacgcgcccgaaaccgttgggtgcgtggtggttggacgggagggccggtg

SEQ ID NO: 233061 - DNA, 225 bp, Glycine max
gacctctgtccttaaagctttgtggcaatcacattccaagtggccttaccctacagtggctacgaagactgagtcagataaagttgcagggaatgccattttatatgaatgtgttcagacagtaatgacgattgaggagaatgggggcttagatgtacttgccattaatatcctgggaaggttcttgtcaggccagtgagaacaatatcaggtttagttctgctc

SEQ ID NO: 233062 - DNA, 384 bp, Glycine max
acaatgcaaatcttgaggctgttagacaggaacttaaagaattacacccacatgatccccaaattgttgtcctcaaacacggagtgtggagagtaaaaggcattattcaggtttctagatctataggtgacgtatatttgaaacatgcacagtttaaccgggaaccacttaatgcaaaattcagacttcctgaaccaatgaacatgcccatcttgagtgctaatcccactattctttctcatcctctccaaccaaatgattccttccttatattcgcatctgatggtttatgggagcacttgagtaatgagaaagccgtggatattgtaaacagcaatccacatgcgggtagtgccaagagacttatcaaggctgctctacacg

SEQ ID NO: 233063 - DNA, 389 bp, Glycine max
ctgacctggccagagaaagtcaaatttgcaattgggcttctaccagctatgcttggtggacagccatatgttgaggctcaagatggtctttcagttcaagaatggatgaaaaagcagggcgtacctgagcgagtaactgatgaggtgttcatagcaatgtcgaaggcactaaacttcatcaatcctgatgaactttcaatgcaatgtatattgattgctttaaaccgatttcttcaggagaaacatggttctaagatggcctttttggatggcaatccccctgaaagactttgtatgccgatagttgatcatattcagtccttgggtggtgaagttcatctaaattcgcgcattcaaaaaattgagctaaatgatgatggaacggtgaa

SEQ ID NO: 233064 - DNA, 391 bp, Glycine max
  unsure (1)..(391): unsure at all n locations
catcaattataagcatgggtttgtggaacacaacgaatgcagtgtcttgccgctttcacaagtttggtgatgaccaaaagaatctggtcttccaaggtgatgccacgtcttcttccaggggcatagaactcacaaagttagacggtggaggaaaaccagtgggtggcagtgtggggagagtgttatactcttctccagtgcacctttgggaaagctctacagtggtcgcaagctttgaaaccgacttcaccttttccatctcatcagactctactactccaggtgatggccttgccttcttcattgcaccatttgacactaaaatccctccaaactctggtgggagcaaccttggactcttcncatcagacaatgttgttgctgtcgagtt

SEQ ID NO: 233065 - DNA, 497 bp, Glycine max
  unsure (1)..(497): unsure at all n locations
gcaggctgtggaaggggggtggtgcgcntggcggcttgagtcatgtgtcatatgcaagagatatgacatcgcatgcacgcgtacgtaagctcggaattcggctcgaagtgtttttcatttcatcgtgcattcaatggccaccacagcagctctatccggaaccatggtgagcacctccttcatgaggaggcaacctatgaccaccacaagcctaaagacattccccaacgttggtgaagctctttttggtctgaaaagtggacgaggtgctcgtgtcacttgcatggcctcgtacaaggtgaagctcataaccccaggaggagaagtggagtttgaatgcccagatgatgttttcagtgttgacaagggagaggacgaaggcattggacttccctactcgtgcagggccggttcctgcgtttccggtggtggaaagattgtcgaaggtaacgtggacaggtcagatgggagcttccttggtgaggagcaaggaggga

SEQ ID NO: 233066 - DNA, 343 bp, Glycine max
cctaaacaactctttctcttcttccttcgctcgttgttctccctcgcgtagatcgacaatggcggagacagagacgtttgctttccaggctgagatcaaccagctcctcagtctcagcatcaacaccttctactccaacagggagagtttccttcgtgaactcatcagcaacgcctccgatgctttggacaagattcgagttgagagtttgacagataagagcaagctcgatgctcagccagagttgttcattcatagtagtccagacgagactaagaatacactgaccattgttgacagtggtattgggatgagcaaagctgagttggtgaacaacttgggt

SEQ ID NO: 233067 - DNA, 394 bp, Glycine max
  unsure (1)..(394): unsure at all n locations
ttttgttactaataatcccgaaaggcaatgagaacatcacaaattctgttggttttgctttggttcttctgcatttatgccccttcttcgtttggagcaaatgtcacgtatgaccacagagcattggtcattgatggcaagcgccgagtcttggtatctggttctattcattaccctcgtagcactccagagatgtggccagacctcattcagaaatccaaagatggaggacttgatgtgattgagacttatgttttttggaacttacacgaaccagttagaggccagtataactttgaaggtangggcgatttggtcaaatttgtgaaggtagtagcagcagcaggtctatatgtgcatctccggattggtccatacgcatgtgctgaatgga

SEQ ID NO: 233068 - DNA, 391 bp, Glycine max
gttcaattcccttttgtctgaggtgtgtgcattcttgtttaactcctctttgttcctcagacatcccagaagggaaccaaaaataaaaaataaaaaaataaacacaatcaataaaggggagaaaacaaacatgtcattcacaggaactcttgataaatgcacagcatgtgacaagactgtctatgtggttgacttgttaactcttgaaggaattccttaccataaaaactgcttcaagtgcagtcactgcaagggatgtcttacgatgtgcacatactcctcaatggatggaattctttattgcaagacacattttgaacagcttttcaaggaatctggcaatttcagcaagaacttcgcaaagtcttctgagaagcaaaatgagttgaat

SEQ ID NO: 233069 - DNA, 301 bp, Glycine max
tttgaaaccaaaaatcaactcttttcacaaactctagttatatttacatttagttttcttaatttatggttttgttatgaattggaatgaacttgatttcaggcttcacagaagaaactttcgaacccaatgagggagatagaggtgcagaaactcgtcctcaatatctctggttggcgagagtggagatcgtctcacgagagccgccaaggtgttggaacaagtgagtggccggagcccagtgttttccaaagaggggagagtgttcgtgcctttgggattagaagaaatggagaagatt

SEQ ID NO: 233070 - DNA, 335 bp, Glycine max
cctcgtgccagctggcctccgccggccccgttccggctccaccgccgaacgtgaccccggtgtctgagtacacccagaggaagatttttgtgagcaatgtgaatgctgagattgatcctcagaagctgcttgaagtcttcaagcagtgtggggaggttgaggatggtcctcttggtttggataagagcactgggaaagctaagggttttgcgctttttgtgtgcaagtctgtggagagtgccaggagggctttgggggagcctcagaggagctatgaggggcatactttgtattgtcagaaggctgttgatgggcctaaggggagcggggggtat

SEQ ID NO: 233071 - DNA, 392 bp, Glycine max
ggagatccggctgcgatggacgagagaaagaggaagcggatggagtcgaaccgcgagtccgcacggcgatcgcggatgaagaagcagaagctgctcgaagacctatccgacgtagcgagtcgccttcaaggcgagaacgtgcgcttagcgcagagcataaaggcgaaggaggaagcgtacgttgagatcgaagccgcgaacgacatcctcagagcacagaccatggaactcgccgaccggttaaggtttctgaactccattctcgagatcgccgatgaggtcggcggcggtggtgaatccttcgagattccgcagattccagaccctctcttcatgccctggcagatcccccaccctatgatggcgtcacctgacatgctcctccatggaaa

SEQ ID NO: 233072 - DNA, 396 bp, Glycine max
cacatcttaatccccaaactgaacccacccctcttcgtccggttcactagcgttcgattcgtttctatctctctctctctctgtcatgggttcgctcgaggcaccaaccgccgcgggagcccgacgcgtcgaagcggcgcagatcgtcggtgctcccgttggaggtgggtacgcgcgtcatgtgccgttggagggacaacaagtaccaccccgtcaaagtcatcgaacgccgcaaggttcccaacgccatccccaacgattacgagtattacgtccattacaccgagttcaataggaggcttgatgagtgggtgaagcttgaccagttggatcttaattcagtggaggctgttgttgatgagaaagtggaggacaagggtgcgacagggttgaaga

SEQ ID NO: 233073 - DNA, 376 bp, Glycine max
atcgttttctacataatacaaacctctctaatttttgaagcttattatacccaatctcgatatgcagatcttcgtgaaaaccctaactggcaagacgatcaccttggaggtggagtcctctgacaccatcgacaacgtgaaggccaaaatccaagacaaggagggcattcctccggatcaacagcgtttaatcttcgccggaaaacagctcgaagacggcagaaccctcgccgactacaacatccaaaaggagtccacgctccacctcgtcctccgcctccgcggcggcatgcaaatcttcgtcaaaacccttactggcaaaacaatcacgctagaggtggagtcctccgacacaatcgataacgtgaaagccaag

SEQ ID NO: 233074 - DNA, 416 bp, Glycine max
atgcacgcgtacgtaagctcggaattggctccagcacagcgatgccaaccccagatggaagggtgttagacatgttctttatcactgatgggatggaattgcttcacaccaaaaagaggcaagattatgtatgtgaatatctgatggatgctttaggagagaggtgtatctccagtgaacttcagttggctgggcctgaatacggacatttgcaggggttttcttctcttccaccagcttttgctgaagagttatttagttctgagctgttagacaagttgtctttgcatcctctcagccaagatatgacaacactgaagacacctactgttactgtggataactcactgagcccagttcataccctgcttcagatacaatgcgttgatcagaagggcttgtgttatgacattatg

SEQ ID NO: 233075 - DNA, 384 bp, Glycine max
gattgatggccttaaagctcatgctgagaaacatgtgactgatagaatgatgctcaatgctgctaacattttccccttcaacacaccaaccaccaaagaagcatactactatagaatgatatttgagaggttcttccctcagaactcagccaggctgagtgttcctggaggaccaagtgttgcatgtagcacagccaaagctgttgagtgggatgctgcttggtctaacaaccttgatccatctggtagagcagcacttggagtgcatgcatcagcttatggaaatcaggtcaaagctgtagaaccagagaagatcataccaaagatggaagtttctccactaggagttgccatatagagctagtatgagccatagcaaaaact

SEQ ID NO: 233076 - DNA, 383 bp, Glycine max
ccacaatgctgcgcaagaacaagcttggcaccgttcccgttcacctcaacgtctatgatctcaccccaattaatggctacgcctattggtttggccttggactctaccattctggggttcaagttcatgggctggaatatggatttggtgcgaacgagcacgacacaacggggattttccaagttcaaccgaaacactgccctgggttcaccttcagaaagtcaattttcatcggaacaacagatctgggtgccaaggatgttcgagcattcatggagaagctagctcaagattattctggcaatacctaccatctcatttccaagaattgcaaccatttctgtaacgatgtttgtctcaaattgaccggaaagtcaatccct

SEQ ID NO: 233077 - DNA, 369 bp, Glycine max
caaagtcttcggcatatttgccactgcaagaggcgtgcatccacagggttaagcatgttgaagaagcaggcttagttcctgggttcaaagaggagtttttgatcattggtgagaactcactagatgatagcttggtcttgagtttaaggtctcttcagtttgaccttgcatgggaacgttgtagacagcttcaagctgaagatgtcacagtcaagggtaagattgtgggggtgaacaaaggtggagtggtggctgagttggaacggcttagacggtttgttccattgtctcagagatcaacgaactcacatgtacaagagcttcgtgatacggagcttcctcctagatttgtggaagtggatgaggaac

SEQ ID NO: 233078 - DNA, 382 bp, Glycine max
ccagattgctggggcggaagcacaaccgttgactagtctcaagcttaactctcatattcttcaggagtctactgctaaagagattaatgaaaatcccgaggcaggatgggaggctgctataaatcctcgtttctccaattatacagttgaacaatttaagcgccttcttggagtcaaaccaatgcctaagaaggaacttagaagtacacctgctatatctcacccaaagacgttgaaattgccaaagaattttgatgcgaggacagcttggtcgcagtgtagcactattggaagaattctagatcagggtcactgtggttcttgttgggcatttggtgctgttgaatcattgtcagatcgcttttgcattcattttgatgtt

SEQ ID NO: 233079 - DNA, 390 bp, Glycine max
ctcgagccgcgcaaagcgcaaagcgcagttgttgccccttgaactcgaacgaagttctccgaagtcgaaacacgcgttcgattcgctgaactctgaagttaagttttgttgcgaaaatgtcggtggcgaagaagttgattagatgcgtcatccttgacttggacggcacgctgctcaacacagatggcatcgtaggcaacgttttgaaggttatgttaggtaaatacggaaaggaatgggacggaagagaagctcagaagataattggaacgacgccgtttgaggccgctgctgcggttgtgcaagattatcaacttccctgctccgccagtgaattcctctccgaaatttcgccactcttctctgaccagtggtgcaacattaaagcac

SEQ ID NO: 233080 - DNA, 400 bp, Glycine max
ctccaaaccacatttaactatatataaaaccatcattatgaacatggggtttactctcttctcattctgacccttcttcttcttcttcatctacattagtagttcttgttattcattattcttcatactcacacagcttcttctgggggcaaaaggggtcatttttcagatccgaggttgagctcctctacccatcatgatggagctcggatacctgaatcagggtcagccttctagaggaagaacaccacttgtcactcttccattgttgctttcaacacttgtgttcttctccactttcacacatgccttctcttcttctgtgtttccggaattgaatcctattaaagctaagcactcacgtcttctcaggagtgctgtgcaacgagaaactcctaca

SEQ ID NO: 233081 - DNA, 380 bp, Glycine max
gtcggagaacttgcttgcactatgccgcttattatggaaatatagactgccttaaggtcattctttctgctgctcattccacacctgttgcagattcttggggatttgcaagatttgtcaacataagagatggaaacggtgccacccctctgcatcttgcagctcgccatagatggccggaatgtcttcatgcccttctagacaatggtgctcttgtttgtgcttcaactggtggatatggttaccctggaagcacgccacttcatatggctgcccgtggtggttctttggactgtgtccggatgttgcttgcttggggagcagatagacttcaattagattcttctgggaaaataccattctcagttgccctgaagcac

SEQ ID NO: 233082 - DNA, 381 bp, Glycine max
agcagccactatagtaaacaatcttctctatctaaaatggagtttgttctaaattacctaaatgccactgccattggagttctttctataaccctcttctttttgtttttgtataatcccttcaaatttgcattaggtaaaaaagaggctcccaaagttgcaggtgcatggccaatacttggtcacctaccactattgagtggttcagagacacctgatagggttttgggtgctttggctgataagtatggacccatattcaccatcaactatggtgtcaaaaaggctttggtaatcagcaactgggaaattgctaaggaatgcttcaccaaaaacgacatcgtcgtttcgtctcgccccaagcttcttgccattgaactc

SEQ ID NO: 233083 - DNA, 382 bp, Glycine max
gtctgaatgggcaaagccccaacaggctactgtaccagctgataaaaggtggccaagtgcagaatctaatccttccatttcttattcactggcatcaccgttgcaaatgtcaccccaacatgctaagtccgaagcacaatatatgcctgctggaggtgattttaagaaccttcaacctggagtagccagggaaccattaatcatgatgcagcagccccagactgtaaatgaagagcaagttccagccacaagcatgatctcatcacctcctcaaatagccgctggtcggtatccaactaacagttcagatgctgtcagatctaataatggctttatatctcatgctcctagcactagaagcctcagtccaaactatctcaat

SEQ ID NO: 233084 - DNA, 381 bp, Glycine max
caaagaaggcgtcttcataaacgcctttcttctccgtttccgtttcctcgttcgaattcgctttttgatctgcgaaaatgagagagtgcatctcgatccacattggtcaggctggtatccaggtcggaaatgcttgctgggagctctactgcctcgagcacggcatcgggcccgatgggcaaatgccaagtgacaagacagttggcggtggtgatgatgctttcaatactttcttcagcgagactggtgctggaaagcacgtgccacgtgcagtgtttgtagatcttgagcccactgttattgatgaggtgagaaccggaacttaccgccagcttttccacccagagcagctcatcagcggcaaagaagatgccgccaaca

SEQ ID NO: 233085 - DNA, 376 bp, Glycine max
aattcactttggttccctcgaagtttagcttgcgttacatcggtggatcacataggttttgtttaagtatgagtcaggagctgaaaaaagctgcctctaagggtcatgagaaaatggtaacatcacaagaagagcaggcaaagatcactgaggttagagggttgatagggccactatcagataaggaatctgtgtactgttctgatgcttccatctcaaggtatttaaggtcgcgaaattggaatgtcaagaaggcagctcaaatgttgaaacagagcctaaaatggagaaaagaatacaaacctgaagagattcgctgggaagaggttgctgaggaagcacagacagggatgatgtataaaccaaattatcatga

SEQ ID NO: 233086 - DNA, 409 bp, Glycine max
ctcgagccgcaacaaacatatctcttcctcttctgtccctcaatggaaggatcaggatccggtgtggttacagtctacggcaacggcgccatcaccgagaccaagaagtcccccttctccgtcaaagtcggcctagcccagatgctccgcggcggcgtcatcatggacgtcgtcgacgccgagcaggcccgcatcgcggaggaggccggtgcctgcgcggtgatggccctggagcgtgtccccgccgacatccgggcccagggcggcgtggcccgcatgagcgatccgcagctcatcaaggatatcaagcgggccgtcaccatccccgtgatggccaaggcccgcatcggccacttcgtcgaagcccagattctcgaaaccatcggcatcgactacgtcgacgagagcg

SEQ ID NO: 233087 - DNA, 381 bp, Glycine max
agaagttctaaggaagagggaatatgcagaatacaaggtgctagttgtctatttgcaataacaacatcagcgatccaaccttagtattcttcaacccagagagatttgtaataataaattacaacaacttaaacgatggcaggaggagcttatgtagattcgggaaatgcaaagcaatttgatgggaaggtcacggcattcgtattggttacatgctttgtggcagccatgggaggcttactcttcggttatgatcttggaataaccggaggagtgacttctatggaaccatttctcatcaaattctttcccggtgtttataaacaaatgcaagatgatgttggccatagaagccaatattgcaaatttgacaacgagctc

SEQ ID NO: 233088 - DNA, 374 bp, Glycine max
cagctaccatattaagatagacttgtgcatccataaatttcttcttgttaattgatcacaaattcagagggcgagccctggtgcagcggtaaagttgtgccttggtgacttgttggtcatgggttcgaatccggaaacagcctctttgcatatgcaagggtaaggctgcgtaccacatccctcccccataccttcgcatagcgaagagcctttgggcaatggggtacgaagtttttttttaattgatcacaaattcagtagagccacatggcatcaataatatgtttcccacagttattctttagaatagcctatgatgtttaggtgcaggtttgcaactttctcagacacgatcactacaataagaaactcct

SEQ ID NO: 233089 - DNA, 370 bp, Glycine max
cgacaacatatgcaaattctcgttcggtctcgacccgggctgtctcctaccgaatctcccagtctcaaagctcgccgacgcgtttgacttggcctcgaagctttccgcggaacgcgccatgaacgcgtcgccgtttatttggaaactaagaacgactcctcaacgtaagttccgaaagataactgagagaagcaatcaacgttgtaaacgacgtcgctaatgagatgatcaaacagagaatagaaatggggttcaacacgcggaacgaccttctctcgcggttcacgggatccataaacgacgacgtttatttaagagacattgtggtgagttttctcttagcgggccgtgacaccaacgcctccgggtt

SEQ ID NO: 233090 - DNA, 357 bp, Glycine max
agacaacaaccatctggaatagtaatccaagggggatccattgtgtctgaccctgagttctactcagtgagatttgagaacaaggcttacctagctcgtccatggaagaattactctaggaccattatcatggacacgtacattgatgatttgattgacgctgatgggtatttgccatggcaaggactagagggtccttctggtatggatacttgcttctatgccgagtaccacaacattggccccggttcagacaaatccaagcgtgtgaaatgggctgggatttggaacctcaattcaaaagcagcacgttggttctcaccatctaagttttttcatggaactgattggattgag

SEQ ID NO: 233091 - DNA, 367 bp, Glycine max
aactcagtgaaagagaatccgaggcgaagagaagagaaaaattaagatggaggggaaggagcaggatgtgtcgctgggagcgaacaagttcccggagagacagccgattgggacggcggcgcagagccaagacgacggcaaggactaccaggagccggcgccggcgccactggttgacccgacggagtttacgtcatggtccttttacagagcagggatagcagagtttgtggccacttttctgtttctatacatcactgtcttaaccgtcatgggagtcgccggggctaagtctaagtgcagtaccgttgggattcaaggaatcgcttgggccttcggtggcatgatcttcgccctcgtttactgc

SEQ ID NO: 233092 - DNA, 380 bp, Glycine max
ggaagaaacgtcttctgatcttcgaaactcagcagaagagagcagcagagctgaagtgccagtaactgcaaatgcacaacaaaatgcaggagttgcattgaacgaacggatgttgcagaccactaataggaatacacaaacccaatacaatactacgatggacctgagaaatgtagctgatgattctgcagtagaatcttcaagtggtaccaggagagaaagggatggaggtttagttccagtatggtctccaccagcttccagttactcagaacaatttgtaggagatgaaaatggtataacaagcagttcatcttacttgcaaaggcatcctcaatctcaccaaatgctgaatttggagcagctacctcaaacggggt

SEQ ID NO: 233093 - DNA, 488 bp, Glycine max
cctgactaatgtctcctatagcagacaatgacgacgcatgcacgcgtacgtaagctcggaattccgctcgaaggcggctctcagaaaagccgtgttctttgtaatcgctcaatgcttcaccttttccgcatatgctgcaaggtttgaaatcacaaaccgatgcacatacactgtctgggctgcgtctgtgcctgttggcggtggcgtgcaattaaacccgggccagtcatggtccgtggacgtgcctgcaggaacgaaaggggcccgcgtttgggcccgaaccggctgcaacttcgacggttcgggccgcggtggatgccagaccggtgactgccggggtgtcctcgactgcaaagcttacggtgcgcctcccaacaccctggctgaatacggcctgaacgggttcaacaatttggacttcttcgacatctccctcgtcgacggttttaacgtgcccatggactttagtccaacctccaatggatgca

SEQ ID NO: 233094 - DNA, 363 bp, Glycine max
ctctccgcagcaaccttcttcgccgtttcagctcaagagccaccagcaggtaagatatggttaagcataacaacgttatccccaatgggcacttcaggaaacactggcaaaactatgtgaagacttggtttaatcaaccagcacggaagaccagaaggcgtttagctcggcagaagaaggctgtcaagattttcccaaggcctactgctggacctctcaggccaattgttcatggccagactctgaaatacaacatgaaagtcagatctgggagaggattttctctcgaagagttgaaagctgtgggaattcccaagaaacttggtccaactattgggatttctgttgatcaccggaggaaag

SEQ ID NO: 233095 - DNA, 284 bp, Glycine max
aaccacttgtcgattttcttccacggaatagcggattaggttgaagatagaagatgttaatacggataaagttgcagcacctgtgagggacttcatggaacgggaacagggtaatgagatgaacgtaagagctttggcatggcagacattggcacacgatgctgcatcgagtccacatgggtcttcgtttgtcaacatggacaacgtggatcgtcacgttcttatgaacaaaattgcatacacagtagtgtttacattattacaattctcaatggcatgaattc

SEQ ID NO: 233096 - DNA, 365 bp, Glycine max
  unsure (1)..(365): unsure at all n locations
aaattttcaaagtcgaagcgagaacttgccatttcgagggttttagggttagggttttctcaaattgcaagaacatgggtttcaacattcaaccctatgggattcagtccatgctcaaggaaggccataagcacctttctggcctcgatgaagcggttctcaagaacatcgacgcctgcaaacaactttccactatcactcgaacttccctcggtcccaatgggatgaataagatggttataaatcacttggacaagctttttgtcacgaacgatgctgggacgattgtgaatgaacttgaagttcagcatcctgctgccaaggttttggttttggctgggaaggctcaacaagangagattggg

SEQ ID NO: 233097 - DNA, 392 bp, Glycine max
accccggaattcggtccaagggcttcaaacccggtatccattccgacccgtccgggcctgctcagtaactggatatcgggtacggactgctgcacatggaccggagtagaatgccactataacagcacccgggtccaaagattattcttaacgggtcaaaaacccgaaaccatcttatcgggtaccatctcacccaccctctcaaaactcaaactcctcgatggactctacctcataaacctcatcaacatttcgggtcccttcccaaattttcttttccaacttccaaatctccaatttatctatctagaaaacaacaatctctcgggtcgaatacccgataacatcggtaaccttacccgattagatgtactcagtttaactggtaaccg

SEQ ID NO: 233098 - DNA, 382 bp, Glycine max
ataccgcacaccgtatttggtagacataattcgtgaaaatgtggggcgagtgcttacattggactccattgttgctggaaatgcgtggaaaggcatggacatgctgattttcaactcgtggcattggtggacccacactggaaaatctcaggggtgggattatattagagatggacccaatcttgtgaagaacatggaccgtttggaggcctacaataaaggattaaccacttgggctaattgggttgatcagaatgttgatccctccaaaactaaagtcttctttcaaggcatttctcctacacactatcagggcaaggattggaatcaaccaaaaagaagctgtagtggagagcttcaaccattgtctggatcaacatat

SEQ ID NO: 233099 - DNA, 376 bp, Glycine max
ataacatcctcatcacactagaacgccccgcttggctcattgccgctgctaacctttttgtctttgtccacgttgttggaggctaccaggtgtttgccatgccagtgtttgatatgatcgaaacctgcatggttacaaaattaaattttccaccttctactgcactccgagtaacaactcgcactatttatgttgcggtgacaatgttaattggcatatgtgttccgttctttggctctcttcttggatttcttggaggctttgcgtttgccccgacatcatattttttgccctgtatcatatggcttaagcttaaaaagcccaagaaatttggcttgtcttggacaattaactggatctgcattattcttggggt

SEQ ID NO: 233100 - DNA, 372 bp, Glycine max
gaaactctaacgaaagagcgagaaagcgaagacagccatggcgtcgtttcttcaatcgtttctggatccgaagaagaactggttcgccgctcagcacatgaaatccctctccaaacgcctccgcaaatatgggctccgatacgacgatttgtacgatccttactacgatctggatgtgaaggaggcgctgaatcggcttccgaaagaggtggtggacgctcgccacgcgcgtcttaaacgcgccatcgatctttccatgaagcacgagtacctccctgacaatctgcagtcaatgcaaacaccattcaggggctaccttcaggatatgctgactcttgtgaagagagagagagcagaacgtgaagcattggg

SEQ ID NO: 233101 - DNA, 401 bp, Glycine max
cacaaccaggtccctgaatgctttttagagagagaaagagtaataataataaagtggaagaaaaagaattaggagagtgaaacaagaagaagaagaagaagaagaagaagaagaagaattgagaagatggtgtttgaggaaactgagctgaggctgggactgggactatgtctccctggaaatggaaccacggcaacaactgaagctgctgctgcggaattaggagtgaggaagagagggttctctgagactgaaactgatgaaacagccaccgttgatttgatgcttaacctctcacccaaggaagctgctgctgctgatggtgcagatccacgtgagaagccaaagacttcgccgaaagagaagaccttctgcttcccgattccgccaagcctcctgcc

SEQ ID NO: 233102 - DNA, 383 bp, Glycine max
cacattttggtaatctcttaacatatagaacactaccctgaacatagtaaagaagccagtgctaagatttgttagtgaagcaatggctcaaaccatgttgctcatgtctagtgtctctagcagttattccgtggatttgaagaaagaccttttcctccaattgcagagtcaaagtttaaggcctaagttctctcagctctcattcaacccacttccatcatcaacttcttccttttcttcaccccgtacattcacaactctggacctcttcaaatctaagaccaaagccgctcctgctaagactaaggttacaaagccaaagcaaaaggttgaagatggtatctttggcacttctggaggatttggttttactaagcagaacg

SEQ ID NO: 233103 - DNA, 353 bp, Glycine max
cctcattctcattttccggtttctctctctctctctctctcatggcgaatctagcacacttctccaagagagccctaagaagcgcacacgcgctcgcaaggcaccacgtgcagccgcagctgctggcagcggaacgcgcttttgcgacggaggcggcgaaatcgatatccccgtcggcggatcgcgtgaagtgggactaccgagggcagaggaagataatcccgttagggcagtggctccccaaagtggccgtggatgcttacgtagcacccaacgtggtcctcgccggccaagtcaccgtctgggacggagcctccgtctggcccggttgcgtcctccgcggcgatctcaac

SEQ ID NO: 233104 - DNA, 376 bp, Glycine max
gcctcgaatcattgtcaaggtaacttgtccaaatggtattgttatttactgtagtctttgtgatttgatatttggtttttgttatgggggtggacagagtatagtgttggagaacttgtatgttcagtcaggaaacgatggaactggggtaccaactgatatgttgtcgttgaactcaacggtcagaatattgtacagaaatcctgccactttcttcggcgttcatgtcacttctacccctcttctcattagctattaccagcttgcaattgcctctggccagatgcagaagttctatcaatcgaggaagagtcggcggagtttggctgtagtggtttcaggacaccagattcctctctatggtggcgtgtcagtt

SEQ ID NO: 233105 - DNA, 377 bp, Glycine max
gtgggaaaccaactaaggaataccctttcaaaatggcttcttctgtgtcatccatggtttctaccaccctcctcctaattaccatctgcacactgtcctcacttctgtcagttgcatctgcagcaacagaggagggacgaacaaggccattcaaaagggtctatgcctttggagactctttcacagacactggcaacacccaaaatgcagaaggtccaagtggctttggccatgtttcaaactctccctatggaaccactttctttaaccactccaccaataggtactcagatggtaggcttgtgattgattttgtggctgaagcactttcactgccttacttgcccccctaccgtcatagcaaaggcaatgacact

SEQ ID NO: 233106 - DNA, 371 bp, Glycine max
gtgtattcccagtcactattcacttccctccggattatcctttcaagcctcctaaggttgcctttaggactaaggtgtttcacccgaacatcaatagcaatggtagcatttgtcttgatatcctgaaggagcagtggagccctgcactcaccatctctaaggtactgctttctatctgctcattgctgactgatccaaatcctgatgatccacttgttccggaaatcgctcacatgtacaaaactgaccgggccaagtatgaggccactgcacgcagctggacccagaagtatgccatgggctgatttgtgtttggataatgtatattgaaatggattgcatctatgaaaacctttgtgggtttgcttttc

SEQ ID NO: 233107 - DNA, 467 bp, Glycine max
cgaaatgaatgtacgtgacactatagacgacaatgacgtcgcatgcacgcgtacgttagctcggaattcggctcgaagaaaaacaaaagagtagtggcctttaagtggtgaagaacaagagctcaaatcaaatcgaatcgaaaaaagaaagaaagatcatattcatggcgatggcaagcctggctcgacggaagggttacgccgtcgttttgtcgtcgaggtcgtcgttttgtctgacaagctggaggggattcgcgtccggatctgacgaaaacgacgtcgtcgtcatcggcggcggtcccggcggctacgtggccgccatcaaagccgcgcagctcggtctgaaaaccacttgcatcgaaaagcgtggcactctcggcggtacctgcctcaacgtcggatgcatcccttccaaggcacttctgcattcttcccacatgtatcatgaggctaaacatgcatttgcc

SEQ ID NO: 233108 - DNA, 376 bp, Glycine max
tggttcttcagaatgatattgatttgctgaatcctccagctgagttggagaagagaaagcacaaactcaagcgtcttgttcagtcaccaaactctttcttcatggatgttaagtgccatggatgcttcaacataacaactgtgtttagccactctcaaactgttgtggtgtgcggaaactgccagactgttttgtgccaaccaacagggggacgggcgaggttaaccgaaggttgctcatttaggaagaagggagattgaatggtttgttaaacatacttttctttgtcaatgatttgacattttcggttgttaggtttttgagatggaatcaatttcagttatggtatactaattttgttaaattgtaagacaat

SEQ ID NO: 233109 - DNA, 373 bp, Glycine max
gtgaaaacagctgaggcaattgagaggattctgactcacaataggaaaggcatcaatttcacaattctgtcaaaccctgagtttcttgctgagggtacagcaattgcagacctgtttaagccggatcgagtcctcatcggaggcagggaaaccccagagggtcaaaaggctattcattctctgaagagtgtttatgcccattgggttcctgaggacagaatcctttgcaccaatttgtggtctgctgaactctcaaagcttgcagccaatgctttcctggcccagaggatctcctctgtgaatgccatgtcggcgctttgcgaggcaactggtgctgatgtctcccaggtgtcacactcaatcgggacagact

SEQ ID NO: 233110 - DNA, 299 bp, Glycine max
gagagagaggagcggaggagagaaaatgacgacgaggttcaagaagaacaggaagaagagaggccacgtcagcgccggtcacggtcgtatcgggaagcaccgcaagcatcccggtggtcggggtaacgccggtggcatgcaccaacaaccgcatcctcttcgacagttacaatccgggttccttcgaaaaggtggttatccccaacttcaacaacttcggcacaaattctaatggcccaaccttcacaatgattagctaagggcccccctaacccaagaaggccaaggacaaggccacc

SEQ ID NO: 233111 - DNA, 411 bp, Glycine max
tcggaatattccctttcttcgttttgaatcactggacggcatggccacttccaatggcttcgtcgacggcacttctccggaatccgcattgatctttctcggcagcggttgttcgagcatggttcccaacgtcatgtgcctccttcagccttctgaccctccctgccccgtctgcgtccagtcattgtctatccctcccgaacgaaaccctaattacaggtcctcttttctcttctttcatttcttttctctttcaagaaatttcctcaagatctcgatttgcaggtgcaatacgtctctcttaattgattactgcggcgacgccaacgctggtgatcgtaagtatatattgatcgacgtcggcaagaccttcagggagaccgtgcttaggtggttcgttgcccatcggat

SEQ ID NO: 233112 - DNA, 363 bp, Glycine max
caccagatcaacaacagcaccaccctcgtctcctccatgttccaggccaccggctcagcctccggcaccgccggctacgtcaacatcaccaacctcaaggccggcaaggtcggcttcgccgccgaagacaacgacggctccctccactccttctacgtcaaatccgtccaggaaatgccctactacatctccgtcctccaaatcagcgccgccataagctccgccgacgccgaggcccccaccgccgcaccctccgccatcgatctgatctccattatgtccaaacaaggctgcaaggcattcgcggaccttttaagaggctccaaagcgcttccggctttcaaggaaaacgttgacgggggc

SEQ ID NO: 233113 - DNA, 312 bp, Glycine max
gttgtggaaaatgtgcctacaaatagctccctgaaagcacatccacgctttcaagccgagaacttagacaagaacaagaatatatatgaacgaattgaaggccttgctaagaagcatcaggccactcctgcccagttggcattagcatgggtacttcagcaaggcgaggatgttgtacctatccctggaacaactaagattaagaacctggatcaaaacataggtgccttagcagtgaaactgtcagaaaaagacctgagagaaatttctgaggcggttcccattggtgatgtaccaggtggtagatactac

SEQ ID NO: 233114 - DNA, 478 bp, Glycine max
  unsure (1)..(478): unsure at all n locations
aggttggatggggctcgcgaatgaattagtggcctatagccgacaatgacgtagcatgcacgcgtacgttaactcgggattcggctcgagccgagttcaaccattaacaagagctaattatcttgcttctcctcctcttgttgttgcctatgcccttgctggcacagtggacattgactttgacactgaacccattgggatagggaaggatggcacaaagatcttcttcagggatatttggccatccagtgaagaaatagcaaatgttgtacaatcaagtgtgctgcctgctatgtttagggacacatataatgcgatcacccaagggaatcccatgtggaataatttatctgttccaactggcactctttatgcttgggaccctacatcaacttatattcatgagccaccttattttagagatatgagcatgtctcccccaggctctcatggagtgaaagatgcttactgtttgctn

SEQ ID NO: 233115 - DNA, 346 bp, Glycine max
gtgatttcagtgagtgatcggtgttcacttgatctcatcataatcgtcagcgtcaattgaagaagatgccgatcagaaacatcgccgtcggaaggcctgaagaggcgactcaccccgacacgttgaaggcggctttggctgagttcatctcaaccttcatcttcgtgttcgccggctcaggctccggcatcgcctacaacaagctcaccgacaacggcgctgccacccctgccggcctcatctccgcctccatcgcccatgcattcgccctcttcgtcgccgtctccgtcggcgccaagatctccggcggccacgtcaaccccgccgtcaccttcggcgccttcgt

SEQ ID NO: 233116 - DNA, 364 bp, Glycine max
gccagctttgccctcggatggctcatcaccaatggtgcaggtcttgcatcatacccaattgacactgttagaagaagaatgatgatgacctctggtgaagctgtcaagtacaagagttccttggacgcattcacacagatcctcaagaatgagggcgccaagtccttgttcaagggtgccggtgctaacatcctccgtgccgttgctggtgctggtgtgcttgctggttacgacaagttgcaggttcttgtgttcggcaagaagtatggttctggtggtgcttaatttcagtgctgagtcagtgttattattattgttttttagatggcgatgataaaaaccgttctgagtttcaagagttttt

SEQ ID NO: 233117 - DNA, 379 bp, Glycine max
tgcaaacacacaaccctctcctctcctaatccataaaaactatctttcatttggcctcgagtagaagagaaagatgagtgtagaaattttggatggtgccaccattgtcaacttccttcaggatgaagaagcattcagtgcctcagttcttaaccggttcgcctaccttgacacagacaatgatggccttctctcgtatgcggagatgttgaaggagctccaaagcttgagggtgttggaaacgcactttggtattgatgtggagccagacccagatgagcttgctcgtgtttatgaatccttgttcgtacaattcgatcacaacttgaatggcaccattgatctcgacgaattcaagaaggaaacgaagcagatgatg

SEQ ID NO: 233118 - DNA, 359 bp, Glycine max
ccgagattccgtgagttgcaaaaatgaagacgattctttccaccgagaccatgaacatcccggacggcgtgagcatcaaagttcatgccaaggtcatcgaagttgagggcccccgcggaaaattggtgcgagacttcaagcatttgaatctcgattttcagctcattactgacgaaaacggtaaaagaaagctgaaaatcgacgcgtggtttggttctcggaaaacatccgccgccattcgcaccgccttgagccacgtggagaatcttatcaccggcgtcaccaagggctaccgctacaaaatgaggttcgtttatgcccattttcccatcaacgcaagcatcggcaacagcaacaag

SEQ ID NO: 233119 - DNA, 409 bp, Glycine max
  unsure (1)..(409): unsure at all n locations
atttccaaactcggggttcttctttaacttctggctctactgtcgcaacaacaaatcttcaaggagttcactctaatgatagaaggtttgcctctcattcttttcctgcaagccaagacagagcacagccatcagaacaatcgttctctgattctctgcgttccagatttaatgcagtatccacgagatacaaagaatcaatttcgaagggcacaaggggatggaaagagaggctgttctctcccaattcttctatgtcagaacttggttcagaagttaagagagaattgaatgccaaaattgctagcgtgtcncgattgatggagcgccttgaaacaacaagagaaaataatagggctgcaggaacttctttatcaaatccaaatcatttggtgaactgttccattgc

SEQ ID NO: 233120 - DNA, 409 bp, Glycine max
cctgtttccatttcctctcacaaaaatcacttattatgaacacacgaaaagacatggaccggctcaaaggcccatggagcccggaggaggacgaggctctgcagaagctggtggagaaacacgggcccaggaactggtccctcatcagcaagtccatcccgggccgctccggcaagtcctgcaggctccgctggtgcaaccagctgtccccccaggtggagcaccgggccttcacccacgaagaggacgacaccattatccgggcccatgcccgcttcggcaacaagtgggccaccatagcccgcctcctccacggcagaactgacaacgccatcaaaaaccactggaactctcacttgaaacgcacgtgcacttcaaccatgattgacgacgacaacactccccggct

SEQ ID NO: 233121 - DNA, 412 bp, Glycine max
  unsure (1)..(412): unsure at all n locations
aattacccttcccaattttcaccaaaacctaatactcccacaccaatcttcgatcatggacgccgattcacaacctcaacaactcgaagagagaacagaggagcaagaactgaagtacctggaattcgtgcaattcgcgaccatacaggctctgatgcgctgcgccatcctctactcatacgccaaggagcgcgcgggtcctctgaagcccggtgtcgacaccgtggaggaggccgtgaagaccgtcgtggctccggtctacgataggttccaccttgtccccggcgaggtcctcaaatacgcggatcggaaggttgccgagttagacagccacgttccctccaacgtgaagaacgtctcctcncaggcctgctccgtcgtctctgaagtccgccgcgatggcgtctccgcc

SEQ ID NO: 233122 - DNA, 344 bp, Glycine max
gggaggagtgtgtaaacctgagagaagtcaagtcattacgaaaaatgaatcacccaaatattgtgaagctgaaagaagttattcgagaaagtgatatcttgtactttgtttttgagtacatggaatgcaacctataccaactcatgaaagacagggaaaaactattttctgaagctgaagttagaaattggtgttttcaagtttttcaacgtcttgcttacatggcacagcgtggatacttccatcgtgacctgaagctgaaaactttcgggttacagggattcatcaaaatcgctgatttggactaacccgagaaatagttcacaaccaccctacactgagta

SEQ ID NO: 233123 - DNA, 367 bp, Glycine max
gttctctcacacactcactctccttctctctcctattgcggctagggtttgggtttttcactttcagcctctccattccttcaaccttcttcttctctttgatctctgatggagacgttccgtgtttagtagcaagggttagttgaggccttgtgtttggaaacgtacggtgtcgttttggagttgggaaaacaaataattctgagagatggcaaccacgaacccttttgatttgttgggtgacgacgctgaggacccttctcagctcatcgccgccgagcaactcaaggcggcggctgctgctgcggctgccaccgccgctcccaagaaggcgccggctcagcagatcaagccggctcagctccct

SEQ ID NO: 233124 - DNA, 376 bp, Glycine max
ccctccaccaccaacgtcgcatcctccaccttaccaccatgtgagccctccaccaccttctccatctcctcctccaccataccattacacatcaccacctcctccttccccagctcccgctcccaagtacatttacaaatcacctccacctccagtttacatatatgcttccccacctccagctatctacaagtaagttcgaattgcggaagcaccattcacgataaatcatgttctagtttttatcgaggaataaaggcaagctctatttggagtcaagtgaaacatctatcttcctgtccaagttctttgaataaaagtctgaatgtgtcatctctgcactaaaataattgtgattctgaccaagttgggtcca

SEQ ID NO: 233125 - DNA, 371 bp, Glycine max
caagctcctacattctctctccaggttgggaattagtgcctttggtgatcatcatgttccttcttagaaggcaaacccagaataaccaggagaatgattcctcatatcaagatacaaaggtggctgaactcaagacaggtcttgggcccctctctggtcgtcgattaaagtattgcacagatgcatgtctaaggagatatttagaagcaagaaactggaatgttgataaagctaagaaaatgctggaggaaacactcaagtggagggcaacttataagccagaggaaatccgttgggctgaaatagcacatgagggtgaaacaggcaaagtctccagagctaacttccatgatcgacttgggaagactgtg

SEQ ID NO: 233126 - DNA, 410 bp, Glycine max
gcttgataggaagactggcagcaacttacttcagtggcctgttgctgagatcgagagtttgagattgagaagtgatgaatttaaaaatttgaaggctaaaccagggtcagtggtgtcagtagatattgaaacagccacgcagttggacattgttgccgagtttgagatagacaaggaaacccttgacaaaattcctcaatccaacgaggaatacacgtgcagcaccagtggtggatctaaacaacgtggtgccttaggaccttttggtcttttggctttggcagatgaggggctttctgagtatactcctcagtacttttatgtcattaaagggagcaatggaaatcttaagacttccttttgtgctgatcaatcaaggtcttctcaagcaaatgatgttcgcaagcaaa

SEQ ID NO: 233127 - DNA, 371 bp, Glycine max
ataagacaaagcacaaagcaaagctcatccttgagttaaaaaatggcagcagcttcttccatggctctctcatccccatccttggctggcaaggccgtgaagctgggcccatcagccccagaagtgggaagggtgagcatgaggaagaccgtcaccaagcaggtctcctcaggaagcccatggtacggcccagaccgagtcaagtacttgggcccattctctggcgagcccccgtcctacctaaccggtgagttcccaggcgactacggctgggacactgctgggctttccgcagacccagaaaccttcgccaagaaccgtgaactcgaagtgatccactccacgtgggccatgctcggagccttgggctg

SEQ ID NO: 233128 - DNA, 413 bp, Glycine max
caaattagttcattctctttgcgcagttccctacctctcctttcaagatgcagatcttcgtcaagaccctcaccggaaagaccatcacccttgaggtggaaagctctgacaccatcgacaacgtcaaggccaagatccaggacaaggaaggaattcccccggatcagcaacgtctcatcttcgccggaaagcagctcgaggacggccgtaccctcgccgactacaacatccagaaggagtcaacccttcaccttgtccttcgtctccgtggtggcatgcagatcttcgtcaagactctcactggcaaaaccataaccctagaggtcgaaagctctgacaccattgacaacgtcaaggccaagattcaggacaaggaaggaaatcccccaagacaagaaaggtctcatcttcgc

SEQ ID NO: 233129 - DNA, 355 bp, Glycine max
gtcacacctcccagatatacgccatcaggcagagcatagccaaggctctcgtcgcttactaccagaagtacgtcgacgagcagtccaagaaggagatcaaggacatcctcgtcaggtacgaccgcaccctcctcgtcgccgatccccgccgctgcgagcccaagaagttcggtggtcgcggtgctcgcgccaggtttcagaagtcctaccgttgatttcctcctttttttttaagctattcatcataagttgttaaagtactttctctgttttattggttctgcgctgagttaagactaatcgaattctgaatacagttatacaatggttaacgttaagttatgtcgttattaac

SEQ ID NO: 233130 - DNA, 361 bp, Glycine max
gtgtctgcggaggacaaaaccactggacagaagaacaagattacaattaccaacgacaagggcaggctttctaaggaggagattgagaagatggtgcaggaagctgagaaatacaagtctgaggacgaggagcataagaagaaagtggaggccaaaaatgcattggaaaattatgcctataacatgaggaacacaatcaaggatgacaagattgcttccaaactgtcttctgatgataagaagaaaattgaagatgcgattgagcaggctatccaatggctagatggaaaccaacttgctgaggctgacgaatttgaggataagatgaaggagttggagagcatttgtaatcccatcatag

SEQ ID NO: 233131 - DNA, 355 bp, Glycine max
ggcggctataggttctctcaatgttccacgttctgcttcttcccgttcatcctttgtgggaagaaaaagcgttccacgcagcctttccttctctgcatcacaactttgtggagacaagattcccacagattcagttttattggcaccaaaaataggtcgcagtccagttatcgttactcctaaagcagtttctgattcccaaaactcacaaacgtgccttgatcccgatgctagcagaagtgtgcttggcattatacttggaggtggtgctgggactcggctttatccactcaccaagaagagggcaaagccagctgttcctcttggagctaactataggcttagtgatattcct

SEQ ID NO: 233132 - DNA, 379 bp, Glycine max
cttgaatgaatatgcttattatgctcaggttgctggtttatattacagcataagtcacacagatggtggtttcgaggtgactctccgtggttacaatcacaaattaaggattctacttgaaactatagttgaaaagattgcgacatttgaagtgaaaactgacaggttttcagttatcaaggaaatggtaaccaaagaataccagaatttcaagtaccaacaaccttatcaacaggctatgtactattgttctttgatcttacaagatcaaacctggccttggatagaacagctagacgtacttcctgctcttcaagttgaagatcttgctaaatttgtaccagcaatgctctccaggacctttttagagttttatata

SEQ ID NO: 233133 - DNA, 414 bp, Glycine max
  unsure (1)..(414): unsure at all n locations
gtttgttgatcgagataactagaaacagtgtgatgaaaatgaaggtccttgttttcttcgttgctacaattttggtagcatggcaatgccatgcgtacgatatgttccctctccgaatgaacactggctatggtgcccgtactccggaggtgaaatgcgcaagttggaggcttgctgtggaagcacacaacatctttggctttgagaccattcctgaagagtgcgttgaagcaacaaaggaatacatccatggcgaacaatatagatcagactccaaaacagttaaccaacaagcttacttttatgccagagacctcgaagtccatcccaaggacacatttgtgttcagtatagatggcaccgtactctctaatattcatactacanaaaacatggatatggggtggagaaatt

SEQ ID NO: 233134 - DNA, 313 bp, Glycine max
aaatgctcccacgtttgatcacattgacagcaatgcgacacacaaggtcttaaatgaatgtgtggaagctgagaactggctcagggagaaacaacagcatcaggactcgcttccaaaatatgccacccctgtacttttgtcagctgacgtatgaccgaacgctgaagctgtggacaggttttgtaagctacctatgacgacaccaagtgccactgcgatccaagccagctacaccagaagcaccagcaaccccagctcctcacggtggtgagcagtagcaccaactacctcaaggagaatcctaatgccagta

SEQ ID NO: 233135 - DNA, 368 bp, Glycine max
gttgatccacaagtcgttacagcgctcgcaacttgtcatggacgcagcaacgggtgttggagtttgtgtcttcctattaatttcttacatggcgttcttaatcaaacgggctacagcaggttctgctcgcaagccaccggcagcatccggtggctggcctttgatcggtcatcttcacctcttgggtggctccggtcagcctctttacgaaaccctaggaacgttagcagacatgtatggcccaatattcagcatccgaattggtgttcaccctgccgttgtggtgagctcttgggagttagcaaaagagtgtttcaccactcttgacgtcactgtctcctctcgtcccaaattcagcgccgcaaaaa

SEQ ID NO: 233136 - DNA, 378 bp, Glycine max
aaggacagcaccttttttgagagctgtggtgtagctgaccttatcacaacatgcttgggtggaagaaataggaaagttgctgaggcttatgcaaggaatggagggaagaggtcttttgatgagcttgaagcagaaatgctacaaggccagaaattgcagggtgtctcaactgcgagtgaggtttatgaggttctaagccatcgtgggtggctagagttgttccctctcttctcaacagtgcatgagataagcactggcctacttccaccatcggccatagttgaatacagtgagaagctacccaggtccttctaattcaaagcatatttgttgtataagaaaatataaattatagtgacagtatcaaggatatacaaa

SEQ ID NO: 233137 - DNA, 370 bp, Glycine max
gcaattacgtactgtgtgggagagaaagagagatggctaagtggtgtatgttggtgttggttcttgctctagctctggctgtggccacaagtgccagagatgcactcgaagatgttggtctcaaggaccagaagaacttcatcagctatgctggagttggtggctattcaggaattggaagcaatggactaccttttggaggtgccggaataggtggtggcaccaccgggataggtggattgggaggattcggaggtcccattggcggtggtactggtggcagtgttggacgtggcgttggcggtggtagcatacctcatcgcaccccttgagtgaatgaacatgcatgcatgcatgcatatggaatttc

SEQ ID NO: 233138 - DNA, 371 bp, Glycine max
gattggtgaggtaaacttgaattgaagtgaagaaggagatggctgcaacctcttccttgtgctcatcgaccctccaatcccagatcaatggattcttccttcacaaaacctctctttcccatactccttccctcactttctccaggaggaaaatttcaaccacagtgaaggctacatctcgagtcgacaagttttcaaaaagcgatatcattgtctctccgtccattctttctgcaaacttttcagaattgggagagcaggtgaaagcagtggaattggctggttgtgattggattcacgttgatgtaatggatggtcgctttgttccaaatattacaattggacctcttgtggttgatgcattgcgccct

SEQ ID NO: 233139 - DNA, 378 bp, Glycine max
caaagcagaaagcaaagctcatccttgagttaaaaaatggcagcagcttcttccatggctctctcatccccatccttggctggcaaggccgtgaagctgggcccatcagccccagaagtgggaagggtgagcatgaggaagaccgtcaccaagcaggtctcctcaggaagcccatggtacggcccagaccgagtcaagtacttgggcccattctctggcgagcccccgtcctacctaaccggtgagttcccaggcgactacggctgggacactgctgggctttccgcagacccagaaaccttcgccaagaaccgtgaactcgaagtgatccactccaggtgggccatgctcggagccttgggctgcgttctccccgaa

SEQ ID NO: 233140 - DNA, 357 bp, Glycine max
gaagggtcgtagaattgagctgaaaacaaggcctgatacccctgatattagtaacctgcaaaaatgtgctgattttgcccatgctttcatgctgggttttgatgtcatagatgccattgctcttttgcgtttggatgagctctacattgagtcctttgagatcaaggatgttaaaacacttcgaggcgatcacttgtctcgtgctattggaaggttatctggtaaaggtggtaaaacaaagttcgccattgagaatgcatcaaagacaaggattgtgattgctgacaccaaaattcacatattgggatctttttccaacataaagattgccagagactctctctgtagcctgatcct

SEQ ID NO: 233141 - DNA, 156 bp, Glycine max
cgagataactagaaacagtgtgatgaaaatgaaggtccttgttttcgtcggtgctacaattttggtagcatggcaatgccatgcgtacgatatgttcgctctccgactgcacactggctatcgtgctcgtactccggaggtgaaatgcgcaagttg

SEQ ID NO: 233142 - DNA, 374 bp, Glycine max
aagaaaaaaaaaaacccttagccaacacaactatcatggccacctctgctattcagcaatcagcattcactggtcaaactgctctgaagcagctcaatgagttcgtccgcaagaccggtggcgccggcacaggtcgcactaacatgcgccgcaccgtcaagagtgctcctcagagcatttggtatggccctgaccgtcccaagtacttgggtccattctcggagcagattccatcatacctgaccggagaattccctggtgactacggctgggacactgctggattatcagctgacccggaaaccttcgccaggaaccgggaactggaggtgattcacaacagatgggcaaagcttggtgcccttggctgcacc

SEQ ID NO: 233143 - DNA, 375 bp, Glycine max
aaaacactcataacacaaagcacaaagcaaagctcatccttgagttaaaaaatggcagcagcttcttccatggctctctcatccccatccttggctggcaaggccgtgaagctgggcccatcagccccagaagtgggaagggtgagcatgaggaagaccgtcaccaagcaggtctcctcaggaagcccatggtacggcccagaccgagtcaagtacttgggcccattctctggcgagcccccgtcctacctaaccggtgagttcccaggcgactacggctgggacactgctgggctttccgcagacccagaaaccttcgccaagaaccgtgaactcgaagtgatccactccaggtgggccatgctcggagccttg

SEQ ID NO: 233144 - DNA, 391 bp, Glycine max
gtcgaacccctaatggcttctcaagttcttcttcaacaggcactgtttgcccccaagctaagtttcccttcttcttctcgtaacgtcgcgttaatttctagggttccttccaccccaatttcatggcgttgcactcctctcattgctaagcctagtttcgctgtgagagctgactccaacgtcgaaggcgctggtgaagccaccgaggatgttccttcgtataatgttgatgaagtttcggaaggcgaacgagaacaagtttcggattctgaagctccaaaatctcgcagaaaagcccgagtcaagctcggagacgtcatggggatactgaatcagagggcaattgaggcatccgagaagcaaaggcgaactccagacattaggactgggg

SEQ ID NO: 233145 - DNA, 368 bp, Glycine max
ctagtctaagcagaaatggcctcttcagtgatggcatctgtggccctcaaacctgcccctttcactgttgagaagtcctcagttagaggccttccctccctctcaaggaactcctcttcattcagagttgtggccactggtggcaagaagatcaagactgacaagccttatggaattaatggtggcatggctttgagggaaggagttgatgcatctggcaggaaaggaaagggaaaaggcgtttaccactttgtagacaaatacggtgctaatgtcgatggttacagtcctatctacgacaccaaggactggtctccaaccggtgatgtctacgctggcggtacgactggcttgggtatctgggctgt

SEQ ID NO: 233146 - DNA, 400 bp, Glycine max
ctttcaactctctctctccccccctctttctctcacacacaaatgtctaaaataacaataacctctccaaaacactgtgctgacaaagaaggactaaaaatcaagaactacaagaagatctacttcactttctcagcatttttcatcacaatcctactactaatacttgttatatggctcatcctccaccctgcaaagcctcaattctccctcaaagaagtcgacatcttccaacttaacctttcaggcccaaacctcaactcctccatccaactcaccctcctctccaaaaacccaaaccagaaagttggcatttactacgacgagattcaactctatgcaacctacaagggccaacagattactggtgatacccctgtgccacccttttatcaaggcc

SEQ ID NO: 233147 - DNA, 392 bp, Glycine max
ggttgatgtatgcaatcggtgggagctcagggccaacaattctgagccaaggaaaccgtttcattgctccgaacaacgacaacgccaaggagatcactcacagggactacgccggacccgatgtgtggaagaattggcagtggcaatcagaaatggaccttttcatgaatggtgcaaagttcgtcacttcaggctcacccatcaagatgacatacaaaaagggtctcatcatgaagccaagagatggaactcatgtcagcaggttgacacgacatgctggtgccctaaactgcttcgttggcaagccttgttagagaacaacaaacattaatgttgttgttgttgttcgctttttcctttttttttttggcaagaaaaagaaaaccacattg

SEQ ID NO: 233148 - DNA, 396 bp, Glycine max
aaatgatcccaagtttgatcacattgacatcaatgagaaacaaaaggtcttaaatgaatgtgtggaagctgagaactggctcagggagaaaaaacagcatcaggactcgcttccaaaatatgccacccctgtacttttgtcagctgacgtaagaaagaaagctgaagctgtggacaggttttgtaagccaattatgacgaaaccaaagccactgccacccaagccagctacaccagaagcaccagcaaccccacctcctcagggtggtgagcagcagcaacaaccacctcaggagaatcctaatgccagtactaatgaaaatgctggggacaatgctaatccagccccgccaccagcatctgctgaagcaatggagactgacaaaccagagaacac

SEQ ID NO: 233149 - DNA, 365 bp, Glycine max
gtccattattggcacgaagctagcagcagaggagaagaatcagaatttagaaggcatggctgaaggaagaagcgaagaagacaaagacgacagaaccatgaagcgccttcttctcacgagaaactgtctcttactcaccatcggcacctccggtgggcccctcgtcatgcgtctctacttcctccacggcggccaccgcgtctggctctccagcttcctcgaaaccgctggcttccccctcatgctcctccccctcgccgtctcctacctccgccgacgtcgcaccgcctccgccgccggaatcgccaaaccgaaattaatctcaatgaagcctcctctcctcgccgcctccagcttcatcggaa

SEQ ID NO: 233150 - DNA, 322 bp, Glycine max
tcttaagaatcctgttgtcacagagattgcagagagattggggaagataccagcacaagttgcccttcgatggggcttgcaagcaggtcatagtgtgcttcctaagagcactaatgagtccagaatcaagggaaattttgatatctttgactggtctattcctcaagatttgatgaccacgatctctgaaattaagcaggaaaggctacttaaggccagtttttttgttcacgagacctatggtgcctataggagcattgaagacttctgggatggtgaactctgagcaatatgcatctttgagacgttgaaaaatacattg

SEQ ID NO: 233151 - DNA, 389 bp, Glycine max
ctcgagtccaaagtctcctcctacccaaaatggatgcaagggcatcatcttcttcagcttcctcgattcttttccttgcagcaattgtagctgcttatttctagtcatcagaagcagctgtgtccaaaggatcttttgaggacaatttcagcataatgtggtctgaggaccattttactacctctaaagatggacagatctggtatctctcactagacaaagacacaggatgtggatttcaaacaaaacaacgctacagatttgggtggttcagtatgaagctgaagttggtagcaggtgactctgctggtgttgtgacagcttattataggtgctcagaaaatggtgcggggacagaaagagatgagcttgattttgagtttttgggg

SEQ ID NO: 233152 - DNA, 380 bp, Glycine max
taatccctctttcttcctcttcctcagtagtgcgattttcgattcacttctctgcaactatgcctaaccctaaggtcttcttcgacatgaccatcggcggtcaacctgccggccgcatcgtgatggagctctacgccgacgtgactccgagcaccgccgagaacttccgcgcgctctgcaccggcgagaagggcgccgggcggagcggcaagcccctccactacaaaggctcgtccttccaccgcgtgatcccgaacttcatgtgccagggcggcgacttcagcgccggaaacggcaccggaggcgagtcgatctatggcgccaacttcgccgacgagaacttcgtgaagaagcacactggtcccggcattttctccaag

SEQ ID NO: 233153 - DNA, 385 bp, Glycine max
caaattagttcaatctctttgcgcagttccctacctctcctttcaagatgcagatcttcgtcaagaccctcaccggaaagaccatcacccttgaggtggaaagctctgacaccatcgacaacgtcaaggccaagatccaggacaaggaaggaattcccccggatcagcaacgtctcatcttcgccggaaagcagctcgaggaccggcgtaacctcgccgactacaacatccagaatgagtcaaaccttcaccgtgtccttcgtcaccgtggaggcatgcaaatcgtcgtcaagacgcccactggcaaaaccataaccctagacgtccaaagctctgacaccattgacaacgtcaaggccagaatcaggacaagagggaatccccc

SEQ ID NO: 233154 - DNA, 251 bp, Glycine max
gtcacacctcccagatctacgccatcaggcagagcatacccaaggctctcgtcgcttacgaccagaagtacgtcgacgagcagtccaagaaggagatcaaggacatcctcgtcaggtacgaccgcaccctcctcgtcgccgatccccgccgctgcgagcccaagaagttcggtggtcgcggtgctcgcgccaggttccagaagtcctaccgttgatttcagccgtttttcttaagcgattcatcagaagtt

SEQ ID NO: 233155 - DNA, 176 bp, Glycine max
gtgtctgcggacgacaaaaccactggacagaagaacaagattacgcttaccaaccacaatggcaggctttctaaggaggacattgagaacatggtgcacgaagctgagacatacaggtctgaggacgacgagcatacgaagaaagtggaagccaaaaatccattggaaaattatgc

SEQ ID NO: 233156 - DNA, 383 bp, Glycine max
ggcggctataggttctctcaatgttccacgttctgcttcttcccgttcatcctttgtgggaagaaaaagcgttccacgcagcctttccttctctgcatcacaactttgtggagacaagattcccacagattcagttttattggcaccaaaaataggtcgcagtccagttatcgttactcctaaagcagtttctgattcccaaaactcacaaacgtgccttgatcccgatgctagcagaagtgtgcttggcattatacttggaggtggtgctgggactcggctttatccactcaccaagaagagggcaaagccagctgttcctcttggagctaactataggcttattgatattcctgttagcaactgcttgaatagcaatgtct

SEQ ID NO: 233157 - DNA, 371 bp, Glycine max
tcctgaacgacaccgagaccagacacggtttggggcacagttaaggtggtagcagtagcattgttaggccatatctcctttttttctctgccttgtattgaggtaaaactcacaaatattataactttgatctggggaagcaatggcatggagaggacatctttcgaaaaacataaaagaacttcggtttttgatgtgccagtcatctcctgcaagctcacctgcaagggcttttgtggagaggaattataaggaactaaagacattgaacccaaaattgccaatattaattcgtgagtgcagtggaattgaacctcaattatgggcaagatatgatttgggtgttgagaaaggcatcaaattggaaagct

SEQ ID NO: 233158 - DNA, 375 bp, Glycine max
ctcgagccgaatcggctcgagggaagaagacttgatcttgataaactatattgcaaatcacggtgaaggtgtttggaactccttagccaaagcttctggtctcaaacgaacgggaaagagttgtcgactccgttggctaaactaccttcgtcctgatgttagaagaggaaacattacacccgaggaagagcttttgatcatagaacttcatgcaaagtggggcaataggtggtccaaaattgcaaagcatcttccaggaagaactgacaatgagattaagaacttctggagaacaaggatccaacagcacattaagcaagctgagacttcacaagaacatggtaattcagagaataatgatcatcaagcaagcac

SEQ ID NO: 233159 - DNA, 365 bp, Glycine max
ggatgaagaagattcagagggaagaactgctttgcattttgcctgtggatatggcgaggtaaaatgtgctcaagttctcctcgaggctggagcaaaagtggatgctttggataagaataagaacactgctctccattatgcagctggttatggcagaaaggaatgtgtggcccttctccttgaaaatggtgctgcagttactctccagaatatggatggtaaaactccaatcgatgttgcgaagctaaacaatcaaaatgaagtcctaaagctacttgagaaagatgcttttctgtagttgtaatgcatgatgccatgctgttaccaacaagcaaagggggaaactgaagggaagaaggcatggt

SEQ ID NO: 233160 - DNA, 387 bp, Glycine max
cttgaatgaatatgcttattatgctcaggttgctggtttatattacagcataagtcacacagatggtggtttcgaggtgactctccgtggttacaatcacaaattaaggattctacttgaaactatagttgaaaagattgcgacatttgaagtgaaaactgacaggttttcagttatcaaggaaatggtaaccaaagaataccagaatttcaagtaccaacaaccttatcaacaggctatgtactattgttctttgatcttacaagatcaaacctggccttggatagaacagctagacgtacttcctgctcttcaagttgaagatcttgctaaatttgtaccagcaatgctctccaggacctttttagagttttacataccagggaa

SEQ ID NO: 233161 - DNA, 382 bp, Glycine max
gtttgttgatcgagataactagaaacagtgtgatgaaaatgaaggtccttgttttcttcgttgctacaattttggtagcatggcaatgccatgcgtacgatatgttccctctccgaatgaacactggctatggtgcccgtactccggaggtgaaatgcgcaagttggaggcttgctgtggaagcacacaacatctttggctttgagaccattcctgaagagtgcgttgaagcaacaaaggaatacatccatggcgaacaatatagatcagactccaaaacagttaaccaacaagcttacttttatgccagagacctcgaagtccatcccaaggacacatttgtgttcagtatagatggcaccgtactctctaatattccata

SEQ ID NO: 233162 - DNA, 388 bp, Glycine max
tcgagacactgcaaatcttgatgctgttagacaggaacttaaagaattacacccacatgatccccaaattgttgtcctcaaacacggagtgtggagagtaaaaggcattattcaggtttctagatctataggtgacgtatatttgaaacatgcacagtttaaccgggaaccacttaatgcaaaattcagacttcctgaaccaatgaacatgcccatcttgagtgctaatcccactattctttctcatcctctccaaccaaatgattccttccttataatcgcatctgatggtttatgggagcacttgagtaatgagaaagccgtggatattgtaaacagcaatccacatgcgggtagtgccaagagacttatcaaggctgctctacag

SEQ ID NO: 233163 - DNA, 331 bp, Glycine max
ctaaatacaattaactaaaccaacaaacgcaaactcaattcctggtttattcgaaggcacgaaagcatacagaacagaatatgggggcttgctactcttccgtccagaagaaaatgccattcgcatgaagactggtgcccaacgaatgtgcatggcatcgccttccattgatcattttgttgatgctttcaagcaaactgtcgtggctaatatgcgttgggttcctccaccgggcaaaggactcttgtaccttaggcctctgctcctaggacctggtccggttttgggtttggctcctgcatctgaacacaccttcctcagagttgcttcc

SEQ ID NO: 233164 - DNA, 380 bp, Glycine max
cactctcattttccggtttcactcttctaaaatggcgaatctagcacgcttctccaagagagccctaagaagcgcacacgcgctagcaaggccccacgtgcagcctcagctgctgacagcagaacgcgctttttcgacggatgcgccgacatcgattaccccgtcggcggatcgcgtgaagtgggactaccgtgggcagaggaagataatcccgttggggcagtggctccccaaagttgccgtggatgcttacgtggcacccaacgtggtcctcgccggccaagtcaccgtctgggacggagcctccgtctggcccggttgcgtcctccgcggcgatctcaacaagatcagcatcggattcggctccaacgtccaggaac

SEQ ID NO: 233165 - DNA, 305 bp, Glycine max
gttgagataagtggtactgcttcacaaatacaggctgcccaacagctagtacagagctgcatataggagttcattccaagtatcaggtagtcctggtaggcaccaatggctgcaatcattaccggtgtgatccactccatagacagaaggatgtgcatcttttcttagttgtgacagaagtgttatgtcaagtagataaacttgattcttcatgttcttcaacactttgttcactatgtttgctgctggaggtagacctgctggatatgttgacccagctaatggttcaagttccccactacaac

SEQ ID NO: 233166 - DNA, 383 bp, Glycine max
ctcgagccgattcggctcgagcatctatctctcctctatccttcgtgcccacagtcaataatgtctcttccaactccatcgctcccccttctccgttgcatccattttcacgattccaatccattaaaaatagaaagccaaaaccccatcatattcctagaatcacatgcagtggaaaccaaaacaatccaacaccaaacgctaattcccagggagaacctccagatattgtcggacataggaggaacgttctacttggcctaggagggctttgtggtgctgttactcttaacaacaacaagccttttgcctttgcagctccaatatctcctcctgacctaaacacgtgcggtcgaccagacctacccgcacgtggtaaaccc

SEQ ID NO: 233167 - DNA, 180 bp, Glycine max
agaacactagggaaactgcctttgcaatcaggaagttgcccttggttaaagctaacaggtacttggaagatgttcttgcgcacaagcaggccattccgttcagacgtttctgtcgtggtgttggaaggacaactcaggcacagactcgcagctctactggccagcgacggtggcctgtcc

SEQ ID NO: 233168 - DNA, 345 bp, Glycine max
ggcactgctgcaagtgcaactccaagaagcggagtgcgaagccagcatgtttcaacattcaagagaagcctttttccttccacttttctctttggaattggttcttctgcttaccaggcagaaggagcagcaagtgtagatgggagaggaccaagcatatgggacacctacactagacagcatactgaaaagatttgggatcatagcaccggtgacatgggagctgatttttaacatcgatacaagggtgacataaagataacgaaagaaattgggccggactccttcagattctctatcccatggtcaagaatatttccaaagggcaagggagcagttaacccc

SEQ ID NO: 233169 - DNA, 339 bp, Glycine max
gttgatccacaagtcgttacagcgctcgcaacttgtcatggacgcagcaacgggtgttggagtttgtgtcttcctattaatttcttacatggcgttcttaatcaaacgggctacagcaggttctgctcgcaagccaccggcagcatccggtggctggcctttgatcggtcatcttcacctcttgggtggctccggtcagcctctttacgaaaccctaggaacgttagcagacatgtatggcccaatattcatcatcctaattggtgttcaccctgccgttgtggtgagctcttgggagttatcaaaacagtgtttcaccactcctgacgtcaatgtctc

SEQ ID NO: 233170 - DNA, 374 bp, Glycine max
gcagatcaatctctctctctctctcaaccataatagtcatgggtttgaaggaggattttgagcagtatgctgagaaagcaaagactttgccaccgactcaatcaaacgaagacttgcttatcctttatggattgtacaaacaggccaccgttggacctgtcaacaccagccgtcctggaatgttcaacatgagggacagagctaaatgggatgcatggaaggctgttgaagggaaatccaaggacgaagcaatgggtgattacatcattaaggtgaaacagctgctggaagcagctggcttgcctgcttgataacattgtcatgccttgctttctgattctgtgctagaagttcacaacagtttgggaataaac

SEQ ID NO: 233171 - DNA, 403 bp, Glycine max
gccatgttgactctgggaagtcaaccaccactggccacttgatttacaagcttggaggtattgacaagcgtgttattgagaggtttgagaaagaagctgctgagatgaacaagaggtcattcaaatacgcctgggtgcttgacaagcttaaggctgagcgtgagagaggaattaccattgatattgcattatggaagtttgagaccaccaaatactactgcactgttattgatgctccaggacatcgtgatttcatcaagaacatgattactggaacttcccaggctgattgtgctgtccttatcattgattcgacaactggtggttttgaagctggtatttccaaagatggacagactcgcgagcatgctctacttgccttcacccttggtgtcaagcaaat

SEQ ID NO: 233172 - DNA, 475 bp, Glycine max
ttgcactgccgtgcctatagaagagatatgacgtcggatgcacgcgtacgtaaactcggtattcggctcgagacctcatgttcttagagcatcacatatagaccaccaagtgggatcagcaccagttgttacagcctcaccctgggatagacaacattctttcttgggagagtcacctgatgcttctggttttagattgggttctgttggaagtccaggctttaatggtagctggcagttgcatcctcctgcttctcacaatatgtttcctcatgttggtgggaatggtacagaattgacgtcaaatgctgggcagggctctcctaagcagttgtcacatgttttccctgggaaacttcccatgactttggtttctaaatttgatacgaccaatgaacgactgagaaacctctattcccgtagaagtgaaccaaacactaagaagaatgctgataacacatactatgaacgtgag

SEQ ID NO: 233173 - DNA, 379 bp, Glycine max
gattggtgaggtaaacttgaattgaagtgaagaaggagatggctgcaacctcttccttgtgctcatcgaccctccaatcccagatcaatggattcttccttcacaaaacctctctttcccatactccttccctcactttctccaggaggaaaatttcaaccacagtgaaggctacatctcgagtcgacaagttttcaaaaagcgatatcattgtctctccgtccattctttctgcaaacttttcaaaattgggagagcaggtgaaagcagtggaattggctggttgtgattggattcacgttgatgtaatggatggtcgctttgttccaaatattacaattggacctcttgtggttgatgcattgcgccctgtgacaga

SEQ ID NO: 233174 - DNA, 392 bp, Glycine max
aaaacacacaaacctcttcagttcacaaaccacacaacctcttctaatattcgttttctgatctacgcaaggttaaggttaatttgcttctatctacatggacattaacgagatcgatgttccttcattctttctctgccccatttcgttagaaatcatgaaggatccagtgacggtctcaacaggcatcacctacgaccgtgaaagcatcgaaacatggctgttctcgaagaaaaacacgacatgccccatgaccaaacagcccttgatagattacaccgatctcacaccaaactacacccttcggagactcatccaagcgtggtgtaccatgaacacttctcacggcatcgaaaggatcccaacccccaaaccccccattaacacaaatc

SEQ ID NO: 233175 - DNA, 364 bp, Glycine max
gaaatttaagtgaggagctagagaatgatgatgaagtctgctatgtgtgcagtggtggttgtagcacttcttcttctggcggaggtggggcccatggctgaggctgtgacatgcaccccaacagagttgagtccgtgtcttccagcaatcacttccggtgctaaaccttccaatgcttgttgcacgaagctgaagcagcaaaaaccatgcttatgtggctacctcaaaaacgctagcttgaagcagtatgttaactctcctaatgcgcggaaaaaccgttgcttcttgtgggattccctttccaacttggtaattaattaagccttcttataaataaagtgtgggatataaatatatatataga

SEQ ID NO: 233176 - DNA, 270 bp, Glycine max
agggtttgtaactttgtcttttgcttgcgaatctgaatcgaataataatcaatcaatcatcatgtcgtcggcgaagaagatcacactgaagagttcggacggcgaggctttcgaggtggacgaggcggtggcgctggagtctcagacgataaagcacatgatcgaggacgactgcgccgacagcggcatccctcggccgaacgtgacaagcaggatcctgccaaaggtgttcaattacggcaggaaccacttcaaggccgcaaatccgga

SEQ ID NO: 233177 - DNA, 383 bp, Glycine max
gattgaacagatgcagatcttcgtgaaaactttgaccggtaagaccatcacccttgaggtggagtcctccgacaccatcgataacgtgaaagctaagattcaagacaaggaagggatcccacctgaccagcagagacttatctttgcgggtaaacagcttgaggatggtcgaacccttgccgactacaacatccaaaaggaatccactctccacctcgtgcttcgcctcaggggtggcatgcaaatctttgtcaagactttgactggcaagaccatcaccctcgaagtcgaatcctccgacaccaatgataatgtcaagggcaagattcaagacaaggaaggtatccctccagattagcaccgggtgatactttgcgggaaac

SEQ ID NO: 233178 - DNA, 297 bp, Glycine max
gatttccttctctctttcatcaatcaacacaaactaagttcttccttctgttgaaagcgatagcaatggccacgaatccaatcgaagcggggaacggcgacgctgctcccaaccctaacgcgactaccaaatcctccgtgtacctgcaagactcggaggagctgaagcgagtcttcagccgcttcgacgccaacggcgacggcaagatctccgtctcggagttggacaacgtcctccgctccctcggatccggcgtcccgccggaagagctccaacgtgttatgggaagacctttga

SEQ ID NO: 233179 - DNA, 387 bp, Glycine max
caaagcacaaagcaaagctcatccttgagttaaaaaatggcagcagcttcttccatggctctctcatccccatccttggctggcaaggccgtgaagctgggcccatcagccccagaagtgggaagggtgagcatgaggaagaccgtcaccaagcaggtctcctcaggaagcccatggtacggcccagaccgagtcaagtacttgggcccattctctggcgagcccccgtcctacctaaccggtgagttcccaggcgactacggctgggacactgctgggctttccgcagacccagaaaccttcgccaagaaccgtgaactcgaagtgatccactccaggtgggccatgctcggagccttgggctgcgtcttcccggagttgctgtcc

SEQ ID NO: 233180 - DNA, 381 bp, Glycine max
gaagggtcgtagaattgagctgaaaacaaggcctgatacccctgatattagtaacctgcaaaaatgtgctgattttgcccatgctttcatgctgggttttgatgtcatagatgccattgctcttttgcgtttggatgagctctacattgagtcctttgagatcaaggatgttaaaacacttcgaggcgatcacttgtctcgtgctattggaaggttatctggtaaaggtggtaaaacaaagttcgccattgagaatgcatcaaagacaaggattgtgattgctgacaccaaaattcacatattgggatctttttccaacataaagattgccagagactctctctgtagcctgatcctgggatctccggcaggaaaggtgta

SEQ ID NO: 233181 - DNA, 376 bp, Glycine max
cgagataactagaaacagtgtgatgaaaatgaaggtccttgttttcttcgttgctacaattttggtagcatggcaatgccatgcgtacgatatgttccctctccgaatgaacactggctatggtgcccgtactccggaggtgaaatgcgcaagttggaggcttgctgtggaagcacacaacatctttggctttgagaccattcctgaagagtgcgttgaagcaacaaaggaatacatccatggcgaacaatatagatcagactccaaaacagttaaccaacaagcttacttttatgccagagacctcgaagtccatcccaaggacacatttgtgttcagtatacatggcaccgtactctctaatattccatactac

SEQ ID NO: 233182 - DNA, 388 bp, Glycine max
attcagcaagtgcgttttggaagcagagaccgaaatacttcgagatggcccgtacaaagcaaactgctcgtaagtcaactggaggaaaagctcccaggaagcagcttgcaaccaaggctgcacgtaagtctgcaccaacaactggtggtgtgaagaagcctcatcgttatcgccctggaactgttgctcttcgtgagattaggaaataccagaagagcactgagctcctaatcaggaagcttcctttccagaggttggttcgtgaaattgcccaggatttcaagactgatctgcgtttccagagccatgctgtgcttgcattgcaagaggcggctgaggcataccttggtgggctctttgaggacactaacttgtgtgccattcacgc

SEQ ID NO: 233183 - DNA, 393 bp, Glycine max
ctcaagggagcctgacaatccaactaagtcttgcaaggctagaggcgccgaccttagggttcatttgaagaacacaagggaaactgcctttgcaatcaggaagttgcccttggtcaaggctaaaaggtacttggaagatgttcttgcccacaagcaggcaattccattcagacgtttttgtcgaggtgttggaaggacagcccaggctaagaatagacactctaatggccaaggacggtggcctgtcaagtcagcaaaattcattcatgatttgctcaaaaatgctgagagcaatgctgaagtgaaaggtttggatgttgatgcactgtacatttcgcatatccaagtcaatcaagcagagaagcaaagacgccgaacataccgagcccatgg

SEQ ID NO: 233184 - DNA, 180 bp, Glycine max
gcaaagatggggaacacggagaagctgatgaaccagatcatggaattgaagttcacgtcgaaatcgctgcagcggcaatcgcgtaagtgcgagaaggaggagaaatcggagaagctgaaggtgaagaaggcgatcgagaacggctgcatggatggagggcggatctacgcggagaaggcg

SEQ ID NO: 233185 - DNA, 368 bp, Glycine max
atttgcagaactttgtttcccaacctccattgcctccgcttctacctcgctaccatgatcattcctgagaagaaccgcaaggagatctgcaaatacctcttccaagagggagtttgctttgcgaagaaggacttcactttggcgaagcaccctgagattgacgtgccgaatctgcaggtgattaagctgatgcagagtttcaagtctcgcgagtatgtgagggagacttttgcttggatgcactattactggttcctcaccaacgatggaatcgagtttctcagaacttaccttaaccttccttccgaaattgtccctgctactttgaagaaacaggccaagccacctggcacgccctttggcggccc

SEQ ID NO: 233186 - DNA, 300 bp, Glycine max
gaaatttaagtgaggagctagagaatgatgatgaagtccgctaagtgtgcagtggtggttgtaccacatcttcttctggcggaggtcgggcccatggctgaggctgtgacatgcagcccaacaaagttgagtctgtgtcttccaacactcacttccggtgctataccttccaatgcgtgtagcacgaagctgaagcatcacaaatcatgcgtatatggctacctcaaaaacgctagcttgaagcagtacgtcaactctcctaatgcccgaagcaccgttgcctcctctgggattcccttt

SEQ ID NO: 233187 - DNA, 389 bp, Glycine max
gagagagaacttcaagtgagggtgagagtgacacaaatctagagagagcactagtactctaaaagtctattatattcttcaaaatatgaccatgcatcgcgagtcttgggcttttgtcttcggcgttatgggcaacatcatctcctttggagtgttccttgctccattgccaaccttttaccaaatctacaagaagaaatccactgaaggtttccagtcacttccttatgttgttgcactgttcagtgcaatgctttggatttactatgctttcgtgaaaagggaaactgccctccttctcattaccattaacacatttggaattgttgtggagtcaatttacctttctatcttcctaatttatgccccaaggaagccaaggcttacaa

SEQ ID NO: 233188 - DNA, 287 bp, Glycine max
caagggcaatggacagtggaggacactacaacccccgcaccgtcgaagaggttttccgggacttcaagggccgccgggctggcatgatcaaagccctcaccactgatgttgaggaattttaccagcagtgtgatcctgaaaaggagactttatgtctgtatggattccccactgaagaatgggaagtcaatttgcctgctgaagaagttcccccagaacttcccgagccagcagtgggcataaactttgctagggatgggatgccagacaaggactggcgatcttta

SEQ ID NO: 233189 - DNA, 230 bp, Glycine max
gaacgaattctggtccagcaaggacatgagaccttcatatcaagttgttttcttgggcaacactccaccgttggcggagataaaggcgaaaaggacttctctggggttgccattgatcttgctagtaatgacaatgcagtcatagatgttgcaattttctcagtagcaattggtggtgtgccaatcgggtcaagtcaacattctcactggggtgcatcgttcttgacacg

SEQ ID NO: 233190 - DNA, 345 bp, Glycine max
aaaaacttgtcgtttaagttttaactctaaaccatggctcttcccctgttcctcctctgcttcatgctctgcatttcactcacacaccaaacgattatgttacccctaacacactcaatttcgaaaacccatttcaacagtacccatcagcttctcaaatctacctccactcgctcagcctcacgcttccaccgccaaactcatcataactccgtagtcgctctcccactttcttcaggaagcgactacaccctttccttcaacttaggctcacacccttctcagtccataaccctttacatggacacaggcaccgagcctcgtgtggttcccatgcgcttcctt

SEQ ID NO: 233191 - DNA, 370 bp, Glycine max
gaagcattgtgtcagaccccacgtactacccagttagattcgacaacaaagcttacttggcacgtccatggaagaatttctcaaggaccatcttcatggactcctacattggtgatttgatcacacctgatggttacatgccatggcaaacattggagggttttagtggaatggatacttgtttctacgctgagttcagtaaccgtggccctggttcagacaaatgcaagcgtgtgaagtgggaaggagttaagacccttgattcacatggaatcacatacttctggccacccatgtttctccatggagacgactggattagggtcaccaggattcattactagcctggccaggtcttgcactcgctctg

SEQ ID NO: 233192 - DNA, 369 bp, Glycine max
atcaaatcaaagtcattcacctaaaccctatggccgacgaagccaaagccaaaggcaacgcagccttctcctccggcgactaccccgccgcaattcaccacttctccgacgccatcgccttggcccccaccaaccacgtcctctattccaatcgatccgccgcatacgcttctctccaaaactacaccgatgccttagccgatgctaagaagaccgttgaactcaagcccgactggtccaagggctacagccgtctcggcgctgcgcatcttggcctttcccaatacggcgacgccgtttccgcttacgaaaagggactcaaaatcgaccctaataacgagcccctcaggctggtctggccgatgcgca

SEQ ID NO: 233193 - DNA, 317 bp, Glycine max
ggcaaagcaatggcatcgtcactacaagcagcagctactttcatgcaacccaccaagtttttgcagctaaagtctactcaggccatatctaaggcttttggtttggaacctgctggagttaataaggtcacatgctcccttcaggctgatcttaaggacttggctcacaagtgtgttgatgctaccaaaattgcaggctttgcccttgccacctctgctctcgttgtttctggggcaagtgctgaatgagtaccaaagcggctaacctttgacgaaatccagagcaagacctacgtggaagttaaagggacaggaac

SEQ ID NO: 233194 - DNA, 268 bp, Glycine max
ctcgagccgagaagaacaagtcgttgagaaggaagaaggagacgcaaatggcttcctcaatgatcgcttccccagctgtgaccagtgtcaagcgtgccggtgccggcatggttgctccattcagtggcctcaagtccatggctggcttccccaccagaaagaccacgactgacattagctccagtgccagcaacggtggaagagtgcaatgcatgcaagtgtggccgccagttggcaagacgaactttgagacgccgtcctacgctgc

SEQ ID NO: 233195 - DNA, 280 bp, Glycine max
ggaccagctgtgatcttcaacaccgacaaagcctgggacgaccaatggacttactgggttggaccgtgtgttggagctgcggtggctgcatgccatcatcattacattcttaaagctgctgcactcacagctctccaatcattcatgaccacggcttcattaagtgtctcgactaccgagactagtatctgatctcctgcgtatgacatgcgatgcgcacagtgtcagcacacgactcggaattcctgccgtgccagctgctctcaccactcgtccattc

SEQ ID NO: 233196 - DNA, 298 bp, Glycine max
aatcacagccaagcctcccatgggacttgctcacatagttaagaaggcaattgaaaagggtaggtttgaagagattcttgaccctgtggtcactgattggccagtggaagaggctctatcatttgccaaattaccattgaagtgctcagaactcagcacgaaggataggccaaaccttgcaacagttgtgttgccagagcttaataggttcagcgaacttgaattgacctttacacaatgatgaagttttttacagtagtgaaggtatgatcaatacctatgccgcttgccctcccac

SEQ ID NO: 233197 - DNA, 183 bp, Glycine max
ggctgttcaatacaaaatccctgattatgttcacatatctcaagattgtagacacctcctctctcgtatatttgttgcaaatccgttgaggagaattactattaaggaaattaagaatcacccatggtttttgaggaatcttccaagggagctaactgaatcagctcaagctgtctctctggt

SEQ ID NO: 233198 - DNA, 232 bp, Glycine max
gtttcttacaaggctctactctactgcttcaccttctgctctagaaaattcagtggtgatatatggcttcggcgactctctctgtagccagagcagcccttcaggcaaatgggaaaggcttctctgaattctctggcctccgcagctcaacaggcttccttcccttttccagaacatcttcagaggatttccattccgtcattgccttccagatgtatgcagttggaagcag

SEQ ID NO: 233199 - DNA, 276 bp, Glycine max
ggagtgggtgaggagaatcgagatgatgcagctgcggccgaagattttggcggcggtggagagtgcgtggcggcgggttccgccgtggagggaggcgttttacggcgccggaatgaggccggtgcagttaagccagtttgcggattttcaagcagagtgcctgttagcgaactcgcaaagcacagggagttcacgtggcacaacgccagaccgaactggtgcttttctggcatgatagggccattggttgccacgtcagcatggcgctgtgacaac

SEQ ID NO: 233200 - DNA, 330 bp, Glycine max
ttttcaacaccctctatgaacctttccgagaaggtgcagattttgttcgcggttaccccttcagtctccgggaaggtgtaccaactgcagtttctcatggtctttggctcaacatcccagattacgatgctcctactcagcttgtgaagccacttgagaggaacactaggtatgtggatgctattttgaccataccaaagggcactttgtttcccatgtgtggaatgaacttggcctttgatcgcgatctcataggagcagcactgtactttggtcccatgggtgatggtcagcctattggacgctacgacgacatgtgggcacgctggt

SEQ ID NO: 233201 - DNA, 214 bp, Glycine max
gaagttgttctgcatagagtggaagaaccagcggaagctagctatattcagtccagaggacaattcatggaaaatggtaccagttccgttgacaggaagctcaagcattgattttcgaattgggatactagatgacaagttgttgctattccctctggaagctgaaactgcatttcaaacattgctgtacgatccaaatgcaactctggggtca

SEQ ID NO: 233202 - DNA, 392 bp, Glycine max
gctgcttctcctatggcaagccaactcaagtccaccttcactaaaactcttgtagctcccaagggcctctctgcctcttcaccactccacctcctgccttctaagaggcaatttagcttcactgttagggccatccaatcagaaaagccaacctatcaagtgattcaaccaatcaacggtgatcccttcattggaagccttgaaaccccagttacatccagccccttgattgcatggtacttatcgaacctccccgccatcaggaacgcaattaagcccactactaacagggatcgaggtgggcctggcccatggctaccttctggtggggccattcgtgaaggccgggcctctgaggaacacccagatcgccgggcaagcaggctctctcg

SEQ ID NO: 233203 - DNA, 266 bp, Glycine max
cgaggtagactatgaaaagattgtccgcgacacatgccgcgaaattggattcatctctgatgatgttggtcttgatgctgacaaatgcaaggtgttggtcaacattgagcaacagagcccggatatcgcccagggtgtgcacggccacttcaccaagcgcccagaggaggttggtgctggtgaccaaggtcaaatgtttgggtatgccagcgatgaaactctcgactacatgaccctcacccatgtccttgccaggaaacttggtg

SEQ ID NO: 233204 - DNA, 463 bp, Glycine max
ttaataatcaggtgacatatagaagagcaatgacgtcgcatgcacgcgtacgtaagctcggaattcggctcgagggcaataacaggtctgtgatgcccttagatgttctgggccgcacgcgcgctacactgatgtattcaacgagtccatacccttggccgacaggtccggttaatctttaaaattcaaccttaatggggaaagatcattgcaatggttggccttcaccaaggaatcccaattaagcccaattcataagcccccgtttactagttccctgccctttgtacaaaccgcccgtcgctctaaccgaatgaatggtccggtaaattttccggattgcggcaactttaccggttcgctgcccgcgactttgtgagaattccactgaaccttaccatttacaggaaggaaaattcttaacaaggtttccgtaggacctgcggaaggatcattgtcgatg

SEQ ID NO: 233205 - DNA, 323 bp, Glycine max
caagtagttgagaactaagaagaaggaaatggcttcctcaatgatctcctccccagctgttaccaccgtcaaccgtgccggtgccggcatggttgctccattcaccggcctcaaatccatggctggcttccccacgaggaagaccaacaatgacattacctccattgctagcaacggtggaagagtacaatgcatgcaggtgtggccaccacttggcaagaagaagttcgagactctttcctacttgccagacctcgatgatgcccacttggcaaaggaagtcgaataccttctaaggaaaggatggattccctgcttggaat

SEQ ID NO: 233206 - DNA, 320 bp, Glycine max
cttcgtctcaaatctcttcgttccttcgattcgttccatttcttccaaaatggccaaagacccagttcgcgttctcgtcactggagctgcagggcaaattgggtatgctcttgtccctatgattgctaggggagtgatgttgggtcctgaccagcccgtgatcctccacatgcttgacattcctccggcagcagagtcattgaatggggttaaaatggaattggtggatgctgcattccctcttcttaaaggtgttgttgccacaactgatgtggttgaggcatgcactggggtcaatagtgccgtgatggttggtggat

SEQ ID NO: 233207 - DNA, 222 bp, Glycine max
actcaactttgtaattcgtggagggaatacttttccattacgcacgcactttaattacagacgagaaaattataattaatagtaatacagacagcagcatgcgcccaccggttattctcaaaactaccacctctcttttggattcttcctcttcttcaacaccctgtgatcgcagactcaacactctcgctagacacttcctttccgcaaatggcttctcac

SEQ ID NO: 233208 - DNA, 315 bp, Glycine max
  unsure (1)..(315): unsure at all n locations
cgcgtacgtaaactcggaattcngctcgagctcttctttattccttttgtaatttcattcattcttaatctttgtgaaaaataatgttcatcgagaattttaaggttgagtgtcctaatgtgaagtacaccgagactgagattcagtccgtgtacaactacgaaaccaccgaacttgttcacgagaacaggaatggcacctatcagtggattgtcaaacccacatctgtcaaatacgaatttaaaaccaacatccatgttcctaaattacgggtaatgcctgttggttggggtggaaacaacgggcccaaccctc

SEQ ID NO: 233209 - DNA, 267 bp, Glycine max
ggagggtgccaatctggtaaagttgtcgatcataattataaggttattggtgttgaagctttgagggtaattgatggatccacttttcatggctcaccgggtacaaatcctcaagctactgtaatgatgcttggaaggtatatgggagaaaagattataaaggaagattcttccataggcggaagtgaagggatcaattgagttcatactttccgttgttccatatttgtgttgttcttcgcaataattctctcacgaatcacaatt

SEQ ID NO: 233210 - DNA, 331 bp, Glycine max
gagttattgacagcatatgactcgcaacgtagggagttgccaccaccagtaattgtgtgggaatggggatggaccaaaagtgctgaaacttggaatggaagagcagctatgcttgctgtgcttcttctgttgtttttagaagtcaccactggtgaagggtttctgcaccagtggggaatattgcccttgtttaggtgagtgagtcctcagctaccctccatggcaatggaatttagttatgcttgtatatgtataccattagcatcatatgcgccttgacggaacgcattcaggagttctcacatgtagtttagacacagtaatttgtgga

SEQ ID NO: 233211 - DNA, 253 bp, Glycine max
caaattagttcattctctttgcgcagttccctacctctcctttcaagatgcagatcttcgtcaagaccctcaccggaaagaccatcacccttgaggtggaaagctctgacaccatcgacaacgtcaaggccaagatccacgacaaggactgaattcccccggagtagcaacgtcgcatcttccccggaaaccacctcaaggacggccgtaccctcgccgacagcagcgtcagaagggattcacccctgcacct

SEQ ID NO: 233212 - DNA, 336 bp, Glycine max
cgtgagtcaaacttgcagaaagagctgaaccgatacattcccacggccgcagcatttggaggcatctgtatcggtgctctgacagtgttggcagacttcatgggggccatcggttcaggaaccggaatattgcttgcagtaacaatcatctatcagtactttgagacatttgagaaggagagagctagtgagcttggcttcttcggtttctaagttctgccaagcaaataatgttggttggtgactccaacgagctctcccacaccccttgtttgagggatcgttatacttgtatgtcgtttaacatcgtccgggaggacattcctagttcgttgt

SEQ ID NO: 233213 - DNA, 384 bp, Glycine max
gttttctgtagcttcaggaattaccttcagtttttatcacttttcttgcatggagcatgggggaggtcattagatattcacattatgctttcggttgtttgggaaattgtccttcttggatgacctatctcaggtacactgcgtttattgtgctgtatcctttgggagtgggtcctggtgaaatatgggctctgtaccaggctcttccagttatactggagaagaatctctatgcagattccttttcaagcctcccatttagttattctgatttccttaaggtataagtaatcaataacccataatctctaacggatctggtacttgacatcacttatttatgggttttttgcttctcctaatgattcggccatttgattccgg

SEQ ID NO: 233214 - DNA, 278 bp, Glycine max
gggttcacgaatggaagcggatccacgaggaagagagtttacagaggtggaccctctcggatggacatgctacccataagaaggagaagctctacgtatacgagatcgagagtcgtggacctcgtaactggtccctcatcatcaggtccatcccgggccgctctggcaactcctgtaggctttactggtgcacgcagctgtccccttcaggctcgcgcactcggccttcaaccactaatccgacgacaccactatcccggccccatgcccccttcggc

SEQ ID NO: 233215 - DNA, 332 bp, Glycine max
cgaaaatatttccatgggccggaacattccccctaccttcaagtctaaagagacttacagagttattgtgggagaaaattagtgatcctaaaagtattgctgaggtacttagtcaggtttatgcagatcattcaacaaacgtagataacgttttttcacgcatagttgaaaccacacggcatccagctgctgcagcgtcatttgcttcaatcatgtttgctcctcaaggagaactatcctttaatgacacattatccagatgtcgagcaaacactgtgccaatctgcctcatgtatggaaacgaagatctctgggttcgggccaacttgggg

SEQ ID NO: 233216 - DNA, 361 bp, Glycine max
tcgacgcatgcatacgtaagctcggacttcggctcgagcgcacgttagcacagcgtatcattgccatggcaacatggaactgcgcatctctctccttgacgggacgcgtctccttgacgtggactcgggatcaagctggagtcatcagccacacaggtgcgacgggtgcgcatgacgaacaccgtcaccaggcacgtctccacaggaagcccatggtacggcccagactgagtcaagtacttgggcccattctctggcgagcccccgtcctacctaaccggtgagttcccaagcgactacggctgggacactgctgggctttccgcagaccagaagacttcgccacgaaccgtgaactcga

SEQ ID NO: 233217 - DNA, 344 bp, Glycine max
gcagatcttcgttaagaccctcaccggcaagactattaccctagaagtcgaaagctccgacaccatcgacaacgtcaaggctaagattcaggacaaggagggaatccccccagaccagcagaggctgatcttcgccgggaagcagctcgaggacggacgcacccttgctgactacaacatccagaaggagtcgactctccacttggtgttgcgtcttcgtggtggtatgcagattttcgtgaagactcttacgggtaagactattaccctcgaggtggagagctctgacaccatcgacaatgtgaaggccacgattcaggacaaggaaggcatcccaccggacc

SEQ ID NO: 233218 - DNA, 385 bp, Glycine max
gtcccaaagagctaacaagagattcaagaccggcatggctaatgaagaggaacagaaaaaccacctcttcggcatcaaagatctcggtcacaagactctccttcagagtgatgcactctatcagtatatacttgaaaccagtgtctatccaagagagcacgagtgcttgaaagagatacgcaagatgactgcaaaacacccactgaacatcatggcaacaccagcagacgaaggacaacttctgagcatgcttgttaagctcacgaattcaaagaacgccttggaaattggtgtattcactggttactctctgctctccactgccctggctcttccccctgatggaaagatcttggctttggatgtgaatcgcgaatactatgag

SEQ ID NO: 233219 - DNA, 295 bp, Glycine max
catgaatacgtaagttcgggaaaggttttgcaccatacaatggagtgctcatccttgccttatcgcctgggagcagcatcttccatggctctctcatccccatccttggctggcaaggacatgaagctgggctcatcagccccagacgtgggaagggtgagcatgaggaagaccgtcactaagcaggtctcctcaagaagtccatggtacggcccagatcgagtcaagtacttgggcccaatctctggcgagcccccgtcctacctaaccggtgggtttccaccgcgaactatgg

SEQ ID NO: 233220 - DNA, 177 bp, Glycine max
ataaaagaaatatgacgtcgcacgtacgtaacccggaatcggtccaattaaaatccaagagaaaaacaatgaaggacctgacggaggaatttctgaaagaaaacccgaacatgtgcgagtacatggcgccatcgctggacgtgagacacgacgtactggtgatggaagtgccgaagc

SEQ ID NO: 233221 - DNA, 361 bp, Glycine max
gaaattgtgaaggaagtctcttcctacttgaagaaagtaggatacaaccctgacaagattccttttgttcctatctctggttttgagggagacaacatgattgagaggtccacaaaccttgactggtacaagggtccaactctgcttgatgcacttgaccagattagtgagcccaagaggccctctgacaagcccctcaggcttccccttcaggatgtgtacaagattggaggtattggaactgtgccagtgggacgtgttgagaccggtgtcttgaagcctggaatggtggtgacttttgcaccaactggactgacaactgaagtcaagtctgtggagatgcaccatgaatctcttacag

SEQ ID NO: 233222 - DNA, 375 bp, Glycine max
aatggcttccatgagctctctgaagatgatttcttccttcaagctctcccatttaagttgttctatctctcctctttcaacccaaaagcaagtaggttcaagtctctttcaatccttcccaaccaaaaccttaaaattctcagctactcctcaagtatctacatctagaagaagtaccaacaagactacaaccactgcattcttcttcaataaccaaaagcagcatcaagattcatcacagccaaccaaagttcaagagctctttgtctacgaaatcaacgaacgcgaccgaggaagtcctgcatacctcaagctaagccagaagcaagttaactctcttggagacttagtgccattcagcaacaagatatactc

SEQ ID NO: 233223 - DNA, 152 bp, Glycine max
  unsure (1)..(152): unsure at all n locations
agcaggctatccagagcaagaagttgttcatcttagatcacatgactatctcattccatatttgaggaaaatanatgcaactacaacaaggccttaggcaacaggaaccaaattttccttgaaaagtgatggaaccttgacgccatgggcca

SEQ ID NO: 233224 - DNA, 374 bp, Glycine max
aaaactttctgactttggtcttgcgaagcttggtcctgttggtgacaaatcacatgtttctacccgtgtcatgggaacttatggttactgtgctcctgagtatgctatgactggacagctgactgtgaagtctgatgtatatagttttggggtggtcttcttagagctgattactggccgtacaagcaattgacagcacccagccgcagggagaacagaaccttgtcacatgggttttcctctattctttctcttgtcattttaattagtttggcaagcataaactaactgcagttttatatgtatgtttgtgcaggcacgtccactttttaatgaccgcaggaagttttcaaagttggctgatcccaggctgc

SEQ ID NO: 233225 - DNA, 365 bp, Glycine max
ctcgagccgattcggctcgagctctcacacaaaataatggacaagaagcttggcaacacgtctcatgatcctgaagtgagaaaggggccatggacaatggaagaagacttaatcttgatcacctatattgccaatcacggggaaggggtttggaactctttggccaaggctgctggacttaaacgtaccggaaagagttgccggctccggtggctaaactacctccgtcctgatgttagaagagggaatattacacccgaggaacagcttttgatcatggaacttcatgcaaagtggggaaacaggtggtccaaaattgccaagcatctacccggaaggactgataatgagattaagaactactg

SEQ ID NO: 233226 - DNA, 367 bp, Glycine max
ctctgcagcaactatgcctaaccctaaggtcttcttcgacatgaccatcggcggtcaatctgctggccgcatcgtgatggagctctacgccgacgtcactccccgcaccgccgagaacttccgcgcgctttgcaccggcgagaagggcgtagggcggagcggcaagcccctccactacaagggctcgtccttccaccgcgtgatcccgagtttcatgtgtcagggtggcgacttcaccgccggaaacggaaccggcggcgagtcgatttatggcgccaagttcgccgacgagaacttcgtgaagaagcacaccggtcccggcatcctctccatggcgaacgccggtcccggaaccaacggatctcag

SEQ ID NO: 233227 - DNA, 341 bp, Glycine max
catgaaccctaacctaaacccctgagaaatcattgaagttgatacatggcggaagttaacactctggtggtgcggaagccctgttttggtcttccaaacggttgccctcaatgcctatctgcttacatctatctcaaattcgctcaatttccattccaattggacatccatctcaacaaccctcagtctgatcaaatcccttactttgaaattggtgactatgtggcttattacaatgagaaataagggattaattaagtgtttgaagaaagatgttggggttgttgaattggatagtggggtttcttcactccctgagtggatttcaactaaagcaattc

SEQ ID NO: 233228 - DNA, 363 bp, Glycine max
ctgactcactcatcaatggctctgagactgaaccctatccccacccaaaccttctccctcccccaaatgcccagcctcagatctccccgcttccgcatggcttccaccctccgctccggttccaaagaggttgaaaatattaagaagccattcactcctcccagagaagtgcatgttcaagtaacccactctatgcctccccagaagattgagattttcaaatctttggaggattgggctgaccagaacatcttgactcatcttaaacctgtagaaaaatgttggcaaccacaggattttttacccgacccctcctcagatggatttgaagagcaagtgaaggaactgagagagagagcaaag

SEQ ID NO: 233229 - DNA, 361 bp, Glycine max
ccaaaatcttttctaatttgttcataactcaataattctcatcatgggctccttgattgttccaggtgaacatgatcacaaactaaagcttgtttctcttccctttgtatcaaccagtcacctcattcccgtagtagacatagctaggctctttgccattcatggtgttgatgtcaccataatcaccaccacagccactgccgccattttccaaagctctatcgatcgcgaccgtgaccgcggccacgctattagaacccacgttgtcaagttcccatgtgaacaagttgggttgccagaaggagtagagagcttcaactccaacactcctcgggatttggtccacaaaatctaccaggga

SEQ ID NO: 233230 - DNA, 361 bp, Glycine max
ctcgagccgaatcggctcgagggagttgtaaattaagagcatggctgcacaagctcttgtatcatcatcatctcttaccttctcagccgaggctacaagacaaagtcttggaccaagatcactccaatctccatttggcttctcaagaaaagcctcctttcttgttaaggcagctgctactccccctgtcaagcaaggatcagacagacctttgtggtttgcatcaaagcaaagtctttcctacttggatggcagccttccgggtgactatggatttgaccctctgggactttcggaccctgaaggaacaggagggttcattgagccgaaatggctagcatatggtgagataatcaatggt

SEQ ID NO: 233231 - DNA, 365 bp, Glycine max
  unsure (1)..(365): unsure at all n locations
aagtttttgaaatgttgtcaccccttcttctatttctatgcctaactcttcctttgtttttgttgtccttcttcaaataccgtaaaaccttcaagaatccaccacttccaccaggtcctagaggccttcccataatagggaatcttcatcaactacgatagtcccttctcttcatgagcagctatggcatctctcaaagaaatatggtcctttattttcccttcaatttggattaaggccagccatagttgtttcctctccaaaattggccaaagaggtaatgaaagacaatgaccttgagtgctgtggacgacctaaattactaggccaacaganactaacctataatgggttagacatgggaa

SEQ ID NO: 233232 - DNA, 275 bp, Glycine max
agagaatacaccaaaacccaacatgaaaacccttaacaaagcctcacttattttattccctctcttgttcctttccctattcaagcattcccatgctgcaggaatcgctatctactggggccaaaacggtggagaaggcaccttagcagaagcttgcaacactagaaactaccaatatgtgaacatagccttcttgtccacttttggcaacggccaaactccacaactcaaccttgcaagtcattgtgaccccaacaacaatggctgcactgggt

SEQ ID NO: 233233 - DNA, 352 bp, Glycine max
caacagcaagcagccgttcttgtgggtgattcgacctgggctaatccatggttcagaatggtttgaaccattgccaagtgggttcctagagaatttgggaggaagaggctacattgtcaaatgggctcctcaagaacaagtgcttagccatcctgcagtgggagcattttgggatcataatggttggaactcaactctagagagcatatgtgaaggggttccaatgatttgtatgccatgttttgcagaccaaaaggtcaatgccaaatatgcaagcagtgtttggagggttggggtgcaattacaaaataagctagatagaggagaggtagagaagacattaaaacactca

SEQ ID NO: 233234 - DNA, 352 bp, Glycine max
tgtttccatatacctaatagctctaggaaatggaggataccatcctaacattgctacatttggggctgatcaatttgatgaaggagatcccagggaacaacattaaaaaattgtatttttcagctatttttatttggctttgaacattgggtcactcttctccaacaccatattgaattattttgaggatgatgatggactatggactttgtggttctgggcttcagctggctcgatctgctgctctggcattgattttgtttctttgtggcacacgaaagtatagatactttaagcctaatggaaaccctcttcctagattttgccaagtttttgtggctgctacaagaaa

SEQ ID NO: 233235 - DNA, 360 bp, Glycine max
ggagagagaaaaaaaaaaaaaaacagaacaacacagaaactcaaaaccaaaataaaattattatggatcacattcataggttacgttgttttgggacaatacccaaaattccttttctattgctactttccctgcttctcttcagtttcgttaacgcatccttcgacctcgctactatacccttcaacgacggctattctccgctcttcggagctagcaacgttgttcgctccgaggatggatacggcgtacaactccgcctcgatcgctacacaggttcgggtttcatttcctccagtatgtaccagtatggattcttcagcgcgagaatcaagttaccatcgaattatagtgctggta

SEQ ID NO: 233236 - DNA, 363 bp, Glycine max
  unsure (1)..(363): unsure at all n locations
ctaaagatgtacctctctacgaagtcaactaaatccattaaagttttggcaaagatagaaagcttagaatcccttcataaactggaggaaatagtgcaagcttctgatgggatcatggtggctcggggtgaccttggtgtcgaaataccacttgaacagattcctacagtccaagaggatataatttacgtatgcagacaattaaacaagccagtgattgtagcttctcagcttcttgagtcaatggtcgagtatccaacgccaacacgtgctgaggtancanatgtttctgaagcatttcgacagtatgctgatgctttgatgtggtctggagagtcagctattggatcatatggacgaaaa

SEQ ID NO: 233237 - DNA, 349 bp, Glycine max
gggaactgtgtcaagagtgactctaaacgtatcaacatggtggggattcacactccaaagaaagacaatgaaccattgctacagtgcactcatcatatgtgtccaataagggtgcactggcacgtgaagctcagctatactgactattggcgagtcaaggttgctgtgacgaatttcaactacaggatgaattactccctctggactcttgctgttcagcatccaaatcttaacaatgtcacccaagtttttagctttgattacaatcctttacttcgctatgagtccataaatgacactggtatgttctatggcatgaaatactttaatgatctcttaatggaaactg

SEQ ID NO: 233238 - DNA, 361 bp, Glycine max
atcataaaccccctccagagaacaagaatcaaagaatggcaactatgactggtgtgagcctttcaagccccagggttttcttcaacgcatcaccctcaccgcaaaacacgtacgccgtaaagttcgcagttccactcagccaagggatgcgacttggtagtgtcaggttgggtcgggtgatgaggatccgacccgttcgcgcagctccagagcgcatttcggagaaggtggaggagagcataaagaacgcgcaggaggcgtgcgccggcgacccgacgagcggcgagtgcgtggcggcgtgggacgaggtggaggagctgagcgcggcggcgagccacgccaaatacaagcaaaaggaaaa

SEQ ID NO: 233239 - DNA, 327 bp, Glycine max
ctctctttcgatctgggtactaaccctaacccgcttcgaaccgtggcttcctcaggctcgcagaacctctctcgaagaaaaccttcttcttcttcgtcttcgtcttctcaacaaacacccgggtcgacccggatcgtttaccgagaatctcggatcccatcggaatccgatttcccgatctggcagcagaactggttcatcgcattgctcttcgtcatggctctcggattcttcgccctcgccattttcctcttcctcactctcgactctgacatcgctccttcttccaacgcctccgcctccgcctccgccgctttctccgaaggc

SEQ ID NO: 233240 - DNA, 322 bp, Glycine max
  unsure (1)..(322): unsure at all n locations
ggctttttaactttaagaaggatanggatggctactggaaatggtttgctggcaacttggcctctggtggtgctgctggtgcttcatcccttttgtttgtttactctcttgactatgcccgtacccgtcttgccaatgatgctaaggctgcaaagaagggaggagagagacattcaatggccttgttgatgtctacaggaagacattggcatctgatggtgttgctgggctctaccgtggtttcaacatctcatgtgttggaatcattgtgtatcgtggtctgtactttggattgtatgattccgtgaaaccagttgtcctc

SEQ ID NO: 233241 - DNA, 374 bp, Glycine max
  unsure (1)..(374): unsure at all n locations
ccctagtctccatacatcaacttgggaagttaaagagacggcaacgttgtgctgtccgccttgaccgagccagagcttcgtcttggccctcgattttgccctgtaaaactaatcccagtcacaacagaaataatcaatggcaccgaaacagaccaaggctgagaagaagatcgcttacgattgcgaagctgtgcgacctaatggaggagtacggccaaatcctcgttgtaaactccgacaacgtgggatcgaaccagctccagaacattcgcaagggtctccgcggcgactctgttgtcctcatggggaagaacaccatgatgaagcgctctgtcaggatgcacgctgagaanaccggaaacaatgcctatctc

SEQ ID NO: 233242 - DNA, 453 bp, Glycine max
cgaatgaattaggtgacacatagaagacaatgacgtcgcatgcacgcgtacgtaagctcggaattcggctcgagcggctcgagcaagctcactacttggactgggctgtccatgccttcagaatcaccaatgttggtgtccaggataccacccagatccacactcacatgtgctactcgaacttcaacgacatcatccactccatcatcgacatggacgccgatgttatcacccatgagaactctcgctccgacgagaagcttctgtcagtcttccgcgaaggtgtgaagtatggtgctggaattggccctggtgtctatgacatccactccccaagaataccaccaactgaagaaattgctgacagaatcaacaagatgctggcagtgctcgagaagaacatcttgtgggtgaaccctgactgtgggctcaagacccgtaagtacactgagg

SEQ ID NO: 233243 - DNA, 368 bp, Glycine max
gtgtgtttgttctctgagtagaagaagatcaagatcaaggaagaggatgtcgaaagaggatgtgtttgttggcgcgatcgaccaaggaacgagcagcagcaggttcataatatacgacgcgaagactggagtagtaggatgccaccacgtggagttcacccagttctacccgcaagccgggtgggtggagcatgaccccatggagatcttggagagtgtgaaagtgtgcgtggccaacgccgtcgacaaagccaccgctgatggcttcaacgtcgaagaaagcttgaaggccattggtctcaccaatcagagagagaccactctcctctggagcaaatccaacggcctccctcttcacaacgccattg

SEQ ID NO: 233244 - DNA, 144 bp, Glycine max
tggaggaacccacttccattatggcgctggcaagtatattgcatcaattgccaatatgctcaactttccaaacaatgtgattaacattgaaggaaaacttcgcaatgtttttgatgttggctgtggtgttgcaagctttggagg

SEQ ID NO: 233245 - DNA, 363 bp, Glycine max
cacgacacgaagtcaaacaggtgatttgttcactttgtgggactgaacaagaggttcagcaaaactgtacaaattgtggtgtttgtatgggaaaatacttctgtggaacatgcaagctttttgatgatgatatatctaatcagcagtaccattgctgtggctgtggaatttgcagaactggaggaagcgaaaatttcttccattgctacaagtgtggttgttgctactcaactcttctgaaaaacagtcacccttgtgtagaacgagcaatgcatcatgattgccctgtttgttttgagtatttgtttgaatcaagaaacgatgtcactgttatgccatgtggacatacgatccataagagct

SEQ ID NO: 233246 - DNA, 353 bp, Glycine max
gcagcagaacagagagagcaaaaccctagagcatccatcacaagcagaggaagaagatggtgaagttcctgaagcctaacaaggcagtgatcgtcctgcagggccgctacgccgggcgcaaggcggtgatcgtgaggaccttcgacgagggaaccagggagcgcccctacggccactgcctcgtcgccggaataaagaagtacccaagcaaggtcatcaagaaggactccgcgaagaagaccgcgaagaaatctagggttaaggccttcgtgaagctcgtgaactaccagcacctcatgcccacgcgctacacgctcgacgtggatctaaaggacgctgttaaccccgatgtt

SEQ ID NO: 233247 - DNA, 383 bp, Glycine max
tcggggaattccaattccacattttcaagaaataaggaggcaaaaatgttcatatatgaattggaattatttgttttcttattaggcctatcctgaagccaaaggaaatgagatcggaattcctcggggaattccaattccacattttcaagaaataaggaggcaaaaatgttcatatatgaattggaattatttgttttcttattaggcctatcctggaagccaaaggaaatgagatcggaattcctcggggaattccaattccacattttcaagaaataaggaggcaaaaatgttcatatatgaattggaattatttgttttcttattaggcctatcctgaagcaaaggaaatgagatcggattcctcggggtaacgaact

SEQ ID NO: 233248 - DNA, 274 bp, Glycine max
gtgactgtcagaaacaaacattatttggttttctgaattgtttggattgcgagaaaaaaaaagggggggaaatggcaaaggatattcgattcttcgacctcaacacgggcgccaagatcccttcagtcggcttgggaacttggcagtctgatcctggccttgttgctgaagccgtcgcggcggccatcaacgttggttaccgccacattgattgtgctcaaatctatggcaatgagaaggagattggctctttgttgaagaatctgtttgagga

SEQ ID NO: 233249 - DNA, 362 bp, Glycine max
ctctaacctacctctttttcttctctctcaacaacttcaccttcttcctcctcgatcatgtctcacttcaagggcaagtaccatgatgagcttatcgccaatgctgcgtacattggcactcctggaaagggtattcttgctgctgatgagtcaacagggacaattggcaagcgtttggccagcatcagtgtagagaacattgaatccaacaggcgagctcttagggagctgcttttcactgccctggtgttcttcaatatctcagtggtgtcatcctctttgaggaaaccctctaccagagcacagctgcaggcaagccctttgtgaatgtcttgaaggaagctggtgtgcttcctggcatc

SEQ ID NO: 233250 - DNA, 359 bp, Glycine max
gcgacacgtatcaacttcaataatcgcatcgcagaagcagtttccggtgcatctcatcgtctccgaaaatgaacgacgcagatgtctcgaagcaaatccagcagatggtgcggttcatccgccaggaagctgaggaaaaggccaacgagatctctgtctccgccgaagaggaattcaatatcgagaagctgcagttggtcgaagccgacaagaagaagatcaggcaagaatacgaacgcaaagagcgccaagttgaaattcgcaagaagattgagtactcaatgcagctgaatgcttctcggattaaagttcttcaagctcaagatgacgtgatcagttccatgaaagaagctgcatcc

SEQ ID NO: 233251 - DNA, 371 bp, Glycine max
gttgaaaacacaaaagaaaaaaaatgggttcttctctgtggacctgtctgattttgttatcacttgcttctgcttccttcgccgccaacccaagagcaccaattgatgtgccatttggcagaaactatgtgcctacctgggcctttgatcacatcaaatacctcaatggtggttctgagattcagcttcatcttgataaatacacaggtactggcttccaatcaaaagggtcctacttgtttggtcacttcagcatgtacataaaattggttgctggtgattcagctggcacagtcactgctttctatttatcatccacaaactcagaacatgatgaaatagactttgagttcttgggaaacagaaccggg

SEQ ID NO: 233252 - DNA, 361 bp, Glycine max
ggagacaccagccattgatgtgtgcaagggactactcggcgacaaggcgcgcctaagcatatatgatccacaggtcactgaggaccaaattcagagggatttatggatgaacaagtttgattgggaccaccctattcacttgcagccaactagtcctacaactgagaagaaagttagtgtggtttgggatgcttatgaggcaacaaaggatgcagatggtgtttgcattctaactgagtgggatgagttcaagagtcttgattatcagaaggtgtatgacaacatgagaaaaccagcatttgtttttgatggaaggaacattgtggatgtggagaagctacgtgagattggtttcattgtg

SEQ ID NO: 233253 - DNA, 318 bp, Glycine max
gtttgtgaagagcgatggataacagttaccatcacaaccgtggcattggtgatagcttcctcagcaccattattattggcggcatgcccttacacctccatcttcagcttcggtgattcacttgcagacactggcaacttgtatttcagccactacccacccaccaatcactgccttttccctccctacggcgaaaccttctttcaccaagtcactgtacgctgctccgatggccgcctcatcatcgatttcatctctgagtcactggggattccacgggtgaagccgtacttgggattctggaatattgggagatgg

SEQ ID NO: 233254 - DNA, 354 bp, Glycine max
ttcattctctttgcgcagttccctacctctcctttcaagatgcagatcttcgtcaagaccctcaccggaaagaccatcacccttgaggtggaaagctctgacaccatcgacaacgtcaaggccaagatccaggacaaggaaggaattcccccggatcagcaacgtctcatcttcgccggaaagcagctcgaggacggccgtacgctcgccgactacaacatccacaaggagtcaacccttcaccttgtccttcgtctccgtggtggcatgcagatcttcgtcaagactctcactggcaaaaccataaccctagaggtcgaaagctctgacaccattgacaacgtcaaggccaag

SEQ ID NO: 233255 - DNA, 378 bp, Glycine max
aaaaaaccctctctttctctctcttccaaaacctaattttcattttttctcttcaaacaaattttcaaaatgcgtgagatccttcacatccagggtggccaatgcggcaaccagatcggcgccaagttctgggaggtggtttgcgcggagcacgggatcgaccccactggaaggtacggtggggactcagagcttcagctcgagaggatcaatgtctactacaacgaagccagctgcggccggttcgtgccgcgcgcggttctcatggacctcgaaccgggcaccatggacagcgtccggtccgggccgtacgggcagatcttcaggcccgacaactttgtgttcgggcagtccggggcaggaaacaactgggccaag

SEQ ID NO: 233256 - DNA, 368 bp, Glycine max
cacgaattttcttgaagaggaataaacgtagatatgctggtaatgatgaattttcaagccaggctatggaaggactacaaattattaatggtctggagtgtaagatagcttgcagttcatctaaggtctcatatgttttagataccgaagactttttgtttcggataagaaggaaaaaaagagttttgcatccaaagagttcaggcgcccatgaacaggcacagttcctcaaagagttcaagcagagtacaacgattccgcaatttgttttccattacatgaaaatgtccattttgagctgggcatgtaacatttgtcaaatgtaaacattggcagaggcgctggatgaaaacagcatcctatccaag

SEQ ID NO: 233257 - DNA, 357 bp, Glycine max
ccagtctgccaaggaagaaagaatagcattgaggccaccaatgttgcaggtggttcggttggcttcatttcagcatgctccttcagttccacctttcatatcattaccaaaacaatctagagttgatagtgatgactcttggatggcaacagaagagagaaaggcaggtgaggtggcagttggtggtggtggggtgtctgtggcagttactcgttttccaatggagcagaagcgtcctgttgggcctcttgtggttgtaggtgtcagggatggagttctttggctaattgacaggtacatggttgctcatgccgtatccttgagtcatcctggtattcgttgccgatgtcttgctgc

SEQ ID NO: 233258 - DNA, 373 bp, Glycine max
gttgcctataaaaataaaaactaagtcccccaaaacccaatcatatcatttcatttcttcctttgtcgtccatcccgtaaccatgtctcagactgttgtcctcaaagttggtatgtcatgtgaaggatgtgttggagcagtgaagagagttctaggaaaattggatggtgtggaatcatatgacattgatttgaaggaacaaaaggtggtagtgaaaggaaatgtccagccagacacagttctgcagaccgtttccaaaactgggaagaagactaccttctgggaaggtgaagcagcaacatctgaaactagcacagcaactgcctaaaacatttgcctctattctgtgcagaagaagtagctgtgtgaatca

SEQ ID NO: 233259 - DNA, 358 bp, Glycine max
cccgaaacctaagcacaagatgaagaagataagaggatatggagagaaatgagtgctcttgtggagaggatgtgttggaaaatagctgctaagaaggatcagactgttatttgggtcaagcctctcactaatagctgctacttaaagagattgcctggtactaagcctccactctgcagatctgatgatgatcctgatgctgttttgggagttaaaatgaaagcttgcatttcacgttattcagatcaaatgcacaaagcaaaaggaagtggtttggctccttggcctgctcgattgactactccacctcctcgtctggcagaaattcactattctactgaaatgtttgagaaggaca

SEQ ID NO: 233260 - DNA, 362 bp, Glycine max
caattccattctctttgcctgcctagtttcaattctgtccaatttccaaaaccaaaacaagccacacaagttcatggcaactcccaataacagactctctcttgccatggagagaactgggcaatgggttttctctcaagacataccaactgatgttatagtggaagttggagaaacaactttctctctgcacaagttcatgctagtggcaaaaagcaactacataagaaaactgatattggaatcagatgagagcgaactcaccagaatcgacctctctgacataccaggaggcccttcaatcttcgagaaaaccgcgaaattctgttacggcgtcaacttcgagataacggtccacaacg

SEQ ID NO: 233261 - DNA, 367 bp, Glycine max
gctgaagacaaagaggacacaccgtttcatagtttttaagattgaggagcagcagaagcaggtcattgtggagaagcttggtgagccagcccaaggctatgaagatttcactgccagccttcctgctgatgagtgccgttatgctgtttatgattttgagtatctgactgaagggaatgtccctaaaagcagaatttttttcattgcatggtcccctgacacatcaagggtgaggagcaagatgatctatgcaagctccaaagacagattcaagagggagctggatggaattcaagtagagctgcaagcaactgatcctactgagatgggtcttgatgtgttcaaaagccgggccaactaaaatgat

SEQ ID NO: 233262 - DNA, 368 bp, Glycine max
agcaactccatcgatgttaaattatctaaaaataccattgaaactggagatgattgtgtttccatgattcaaggagtcaacaatattactatcaacaaactgaaatgtggccctggacacggtattagtattggaagtcttggaaagtatgcggatgagcaagaagtgaaagacattcgcgtcaagaactgcacgatggttggcacaaccaatggcctcagaatcaagacatggccagataagtatccaggttcagcatcagctatcaccttcagtgacattgtcatggaaaatgttaaaaatcctatcatcattgaccaagagtatgattgcgaaccagcaaactgccaaaagaagccttcacttgt

SEQ ID NO: 233263 - DNA, 369 bp, Glycine max
gtaacacttgcaacacacatggctacaatcaccaacactttcatattcaaaccccccatctctcatcacccaaagcagcttctttattcccaccgctcttctctacgctttctcaccaaatttaaaaccccctccggagcgaattctcggcggctggttccgaaagccaaggcggccccggggccaagaagacagaaaagccgcacgagagagtccagcgagtccacagcgtggaggagttcgagtcggcgctcgaatccgccaaagacaggcttgtggtggtggaatacgctgccagcgacagcgaggagagcagccagatataccctttcatggtggagctgagccgcagctgcaacgacgtggagt

SEQ ID NO: 233264 - DNA, 353 bp, Glycine max
ccaaaccaaagcaagaatagtgttctaagagtgagcaacaacttcaaacaccattgtgagaaatggcttccaagggtgcacttctcttgtgtctcaacattctcttcttcactgtggtaagctccacatatgtcccatgcaacccaccccctaaaactcctaaacacacacctgtcccaaagccaccttccccaaagcaaccaagttgccccaaagacaccattaagtttggtgtgtgtgctgatgtgttaggtttgattaacgtgcaacttgggaagccaccaaagaccccatgctgcaacctcattcagggtcttgctgatcttgaagcttccgtgtgcctttgcaccgct

SEQ ID NO: 233265 - DNA, 379 bp, Glycine max
ctcgagccgagaaatttaagtgaggagctagagaatgatgatgaagtctgctatgtgtgcagtggtggttgtagcacttcttcttctggcggaggtggggcccatggctgaggctgtgacatgcaccccaacagagttgagtccgtgtcttccagcaatcacttccggtgctaaaccttccaatgcttgttgcacgaagctgaagcagcaaaaaccatgcttatgtggctacctcaaaaacgctaagcttgaagcagtatgttaactctcctaaggccgaaaaaccgttgcttcttgtgggattccctttccaacttgttaattaattaagccttcttataattaaagtgtgggatatatatatatatatagataaaca

SEQ ID NO: 233266 - DNA, 364 bp, Glycine max
ctttttgagaacaatttagccaatgagcaagaattgaagaccatagagaagaaaatcgatgagatcctcgaggacgctgttgagtttgcagacaaaagccctcttccaccccgcagtcagcttctggagaatgtctttgctgatccaaaaggctttggaatcggaccagatggaagctatagatgtgaggatccaaagttcactcaaggcacagctcatgtctaatcttttcttgcttgcaagttggaactttcatttttgtatgactcttctttttcatatgccttatttagtgatcaaatgttacacaatgtctaatataaacaggatttgctctttaggttggtaatttggttttacgtgt

SEQ ID NO: 233267 - DNA, 373 bp, Glycine max
ggaatagaaaaaccctaagcaaagcaaagcggtaaggatggggaacacggagaagctgatgaaccagatcatggaattgaaattcacttcgaaatcgctgcagcgtcaatcgcgtaagtgcgagaaggaggagaaatcggagaagctgaaggtgaagaaggcgatcgagaaaggcaacatggacggcgctcgaatctacgcggagaacgcgatccgtaagcgcacggagcagatgaactacctccgcctggcctcgcgcctcgacgccgtggtcgcccgcctcgacacgcaggcgaagatgacgacgatcagcaagtcgatgggcaacatcgtgaaatcgctggagtcatcgctggccacggggaacctccag

SEQ ID NO: 233268 - DNA, 362 bp, Glycine max
tttctcggttcattgtccccctttgacggtggtgctgtaagcattgacctcagcttgagcagtaaaacatcatcagcactactacggtaccatggctgtgctgcaatctttcgtttcggtccacccagattctcacttccccatacagaagctcccttagggagtcttcaagccccaatccgcttcgcctcctcgtcccggcgtcgccatctgcgacttcgtcctcgacctctccgaaatatcttccgctggtctcttcgacggtcctctcctcaaaaactccgatgcttttctccagcctaatctaaataagtttgtatcacttggaagaccagcctggaaggaagctcgtgctactcttc

SEQ ID NO: 233269 - DNA, 357 bp, Glycine max
atcgaaaggttgttttcaagtcaactcaatggcacttccctcaggtttagtttccatgttgatagtactttttggtatggttttggtagttggggttgaggcaaaggcaagggctttctttgtatttggagactcactggttgacagtggtaacaacaattacttagcgaccactgcacgggctgattcccctccttatggcattgactatccaactcgtagaccaaccggtcgtttctccaatggcctcaacattcccgatcttatcagtgaacgaataggtggcgagtccgtgttgccttatttgagtccacaactaaaaggtgaaaatcttctgaatggagccaattttgcttc

SEQ ID NO: 233270 - DNA, 360 bp, Glycine max
aactgggttgtctgctccttataacaaccttgccataatctataagcagcaggggaattatgtagatgccatatcgtgctacaatgaggtcctccgcattgaccccttggcagctgatggactagtaaatagaggcaatacatataaggagattggtagagttagtgatgctatccaggattacatacgggcaattgttgtcaggcccaccatggcagaagcccatgctaatttggcttctgcttataaagatagtggacatgtagaggctgctgtgaagagctataaacaagcattgattcttcgtccagacttccctgaagcaacttgcaatctccttcatacacttcagtgtgtctg

SEQ ID NO: 233271 - DNA, 372 bp, Glycine max
agtagttgagaactaagaaggagaagcaaatggcttcctcaatgatctcttccccagctgttaccactgtcaaccgtgccggtgccggcatggttgctccattcactggcctcaagtccatggctggcttccccaccagaaagaccaacaatgacattacctccattgctagcaacggtggaagagtgcaatgcatgcaggtgtggccaccagttggcaagaagaagtttgagactctttcctacctgccagaccttgatgatgcacaattggcaaaggaagtagaataccttcttaggaagggatggattccttgcttggaattcgagttggagcacggtttcgtgtaccgtgagcacaacagggtcacag

SEQ ID NO: 233272 - DNA, 370 bp, Glycine max
caatatattccattctctctgtgtatttccctacctctcccttcaagatgcagatcttcgtcaagaccctcaccggcaagaccatcacccttgaggtggaaagctctgacaccatcgacaacgtcaaggccaagatccaggacaaggaaggaatccccccggaccagcaacgtctcattttcgccggaaagcaacttgaggacggccgtacccttgctgactacaacattcagaaggagagtactcttcacctcgtcctccgtctccgtggtggcatgcagatcttcgttaagacaccaccggcaagaccataaccctagaggttgaaagctccgacaccatcgataacgtcaaggccaagatccaggac

SEQ ID NO: 233273 - DNA, 378 bp, Glycine max
  unsure (1)..(378): unsure at all n locations
ggaggagactctttctctcagtctcatccacgtaaacaactcattggttttcaccaatagactacacatcatcctccatttcactgctctatgtttcttggtttactacaggctttgtttcttctttcagaatccacaaaccagacgaggaactactttgttcccttggcttcttgtttttgcctctgaaatcattctctccttcatttggattcttggtcaaggtttccgctggcaccccatttcaagaactgtgtttcctgaaaggttaccacaggatgacangcttcctctcattgatgttttcatatgcactgcagacccaactaaggaancaactttggatgttatgaacactttgctatcagccatggcgct

SEQ ID NO: 233274 - DNA, 378 bp, Glycine max
tgttcagccaactaaggttgattcccctcctagcagtgtgtcaacaaatggggtttcttccccttcagtgccagcaaactcagaatcatctgatgctgctgcttccaagtctcccattcaggagcaagtttcaggcaccaaagaggacaaaaatgtggataccaaagatagtgagagtgattcctcaagtggggttcctagtgaatcattccctaagcctgttgtgactgtgaacattgaacccgagccaaaggtcgtgcagcaggatatagtagacatgtacatgaaaagcatgcagcaattcactgagtcactagcaaaaatgaagctccctatggacttggaaagtgaaccaactagttcaggaaattcaaccac

SEQ ID NO: 233275 - DNA, 380 bp, Glycine max
taaccccgaattccggtccaaaaaaaggttaaaccaagacaatccccaaagggaatcaagaatttgggctcctccaactccaaaggaaatcaaagtctcctctacctccagacctcatctcttgcatcctttttctttctccagatgcttgtcctccgtcctggatggacttaagtatgcagattcacacgaatgggtcaagcaccaaggctcagtctccaccattggtatcactgaccatgcccaggaccatcttggagaggttgtgtacgtggacctgccacaagcaagtggcacagttacccagaagtccggcttccgatccgttgaaactgttaaagcaacaagtgacataaactctctaatctccggggagattg

SEQ ID NO: 233276 - DNA, 372 bp, Glycine max
gccaggaatagggcacaggatcaagaatagggacaacaaagataagagagttgagctgctacagaagtttgcacgcacacattttccttctgtgaaatacatggaatatgctgttcaagttgagacctacacgctcacaaaggcaaataatttagttcttaacgtagatggtgcaattggatctcttttcttggatcttcttgctggtagtggaatgttcaccaaacaagagattgatgaaattgtggagattggctatctgaatggcctctttgtgctggcacgctccattggtctgattgggcacacctttgaccaaaagcgattgaagcaaccactttaccgtcacccatgggaggatgttctctacac

SEQ ID NO: 233277 - DNA, 367 bp, Glycine max
tgatcacggtgtggatcaacaactcgtggccgagatgacccgtctcgccaaagagttctttgctttgccaccggacgagaagcttcgttttgatatgtccggcgccaaaaagggtggattcattgtctccagccatctccaaggggaatcggtgcaggactggagagaaatagtgacatacttttcgtacccaaaaagagagagggactattcaaggtggccagacacgccagaagggtggagatcggtgactgaggaatacagcgacaaagtaatgggtctagcttgcaagctcatggaggtgttgtccgaagcaatggggttagagaaagatggtttaagcaaagcatgtgttgacatgggacag

SEQ ID NO: 233278 - DNA, 385 bp, Glycine max
  unsure (1)..(385): unsure at all n locations
caatacttgggaaccaagatcgatcccaaccggaggctcggaaagaccccgagcaaccgctacgcgccacgtgtcggcgacaaattgcctgattccgttgattggaggaaggaaggtgctgttcctcctgtcaaagaccaaggaggctgtgggagctgttgggcattctcagcaatcggtgcagtagaaggaataaataagatagtaacaggcgaactgatttcgttatcagaacaagaattggtggattgtgatactggatataaccaaggatgcaatggaggacttatggactatgcatttgagttcataatcaacaatggcggcattgattctgatgaggattacccnatacgtggtgttgatggtagatgcgacacatata

SEQ ID NO: 233279 - DNA, 371 bp, Glycine max
  unsure (1)..(371): unsure at all n locations
actgggtccagaagacaccagcaagaacatagtagagataatattccactccagctggctgaagaagcaatcaccagtgtgcaaaatagaccgcatcctcaaggtccacaacacacagaaaaccataaccaaattcgaagagtacagagactccataaaagccaaggccacgaagctctcaaagaagcaccctcgttgcatagcagacggcaacgagcttctcaggttccactgcacctccttcaattgctccctgggtctaaacggctcctccaacttgtgcaactcgataccacagtgcaacgtgtgcagcataatcaagcacgggttcaaggtcaccggaggangagccggcatcttgacgacggcga

SEQ ID NO: 233280 - DNA, 305 bp, Glycine max
cacaacacgaactcttacaggtgatttgttcactttgtgggactgaacaagaggttcagcaaaactgtacaaattgtggtgtttgtatgggaaaatacttctgtggaacatgcaagctttttgatgatgatatatctaatcagcagtagcattgctgtggctgtggaatttgcagaactggaggaagcgaaaatttcttccattgctacaagtgtgggtgttgccactcaactcttctggaaaaacagtcacccttgtgtagaacgagcaatgcatcatgattgccgcgtttgttatgggtattt

SEQ ID NO: 233281 - DNA, 317 bp, Glycine max
caagaattttcttgaagaggaataaacgtagatatgctggtaatgatgaattttcaagccatgctatggaaggaggacaaattattaatggtctggagtgtaagatagcttgcagttcatctaaggtctcatatgttttagataccgaagactttttgtttcggataacaaggaaaagaagagttttgtatccaaagagttcaggcgccgatgaacaggcacagtcgccaaagagttcacgcagagttcaacgattcggcagtttgttttccattacatgagaatgtcgattttgagctgggcatgtaacatttgtc

SEQ ID NO: 233282 - DNA, 348 bp, Glycine max
ggaggagactctttctctcagtctcatccacgtaaacaactcattggttttcaccaatagactacacatcatcctccatttcactgctctatgtttcttggtttactacaggctttgtttcttctttcagaatccacaaaccagacgaggaactactttgttcccttggcttcttgtttttgcctctgaaatcattctctccttcatttggattcttggtcaaggtttccgctggcaccccatttcaagaactgtgtttcctgaaaggttaccacaggatgacaagctccctctcattgatgttttcatatgcactgcagacccaactaaggaaccaactttgggtgt

SEQ ID NO: 233283 - DNA, 324 bp, Glycine max
agtagttgagaactaacaatgagaagcacatggcttcctcaatgatctcttccccagctgttaccactgtcaaccgtgccggtgccgggatggctgctccattcactggcctcaagtccatggctggcttccccagcagtaaagaccaacgatgacagtacctccattgctaccaacggtggataagtgcagtgcattcatgtgtggccaccaattggcaacaccaagtttgagactccttccgacctgccagaccttgatgatgcacaagtggcaaaggaaatctaataccttcttatgaatggacggataccactgcctgga

SEQ ID NO: 233284 - DNA, 393 bp, Glycine max; identical to SEQ ID NO: 208347

SEQ ID NO: 233285 - DNA, 376 bp, Glycine max
gttcggtggagggagggagccgtagcagcggaagctctagcttgggtagcgaatcacaatggcgagaggattaaagaagcatctgaagaggcttaatgccccaaagcattggatgcttgacaaactgggtggtgcatttgctcctaagccctcatctggaccacacaaatcgagggaatgcctgccactcatactcattttgcgaaaccggctgaagtatgctctaacataccgtgaagtcattgctattctgatgcagcgacatgtccttgttgatggcaaagtcaggactgacaaaacataccctgctggttttatggatgttgtatcaatccctaaaacaaatgagaacttccgcctgctgtatgacaccaaa

SEQ ID NO: 233286 - DNA, 400 bp, Glycine max
  unsure (1)..(400): unsure at all n locations
tggcaacaaccttcaagtactttacttccatcctcttcctcaccctcgtcatcaaagggtcatgtgatgactgttccttgaacaacatcaatattggcacatcaagaactgggagagaaatccagggccagcctgagtggaacgtgaccgtgatcaacaattgcaactgtgaacagagtcagataaagttgtcttgcaaaggttttcaaagtgcagaaagtgttgacccttcaattctttccatggaaggtgatagctgcttactcatcaatgggaatccaatgaagggttctgatactgttaacttctcctatgcctgggatcctccctttctgcttttgcctacaagctctgttttaggtccttgttcatanggatttgcttaacagaatatgaaaaa

SEQ ID NO: 233287 - DNA, 358 bp, Glycine max
aagcaattaattaagcactctaaaacatatctttatttccttgtctacatatcttgaaaaactcaatcatggctagtgtttcttcggttttagctccatttagaaggcttgatgggaaggtggcgattatcactggtggtgcgagtggtctaggtgcagccactgcaagactcttctctaagcatggagcatatgtagtcatagctgatattcaagacgacttgggtctctctgttgccaaagagttagaatctgcttcctatgtccattgcgatgtgacaaaggaagaggacgttgaaaactgcgtgaacacaacggtttccaagtatggcaaattagatatcatgtttaacaatgc

SEQ ID NO: 233288 - DNA, 396 bp, Glycine max
ggttcttccatttgactcttgttctgaacgacttttcaagagaatcaaaccatggcagtgaaagtatacggtccccactgtgcttccaccaagcgggtgctggtttgtctggttgagaaggaagtcgaatttgaggttgtccctgttgatgtcactaagggggagcagaaggatcctgagtacctcaaactacagccatttggagttgttcctgtcatcaagatggagattataccttatatgaatctcgtgctataatgaggtattatgcagaaaaatacagatctcaaggggttgagttgctgggaaaaacaatagaagagaggggtctagtggagcaatggctagaagttgaagcacacaactttcatccacaagcctacaacttgtgtcttc

SEQ ID NO: 233289 - DNA, 383 bp, Glycine max
gaaaaatcttccagaaccaaccttggccaccatcaagattttggcatggaggcttactccatagatggtgtttcttcacaaagtgagtccaaattctacgatgatgatggtcatgttaaacgaacagggaacgtttggactacaagctcgcacataataacagcagtggtgggttctggggtgctgtctttggcatgggccatggctcaaatgggttgggttgctgggcctgtagttatgatcttcttcagtgctgttacgttgtatacgacgtcgcttctggctgattgttatcggtgcggtgaccccgttacggggaagagaaactatactttcatggatgcaattcaatccattcttggcgggtattatgatacgttttg

SEQ ID NO: 233290 - DNA, 392 bp, Glycine max
gaaacatggctgaagagggtcaggttgtcggcgtccacaccgttgatgcgtggaaccagcaactgcagaatggaaaagactcccaaaaattgattgtggtggattttactgcttcctggtgtggtccatgccgttttattgccccagttctggcagagattgctaggcatactcctcaagtgatcttcctcaaggtggatgtggatgaagtgaggcctgttgctgaggaatattccattgaggccatgccaaccttcctcttcttgaaagatggcaagatcgtggataaggttgttggtgctaagaaggaggagctgcaactcaccatagccaagcatgtatctgctgctgctgcttcttcttgaagtgaagtatcatcatatgaaagaaga

SEQ ID NO: 233291 - DNA, 392 bp, Glycine max
tgtgcctctcctctcgctgcgttttccaatggcggccataacccgcctcctaaatcgcacctcttccctctcttccgtggcgcgtggattctcatctcacgcatcgccgccgcgcaaggaggagaggaatgtccagtgggtgttcctgggttgccccggcgtcggaaaaggcacctacgccagtcgcctctgcaacctccaacggcccccctttcttcccagctatcagaaattgttaatcaaggaaaattggtgtcagatgaaatcatcataagtttattgtcaaagaggctggctgatggggaagctaaaggagaatcgggatttattcttgatggttttccacgaacaataaagcaagcggaaatattggaaggggtaactgacattga

SEQ ID NO: 233292 - DNA, 394 bp, Glycine max
  unsure (1)..(394): unsure at all n locations
nattcggatagcntttncncganaacgggggacnaccctctgggccnaagtntncctcattgnncganatcntngaagtagnntgagggancggngaaaannaccctatttagggagtgcaatcnagaacctgacatccgatgcgaacactcatccgaaggatcttacaagcctttacntgngcatttantgcagngcactnactcgaanggngtaccttntgcangnagggtcatcgagannntgggaanagcngctgannccattatgtgtnngcgcctttcacaggtggaatcttctnnttcntcnnacttgacccnnnccngnttgatntaaccatgngcatgttgaatcanagctcnaanagggcttggnggancgaacccangtttnt

SEQ ID NO: 233293 - DNA, 352 bp, Glycine max
cccgattcatttccaccagcacaagaagcatggctgcaatatcaataccttctcacatgaaagcttggacatactctgagtatggaaaatccaaggaagttctcaagtttaatcagagtgtggctttgcctgaggtgaaggaagaccaggtcctcatcaaggtcgctgctgcttcccttaaccccattgatcataagagaatggaaggcttttcaagaacagcgactcccctttacctactgctccgggttatgatgttgctggagtggtggttaaagtgggaagtgaagtgaagaaatttaaggttggggatgaagtttatggtgatatcaatgtgaaagctttggaatat

SEQ ID NO: 233294 - DNA, 393 bp, Glycine max
attccaatatattccattctctctgtgtatttccctacctctcccttcaagatgcagatcttcgtcaagaccctcaccggcaagaccatcacccttgaggtggaaagctctgacaccatcgacaacgtcaaggccaagatccaggacaaggaaggaatccccccggaccagcaacgtctcattttcgccggaaagcaacttgaggacggccgtacccttgctgactacaacattcagaaggagagtactcttcacctcgtcctccgtctccgtggtggcatgcagatcttcgttaagacactcaccggcaagaccataaccctagaggttgaaagctccgacaccatcgataacgtcaaggccaagatccaggacaaggagggtatccccccg

SEQ ID NO: 233295 - DNA, 398 bp, Glycine max
cttcaatctcgatcagacatgttcatgggttttgatgaaaatgatggggacgatgatataagagaggagtttctctgcccattttgttctgagtattttgatatcgttggattatgctgccacattgatgaagagcatccaatggaggcaaaaaatggggtatgtccagtttgtgcattgagggtgggggttgatatggtagcacatataaccctacaacatgggagtatatttaagatgcagcgcaaaaggaaatcacggaaaggtggatcgtattcaacactatctttattgaggaaggaactacgagaaggaaatttgcaatccctttttggcggatcttcatgtatagtgtcctcatctaatgcagatccactgttgtcatcatttatattgcc

SEQ ID NO: 233296 - DNA, 391 bp, Glycine max
  unsure (1)..(391): unsure at all n locations
caaaggagatgattcaaacacattgccctgctccagcacaagatattaagatattgagatgtggccccccacctatgaacaaggccatggctgctcaccttgaagcccttggatatgctcctgagatgcagttccagttctgattctcttcattgggggtgcttaacattgcatggatttcatggcctaggccattgaaaaacatatagcaactttttgtttcttttttcctggctatgaatctgagaaacattggactgacagtgcattcagtttcacaaggttcttcanagttgaggcctgaataattgcttcttgtatgaaatgagattgataacaccatgtgctagagttgcaaactatgacttgttagtattgactaaaattgtca

SEQ ID NO: 233297 - DNA, 395 bp, Glycine max
gcaaaccaattcaacacagtgaccgcagatggaaccaagcagaagaacatggccacaggaattgtgctccagaactgcgagatcttgccggagcaggctctgttcccttcaaggttccaaacgaaatcgtacttggggaggccgtggaaggagttcgcgagaacagtggttatggaatcgaacattggcgacttcattcagccagaggggtggaccccttgggatgggaacctgtatcttgatacgttgtactatgctgagtatgctaacgttggacctggttctaacgttcaaggaagggtaaagtggaggggttaccatcccaatattaataagaacgaagctgcacaattcactgctgcccaattcctcagaggtggacctgctggagatgc

SEQ ID NO: 233298 - DNA, 379 bp, Glycine max
actactttgactcctttaccataccattacaataattatcaaacctaaccagtaaaaatggtgaccgtggaggaaatccgcaacgctcagcgttcccatggacccgccaccatcttggccttcggcaccgccacgccgtccaactgcgtctcccaagccgattaccctgactactacttccgcattaccaacagcgaacacatgactgatctcaaagagaagttcaagcgcatgtgtgaaaagtccatgataaagaagcgatacatgcacctgacggaggagtttctgaaagagaacccgaacatgtgcgagtacatggcgccatcgctggacgtgagacaagacgtagtggtgatggacgtgccgaagctgggaaaac

SEQ ID NO: 233299 - DNA, 395 bp, Glycine max
gctggtgcatgtttatttgaagagcttgggttattctacattggcccagtagatggccatgacatagaagaccttgtgcacatcctgaaaagtgtcaagggtatgccgacacttggacctgttctcattcatgtaatcactgagaaaggaaaaggttatcatccagctgaagttgctcctgacaagatgcacggtgttgtgaaatttgatcctaagtcagggaagcaattgaaatccaaagctagtacgcggtcttacacgcagtattttgcagaatctttgacagcagaagcagaagttgatgagaaaattgttgccatccatgctgcaatgggaaggggcacggggcttaacttgtttcaaaagcgcttccccgaacgatgttttgatgttgg

SEQ ID NO: 233300 - DNA, 397 bp, Glycine max
gaaaagatctcaccccggtttggtaaagttacatgtggagatattgtagtcttgcgcaatcctcaacaccctaggcactttatgaccaaacgtctggttggattggagggtgatagcgttacatacatttccaatcctgagaccaatgaatatgagggtgatagttttacacacatttcctctcctgataacggtgataagtctaagacgattgtggtgccaaagggtgccgtttgggttgagggagataacaagtataacagcaatgattcaagaaaatttggtcctgttccttatgaccttattgatggcaagatgttctggaggataacgccacttaaaaaatttggacctttctggaataaatgatctgaagcaaagcattctgtcatggaag

SEQ ID NO: 233301 - DNA, 389 bp, Glycine max
atcagaactaagaatttctcagagcctgaaaatctttctgcatatgatggtttggagttccgcctaaaaggtgatgggcgtagatataaaatcattgttcgcacaagcagtgattgggacactcttggttacactgcaggctttgacactgagaaaggaaaatggcaatcaattcaagtgccattttcttccctgagtcctgtatttcgagcaagaacagtgtccaatgctccaccatttgatccaagcattgttgtatcattacagctcatgttcagcaagtttgagtctgatggtaaattaaatgaaacttttgtggaaggtccatttgagcttccggtgtctagcatacgggcatatataaaggatccaataacacccaggtttgt

SEQ ID NO: 233302 - DNA, 385 bp, Glycine max
tttctactcaaaacaaaacaaaacatcaatttctgtttcagttcgcggagatcaatatttgtcgctgaggtcgatcgtcgataaaaggcaatgtttttgtgggattggttttatgggattctaccgtcgcttggcctgtggcataaggaggccaagatcttattcttgggcctcgataacgctggcaaaaccagcttgcttcacatgcacaaagatgagagattagtccagcatcagcctactcaatatcctacatcagaggagttgagtattgggaagatcaagtttaaagcttttgatctcgggggtcatcagattgctcgaagagtttggaaagattactatgcccaggtggatgcaatggtgtacttggttgatgcttatg

SEQ ID NO: 233303 - DNA, 385 bp, Glycine max
tagcactcaccctcattaccaacacgaaagcatagccaaaaccttttttcgaagtctctgattttcctaatggctccggcaaaggcagagaagaagccggcggagaagaagccagcggcggagaaggcaccggcggagaagaagccgaaggcggagaagaagatctcgaaggaaggagggagcgagaagaagaagaagcgcacgaagaagagcgtggagacctacaagatctacatcttcaaggtcctcaagcaggttcaccccgacattggtatttccagcaaggccatgggcatcatgaacagcttcatcaacgacatcttcgagaagctcgcccaggaagcgtcgcgtttggctcgctacaacaagaagcccaacatcacct

SEQ ID NO: 233304 - DNA, 370 bp, Glycine max
cggatataaacaataaaataaaataaaacagaagagaaggaaacagaagtaaaaaaaaaataaaatgggttacacaagatcttctcttctgtccgtggctcttgtcttggcattctgttcaagcattcagggtttggacatcaccaaattgttgggcgaatatcccgaatatgcacagttcaacaaatacctaactgaaaccaagctggcggaccaaatcaacagccgtaacgccgttacagtccttgcccttgacgacgccgcaatggcttccctctccggcaagtcgcaagacgccgttaaggccatccttagcacccatgtgctcgtcaacttctacgacgagaagaagctgatggaagccgaaagt

SEQ ID NO: 233305 - DNA, 400 bp, Glycine max
gatcaagatgattatgaggttgtgcgcaaagtgggaaggggaaagtacagtgaggtttttgaaggcataaatgttaatagcaatgagcgttgtataatcaagattcttaagcctgtcaagaaaaagaagattaaaagagagataaaaatacttcagaacctttgtggtggcccaaatattgtcaagcttcttgatattgtcagagatcagcactctaaaactcctagcttaatatttgagtatgtcaacagtacagattttaaagttttgtatccaaccttgactgattatgacatacgctattacatatatgagcttcttaaggtaacgtgatccttcaatctctcatggtataccttgactggtgctctgtgtcctctccataatgtatatattggag

SEQ ID NO: 233306 - DNA, 397 bp, Glycine max
  unsure (1)..(397): unsure at all n locations
gatttgaagtttaaaccttcaaattaatcaaaccattttaatttgcctatagattctgagtcactgctgctatggcgctacgcgtacttcttgtgttggggatgttgctgatgttgtgccttgttaaggtttcatctgatccaaagatagaagaagaaatactggaagcagaagaagaactgcagtttcccgataacgagccacttatcgtgagagacgcgaacagaaggctaatgcaagatatggattgtggtgggttgtgcaagacgaggtgcagtgcacattcgaggcccaacttgtgcactanggcgtgtggcacgtgctgtgtgaggtgcaagtgtgtcncacctggtacatctggaaatanggaactatgtggaacctgctacactgatat

SEQ ID NO: 233307 - DNA, 390 bp, Glycine max
  unsure (1)..(390): unsure at all n locations
gcaatcttgcagctacatatgatgctatgggaagagtgggagatgcgattgaaatcttagaatatgtgctcaagttgagggaggaaaagcttggaatagcaaatcctgattttgaagatgagaagcgtcgtctggccgagcttctgaaagaagcaggcaagacacgggacagaaaagcaaaatctctggaaaaccttattgatcctggctcaaagaggacaaagaaggagggggcaaagaggtggcctggtttggggtttagaatttaaccatatttttgttcattaatatatatattgaatgcacattctgtaacatacgatatcttgtatagggttgaatttgggaaggagcttccctgtntcttgaaaattgttcatgcatttgttt

SEQ ID NO: 233308 - DNA, 398 bp, Glycine max
cgagaacaaaaaaaaaaaaaaaaaaaatccgcgattcgctcttctcttggaaaagtgaaaaccagaagtacgaacgaaagagaagagcgatttagaagtgagagaagatggggttgtcgttcacgaagctgttcagcaggttgtttgcgaagaaggaaatgaggattctgatggtaggtctcgatgctgctggtaagacaaccatcttgtacaagctcaagcttggagaaatcgtcaccactatccccaccatcggatttaatgttgagactgtggagtacaagaacatcagcttcactgtgtgggatgttggtggtcaggacaagatccgtccactgtggaggcattatttccagaacactcagggtctcatttttgtggttgatagcaatgataga

SEQ ID NO: 233309 - DNA, 375 bp, Glycine max
cggttgagtcatacttggaacaaattttatcacatggtttcttccatgctgaccctcatcctggaaatattgcagttgatgatgtcaatggtggaagattgatcttctatgattttggaatgatggggagtatcagtccaaacattcgagaaggtttgctcgaaacattttatggggtttatgagaaagatccagacaaggttctacaagcaatgattcaaatgggagttcttgtccccactggagatatgactgctgttagaagaacagcacaattcttcctcaacagttttgaagagcgcctggctgcacaaaggagagagagagaggaagcaacaactgaacttggattcaaaaaaccattaagcaatgacg

SEQ ID NO: 233310 - DNA, 384 bp, Glycine max
gaaagataaagcattccatagcctcccataaaaatgaagaatactatcttctctgctctctttctactttgtgccttcaccacctcatacctaccttcaaccaccgcggtggtcgataccgacggtgatattcttcagaatcctggcacatactttatcttgtccgtttttcgacccggcggcggagtagaattcgccgccactggaaacgaaacttgccctctcactgtcgtgcagactctcttcgggaggggctttccagcaatattatcgtcccggttacgaatccctttcatcggcgaaggacaactcttcagcatcctgttccgtattgtgccatggtgcgccaccactccttctaagtggaccattgtggagggttta

SEQ ID NO: 233311 - DNA, 392 bp, Glycine max
cgactcgatattggggcagtgctgcgagatgccgatagggttcgtgcagatccccgtgggagtagcggggccattattgttggatggaaaagaattcaccgtgcccatggccaccactgaagggtgtctggttgcgagcaccaacagaggttgcaaagctatatacgtctccggtggggcctcctcggtgttgcttagggatggtatgaccagagcacccgttgttcggtttccctccgcccagcgcgccgcgcagttgaaattcttcttggaggatcctctcaacttcgattctcttgctgtcgttttcaataagtcaagcagatttgccaggttgcagaatattcagtgtgctattgcgggcaagaatttgtacatgagattccgatgca

SEQ ID NO: 233312 - DNA, 394 bp, Glycine max
  unsure (1)..(394): unsure at all n locations
gaggtgcctcatcgacccttcagatcctccatgtctcgtctgcactcaatctctctccctcccacctcacctaaaccctaactacaggtgcaatacctctctgttaatcgattattactctcaaagcgacgccactcacaaatatatattgatcgacgctggcaagaccttcagggagactgtacttaggtggtttgttttccatcacattccaagaatagattctattcttttgactcatgaacatgctgatgcagtccttggattggatgatatacgagctgtgcagccgtttagtcncactaatgatattgatcccacccccatttacttaactcggcattcaatggatagcatggaaaaggtgtttccttatttggttcaganaaaacac

SEQ ID NO: 233313 - DNA, 391 bp, Glycine max
  unsure (1)..(391): unsure at all n locations
ggtggttggtgcaaccctcctttgcaacactttgatatggctgaacctgccttccttcaaattgctgaatatagagctggaattgtgcctgtggccttcaggagggttccttgtgtgaaaaagggaggaataaggttcacaatcaatggccactcttacttcaacctagttttgatcaccaatgtggctggagctggtgatgtgaattcagtgtccattaaagggtccaaaactgggtggcagcccatgtcaagaaactgggggcaaaactggcagagcaactcatacctcaatggacaatcnctctcttttcaagtcaccaccagtgatggcagaactgtgacaagcttcaatgtggcaccagccaattggcaatttggccagaccttcc

SEQ ID NO: 233314 - DNA, 402 bp, Glycine max
ctaatcaataccgcaagggtccaagcccaacgctacacatacgcctatcaagagcccatgccagttgagcagttagttcagtctctctgcgataccaagcaaggttacacccaattcggtggtcttcggccatttggagtttcgttcctatttgcaggatgggacaaaaactttggctttcagctttacatgagcgaccctagtggaaattatggtggctggaaagctggagccattggggcaaataaccaggcagcacaatcaatactgaaacaggactacaaggatgacatcacaagagaagaagcagtacaacttgcattgaaggtgttaagtaaaaccatggacagcacaagtctaacctcagaaaagcttgaacttgcaaaggttttcctttcaccc

SEQ ID NO: 233315 - DNA, 397 bp, Glycine max
ggtgaggtcagcggggttttccttgacactttgcttgaattcgctgaggatgagaccatggagatcaaaatcaccaaggaccacatcaagggtcttgttgtcgactttttctcggcaggaacagactccacagcggtggcaacagagtgggcattggcagaactcatcaacaatcctaaggtgttggaaaaggctcgtgaggaggtctacagtgttgtgggaaaggacagacttgtggacgaagttgacactcaaaaccttccttacattagagcaatcgtgaaggagacattccgcatgcacccgccactcccagtggtcaaaagaaagtgcacagaagagtgtgagattaatggatatgtgatcccagagggagcattgattctcttcaatgtat

SEQ ID NO: 233316 - DNA, 282 bp, Glycine max
  unsure (1)..(282): unsure at all n locations
ggttatctcaagtggattggccaagagcggacctttttggatatataatcaaaagagtggagttacgggaacagccgtctgatggaaaactactttcacgttcggttcagagagcactttatttttcgtcgagaattcttcgttccctttcgtgtgaattccccagcggcgaattcaaaacttttttggccctatctattccatctctcgagccccgaagaaaacccccctccccttcggactccatatctctctctataaaaaaaaaanannnanannnnn

SEQ ID NO: 233317 - DNA, 376 bp, Glycine max
gccctatctcatagggtttccaccctctctctcatgcatttttgctctcacgagttcttctttgccgttgccctcttattctttgctgtatttggagccttcttttgtgtggaacagagcagatttcacctccctgggttttttgaaccgtgcccatgtctaaagttttcagctttaccggaaatgatgatttctaccatgggggccctatttatcctaacccgaaggaaccatgtctcttcttgtctcttggccgtcaagttgatgtttaccttcctcttcagaagaggtctcgcttcagtgttccatttgatatcagcggagaatggtttgagcagaagcagaagccaaagacatctattgaatctttgccaga

SEQ ID NO: 233318 - DNA, 393 bp, Glycine max
acttgccttatttttggttttgagattgagctaaaggccaactcaaccatcgaatttgttggtgattgaaagagaaggaagaagaagcaggaaatggaagcagtgagagctggtcgagaaggagcaataggtctaggtcaaggtgatggcgtagccaaggacagcactgagactgaactcaccaaaatccgtctcctcagggcaattgttgaaacccgtgatccctcttccaaggaagaggatgattttatgattagaagattcctgcgtgctcgtgatttagatgtagagaaggcttcggcaatgctcctcaagtacttgaaatggagaaattcatttgttccaaatggctctgtatctgtgtcagatgttcctaacgaacttgcacaagat

SEQ ID NO: 233319 - DNA, 395 bp, Glycine max
aggtctactctaaaggatactctcggggaattccatgttccacattttcatgatataatgaggctaaaaggttcatctatgatttggattgatgtgttttcttattaagcgtatcctgaacccgaaggagatgagatgggaattcctcggggaattccaattcgacatgttcaagagatggcgatgccaaggtgttcatagatgaagtggacataattgtctgcctcgtcagggtatctggtgaccaccggaattgagattcgaatgcctcggggaattctaattccacattttccctgcgtgcagatgcattagtggtcatgtatgcttcggcaatacttctcatgttattacgctgaacatgatcccttgggcaatgaggatccgatatccgt

SEQ ID NO: 233320 - DNA, 399 bp, Glycine max
ctgcaattacgatggcgcccagggacaagactagtgccgttaagcctagcggtaacgccggggtgaaggacctgcattttcgtggagtcaggaagagaccgtgggggaggttcgccgccgagatcagagatcccgccaagaagacccgcgtctggctcggaaccttcgacaccgcggaggaggcggcccgtgcctacgacgccgccgcgcgggagtttcgcggccctaaggcgaagacaaacttccctctcccttcggaaaattttaagaacgcgagccctatccaaagcagcacggtggagtcctccagccgcgaccgcgacgtcgccgccgattcctctccgctcgacctcaacctcgcccccgtcgccgtctcctccgctcgattccccttccgga

SEQ ID NO: 233321 - DNA, 399 bp, Glycine max
  unsure (1)..(399): unsure at all n locations
tataccttcctctattggccgtctctcacatttgcaaattatgaacttgtctaccaatttcttctctggtgaaattcccgacattggagtattaagcacctttgacaagaactcgtttgttggcaatgtagatctttgtgggcgacaagtccaaaagccatgtcgaacatcacttggtttccctgtggtgctaccacatgctgaaagtgatgaagctgcagtccctaccaaaaggccttcacattacatgaagggggtcctaattggagcaatggcaattttgggtctcgcacttgtcataatcctttcattcctctggactcgtttgttatcaaagaaggaacgagcagcanagagatacactgaagtcaagaaacaagctgatccaaaagcaagcac

SEQ ID NO: 233322 - DNA, 390 bp, Glycine max
  unsure (1)..(390): unsure at all n locations
aaaggagaagatgaaatgggatatgcagatggaggaaatcgaagcgattatggagaaaatttgggacctccacgataagctcagcgacgccattcactccgtctccagatcccactttctcacttccgtcaaaaccctcaaactcaacaactctccaccgcaccttcccaacgccgccgtcgccgctgccgatgaccgctcctccggtttcgttttcgtcaaggactttagaccgctcgccgtcgccgataacgacaacgatgacgatgactccgccgtccgcgaagccaagagcctcaacgccatccggaccgccctcgagaacctcgaagaccagctcgagttcttccatactattcanacccagcagcgtgttgagagagatgccgc

SEQ ID NO: 233323 - DNA, 393 bp, Glycine max
  unsure (1)..(393): unsure at all n locations
tgaatttgttgttgaagatgtgtccactcagcacgtaactgttaaagtttatgattctgagggtttacagtcatctgaattgattggatgtgctcagctacagcttagtgaacttcaacctggtaaagtaaaggatgtttggttgaagttggtcaaggatttggagattcaaagggatacgaagaacagagggcaggtacatttggagctcttgtactgtccatttggcatggagaatagctttacaaacccatttgctcccaactactcaatgacatctttggaaaaggttcttaaaaatgcgaatggagtanagtctaatggaaatgaaaacgcagttacccaaaagaaaaaggaggttattattagaggagtcctttctgttactgtaat

SEQ ID NO: 233324 - DNA, 397 bp, Glycine max
gttgatttaattggaaagccaggaaacttatccgagcctgattccttgctcaatggtccatcttccatctcattttcttcacccttgcgctttccacgacttaaaccagctgaaactaccattgatttcaggtcactggccaaacagtatttctcggactgtgtgtctcttgagcttgtctttgacaacaattctgcagaacagtttgatgggaagtgtaaagacaggaataaccctaggccaattttgactgacagcaatagaagttctcaccttcctctgcatcctcaagattctcatccaagctcacgggaacaaggttccgaaacatatcaatcatgtaaccctcctcagaacattgtagactcgactgtgggaaagtatccaccaccaataa

SEQ ID NO: 233325 - DNA, 396 bp, Glycine max
attgcttccctctatcgtcttctccccccttccttcaatggtcctaagggttccggggtccaggcgtaacagctccgcactaatgcgcttttggaacccgtgttcatctgtatccaacgatttactagaaggaggtcgcaatttctccatcttcacatttcgctagcacgtgaaatcaaaagttatcgacactttcgcgcgacacgaaatattgggaaccaagcaaaatatctatggctgacgaaccattatatccaatagcggtgcttatagatgagttgaaaaatgatgacatccagctgcggttaaactcaattcgtaggctatcaacaattgcacgtgctcttggggaggagcgaacccgtcgagaattaattccatttttaagtgaaaata

SEQ ID NO: 233326 - DNA, 350 bp, Glycine max
  unsure (1)..(350): unsure at all n locations
ctctcacacaaaataatggacaagaagcttggcaacacgtctcatgatcctgaagtgagaaaggggccatggacaatggaagaagacttaatcttgatcacctatattgccaatcacggggaaggggtttggaactctttggccaaggctgctggacttaaacgtaccggaaagagttgccggctccggtggctaaactacctccgtcctgatgttagaagagggaatattacacccgaggaacagcttttgatcatggaacttcatgcaaagtggggaaacaggtggtccaaaattgccaagcatctacccggaaggactgataatgagattaagaactactggangac

SEQ ID NO: 233327 - DNA, 238 bp, Glycine max
tcgcaatcaacgcgcatttcagacgcgtctacatccgtcacgagcaccttgatagcacggagtttccccctttcaccatcctcacagtgcgctcgcgttctgacactgacgtttaccggacattcgcccgacattatctcttcgggaagcgtcacgatttctatggctgacgaagcattagatccaagatcggtgcatgtcgatcacttgaagtttggccgtgtccatctgccgttcg

SEQ ID NO: 233328 - DNA, 390 bp, Glycine max
agaacttcaactgagggtgagagtgacacaaatctagggagcactactctaaaagttctattagattcttcaaaacatgaccatgcatcgcgagtcttgggcttttgtcttcggcgttatgggcaacatcatctcctttggagtgttccttgctccattgccaaccttttaccaaatctacaagaagaaatccactgaagggttccagtcacttccttatgttgttgcactgttcagtgcaatgctttggatttactatgctttcgtcaaaagggaagctgccctccttctcattaccattaacacatttggaattgttgtggagtcaatttaccttgcaatcttcctactttatgccccaaggaagcctaggcttacaaccatcaagct

SEQ ID NO: 233329 - DNA, 387 bp, Glycine max
cgttctttctctcgcaatcttcactacattcaccgagcatttgcattcacattgaatatggctgagactacacaatctaatgctgagttgttggagtggcctaagaaagataagcgccgcttcctgcatgttgtgtatcgtgttggtgatcttgatcgcaccattaagttttatactgaatgttttgggatgaagcttttgaggaaaagagatattccagaggagaaatatgccaatgcttttcttggatttggccctgaacaatcccattttgttgtggaattaacatacaattatggggtgacctcatatgatattggaactggatttggacattttgctatcgcaactccagatgtttacaaattggttgaagacatccgggct

SEQ ID NO: 233330 - DNA, 380 bp, Glycine max
aaaaaaaatatccatagtataaattaatgacaattatttagaacacatggcttaaggtcaaacagaatgatacaacttacagctgatctggaaagacaacaaagcaatgaatcgagagatccctaaaaacacagaaaaaacgtcttccctagtatataaagtgcctcaacatcaaacacgactctcgcctcgaaggcctcatcaagatggcagatctcactattaatctggctgcgatttgcactcccgcggattacaacactcgccctctcgacaccatttacagcaatttcatcgacgcgctccccgtggtgaaatactgttccgagaacaacaagcgccttatccatttctccacttgcgaagtgtacgggaaaacg

SEQ ID NO: 233331 - DNA, 398 bp, Glycine max
  unsure (1)..(398): unsure at all n locations
tcacctgaaccctgctcactacattagtgagattattagagaaggcactaaaaatggcactgctttctttaagtgccatggccatgagcaatttgagatgacaggtttggaccctgagtataatagattgttcaatgagggcatggtgtgcactgctagggttgtgtccaaggctgtgatcactgggtacaaagatgggttcaaccagattaagtccttggttgatgttggaggtggcattggagggtctctttctgagattgttagggcttatcctcacatcaatgccatcaactttgacttgcctcatgtggttgccactgctcctaagtatgatggaatcacncatgttggaggtgacatgttcgtgttcattccagatgctgatgctatttaca

SEQ ID NO: 233332 - DNA, 396 bp, Glycine max
tttgcaaccattaaccatctccactttcaggcatattacttggctctgccttttccaattgagaaggcccctactaagaaaattgccaagttaagcggtggagtgaaaatatctaaactgttaaactatcctgtcagaggccttgtctttgagggcggtcattctctagagggtttagcaaatgttgtttcagaagcctgcatctgccttcagcacaacaacataccttacaatatacttatttcagactgtggaaggcaaatctttctcttaccacagtgctatgcagagaaacaagcccttggagaagtgagtgccgagcttctggagacacaagtgaatcctgctgtgtgggaaatcagtggtcacttggtgctgaagaagaagaaggactat

SEQ ID NO: 233333 - DNA, 392 bp, Glycine max
  unsure (1)..(392): unsure at all n locations
aaaagcatgcatatacggcatccagtacggtgacagttcgttctccgttggctacttcagccgcgagcggctctccgtgaccgccaccgacatcgtcgacaacttcctcttcggttgcggccaaaacaaccagggcctctttggtggctccgccggcctcatcggcctcggccgccaccccatctccttcgtccaacaaaccgccgccgtatatcgtaaaatcttctcctactgcctcnccgccacctccagctccaccggccgcctctccttcggcaccaccaccacttcctacgtcaagtacacccccttctccaccatctcccgcggctcctccttctacggcctcgacatcaccggcatctccgtgggcggcgccaaactcccagtct

SEQ ID NO: 233334 - DNA, 393 bp, Glycine max
gctggacattacattccagctcttgcatccagggttcaccaaggaaacaaagcaaaagaaggaattcatataaatctaaagggatttgctattggtaatgggttaaccaatcctgaaattcagtaccaggcgtatacagactacgcattagacaggggactaattaaaaaggctgaatataacagtatcaacaagttgatcccaccatgcaagcaggccatagaagcttgcgggactgaaaggtggagaaacatgcgtatcttcattatatgtttgcaataagatattcaatcggatcatgaccattgctgatgatgttaattactatgacattagaaagaaatgtttgggagtctcgtgttatgacttctctgtgatggaggatttcttaaa

SEQ ID NO: 233335 - DNA, 350 bp, Glycine max
atcaatggcaccgaaacagaccaaggctgagaagaagatcgcttacgatgcgaagctgtgcgacctaatggaggagtacggccaaatcctcgttgtaaactccgacaacgtgggatcgaaccagctccagaacattcgcaagggtctccgcggcgactctgttgtcctcatggggaagaacaccatgatgaagcgctctgtcaggatgcacgctgagaaaaccggaaacaatgcctatctcaaccttatccccctccttgtcggcaatgtgggattgattttcaccaagggtgacctgaaggaggtcagtgaggaggttgctaagtacaaggttggagctcctgctcgtg

SEQ ID NO: 233336 - DNA, 397 bp, Glycine max
aacgccgttgccaaaaaatagatacttgtttcttattcacgtagtattttaatacttagtcaaacacgatagcatgaacccaagatttttgacaattgtttctcaacaagagagattttgattttagcagacaagcaatggcaagtgcgttgggtagcagagttgaatctgttcgaaactctcacttactaagcttttcgctcaactccattagatccttgagttcatcttcgtcatccgccgtttcttctgctcagaaccctaagactaagaaatcgaagcgaagaaagaagaacttgttcgatgtggctcagttcttacctaactggggaatcggctaccacatggccaagactcactggaatgaagtttcttacgaaatcactagaatcaatct

SEQ ID NO: 233337 - DNA, 309 bp, Glycine max
gatttttcatccttggagatcgatgctaatctcatgaaattgctcctaccaagacttggatttgccccataccttcctccagttgaggagggtgcaaattctgcgttgaagagagcatttgaggccttgaacactcatcttgcctccaatacttaccttgttggccattctgttacccttgctgacatcataacaacatgcaacttgtatttaggattcagccagctcttagttaagagcttcacctctgagttccctcacgttgaacgatacttttggaccttggtcaaccagcctaacttcagaaag

SEQ ID NO: 233338 - DNA, 413 bp, Glycine max
ggacgcacctgctgttggcttgttgttcaaggatggcaatttgtaaaaaagatgtttggagagttgaatgtggaatcccttctggatttccgctcacagttatttgcaatagcatttttaatgagatgctcattagatatagctatgaaaaattactgcgtcaggctaaagctccaagtatgtttttacaatccttcaaaaattttgtttctttgtgtgtgtatggtgatgacaacttaattagtgtacatgaatatgtcaagccttactttagtggttctaaattgaaaagctttctagctggtcataatatcaccattactgatggtattgacaaaactagcgcaactttgcaatttagaaagttagcagattgtgactttctcaaaagaaactttaagcagatgtctaac

SEQ ID NO: 233339 - DNA, 393 bp, Glycine max
  unsure (1)..(393): unsure at all n locations
agcgcattggaaatgtgagtactggattgagtgaggaaaccctatcgaaactcttgaaacagagaaagcactcggttgaaaaagggtctgagactgatgcagaatcctgttgtgtttgtcaggacgattatggtgatgggactgatattggaacgcttgattgtggccatgatttccatagcagctgtatcaaacagtggctaatgcaaaagaatctgtgtcccatttgtaagacaacgggcttggcaacatgatgtatgtgactctctgtcctcaggcaaataccatgaccatgaaggaaaaaaaaaattggcacaatttacccaggaaattctggtgcttggtgccttgtcntctgtttccagcctagtaaattggcgtacctgactgaca

SEQ ID NO: 233340 - DNA, 402 bp, Glycine max
gttcaatatcctagtacaccgtattaaagaatttaagatatactatgatgagagcgcggttcccattactgttgctgggagttgttttcctggcatcagtttctgtctcatttggcattgcgtattgggaaaagcagaaccccagtcacaacaagtgcctccgaagttgcaatagcgagaaagactcctacaggaaccaagcatgccacgctcgttgcaacctccttaaggtggaggaagaagaagaatgcgaagaaggtcaaattccacgaccacgaccacaacacccggagagggaacgtcagcaacacggtgagaaggaggaagacgaaggtgagcagccacgtccattcccattcccacgcccacgccaacctcatcaagaggaagagcacgagcaga

SEQ ID NO: 233341 - DNA, 368 bp, Glycine max
tacttgtgggatatggtgcaaaaggcttctcaattcttaggcttggcaacaaaccatactggatcatcaagaattcgtggggggagaaatggggagaagatggctattacaagctctgcagagggcatggcatgtgtggaataaacactatggtttctgctgcaatggtgcctcaaccacaaacaacacctacaaagaattatgcttcttattagctatgcacttaaggaaatctaaataaatatttttcattctaggtgatgtatcatgtatgtaccaaaatattttggtacgtaagtcttttaaaaagtttgcatctcctctttggttttccttagttctgaaagttatctcctaagaagacaatc

SEQ ID NO: 233342 - DNA, 362 bp, Glycine max
cgcattttggagttcaactccaaacccaacaccctccttctccccaaccatgctgacgctgattacctcatcgttatccttaacgggactgccattctttccttggtgaacaacgacgacagagactcctacagacttcaatctggtgatgccctgagagtcccctcaggaaccacatactatgtggtcaaccctgacaacaacgaaaatctcagattaataacactcgccatacccgttaacaagcctggtagatttgagagtttcttcctatctagcactgaagctcaacaatcctactttcaaggattcagcaggaacattttaaaggcctcctacgataccaaattcgaggagataaa

SEQ ID NO: 233343 - DNA, 394 bp, Glycine max
gtggaaaccccagagcacttagaaggttgaggactgcttgtgagagggccaagagaacactttcatcgactgctcagaccaccattgaaattgattctctatacgagggaattgatttctactccactgttactcgtgccagatttgaggagctcaacatggatctcttcaggaaatgtatggagccggtggagaaatgtttgagggatgctaagatggacaaaagaagtgttgatgatgttgtccttgttggtggttctaccagaattcccaaggttcaacaactgctgcaggacttctttaatggaaaagagctttgcaagagcattaatcccgatgaggctgttgcatatggtgcggctgttcaagctgcaatcttaagtggtgagggcaa

SEQ ID NO: 233344 - DNA, 411 bp, Glycine max
acaaatccttcacttgttgctcgtcttagtttctgtgttgtgtcatttttattgctatatcctaattaaacttcaccctcaaaatgagtgatcccacactagcacaaccacacctagtcgaagtccacacaacactcgaaaccgttgttaccacacacaaccataaccatagaccctcaataaatgcctcaggtgaaaagaagaaaattgtgggggtgttctacaaagggaatgagtatgctaaattgaaccccaatttcgtggggtgtgttgaaggagcattgggtatacgtgagtggctggaatcacagggtcatcagtacattgtcactgatgacaaagaaggaccagattctgaacttgagaaacacattccagatggccatgtcatcatatctactccaattcacc

SEQ ID NO: 233345 - DNA, 408 bp, Glycine max
  unsure (1)..(408): unsure at all n locations
gcgaaatatcttcgcgtgatactggaaagacaatggtagatgcctctttaggagaaataatgacaacatgtgagaagatcaattggctactgtcagagggtgagcagtggttaaagcctgaataccggtcttctggaagatcaatgcttcataagagagctaaagtagaatttcatcnccttggtgttattggagccattgtttcatggaattatcccttccacaatatttttaatcctatgctggctgcaattttttctggaaacggtattgtgattaagatatcagaacatgcaagttggtctggatgcttctacttccggatcatccaatcagcccttgctgccataggagctccagaggaccttgttgaggtgataacagggtttgctgaaacaggagaagcat

SEQ ID NO: 233346 - DNA, 409 bp, Glycine max
aacgaggacacagctgagaaacttcggtctccagatgacgaaaggaagcagatcgtgacagtggagggaggcctcagcgttatcagccccaagtggcaagaacaagaagacgaagacgaagatgaagacgaagaatatgaacaaactccctcttatcctccacgacgaccaagccatggaaagcatgaagatgacgaggacgaggacgaagaagaagatcaacctcgtcctgatcaccctccacagcgaccaagcaggcccgaacaacaagaaccacgtggaagaggatgtcagactagaaatggggttgaggaaaatatttgcaccatgaagcttcacgagaacattgctcgcccttcacgtgctgacttctacaacccaaaagctggtcgcattagcaccctcaaca

SEQ ID NO: 233347 - DNA, 358 bp, Glycine max
caagaatgctatgttcgtgccacactacaccctgaacgcgaacagcataatatacgcattgaatgggcgggcattggtacaagtggtgaattgcaatggtgagagagtgtttgatggagagctgcaagagggaggggtgctgatcgttccacaaaactttgcggtggctgcaaaatcccagagcgataactttgagtatgtgtcattcaagaccaatgatagaccctcgatcggaaaccttgcaggggcaaactcattgttgaacgcattgccagaggaagtgattcagcacacttttaacctaaagagccagcaggccaggcaggtgaagaacaacaaccctttcagcttcctggtt

SEQ ID NO: 233348 - DNA, 379 bp, Glycine max
tgcttgcacaaaagcaatgactatgtcatttaatccaaacccgtgttctgatgcatggagtttggaatttctgaagcgtactggatttcattgcgatatcatttgtgtcactggatggactgccaccccaatgcaggatgttcaggttacaattgattggtttatttcctctcaggaatgtgttcccaggacctattgtgttttaaatccacaaaatccttttgtgttaaataggtggatgggaaaattgactttcccccagggcacttcccgaagtgttaagagaatgcctctttctatagggggaggagctggtgcaaagaatgctattctcatgaatatgccaaatgctgttctttcaatgtggagatattttgtt

SEQ ID NO: 233349 - DNA, 350 bp, Glycine max
atttaatccaaacccgtgttctgatgcatggagtttggaatttctgaagcgtactggatttcattgcgatatcatttgtgtcactggatggactgccaccccaatgcaggatgttcaggttacaattgattggtttatttcctctcaggaatgtgttcccaggacctattgtgttttaaatccacaaaatccttttgtgttaaataggtggatgggaaaattgactttcccccagggcacttcccgaagtgttaagagaatgcctctttctatagggggaggagctggtgcaaagaatgctattctcatgaatatgccaaatgctgttctttcaatgtggagatattttg

SEQ ID NO: 233350 - DNA, 362 bp, Glycine max
gagaaacaaagaaaggaaataattgatctttgaaaatgcagggaggaaagaaagctggagagtccatcaaggaaacagctgcaaacattggtgcttctgccaaggctggcatggagaaaaccaaggccactgtccaggagaaggcagaaagaatgacggcacgtgatccgatgcaaaaggagttggcaacccagaagaaagaggcaaagatgagccaggcagagctggacaagcaggcggcgcgtcagcataacacggcggcgaagcaggctgccacggcagggcacatgggacaacccatggggacccatcagacgtcagctatgcccggtcatggaaccggacagcccacgggccatgtc

SEQ ID NO: 233351 - DNA, 381 bp, Glycine max
attatgctaattcgaatcaaatttctttttgactacaaactatataaaggatctttttattttattttaatttcaatcataatacacacacattttaagtagaccttcattttttaggtagttcttttgttcatttttgtttagatacttacttggattccacaaatgcttgttctttttaacagcatcttgaggagcttcttgaatattttcgctttggactgtggtgggttgcccttggggttgcttcttcaattggtctaggatctggtttgcacacatttgtcctatatttgggtccccacatagcactgtttacaataggagcagtgcaatgtggccgagttgatttgaaaagtgctccttatgatacgatacaat

SEQ ID NO: 233352 - DNA, 410 bp, Glycine max
  unsure (1)..(410): unsure at all n locations
ctcgtcttttgggcaccattcctcagtccatttcacagcaaactgtttggaatcaaatggcaacagtgagaacaccattgaattttgattctagcaagcagagcttttgtcaattctctattgatcttcttggtggaggaattttagtggacaaaactggagattggatcacacttatacaaaattctccaattagtaacttgttgagagttgctgcttggaagaaaggctgtttaatggttaagattgtgatgtctgggaatgcagcagtcaaaaggagtgattgggcctcattggtacaagtgtttttaacaaacagcaacagtacagagcattttgatgcatgtaagtggacaaaatcggaaccacattcctgngaattgatcttcccaatagaggtatgcggtcct

SEQ ID NO: 233353 - DNA, 405 bp, Glycine max
gctgatcttataaaaagaggaatggcaattgaggatccatcgtgccctcatggcattcgccttgtgatagaggactacccttatgctgttgatggacttgagatatgggatgctatcaagacatgggtccatgaatacgttttcttgtactacaaatcagatgacacacttagagaagatcctgaactccaagcctgctggaaagaactcgtacaggtgggtcatggagacaagaaaaatgagccatggtggcctaagatgcaaactcgtgaagagctagttgaagcttgcgctatcatcatatggactgcttcagcacttcatgcagctgttaattttggacagtatccctatggaggtttaatcttaaaccgtccaactcttagtacgcgattcatgcctgag

SEQ ID NO: 233354 - DNA, 412 bp, Glycine max
tttttgttccctctctgccgttaaccttttggacctcaaaggggggccccgaaaacctccccttccaagccggaaataaacaacctcccaagccccaccaccacaaccttcaaaagcaacaaggaaatttcctggcgtgaacccatcagcaacgcttcggaggcttgggataaaatttgatttgaaagttaaaccgacaagagcaagctcgatgctcagccaaagctcttcattcgtcttgtgcccgacaaggccaacaagactctttccgttattgacagcggcattggaatgaccaaagcagatttggtgaacaacttgggtaccattgcgaggtccgggaccaaggagttcatggaggcattgcaggctggtgctgatgtaagcatgattgggcagttcggtgtggggt

SEQ ID NO: 233355 - DNA, 486 bp, Glycine max
ttcccgaagtcaatttaggtgacactatagaagagaatgacgtcgcatgcacgcgtacgtaagctcggaattcggctcgagaggaaactctggtggaggcccgcagcgatactgacgtgcaaatcgttcgtctgacttgggtataggggcgaaagactaatcgaaccgtctagtagctggttccctccgaagtttccctcaggatagctggagcccgcgggcgagttctatcgggtaaagccaatgattagaggcatcgggggcgcaacgccctcgacctattctcaaactttaaataggtaggacggtgcggctgctctgttgagccgcgccatggaatcgagagctccaagtgggccatttttggtaagcagaactggcgatgcgggatgaaccggaagctgggttacggtgcccaactgcgcgctaacctagaccccacaaagggtgttggtcgattaagacagcaggacggtggtcatggaa

SEQ ID NO: 233356 - DNA, 406 bp, Glycine max
ctcgagccgattcggctcgagctttgaagtttctaagatgacttctccctacattaaatgtacagtctctttcttcatagcatttggaaatttggctgatgacaccatcaattttgaggcttttccccacaagctggtgcagtttggagagattcaggaaaaagttgtattgaaattttcacaagaggaatttcttacagcttggtcaactcaggtgcgtcctgcaacaactctgttggctgatgggtgcccatatttgtatgctatggtgcatgatagttcagtgtctacaataccaggtgattttgtcattggtgttaagttgacaaccataaacaatatgtgtgcatatgggctcaatcctggtatttcaggttctcgtcttttgggcaccattcctcagtca

SEQ ID NO: 233357 - DNA, 209 bp, Glycine max
gaggaaggacacatgcagaagtgctgcagcgaaatgagcgagctgaaaagccccatatgccagtgcaaagcgctacagaagataatggataaccagagcgagcaactggaggggaaggagaagaagcagatggagagagagctcatgaacttggctattacgtgcaggttgggacccatgatagggtgcgacttgtcctccgatgactg

SEQ ID NO: 233358 - DNA, 384 bp, Glycine max
tcggggaattccaattccacattttcaagaaataaggaggcaaaaatgttcatatatgaattggaattatttgttttcttattaggcctatcctgaagccaaaggaaatgagatcggaattcctcggggaattccaattccacattttcaagaaataaggaggcaaaaatgttcatatatgaattggaattatttgttttcttattaggcctatcctgaagccaaaggaaatgagatcggaattcctcggggaattccaattccacattttcaagaaataaggaggcaaaaatgttcatatatgaattggaattatttgttttcttattaggcctatcctgaagccaaaggaaatgagatcggaattcctcgggggtaacgaac

SEQ ID NO: 233359 - DNA, 374 bp, Glycine max
ggaattttagtggacaaaactggagattggatcacacttatacaaaattctccaattagtaacttgttgagagttgctgcttggaagaaaggctgtttaatggttaagattgtgatgtctgggaatgcagcagtcaaaaggagtgattgggcctcattggtacaagtgtttttaacaaacagcaacagtacagagcattttgatgcatgtaagtggacaaaatcggaaccacattcctgggaattgatcttcccaatagaggtatgcggtcctaataatggttttgaaatgtggagttctgagtgggcaaatcaaacttcatggcatttgagtttccttattgacaatcccaaacagtctacagtttttgacat

SEQ ID NO: 233360 - DNA, 382 bp, Glycine max
gggctgctgaatatgctagtgatgcggctcataggaccaaagagtatgctggtgatgctaccaagagaagcaaagaggcttctaatgatcatgccaatgacatggctcagaagaccaaagactacgccagtgacactgctcagagaaccaaggaaaaactccaagacattgcatctgaagctggtcaatacagtgcagagaaagctagagaaatgaaggatgcagcagcagagaaggcaagtgacatagcaaaggctgcaaagcaaaaatcacaagaggtgaaagagaaattaggtggacaacaccgggatgccgagctttgagaattgagatgtttgaatcactttgaaccttttaattatgccacaatagttgtctaaat

SEQ ID NO: 233361 - DNA, 357 bp, Glycine max
gggctgctgaatatgctagtgatgcagctcataggaccaaagagtatgctggtgatgctaccaatagaagcagagaggcttctaatgatcatgccaatgacatggctcagaagaccaaagactacgccagtgacactgctcagagaaccaaggaaaaactccaagacattgcatctgaagctggtcaatacagtgcagagaaagctagagaaatgaaggatgcagcagcagagaaggcaagtgacatagcaaaggctgcagagcaaaaatcacatgaggtgaaagagaaattaggtggacaacaccgggatgccgagctttgagaattgagatgtttgaatcactttgaacctttta

SEQ ID NO: 233362 - DNA, 404 bp, Glycine max
atacactctgcttcttctgatgccatcactctccccgcttcgcctaccaccgcgctggtccacgcaaaaacatctactttgacccttccattgttcgcgttgccattgtcacctgcgggggtctctgtcccggccttaacaccgtcatccgagagcttgtcgtgggcctgtggcaactctatggcgtccgtcatattttcggcatcaccgccggctacagggggttttactcctctgtcccactccccctcaatcccaaactcgttcatcattggcacaacgtcggtggcaccctccttcagacatccaagggcggtttcgaccttcataaaatcgtcgatgccatccaaactcacgccttcaatcacgtgtacattatacgtggagatgggactatgcgagga

SEQ ID NO: 233363 - DNA, 491 bp, Glycine max
  unsure (1)..(491): unsure at all n locations
ngcaagctatcctcaggcaatggagagactacttgcatgcgatgcaggtcgactctagaggatcccctcggggaattccaattccacattttcaagaaataaggaggcaaaaatgttcatatatgaattggaattatttgttttcttattaggcctatcctgaagccaaaggaaatgagatcggaattcctcggggaattccaattccacattttcaagaaataaggaggcaaaaatgttcatatatgaattggaattatttgttttcttattaggcctatcctgaagccaaaggaaatgagatcggaattcctcggggaattccaattccacattttcaagaaataaggaggcaaaaatgttcatatatgaattggaattatttgttttcttattaggcctatcctgaagccaaaggaaatgagatcggaattcctcgggggtaccgagctcgaattccctatagtgagtcgtattaaattcgtaatcan

SEQ ID NO: 233364 - DNA, 414 bp, Glycine max
  unsure (1)..(414): unsure at all n locations
cagtcnctggagaagtgggcccaacaagctggtatagattaccaagattttcctgatctgtgtaacaaacctgaaactgtcactgaggttcttcagtctatttccaagaaagggttacttatggaggggcttaccagaaaggctaagtgaagcattgtagagtgtcaactgcggcgatgtcacctatcaggctatcaagggtggtgctatagtanggacttggatatcatcaagtgcttaagtcccacatcgactagtatgtgaaggaggttgcaaaatctgcaaagctggagaaaactgaaatccctgcaaagattaagttgctgccggatccatggactcctgaatctggattggtcactgcagctctcaagataaagagagagcagctgaaagccaaattcaaagatgagc

SEQ ID NO: 233365 - DNA, 408 bp, Glycine max
gaatcagcaccacattcacctgagctttttgtgaggattccaaagcatggcttcccttgcagcatccactgctgctgcttcccttggcatgtcagaaatgcttggaaaccccatcaacctcagtggtgccacaaggccagctccatctgcctctagccctgcctccttcaagactgtggctcttttctccaaaaagaaggctgcacctccaaaaaaagctgcagctgctgctcctgccaatgatgagcttgccaagtggtatggtcctgacagaaggatcttcttgcctgagggtctcttggaccgatctgagatcccagagtacttgaccggagaagtccccggagactatggttatgacccatttggtcttagcaagaagccagaagatttttccaaatatcaggc

SEQ ID NO: 233366 - DNA, 369 bp, Glycine max
tgatgagagtgcggtttccctttgttggtgttgctgggaactgttttcctggcatcagtttgtgtctcattaaaggtgagagaggatgagaataaccctttctacttgagaagctctaacagcttccaaactctctttgagaaccaaaacggtcgcattcgtctcctccagagattcaacaaacgctccccacaacttgagaaccttcgagactaccggattgtccagtttcagtcaaaacccaacacaatccttctcccccaccatgctgacgccgatttcctcctctttgtccttagcgggagagccatacttaccttggtgaacaacgacgacagagactcctacaaccttcaccctggcgatgcc

SEQ ID NO: 233367 - DNA, 378 bp, Glycine max
gagcgagatagagaacagatagagataacactaggcagcacaagagaatggcgctgctgtgtggttcaacttccgtgactccattcctttctcacaagaacgttggtttcacaacctcagcaaaatcttcctttgttggctttcaattgccgcttccaaagctcacattatcttcttccgttcgaacccttctgccggcaacatcccgtgtccgttgccagcaagagtctactactgttacccctgtcgcagaagaagacccgcgcttcgcgtgcgtcgaacccgaaccccgattcaaaggcccggacatttggaacaagagctggtatccaaaagctgcagatcatgtgaatacagaaaaaacatggtatgttgttg

SEQ ID NO: 233368 - DNA, 383 bp, Glycine max
caaaaaaaagcctcgtctctcgtgccgattctccaggacaattcccttcacccaacctaattgcaattagtgtagaagatgagtacgttggatgcaacaagggctgaacttggtcttcttgttttatatttgggcaaggctgaagcaagggacaaaatatgcagggcaatacaatatggttccaaatttttgagtaacggggaacctggtactgctcagaatgtcgacaaaacaaccagcttggcacgaaaagtcttccgtctttttaagtttgtcaatgacctacatgctttgataagtccaacaccacagggcactcccctccccctaattctgttgggaaagttcaagaatgcactactctccactttcttgtttcttga

SEQ ID NO: 233369 - DNA, 406 bp, Glycine max
ttcagatattattttcgtccctgaccggagttacaggaaatcagatgctttattttgtggggctgaaatattcatccgctacaattgcatgtgcactgacaaatttgctcccagctttcactttcatccttgcagttctcttcagacaagagaatttgggaatcaagaagagggctggtctagcaaaggtattcgggacaatattgtgtgtgagtggagccttgcttttgtcattttaccatggaaaaaccattggtttaggccaatcaagtattcactggagatatgctgagaaaatggaaggaactagctcttctggcaaaggaaacatgttcctaagccctttggtcgtaattcttagcacccttgtttgggcagcatggttcataattcaaaaagacataag

SEQ ID NO: 233370 - DNA, 340 bp, Glycine max
caagaggccctctgacaagcccctcaggcttccccttcaggatgtgtacaagattggaggtattggaactgtgccagtgggacgtgttgagaccggtgtcatgaagcctggaatggtggtgacttttgcatgaactggactgacaactgaagtcaagtctgtggagatgcacgatgaatctcttacagatgcacatcctggtgacaatgtgggattcaatcttgcgaatgtcgctgttacggatttgaagcgtggttatgtggcctcaaactcatcggatgacactgcctaggaggctgctaagttcacagcccatgtcatcatcatgacacatccctgg

SEQ ID NO: 233371 - DNA, 412 bp, Glycine max
  unsure (1)..(412): unsure at all n locations
ccctccacagcgaccaagcaggcccgaacaacaagaaccacgtggaagaggatgtcagactagaaatggggttgaggaaaatatttgcaccatgaagcttcacgagaacattgctcgcccttcacgtgctgacttctacaacccaaaagctggtcgcattagcaccctcaacagtctcaccctcccagccctccgccaattcggactcagtgcccaatatgttgtcctctacaggaatggaatttactctccacattggaacttgaacgcgaacagtgtgatctatgtgactcgagggaaaggaagagttagagtggtgaactgccaagggaatgcagtgttcgacggtgagctaaggaggggacaattgctantggtgccgcagaactttgtggtggctgagcaaggggga

SEQ ID NO: 233372 - DNA, 380 bp, Glycine max
gaccaagccatggcgatgagaacaaactttccttagccatctttttcctttttccttttagccttattttaaacctagcctttggcaaatgtaaagaaaccgaggtagaagaagaagaccctgagctcgtaacattcaaacaccaatgccaacagccacagcaatacactgatggttacaagcgggtatgcttgcaaagatgtgacaggtatcatcgtatgaagcaagagcgagagaaacaaatccaagaggaaactcgtgagaagaaagaggaggaaagccgtgaaagggaagaagaacaacaagagcagcatgaggaacaagatgaaaatccctacatttttgaggaagattaggattttgagaacagagtccaaact

SEQ ID NO: 233373 - DNA, 369 bp, Glycine max
caactgcagcattatcatcatactgaattattagaccgttgtcattgatcaagaaggaaatccaaaaggaactcgaatcttttgtgcaatcgcccgggaattgagacagttaactttcactaaaatagtttcattagcacccgaggtattataagacgaaactgtgctatggatacattacttttttgtgaaatagattaattaatctaatttatctaacatatatcccttttgtagcaattattagaatttgtagtaattattagaagtattagaagcagcaattcgtacttacttcagattaatacttgataacctaaacaatatatctatatatagaatatagatagatatatgtataatagaacg

SEQ ID NO: 233374 - DNA, 376 bp, Glycine max
tcggggaattccaattccacattttcaagaaataaggaggcaaaaatgttcatatatgaattggaattatttgttttcttattaggcctatcctgaagccaaaggaaatgagatcggaattcctcggggaattccaattccacattttcaagaaataaggaggcaaaaatgttcatatatgaattggaattatttgttttcttattaggcctatcctgaagccaaaggaaatgagatcggaattcctcggggaattccaattccacattttcaagaaataaggaggcaaaaatgttcatatatgaattggaattatttgttttcttattaagcctatcctgaagccaaaggaaatgagatcggaattcctccgggg

SEQ ID NO: 233375 - DNA, 349 bp, Glycine max
tgcagaccgagctagctagctagcaagcaagcacagagatggaggcaaagcgaggccatgccctcatgtgcttggcacgtgtttcactcttcctctgcgctctaaccctatccgctgctcacggaagcaccacggttcaagacatcgcgagaaagttgaaactcggggacaacgagcttctgcgcacggagaagaagttcaaggttttcatggagaattacgggaggagctactccacagaggaggagtatttgcgccgtttggggattttcgcccagaacatggtcagagcggcggagcatcaggcgctggaccccaccgccgtccacggcgtcacgcagttctccga

SEQ ID NO: 233376 - DNA, 371 bp, Glycine max
gttcttcatagttcagtgtgtcgtttaaaaatgtcgcagttgctggataaagccaagaacttcgtgtcggagaaggtaaatgatatggccaagccggaggcgagtgtcactgacgtggacttcaagcgcgtgagcaaagataatgtcgagtacttggccaaggtctctgttcgtaacccttattcaacttccatacccatttgtgagatcaactactctttcaaaagcgcatccagggagatagcatcagggaaaattccagacccaggatcgttgaaggcaaaggacacaacaatggtggatgtgccagttaaggttccatacagcatattgatgagcttggcaaaggacattggtgctgactgggacat

SEQ ID NO: 233377 - DNA, 174 bp, Glycine max
aaaatgcggaatcctctgcatgatctggaatttgtgttttcttttgcttgttcgtttgtttaattcaataaaggaaattaggcatgaccctcttgttgagtatgctctgcctatttgaaaatttccacacctcttttaattatcgtaatgatgtgtgaagtgtgtgttatttta

SEQ ID NO: 233378 - DNA, 403 bp, Glycine max
  unsure (1)..(403): unsure at all n locations
attttgataaaccgcgatcacaggttgccgcaccttaaaaccggaaacaaaagcaatcgttacttgatttcaagaatctctcaatttcttcctacttctttgtgtacgatttcttaagggaaagaaaatcactctctgtgctggccacagacttcgtgaatcattttcttttccactctcagtttatttgctgaacactctcctatttgatataggacttcgtgtcagatttaaactacttctgtctctttcttagttctctgtttaatttcaagttcaagctggtgaaatcttggattagtgctcccactctcctatctggtataggacttcgtgggtagacttttctatttctctcctttcnttcactctcttcttctcactgatccgcattgccgttcaa

SEQ ID NO: 233379 - DNA, 405 bp, Glycine max
  unsure (1)..(405): unsure at all n locations
cggctcgagtaaaattcttccaccaagttatgggtttccttgtgttgcttcttttctccctcttaggtctctcttctagttccagcatatcaactcatcgttccatattggaccttgacctaaccaagtttaccacacagaaacaggtgtcttcactgttccaactatggaagagtgagcatggacgtgtctaccataaccacgaagaagaggcaaagagacttgagattttcaagaataacttgaactatatcagggacatgaatgcaaacagaaaatcaccccattctcatcgtttaggattgaacaagtttgctgacatcactcctcaagagttcagcanaaagtacttgcaagctcccaaggatgtgtcgcagcanatcaaaatggccaacaagaaaatga

SEQ ID NO: 233380 - DNA, 465 bp, Glycine max
tgacgtcggacgcacgcgtgcctaaactcggaattcggtccgaagtcggatcgagcaaattgagacagatgactcacacgtattgtgttaagaagtaaacaatttttcattggcgtccaagaaccaagaggagcgagctgaggcagctgcgagagttgctgccaaagaactcgaacaagtcaacagagaaagaagagaccgtgatttcggtgttgttgctgaacaacaacagcaacatcatcaggaagatcaacaaaaacgtggtgtaatcgggtccatgtttaaggcggtgcaagacacctacgagaacgccaaggaagctgtcgttggcaagaaagaagctactaataacgcgtacagtaatacagaggttattcacgatgttaacattcagcccgatgacgtgtcggcaacgggggaagtaagggacatatcagccacaaagactcatgatatctacgattc

SEQ ID NO: 233381 - DNA, 367 bp, Glycine max
cacagaagcagaaggaggagaagcagaaagaggagacgaagcaatggcgccgaagaagccccgaaccacgtcgaggaaccctgatttggtcaggggaattggcaaatattcgaggtcgcagatgtaccacaagaggggcatctgggccatcaaggccaaaaacggcggtgttttgcccctccacgatcccaagcccaaacccgaggccccggcccagaagccgcccaagttctacccggccgatgacgtgaagaagcccctcgtcaacaagcacaagcccaagcccgcgaaactcagggctagcattactccagggactgttctgatcctgcttgctgggaggttcaagggaaaagaggttgttttc

SEQ ID NO: 233382 - DNA, 355 bp, Glycine max
cattaattttgaggcttttccccacaagctggtgcagtttggagagattcaggaaaaagttgtattgaaattttcacaagaggaatttcttacagcttggtcaactcaggtgcgtcctgcaacaactctgttggctgatgggtgtccatatctgtatgctatggtgcatgatagttcagtgtctacaataccaggtgattttgtcattggtgttaagttgacaaccataaacaatatgtgtgcatatgggctcaatcctggtatttcaggttctcgtcttttgggcaccattcctcagtctatttcacagcaaactgtttggaatcaaatggcaacagtgagaacaccattgaat

SEQ ID NO: 233383 - DNA, 345 bp, Glycine max
gctacttcaaagttgaaaacccagaatgtggttgtatctctctccctaaccttaaccttggtactggtgctactgaccagcaaggcaaactcagcggaaactgtttctttcagctggaacaagttcgtgccgaagcaaccaaacatgatcctccaaggagacgctattgtgacctcctcgggaaagttacaactcaataaggttgacgaaaacggcaccccaaaaccctcgtctcttggtcgcgccctctactccacccccatccacatttgggacaaagaaaccggtagcgttgccagcttcgccgcttccttcaacttcaccttctatgcccctgacacaaaa

SEQ ID NO: 233384 - DNA, 406 bp, Glycine max
caactcatcgttccatattggaccttgacctaaccaagtttaccacacagaaacaggtgtcttcactgttccaactatggaagagtgagcatggacgtgtctaccataaccacgaagaagaggcaaagagacttgagattttcaagaataacttgaactatatcagggacatgaatgcaaacagaaaatcaccccattctcatcgtttaggattgaacaagtttgctgacatcactcctcaagagttcagcaaaaagtacttgcaagctcccaaggatgtgtcgcagcaaatcaaaatggccaacaagaaaatgaagaaggaacaatattcttgtgaccatccacctgcatcatgggattggaggaaaaaaggtgtcatcacccaagtaaagtaccaagggggctg

SEQ ID NO: 233385 - DNA, 417 bp, Glycine max
ccaaaatggcggctgctacgacgtcgtattcttccgcaatcgccgcctcgtccgataccctagccaaacctgcttccaccagaacattctccgccaccaacctcgcccttcaatcgtcgtcttccaagctcggtttcaaatccctaaagcttcaccgatgcgccgccgccgccggctccgccctcggcgcgcggatggtgtcggcgccggcggtcaaggcccccgcactgctcgatttcgacacgaaggttttcaagaaggagaagattaacctcgctggacacgatgagtacatcgtaaaaggaggcaaggatttgtttcacttgttgcccgatgctttcaagggtatcaagcagattggtgttatcggttggggatctcagggacctgctcaggctcagaatctacgggactctc

SEQ ID NO: 233386 - DNA, 410 bp, Glycine max
gaaaagctttctagctggtcataatatcaccattactgatggtattgacaagactagtgcaactttgcaatttagaaagttagcagattgtgagtttctcaggagatactttaagcagatgtctaatgttttgtgggtagctcctgaggacaaggcgagtttatgggcacaacatcattatgtttcgtgtaataatctggaaatgcaagaagcttatcttgtcaatctcgtaaatgtgttaccagaattgtatttgcacagtccagaggaagctcgccaattgagaatgaaagctctctcgcgtaatgaatggctgcataaagctgatgtgcctaccatagcacagattgaagagttccattcgatgcagacgatgatgaatgctcctgattcagatgataatattgatc

SEQ ID NO: 233387 - DNA, 402 bp, Glycine max
gtgagaacaccattgaattttgattctagcaagcagagcttttgtcaattttctattgaccttctcggtggaggaattttagtggacaaaactggagattggatcacacttatacaaaattctccaattagtaacttgttgagagttgctgcttggaagaaaggctgtttaatggttaagattgtgatgtctgggaatgcagcagtcaaaaggagtgattgggcctcattggtacaagtgtttttaacaaacagcaacagtacagagcattttgatgcatgtaagtggacaaaatcggaaccacattcctgggaattgatcttcccaatagaggtatgtggtcctaataatggttttgaaatgtggagttctgagtgggcaaatcaaacttcatggcatttg

SEQ ID NO: 233388 - DNA, 412 bp, Glycine max
catccataaatctactggcaaagaagaaagccttgttatatgggctactcctcgcttacaggatagtaggcgagtaataagggagttggttgatccacaattgaaaggaaacttcccagaagaagaggtgcagataatggcatacttagcgaaggagtgtttgctgctggatcctgacactcgaccaaccatgagcgaggtcgttcagattcttttgagtatttccccgggaaaatctaggaggagaagaaacattccagccagcctctttcaggaaccagaggatgcagaaaagcaaaggcaatctacacccagtaaatttccaacacatagttcattgccaatatataatgatcacaatctttctgttgagaacaaaaacaaagcagaagatgcagtttcagctgagaat

SEQ ID NO: 233389 - DNA, 485 bp, Glycine max
ttccgcaagcttacctcaggcaagggagagacaagcttgcatgcctgcaggtcgactctagaggatcccctcggggaattccaattccacattttcaagaaataaggaggcaaaaatgttcatatatgaattggaattatttgttttcttattaggcctatcctgaagccaaaggaaatgagatcggaattcctcggggaattccaattccacattttcaagaaataaggaggcaaaaatgttcatatatgaattggaattatttgttttcttattaggcctatcctgaagccaaaggaaatgagatcggaattcctcggggaattccaattccacattttcaagaaataaggaggcaaaaatgttcatatatgaattggaattatttgttttcttattaggcctatcctgaagccaaaggaaatgagatcggaattcctcgggggtaccgagctcgaattccctatagtgagtcgtattaaatg

SEQ ID NO: 233390 - DNA, 381 bp, Glycine max
  unsure (1)..(381): unsure at all n locations
ggaaatttggctgatgacaccatcaattttgaggcttttccccacaagctggtgcagtttggagagattcaggaaaaagttgtattgaaattttcacaagaggaatttcttacagcttggtcaactcaggtgcgtcctgcaacaactctgttggctgatgggtgcccatatttgtatgctatggtgcatgatagttcagtgtctacaataccaggtgattttgtcattggtgttaagttgacaaccataaacaatatgtgtgcatatgggctcaatcctggtatttcaggttctcgtcttttgggcaccattcctcagtccatttcacagcanactgtttggaatcaaatggcaacagtgagaacaccattgaattttgat

SEQ ID NO: 233391 - DNA, 318 bp, Glycine max
ttttcgcaaaagtctcagttatcaaaacagagggcaaggccacaaagcacactctaagtgcttccattgcccactacgttacatacacgatcaccattcaccagtgatgatctttttattaatatacaacatacggagatagcttatacgttcttctagctagcataaactaacacatatatgtgttagtagtacttttttttcagtcatcggaggacaagtcgcaccctatcatgggtcccaacctgcacctaatagccaagttcatgagctctctctccatctgcttcttctccttcccctccagttgctcgctct

SEQ ID NO: 233392 - DNA, 413 bp, Glycine max
aaaccctactcattctccatacctcaacgaagaggttaaagagacggcaacactttgccgtccgccttgaccgaacaaaacttcgtccttggcctcgattttgccctaaagtactctcaagtcacaacagacaccgtcgtcgtcgtcgtcgtcatcaatggcaccgaaacagaccaaggctgagaagaagatcgcttacgatgcgaagctgtgcgacctaatggaggagtacggccagatcctcgttgtgaactccgataacgtgggatcgaaccagctccagaacattcgcaagggtctccgtggcgactccgtcgtcctcatggggaagaacaccatgatgaagcgctcagtcaggatgcacgctgagaaaaccggaaacaacgcctatctcaaccttatcccgctccttg

SEQ ID NO: 233393 - DNA, 328 bp, Glycine max
agtctactctagaggatcccctaggggaattccaattccacattttcaagaaataaggaggcaaaaatgttcatatatgaattggaattatttgttttcttattaggcctatcctgaagccaaaggaaatgagatcggaattcctcggggaattccaattccacattttcaagaaataaggaggcaaaaatgttcatatatgaattggaattatttgttttcttattaggcctatcctgaagccaaaggaaatgagatcggaattcctcggggaattccaattccacattttcaagatataaggaggcaaaaatgttcatatatgaat

SEQ ID NO: 233394 - DNA, 406 bp, Glycine max
cttaattattaacacttccttagttcaatatggggaagcccttcactctctctctttcttccctttgcttgctactcttgtcgagtgcatgctttgctattagctccagcaagctcaacgagtgccaactcaacaacctcaacgcgttggaacccgaccaccgcgttgagtccgaaggtggtttgattcaaacatggaactctcaacaccctgagctgaaatgcgccggtgtcactgtttccaaactcaccctcaaccgcaatggcctccacttgccatcttactcaccttatccccggatgatcatcatcgcccaagggaaaggagcacttggagttgcaattccaggatgtcctgagacgtttgaggagccacaagaacaatcaaacagaagaggctcaaggtc

SEQ ID NO: 233395 - DNA, 409 bp, Glycine max
tttaccttgctgggaacccagatatagagtacccagagaccatgcaacaacaacaacagcagaaaagtcatggtggacgcaagcaggggcaacaccagcaggaggaagaggaagaaggtggcagcgtgctcagtggcttcagcaaacacttcttggcacaatccttcaacaccaacgaggacatagctgagaaacttcagtctccagacgacgaaaggaagcagatcgtgacagtggaaggaggtctcagcgttatcagccccaagtggcaagaacaacaagatgaagatgaagatgaagacgaagatgatgaagatgaacaaattccctctcaccctcctcgccgaccaagccatggaaagcgtgaacaagacgaggacgaggacgaagatgaagataaacctcgtcc

SEQ ID NO: 233396 - DNA, 399 bp, Glycine max
tttaccttgtaggaaatccatatttcaagttgggaaagaccatgaatcaccctcattcgtacctatgtcatggtggacgtatgcagtggcagcattagtatgaggactaggaagctcgtggcatcgtactcaatggcctcacacattcatttcttggcaaactccgtcttgagtacggaggtgatatctgtcaaacatcagtctctaaacaactagaggaaacatatcctgatagtagtatgacgtctcacagtttccagcgccatgtggtagaattaacatcattatcatcattatgaagaggaggtaatcatcggatcaacggattcgatcacatcctcttcgccgtccaggccatcctcagcattttgaggaccaagacgatgactaagatgaaga

SEQ ID NO: 233397 - DNA, 281 bp, Glycine max
gattacaaattattgcaagggttgctcttagcttcttcatttcaagcttttgtttacactttgcagtgctatggcaaagataagagtatcatggatggaaaaagggggggaaaaaatgttgctttgtactccaaattatgaataatagaactttatattatttatcaaaaaaaaaaaaaaaaaaaaaaaaaaaaaaaaaaaaaaaaaaaaaaaaaacaaaaaaaataaaaaaaaaaaaaaaaggggcggcccccaataattaacctcttcaacccggaaat

SEQ ID NO: 233398 - DNA, 377 bp, Glycine max
ctcgagccgaatcggctcgagagcatttggaaatttggctgatgataccatcaattttgaggcttttccccacaagctggtgcagtttggagagattcaggaaaaagttgtattgaaattttcacaagaggaatttcttacagcttggtcaactcaggtgcgtcctgcaacaactctgttggctgatgggtgtccatatttgtatgcaatggtgcatgatagttcagtgtctacaataccaggtgattttgtcattggtgtcaagttgacaaccataaacaatatgtgtgcatatgggctcaatcctggtatttcaggttctcgtcttttgggcaccattcctcagtccatttcacagcaaactgtttggaatcaaa

SEQ ID NO: 233399 - DNA, 368 bp, Glycine max
cccgttcaaaatgatggttccacagggctccattgggccaacctccaaaaaagaacccctctaatgcaagtaccagtcctggtggacctcaatggaaatcacttgtgggttaactgtgagcagcagtactcatccaaaacgtaccaagcacccttctgccactccacccaatgctctagagccaacacccaccaatgcctcagttgccccgcggcatcaaggccagggtgccacaaaaacacgtgtggcctcatgtccactaatcccatcacccaacaaaccggtttaggtgaactaggagaagacgttcttgcaatccacgccacacaagggtcgacccaacaacttggcccattggtcacagtccc

SEQ ID NO: 233400 - DNA, 387 bp, Glycine max
gggaattccaattcaacattttcacgaaataaggacgcagacatggttcatatctgaattggaattaattgttttcatattacgcctatcctgaagccaaatgaaatgagatcgggattcctcggggaattccaattccacattttcaagaaataaggaggcaaaaatgttcaaatatgaattggaattatttgttttcttagtatgcctatcctgaagccaaatgaaatgagatcggaattcctcggggaattccaattccacattttcaagaaataacgaggcaaaaatgttcatatatgaattggaattaattgttttcgtaataagcctatcctgaagccaaaggaaatgagatcggaattcctcgggggtaccgagctcgaa

SEQ ID NO: 233401 - DNA, 175 bp, Glycine max
tgaattcggttcaatacaaatctacacccttgaccctggggactggatatatatacaatctggaaccccactgtcaatcgttaccataaatgagaatgataagctcttccgtgctatgctccatatacctgtctcagtccctactcctggaaaatttgaggaatttttcgggcct

SEQ ID NO: 233402 - DNA, 420 bp, Glycine max
gatatatgatatagaaagagagagaagaagaaaagaagaacaaagatgcaatcctcaaaggagaagatgaaaaacatggcaagtgctgccaaggaacaagtcgacatctataaagccaaaatagacgagaaggcagagaaagcaacggcaagaacagaagaggagagggtgatagcccatgagcacgcaaaggcaaaggaagctggagcaaagatggagctgcatgaagctaaagcaaggcatgcagcagagaagctaagcgccaaccaatcacattatggtctccaccatggccacaacaaccctcccttagtaggaacaactcagactcactaccagcaagggcaccagcaccagccacttggggcagttcctatgcctggaaacacttatccatcttaaccactacgaggaaaccct

SEQ ID NO: 233403 - DNA, 491 bp, Glycine max
  unsure (1)..(491): unsure at all n locations
ngattgatttacgtgacactatagaagagctatgacgtcgcatgcacgcgtacgtaagctcggaattcggctcgagcttattgacaatcccaaacagtctacagtttttgacattctcttgggaatttctcaagattttgaaattgctggtaatactcttatgccagctttttctgttccacaggctactgccagatcttctganaatgcggaatcctctgcatgatctggaattttgtgtttctttcaattgtccgtttgtttattcaatanaggaaataggcatgaccctctgttgagtatgctctgcctatttgaaaatttcacacctcttttaatgtcgtaatgaagttttgaagtgtgtgtaatttaaaaaaaaaaaaaaaaaaaaaaaannaaaaaaaaaaaaaagggccggcagcgaatagtgagctcgtcgacccgggaattaattccggaccggtacctgcaggcgtacaagctttccctaa

SEQ ID NO: 233404 - DNA, 394 bp, Glycine max
cacaactactacaagtacttccttacaatcaaaaccaacaacaactatggcaagttatcaaaagcactacgatgatcagggtcgcaaggttgacgagtatggcaacgttgagaagcaaaccgacgaatacggcaaccctgttcatgctgctagtgtcacctatgtagccaccagaactgctgctggtggttacagtgatgacattaataagcaacatgataccaccaatgcctacggcgtagacactggtagacagcattctagtggtggctacgatggtgacactaataaacatcatggaactactggtggctataatgatgacaccaatagacatcatggaactaccggtgtctatggtatagacaccgataggcaacaacatgggactact

SEQ ID NO: 233405 - DNA, 416 bp, Glycine max
ccgcaaccatgagtggtgttacatgctgtcttcgtttccctggtcaactcaactctgatctgaggaaactggccgtgaatctcatccctttccctcgtctgcacttcttcatggttggatttgcgcctctcacctctcgtggctctcagcagtaccgtgcattgacagttccagagctgacacagcaaatgtgggatgccaagaatatgatgtgttgccgctgattccaggcacgggcgttacctcacggcatcagccatgttccgtggcaagatgagcacgaaggaggtggatgagcagatgataaacgtgcagaacaaaaactcttcgtactttgtcgagtggattcgcaacaatgtcaagtcgagtgtgtgtgacattgctcctaaagggctctccatggcgtccacattcat

SEQ ID NO: 233406 - DNA, 387 bp, Glycine max
tgaatttctttgctattggtattaatgccgagaacaaccagaggaacttcctcgcaggttcgcaagacaatgtgataagccagatacctagtcaagtgcaggagcttgcattccctgggtctgcacaagctgttgagaagctattaaagaaccaaagagaatcctactttgtggatgctcagcctaagaagaaagaggaggggaataagggaagaaagggtcctttgtcttcaattttgagggctttttactgaataagtatgtactaaaatgtatgctgtaatagctcatagtgagcgaggaaagtatcgggctatgtaactatgactagagcttcaactatgaataaataaatcgacagcatatgatgcttttgttttgtgtcaa

SEQ ID NO: 233407 - DNA, 377 bp, Glycine max
gggattgggaaggcgagggattgcgctgcgtctcttcctcttctctttcgattcatccctcattcataatcttccaatccaacaacctcagcctcacactcacacatacacacatctgaacgcgtatcgtccctcccatggcttcaaagcgcatcctcaaggagctcaaggacttgcagaaagacccaccaacttcttgcagcgctggtccagtagctgaggacatgttccattggcaagcaacgattatgggtcctgctgatagtccttatgctggaggtgtattcctagtcactattcactttcctccggattatcctttcaaacctcccaaggttgcctttaggactaaggtgtttcatccgaacatcaacagc

SEQ ID NO: 233408 - DNA, 387 bp, Glycine max
ggaagaagaagaaaatggaggaggaacaaaacggcggtcgtttcgacctcataatcctgggcgcctcaggcttcacaggcaaatacgtcctccgcgaagccctcaaattcctcaacaccccatcctcccccctcaaatccatagccatagcgggccgaagcccacaaaaactaacccaggcccttcagtgggcctccaggcccaaccctcccccctccctccccatcctcaccgcggacaccgccgacccctcctccctccgttccctctgcgcccgcacgggcctcctcctcaactgcgtgggccccttccgcctccacggcgagcccgtcgtggccgcctgcgccgcagcgggctgcgactacctcgacatctccggcgagcccg

SEQ ID NO: 233409 - DNA, 369 bp, Glycine max
gttcagcaaaaagtacttgcaagctcccaaggatgtgtcgcagcaaatcaaaatggccaacaagaaaatgaagaaggaacaatattcttgtgaccatccacctgcatcatgggattggaggaaaaaaggtgtcatcacccaagtaaagtaccaagggggctgtggaagcggttgggcgttttctgccacgggagccatagaagcagcacatgcaatagcaacaggagaccttgttagcctttctgaacaagaactcgtagactgtgtggaagaaagcgaaggttgttacaatggatggcactatcaatcgttcgaatgggttttagaacatggtgggattgccactgatgatgattatccttacagagc

SEQ ID NO: 233410 - DNA, 408 bp, Glycine max
cacaatctaatgctgagttattggagtggactaagaaagataagcgccgcttcctgcatgttgtgtatcgtgttggtgatcatgatcgcaccattaagttttatactgaatgttttgggatgaagcttttgaggaaaagagatattccagaagagaaatatgccaatgcttttcttggatttggccctgaacaatcccattttgttgtggaattaacatataattatggggtgacctcatatgatagtgggaacgggtttggacattttgccaacgcaactccaagatgtgtacaaattggttgaagacatccgggctaagggtggaaatatcaccagggaagccgggtccagttaagggtgggaagtctgttattgccttcgtgaaggatcctgatggttatgcttt

SEQ ID NO: 233411 - DNA, 343 bp, Glycine max
gcggaatggagaagaagaggatttgagaggagacgccacttcaaggagaagatgagtcaagaagaagctcaccaccataggaagccatggataagagcttgaaggtagaagaagatgagtggaaggagaaggagagaaggagcacaaaattttatgcctcaaaagaggtctgaacattgaagtataattttcaaatgatcaaagttgaaaaaatgcacacccatgacctttatttatagcctaagtgtcacacaaaattggagggaaatttgaacttctattcaaatttcacttgaacttgtggagccaaaatttcacgaattatgactagtgaattttagct

SEQ ID NO: 233412 - DNA, 387 bp, Glycine max
cttccatagccccccaaaaatgaagagcaccatcttctttgctctctttctcttttgtgccttcaccacctcatacctaccttcagccatcgctgatttcgtgctcgataatgaaggtaaccctcttgaaaatggtggcacatattatatcttgtcagacataacagcatttggtggaataagagcagccccaacgggaaatgaaagatgccctctcactgtggtgcaatctcgcaatgagctcgacaaagggattggaacaatcatctcgtccccatatcgaatccgttttatcgccgaaggccatcctttgagccttaagttcgattcatttgcagttataatgctgtgtgttggaattcctaccgagtggtctgttgtggagga

SEQ ID NO: 233413 - DNA, 383 bp, Glycine max
ctcttcttcgtctcaaatctcttcgttccttcgattcgttccatttcttccaaaatggccaaagacccagttcgcgttctcgtcactggagctgcagggcaaattgggtatgctcttgtccctatgattgctaggggagtgatgttgggtcctgaccagcccgtgatcctccacatgcttgacattcctccggcagcagagtcattgaatggggttaaaatggaattggtggatgctgcattccctcttcttaaaggtgttgttgccacaactgatgtggttgaggcatgcactggggtcaatattgccgtgatggttggtggattcccaagaaaagaaagtatggagaagaaggatgtgatgactaagaacgtctccattta

SEQ ID NO: 233414 - DNA, 381 bp, Glycine max
gaacaacaagatgaagatgaagatgaagacgaagatgatgaagatgaacaaattccctctcaccctcctcgccgaccaagccatggaaagcgtgaacaagacgaggacgaggacgaagatgaagataaacctcgtcctagtcgaccaagccaaggaaagcgtgaacaagaccaggaccaggacgaggacgaagatgaagatgaagatcaacctcgcaagagccgcgaatggagatcgaaaaagacacaacccagaagacctagacaagaagaaccacgtgaaagaggatgcgagacaagaaacggggttgaggaaaatatctgcaccttgaagcttcacgagaacattgctccgccttcacgcgctgacttctacaaccct

SEQ ID NO: 233415 - DNA, 331 bp, Glycine max
cacaatatgatgttaagggattcccaacaattaatattctgagaaatgggggaaagaatgttcatgaatacaaaggtccccgtgaagcagatggcatcgttgactatttgaagaaacaaagtggtcctgcttcaactgaaattaaatctgctgatgaagctactgcttttattggtgaaaataaagttgctattgttggagttttcccgaaattttctggagaggagtttgacaacttttctgccttagcagagaagttgcgttctgattatgactttggtcacactctgaatgccaaactccttccaagaggagagtcatcagtttctgg

SEQ ID NO: 233416 - DNA, 422 bp, Glycine max
agaaaaaagagaagaagatgggtttgaagaacaacatggtggtgctaaaggtgtgtttggtgctacttttccttgtggggggtactactagtgccaacttgaggctgagtaagcttggcctgctcatgaaaagtgatcatcatcaacactcaaatgatgatgagtcttcaaaaccatgctgtgatcaatgcgcatgcacaaagtcaaaccctcctcaatgccgctgttcagatatgatgctgaattcgtgccattcagcttgcaaatcttgtatttgcgcattatcgtatcctgcacagtgtttttgtgttgacataaccgatttctgctatgaaccttgcaaacccagtgaggatgacaatgaacactactaatgaacaagtgttatgcatgtaagctctctctccaacggacaaagcccc

SEQ ID NO: 233417 - DNA, 298 bp, Glycine max
agaaataagagaagaagatgggtttgaagaacaacatggtggtgctaaaggtgtgtttggtgcaacatttccttgtggggggtactacaaatgccaacttgaggcagattaagcttggcctgcgcactacaactgatcatcatcaatacgcaaatgatgatgattcttcaaaagcatgctgtgatcaatgcacatgcacaatgtccaaccctcctcaatgccactgttcagacatcatgctgaactcatgccattcatcttgcaaatcttgtaattgcgcattaacgtatcctgcaca

SEQ ID NO: 233418 - DNA, 414 bp, Glycine max
tgaaaatcgttgctttgcagagtataagatcttgctcccacgtctctgattacttgcaagcttcatctgcactcatggatcccaaccagcctgtgggtgaaaactacgccaatcccaggacttgcttctttcatgtcctcttcaaggctgcagccttggcattttacattctctcggccctctttattgataactttgtcatcattttcgtggtgactgtccttcttgccgcccttgatttttgggtagtcaagaatgtcagtgggcgaattttagttggattgaggtggtggaatgaaattaaagattcgggtgagaatgtttgggaaattggatgtcctgaacaagaatcaatggctccgatgaacaagaaagactcatggcttttctggtggaccctgtatcttacagcga

SEQ ID NO: 233419 - DNA, 414 bp, Glycine max
ttgtatttcgtttgttgttcaatctaacaaacttctctatatcgtttactttttcaacacaccttacacacttctttatttgagcctttcatataaatatcatggcttcgagggtggtttcggttttggtgatagcgatgatgttgtttgccatgaactgtaactgcactagtgttggccacatgccttcaaccaaagaggaaggtcacgattttcaggaggctaaagccaagacaacacaaactgcgaacaaggccatggaaactggtaaagatgggaaagaagccgcagagtcatggacagaatgggctaaagagaaactcactgaaggtcttggcttcaaacatgatcaagaatcaccactaagaaagtccctgactatgccggtgatgctgctcagaaatcaaaggacta

SEQ ID NO: 233420 - DNA, 390 bp, Glycine max
taacaattccttcacttgcagcactgttgcatcatcatcttcattgcaaaaccctaaacttcaccttcaaccatgaccacacaagtaccaccacacagtgtccaagtccacacaacaacacaccgctacgaagctggcgtcgtcccccccggagcccgtttcgaaccgccgcgttatgaagccggcgtcaaagcgccctccatttaccattccgagagaggtccaacgacttcccaggtcctcgccgtcctcgccggcctcccggtcggtggcatcctgctcctcctggcgggattgaccctggcaggaaccctcaccggactggcagttgccacgccgctcttcgtcctcttcagcccggtgctggttccagccacggtcgccatcggc

SEQ ID NO: 233421 - DNA, 401 bp, Glycine max
ctcaatctctcttcttacccatttcctccccccctctttctcttttcttgttctgtttttattttcactgttctctgataacaacgttgttagttgtcaccatggttgttctgtctcagccagcattaaaccagtttttccttctgaaaacatgcaagcccacgcccttgttcgcggggattcctgtggtcgacctcacggaccccgatgccaagacccacatagtcaatgcctgcagggacttcggcttcttcaagctcgtgaaccacggtgttccgttacagttcatggccaatttggaaaacgaaaccctcgggttcttcaaaaaacctcaatccgagaaagacagggctggtccccctgacccttttggctacggcagcacgaggattggccctaac

SEQ ID NO: 233422 - DNA, 405 bp, Glycine max
  unsure (1)..(405): unsure at all n locations
ccaatatattccattctctctgtgtatttccctacctctcccttcaagatgcagatcttcgtcaagaccctcaccggcaagaccatcacccttgaggtggaaagctctgacaccatcgacaacgtcaaggccaagatccaggacaaggaaggaatccccccggaccagcaacgtctcattttcgccggaaagcaacttgaggacggccgtacccttgctgactacaacattcagaaggagagtactcttcacctcgtcctccgtctccgtggtggcatgcagatcttcgttaagacactcaccggcaagaccataaccctagaggttgaaagctccgacaccatcgataacgtcaaggccaagatccaggacaaggacggtatncccccgggaccagcaacgtct

SEQ ID NO: 233423 - DNA, 405 bp, Glycine max
cacagctccagccatgaggaagccacagcaagaagaagatgatgatgatgaggaagagcagccacagtgcgtggagacagacaaaggttgccaacgccaaagcaaaaggagcagaaatggcattgatgagaccatttgcacaatgagacttcgccaaaacattggtcagaattcatcacctgacatctacaaccctcaagctggtagcatcacaaccgccaccagccttgacttcccagccctctggcttctcaaactcagtgcccagtatggatcactccgcaagaatgctatgttcgtgccacactacaccctgaacgcgaacagcataatatacgcattgaatgggcgggcattggtacaagtggtgaattgcaatggtgagagagtgtttgatggagagct

SEQ ID NO: 233424 - DNA, 400 bp, Glycine max
ttcgtttgttgttcaatctaacaaacttctctatatcgtttactttttcaacacaccttacacacttctttatttgagcctttcatataaatatcatggcttcgagggtggtttcggttttggtgatagcgatgatgttgtttgccatgaactgtaactgcactagtgttggccacatgccttcaaccaaagaggaaggtcacgattttcaggaggctaaagccaagacaacacaaactgcgaacaaggccatggaaactggtaaagatgggaaagaagccgcagagtcatggacagaatgggctaaagagaaactcactgaaggtcttggcttcaaacatgatcaagaatccaccactaagaaagtctctgactatgccggtgatgctgctcagaaatc

SEQ ID NO: 233425 - DNA, 501 bp, Glycine max
cgcaagctatcctcatgacaaggacagacaaacttgcatgcctgcaggtcgactctagaggatcccctcggggaattccaattccacattttcaagaaataaggaggcaaaaatgttcatatatgaattggaattatttgttttcttattaggcctatcctgaagccaaaggaaatgagatcggaattcctcggggaattccaattccacattttcaagaaataaggaggcaaaaatgttcatatatgaattggaattatttgttttcttattaggcctatcctgaagccaaaggaaatgagatcggaattcctcgggggtaccgagctcgaattccctatagtgagtcgtattaaattcgtaatcatgtcatagctgtttcctgtgtgaaattgttatccgctcacaattccacacaacatacgagccggaagcataaagtgtaaagcctggggtgcctaatgagtgagctaactcacattaattgcgttgcgctcacgg

SEQ ID NO: 233426 - DNA, 281 bp, Glycine max
gctctatactacacagtacacacactagaagaataatggcttccatcctccactactttttagccctctctctttcttgctcttttcttttcttcttatccgactcagtcacccctacaaaaccaataaaccttgttgttctacccgttcaaaatgatggttccacagggctccattgggccaacctccaaaaaagaacccctctaatgcaagtaccagtcctggtggacctcaatggaaatcacttgtgggttaactgtgagcagcagtactcatccaaa

SEQ ID NO: 233427 - DNA, 380 bp, Glycine max
tagggttttaggaaaagacactgtctcgcgagtgaacacaggttacagcaatggctttctttggtagaattgggaatttattaagacagacagcaagcaggcaggttagttcagaattgcgatcatccccttcgttttttcaggctatacgcagtgtttcatattctactgacgagcaaagtttgagggaagctttttcaaaatatggtgaagttgttgatgctaggataattatggatcgtgaaactggtagatccagaggatttggctttattacatacacttcggttgaggaggcatcaagtgccattcaggccttggatggtcaggacctacatggtcgcccgattaaggttaattatgctaatgaaagacctcgt

SEQ ID NO: 233428 - DNA, 418 bp, Glycine max
ttcatcctttcccaagccagccaagcgaggcatgctctcaatttttgaaattacttgcatagatagagcatcatggccatgatgaaacgtgctgcttcctcttcggttcgctcgctactttcctcatcctccaccttcaccagaaaccttcatgcctcaggtgaaaagaagaaaattgtgggggtgttctacaaagggaatgagtatgctaaattgaaccccaatttcgtggggtgtgttgaaggagcattgggtatacgtgagtggctggaatcacagggtcatcagtacattgtcactgatgacaaagaaggaccagattctgaacttgagaaacacattccagatgcccatgtcatcatatctactccatttcaccccgcctatgtcaccgcggaaagaataaagaaagcgcaaa

SEQ ID NO: 233429 - DNA, 404 bp, Glycine max
gcaccctcaaccgcaacggcctccacttgccatcttactcaccttatccccaaatgatcattgtcgttcaagggaagggagcaattggatttgcatttccgggatgtcctgagacgtttgagaagccacaacagcaatcaagcagaagaggctcaaggtcgcagcagcaactacaagacagtcaccagaagattcgtcacttcaatgaaggagacgtactagtgattcctcctggtgttccttactggacctataacactggcgatgaaccagttgttgccatcagtcttcttgacacctccaacttcaacaatcagcttgatcaaaaccccagagtattttaccttgctgggaaaccagatatagagcacccagagaccatgcaacaacagcagcagcagaag

SEQ ID NO: 233430 - DNA, 361 bp, Glycine max
aaacagtagtggagagagggagaaaaaccaaagaagattgaccatggcttcttcattgaggatctcaaggctcctctctcgttcttttctttctgcttccactactactcctttgttttctagaggcggaagtggtgctcttggtgcagggctcagtaaattcagcactgctgctgccattgaagaaccaattaaaccaccacttaaagttgaacacacccagctcttaattgatggaaaatttgttgatgctgctactggcaaaacttttccaacgttggaccccaggacaggagatgtgatttctcatgttgctgagggtgaccatgaagatgttgatcgagcagttgcagctgctcgc

SEQ ID NO: 233431 - DNA, 399 bp, Glycine max
cacttcccgaaatgttaaaagaatgcctctttctatagggggaggagctggtgcaaagaatgctattctcatgaatatgccaaatgctgttctttcaatgtggagatattttgttggagatctcgtctttgaagtttctaagatgacttctccctacattaaatgtacagtctctttcttcatagcatttggaaatttggctgatgacaccatcaattttgaggcttttccccacaagctggtgcagtttggagagattcaggaaaaagttgtattgaaattttcacaagaggaatttcttacagcttggtcaactcaggtgcgtcctgcaacaaccctgttggctgatgggtgtccatatttgtatgccatggtgcatgacagttcagtgtctacaat

SEQ ID NO: 233432 - DNA, 358 bp, Glycine max
gtaggtgcacacgtcaacatctgaattgacatctgcagtcatgtctgtgtataagctcactaatgtcatatacacgcaaaggctggagactctgtgggattcaatgttaaggttgtgtcagtgaaggatttggtgcgtggtcagtttgcactcgcagtcacaggatgacactagccatgacgttacaaatttcagagctcaagtgatcatcatgaaacagctttgtcaggatgcagatagctatgcgcatgtcatccactgactcacatcgcacattaccgtcatatatgccgaactgatgtccaccattcagaggagatttggcactaagcttgagaaagaaccgaaatttttgaca

SEQ ID NO: 233433 - DNA, 344 bp, Glycine max
ccccagggcacttcccgaaatgttaagagaatgcctctttctatagggggaggagctggtgcaaagaatgctattctcatgaatatgccaaatgctgttctttcaatgtggagatattttgttggagatctcgtctttgaagtttctaagatgacttctccctacattaaatgtacagtctctttcttcatagcatttggaaatttggctgatgacaccatcaattttgaggcttttccccacaagctggtacagtttggagagattcaggaaaaagttgtattgaaattttcacaagaggaatttcttacagcttggtcaacccaagtgcgtcctgcaacaac

SEQ ID NO: 233434 - DNA, 505 bp, Glycine max
  unsure (1)..(505): unsure at all n locations
cgaattgaatttaggtgacactatgacaagagctatgacgtcgcatgcacgcgtacgtaagctcggaattcggctcgagtcctgccagtagtcatatgcttgtctcaaagattaagccatgcatgtgtaagtatgaactaattcagactgtgaaactgcgaatggctcattaaatcagttatagtttgtttgatggtatctactcggttaaccgtagtaattctagagctaatacgtgcaacaaaccccgacttctggaacggatgcatttattagataaaaggtcaacacaggctctgcctgttgctttgatgattcatgataactcgtcggatcgcacggcctttgtgccggcgacgcatcattcaaatttctgccctatcaactttcgatggtatgatagtggcctaccatggtggtgaccggtgacggagaattatggttcgattccggagatggagcctgagaaactgctatcacatccnaagaaggcancatgcgcgca

SEQ ID NO: 233435 - DNA, 377 bp, Glycine max
gcatctaaagtcactgaagcggatcaccattggatttctgatcgtgaatttggccatgggatctctaatggggcctcagtgaataccgcatgcaatcaatttggtattgggagtagatagcggatgcatggtccgagtaatatctggaagcagcacttacgatgagacacaatgtcagaacatgatgtttattgttaatgaaagtgatgcatatctgctgcctatgtctcatccagaggcatcatatgtcagtcaaatcacgaccacttgtttttctcggcttaagcatctcatctcagaactatcatcctccaattttggcaggataggcgtcaatgcttcagactctatgacaaaagatactggccaactccttc

SEQ ID NO: 233436 - DNA, 417 bp, Glycine max
cgcgatcttctgttcaaggattatcagaatgaccacaagttcaccatcaccacttacacttccaccggagtggaaatcacttcaactggagtcaggaaaggtgagatatatttggccgatgtcagcactaaggtgaagaacaagaacatcacaactgatgtcaaagtggacactaactcaaatctgcgtacaatcattactgtggatgaacctgcccctggactcaagacaatttttagctttaattttccagatcagaaatctggcaaggtagaactccagtaccagcatgagtatgctggaatcagcaccagcattggattgacagcaaatcctgttgttaacttctctggtgtggttggaaataatttggttgccgttgggacagatctttcatttgatactacctccggcaac

SEQ ID NO: 233437 - DNA, 306 bp, Glycine max
gcaatctcacgcaggtagcagcacagacgctattacccgtgacttcgcagccctactggcctcacacactcagtgcccagtgatggatcaggctgcaagaatcctaggttcgcgcgacgctatctcctgatcacaaatagcatgatgaacgtattgaatgggcaggcacaggaatcaatggcgaattgctgtcgtgagagagtgtacgaaggagagctgccacagggaagcgtgctgcatgtgacactataacacactgtggctgcaacatgcgggcggcagccgactaatgagctcttcgacccg

SEQ ID NO: 233438 - DNA, 398 bp, Glycine max
taaaattcttccaccaagttatgggtttccttgtgttgcttcttttctccctcttaggtctctcttctagttccagcatatcaactcatcgttccatattggaccttgacctaaccaagtttaccacacagaaacaggtgtcttcactgttccaactatggaagagtgagcatggacgtgtctaccataaccacgaagaagaggcaaagagacttgagattttcaagaataacttgaactatatcagggacatgaatgcaaacagaaaatcaccccattctcatcgtttaggattgaacaagtttgctgacatcactcctcaagagttcagcaaaaagtacttgcaagctcccaaggatgtgtcgcagcaaatcaaaatggccaacaagaaaatgaag

SEQ ID NO: 233439 - DNA, 482 bp, Glycine max
ggcaagctatcctcacgcaagggagagacaagcttgcatgcctgcaggtcgactctagaggatcccctcggggaattccaattccacattttcaagaaataaggaggcaaaaatgttcatatatgaattggaattatttgttttcttattaggcctatcctgaagccaaaggaaatgagatcggaattcctcggggaattccaattccacattttcaagaaataaggaggcaaaaatgttcatatatgaattggaattatttgttttcttattaggcctatcctgaagccaaaggaaatgagatcggaattcctcggggaattccaattccacattttcaagaaataaggaggcaaaaatgttcatatatgaattggaattatttgttttcttattaggcctatcctgaagccaaaggaaatgagatcggaattcctcgggggtaccgagctcgaattccctatagtgagtcgtattaaatg

SEQ ID NO: 233440 - DNA, 403 bp, Glycine max
agattgtaatggtgcatgttcacctttcgagatgccaccgtgccgctcacgtgattgtcgttgtgtccctataggactagttgctggtttctgcatacatccaactggactttcatctgttgcgaagatgatcgacgaacatcccaacttatgtcaatctgatgatgaatgcatgaagaaaggaagtggcaatttttgcgctcgttaccctaataattatatcgattatggatggtgttttgattctgattctgaagcactgaaaggcttcttggccatgcctagggcaaccaccaagtaatatggtgggtatgccaaagtgggcatgcttgatgcatcttctactacttaaaaataaaagcttatgatgcatctactgctttaaacaaaagagtgctccact

SEQ ID NO: 233441 - DNA, 418 bp, Glycine max
gtactttcttgcgaaacagaagggcgaaggggcaaacacaacttttttgtttttttgtagagcgagagagaaaaaaaatgttggggatcttcagcagtttcgtggtgtcgccgccggaggagctggtggctgccggcagcagaacgccgtcgccgaagacgacggcggggaagctgctgaaccggttcgtggagaacaaggcgtcggcggtgtcgctgcaggtgggagaacacgtgcagttggcttacacgcaccacaacgagtcaccgtggcatcccagatcatttgctgttaaggatgagatattctgcttgtttgagggggctctagacaatttgggcagcctgagacaacagtatggactggccaagtcagccaatgaagtggttttggtgattgaggcttacaaagctttacg

SEQ ID NO: 233442 - DNA, 376 bp, Glycine max
ggctaacacacaagaattctttgatggaaattttccagtggattcttggttaccaatttttgtgaattgtctttatcctgtaagtcaattaccttcagaagctgtcgttgtaaatgttacatgtggtagtggacgtggtggtttacccaccactgcttggattagttctgcagttaacaatcgctcctcagatatcaacaaaaggattcgcacagcacttgggaaaggtaagaaaattgtttttcttactagagttgatccttttccagtagctttactggctgttctttttggcgttaagaatgaaattctgagttctaacgccactaatcctatgctgacgcgacttcttgagaactgttagagtctcaaatat

SEQ ID NO: 233443 - DNA, 373 bp, Glycine max
  unsure (1)..(373): unsure at all n locations
tataacttaagagagggtgatttgatcgcagtgcctactggtgttgcatggtggatgtacaacaatgaagacactcctgttgttgccgtttctattattgacaccaacagcttggagaaccagctcgaccagatgcctaggagattctatcttgctgggaaccaagagcaagagtttctaaaatatcagcaagagcaaggaggtcatcaaagccagaaaggaaagcatcagcaagaagaagaaaacgaaggaggcagcatattgagtggcttcaccctggaattcttggaacatgcattcagcgtggacaagcagatagcganaaacctacaaagagagaacgaaagggaaaacaagggagccattgtgacag

SEQ ID NO: 233444 - DNA, 401 bp, Glycine max
aacaaatcccagggagccaccaaccatggcttccaagctctgcgactcatgcaaatcagccactgctaccttgtactgccgccccgacgcggccttcctctgcggcgcctgtgactctaaggttcatgccgccaacaagctcgcatcgcgccacccgcgcgtcgtgctctgcgaggtgtgcgagcaggcgcccgcgcatgtgacctgtaaagccgacgccgccgcgctctgccttgcctgcgatcgcgatatccactccgccaaccccctcgccagccgccacgagcgcatccccgtcacgccgttcttcgagtccgtacattcagtcaaggcctcctcgccgatcaacttccaccaccgcttcttctccgacgccgacgctgatgctgacgtcagcaccg

SEQ ID NO: 233445 - DNA, 415 bp, Glycine max
caccatcctcaaaatctccaaactcgcgatcctcctcgttttgttcgcttcagtctgcaacgtcgctatgtcggactccaccgccaaacccctcgaccagcacgccaccacgggctctgaccctactgcgccagcggttcacatcgtgtacaccgagagaccacagaacgaggagcctgaggcctaccacatcagaaccctcacttcagtccttggcagtgaggaggctgcaaaggaagctttgttgtatagttacaagtctgcagccagtgggttctcagctaagcttactccggagcaggttgaacagatttcaagtgttcttcaagttgttcctagcaggacatatcagctccatggaccaaataacctgcagtagagaatgttcacctaaagttgtatcggttaaaccgtt

SEQ ID NO: 233446 - DNA, 406 bp, Glycine max
aaaaaacaccatgatgcttggggagacccaccgcccaaatccaaccgtacacgtgccaccgtgggcgccggagatcttctcaccatacaccggcaatgccgattactctccgtactccatgcaagaagcacttagtgcacttcagcactacgaatccaccgatgctgagtcagactcggaggttccgtctcgggaaccggaagtcccggtggacgcttactcctgcgaccatttccgcatgttcgagttcaaggttcggagatgcgcacgttgcaggtcgcatgactggaccgactgtccgtacgcccaccccggcgagaaggcacgccgccgtgatccccggaagtaccattactccggcacggcttgcctcgatttccgcaaggggagttgcaagaagggtgac

SEQ ID NO: 233447 - DNA, 402 bp, Glycine max
gaggaagctcgccaattgagaaggaaagctctctctcgtattgaatggctgcaaaaagctgatgtgcctaccatagcacagattgaagagttccattcgatgcagaggatgatgaatgctcctgattcaaatgataatattgatctactgttgagcattgatttgttgggtttacaaggagcaggtaaagcttttccaaacaagattgtttttgatgataagcttgtgttggctaacacacaagaattctttgatggaaattttccagtggattcttggttaccaatttttgtgaattgtctttatcctgtaagtcaattaccttcagaagctgtcgttgtaaatgttacatgtggtagtggacgtggtggtttacccaccactgcttggattagttctgca

SEQ ID NO: 233448 - DNA, 351 bp, Glycine max
gcggttgttgatcaagtgcttaagatcattgagaaggaagatagaaaactcttgattccttgtgtaaaggctattgggaatctggccaggaccttccgggcgacggagaccaggataatcggtcccttggtccggcttctcgacgaaagagaggcagaagtgtccagggaagcagccatatctctcacgaaattggcctgctcggagaactacctccaccttgatcactccaaggcaatcataagtgccagtggtgccaaacacttggtccagcttgtgtatcttggagaacagacagtgcagatttcagcactagtcctgctctcctacattgcattgcatgtgcctgac

SEQ ID NO: 233449 - DNA, 383 bp, Glycine max
cggctcgagcttcagagcgcaggcaaacaacttcttctcagacatggcatctcaaggtttgtgtccttcgataaaaaatattcttcttttggactctgaagggaagcgtgtggcagtcaagtattactcagatgactggccaacaaacaatgcaaagttagcttttgagaagtttgtatttactaagactgttaagacaaatgctcgtacggaagctgaggtaacactacttgagaacaatattattatttacaaatttgtacaagacctgcatttctttgtcactggtggtgaagatgaaaatgagctcattctagcatcagttcttcaaggtttctttgatgcagtcacccttctgttgaggagtaatgtttacaaaagag

SEQ ID NO: 233450 - DNA, 422 bp, Glycine max
cgctccggaggcgcctgggacgacgagaagccgcgcgaggagtgcggcgtggtgggcatatacggcgaccctgaggcctcgcgcctttgctacctcgccctccacgcgcttcagcaccgcggccaggaaggcgccggaatcgttacggttcacaacaacgtcctccaatccatcaccggcgttggtctcgtttccgacgtgttcaaccagtcgaagctggaccagctccccggcagcctcgccatcggccacgtccgctactccaccgccggccaatccatgctcaaaaacgtgcaacccttcgttgccggctaccgcttcggctccgtcggcgtggcccacaacggcaacctcgtcaactaccgcaccctccgaaccaacctcgaggacagccggtccatcttcaacactacctccgacac

SEQ ID NO: 233451 - DNA, 420 bp, Glycine max
gcagcgtcaatcgcgtaagtgcgagaaggaggagaaatcggagaagctgaaggtgaagaaggcgatcgagaaaggcaacatggacggcgctcgaatctacgcggagaacgcgatccgtaagcgcacggagcagatgaactacctccgcctggcctcgcgcctcgacgccgtggtcgcccgcctcgacacgcaggcgaagatgacgacgatcagcaagtcgatgggcaacatcgtgaaatcgctggagtcatcgctggccacggggaacctccagaagatgtcggagaccatggactcgttcgagaagcagttcgtgaacatggaggtccaggccgagttcatggagagcgccatggccggatccacctccctctccactcccgaccgagaggtcaacagcctcaagcagcacgttgccga

SEQ ID NO: 233452 - DNA, 388 bp, Glycine max
gattgttgtgactcgttcttcttcgtcgttatcttcttcttttgttgtttgtgtgtttgttttttctctcacctgaaaatgtcttgctgcggtggtaactgtggttgcggaagcgcctgcaagtgcggcaacggctgcggaggctgcaagatgtacccagagttgagctacaccgagtcaaccaccaccgagaccttggtcatgggagtggcaccagttaaggctcaattcgagagtgctgaaatgggtgttcccgctgagaacgatggctgcaaatgtggagctaactgcacctgcaacccctgcacttgcaagtgacgtcttggagagctaaagcttcaagcataaatggcccttagaattaatgatacaaactacaagtaatttc

SEQ ID NO: 233453 - DNA, 403 bp, Glycine max
cagtggtgccttatcgctgtggttatcatcttcttcttcctctttcttagatctcttctttctctacgccgcacgccgaaaccatggccggaaaaggagagggtcctgctatcggaatcgatctcggaaccacctactcttgcgtcggtgtgtggcaacatgaccgcgttgaaatcatcgccaacgaccaagggaacagaaccacgccgtcttacgtcggattcactgacaccgagcgtctcatcggtgatgcggccaagaatcaagtcgccatgaaccccatcaacaccgtcttcgatgccaagaggttgattggtcgtagattcagtgattcctctgttcagagtgatatcaaattgtggcctttcaaggtcattcctggtgctgctgacaagccaatgat

SEQ ID NO: 233454 - DNA, 407 bp, Glycine max
ctgtctctctcgaacacaatgtccaactccaccaccggcaccaccgcggccttaccaccgaagcccacctgggtcctcccataccgaaccgagaatctccgcgaggtctacaccctaagccgaaagctcggccagggccaattcggcacaaccttcctctgcacgcacaacgccacgggacgcaccttcgcctgcaagtcaatcccgaagcggaagctgctctgcaaggaggactacgacgacgtatggagggagattcagataatgcaccacctctccgagcaccccaacgtcgttcgcatccacggcacctacgaggacgccgcctccgtccacctcgtcatggagctctgcgagggaagggagttgttcgacaggattgtgcagaaggggcactacagcgagcg

SEQ ID NO: 233455 - DNA, 395 bp, Glycine max
atcccatccgccgcatctcccgagagtaaagtgttttaccttaaaatgaagggtgattaccacaggtaccttgccgagttcaagactggggcagagaggaaagaggcagcagagagtactttgcttgcttacaaatctgctcaggatattgctcttgctgacttggcccccactcaccccattaggctgggacttgctctcaacttttctgtcttctattatgaaatccttaactcgccagatcgggcttgtaatcttgccaaacaggcatttgatgaggcaatttccgagcttgacacattgggtgaagagtcatacaaggatagtacgttgatcatgcaacttctccgtgacaatctgactttgtggacatcagacatcacggacgatgctgg

SEQ ID NO: 233456 - DNA, 396 bp, Glycine max
  unsure (1)..(396): unsure at all n locations
acaagagcagcatgaggaacaagatgaaaatccctacatttttgaggaagataaggattttgagaccagagtcgaaactgaaggtggcagaattcgggttctcaagaagttcactgaaaaatccaagcttcttcagggcattgagaacttccgtttggccattttggaagctagagcacacacgttcgtgtctcctcgccactttgattccgaggttgtttttttcaacatcaaggggcgagccgtacttgggttggtgagtgaaagtgaaacagaaaaaatcacccttgaacctgnggacatgatacacataccagctggcaccccactgtacatcgttaacagagatgagaatgataagctcttccttgccatgctccatatacctgtctctgt

SEQ ID NO: 233457 - DNA, 408 bp, Glycine max
gtgaccaaactccatttctcactcgccgtcgtctcttccgtctagggtttctcctcttcacaaaaatggttgccgcaaaaaaaactaagaagacccatgagagcatcaacaacaggctcgctctcgtcatgaagagtggcaaattcaccctcggttacaagaccgttctcaaatctcttaggagctccaaagggaaattgattatcattgctaacaactgcccccctttgaggaagtcagagattgaatactatgctatgttggcaaaggttggggttcatcattacaatgggaacaatgtggatttgggcactgcatgtggcaaatattacagagtgtgctgccttagcattagtgatcctggtgattcggatatcatcaagacactgcctggcgaacagtaaagta

SEQ ID NO: 233458 - DNA, 383 bp, Glycine max
atcatcatcatcttcattagtgttagccctaaacttcaccttcaaccatgaccacagtgccaccacacagtgtccaagtgcacacaacaacacaccgctacgaagccggcgtcgtcccgccggctcgttttgaggcgccgcgttacgaagccggcatcaaggcgccctcttccatttaccattccgagagaggtccgacgacctctcaggttctcgcagttgtcgccggccttccggtcggcggcatcctcctgctcctggcaggactgaccctggctggaactctcaccgggccggtggtggcaacaccgctcttcatcatcttcagcccggtgctgattccgggcacggtcgcaattggcctggccgtggcgggttcctga

SEQ ID NO: 233459 - DNA, 447 bp, Glycine max
  unsure (1)..(447): unsure at all n locations
tatatatgagctatgacgtcacacgtacgtatactcagacttcggattcagcacnatgtaaatttgcatatcagcatcaatggctccaattgcaatgggaaacgtcattccagacggcattttggcttacttggatgaagaaaacaaaccccaaactgtctccattcactctctcgccaccggcaagaaagtcatcatctttggggttcccggtgccttcactcctacttgcagcttgaagcacgttcctggcttcattgagagagcagaagagctgaaagggaagggtgtggacgaaataatctgtatcagtgtgaatgatccatttgtgatgaactcatgggccaaaacattcccagagaacaagcatgttaagttccttgctgatggtgcagccaaatacaccaatgcccttggtcttgagcttgacctcactgacaagggtct

SEQ ID NO: 233460 - DNA, 359 bp, Glycine max
gattgtttagatgcaatcttcagcagatctatgaagtaccctttcttcgctcagttcgaggtgtcgtattctttagagtaggacaacctcttggctttctgtcttcttggcctctcttcactttaacacatcacttagtgatgttttattgtgcagagaaggtgtacccaggacagcgctttactaggtatgccattcttggagacgatgtttgtatcgccgacgagaatgtggcctctctttatcgccagacagtaaatgatctaggtctcgcaataagaaagggggtgagataggcgacaggtagcttgcttccaagccggcccggccgcgaggaagagatctttgccggtgctgac

SEQ ID NO: 233461 - DNA, 342 bp, Glycine max
tcctttaccaccattctagatatcagagaactttgcagctctcttaggtttttaaaaaacaccacgcaaacagcaagatggccacttccgacagtaacatgctactaaattatgttccagtttatgtgatgctcccactcggagttgtcaatgttgacaatgtttttgaagacccagatggccttaaagaacagctcttgcagcttcgagctgcgggtgttgacggggttatggttgatgtgtggtgggggatcatagaactgaaggggcctaagcagtatgattggagagcctacaggagtttgtttcagctggttcaagaatgtggcttgacactgcaag

SEQ ID NO: 233462 - DNA, 193 bp, Glycine max
ggagtcaacactgggggtgcgcacactgaagcaggatatacgaaggaacatcgtcagcatgaccaatctcatggtgatcagaacgagaagacagggattatggacaagattaaggacaagcttcctggaggacacagtgacaagtagatgcatcgtgcatcatgcttgcatgcacatatcgaatactgttgtc

SEQ ID NO: 233463 - DNA, 406 bp, Glycine max
atagcattttcagaggaacaatggcgggtaaggtttcgacgtgcttcttcttcgtgtttgctctttctctccttcttccttttcagatctccgctgaggaatcatcggagaaagagttcgtactcacattggattactctaactttcacgacactgtcagcaagcacgatttcatcgtcgtcgagttctacgctccatggtgtggccactgtaagaagcttgctcccgagtatgagaaagctgcttctatcttgagtagtcatgatcctccggttgttttggctaaaattgatgccaatgaggagaagaacaaagaccttgcatctcaatatgatgttaggggatacccaacaattaagattctgagaaatgggggaaagaatgttcaggaatacaaaggtccccg

SEQ ID NO: 233464 - DNA, 398 bp, Glycine max
ctaagtgagaaacaaagaaaggaaataattgatctttgaaaatgcagggaggaaagaaagctggagagtccatcaaggaaacagctgcaaacattggtgcttctgccaaggctggcatggagaaaaccaaggccactgtccaggagaaggcagaaagaatgacggcacgtgatccgatgcaaaaggagttggcaacccagaagaaagaggcaaagatgagccaggcagagctggacaagcaggcggcgcgtcagcataacacggcggcgaagcaggctgccacggcagggcacatgggacaacccatggggacccatcagacgtcagctatgcccggtcatggaaccggacagcccacgggccatgtcaccgagggagtggtgggctcacaccctatt

SEQ ID NO: 233465 - DNA, 403 bp, Glycine max
tgggtttacaaggagcaggtaaagcttttccaaacaagattgtttttgatgataaacttgtgctggctaacacacaagaattctttgctggaaattttccagtggattcttggttaccaatttttgtgaattgtctttatcctgtaagtcaattaccttcagaagctgtcgttgtaaatgttacatgtggtagtggacgtggtggtttacctaccactgcttggattagttctgcagttaacaatcgctcctcagatatcaacaaaaagattcgcacagcacttgggaaaggtaagaaaattgtttttcttactagagttgatccttttccagtagctctactggctgttctttttggcgttaagaatgaaattctgagttccaacgccactaaccctatgct

SEQ ID NO: 233466 - DNA, 368 bp, Glycine max
  unsure (1)..(368): unsure at all n locations
ctttctccgagaacaaaaaaaaaaaaaaaaaaaatccgcgattcgctcttctcttggaaaagtgaaaaccagaagtacgaacgaaagagaagagcgatttagaagtgagagaagatggggttgtcgttcacgaagctgttcagcaggttgtttgcgaagaaggaaatgaggattctgatggtaggtctcgatgctgctggtaagacancatcttgtacaagctcaagcttggagaaatcgtcaccactatccccaccatcggatttaatgttgagactgtggagtacaagaacatcagcttcactgtgtgggatgttggtggtcaggacaagatccgtccactgtggaggcattatttccagaacact

SEQ ID NO: 233467 - DNA, 393 bp, Glycine max
gcggtggtggaggtggcaagagtggaaagacaatgtccaccaacagcaaggagaatttgttcatagtttttcttgttacactttggtactcttcaaacattggtgtgatccttctgaacaagtatctgctctcaaactatggattcaagttcccaatcttcctcacaatgtgccacatgtcggcctgtgctgtcctcagctatgtctccattgtgttcttcaaggtggtgcctcagcagatgatcaaatcaaggtcccagttcatcaagattgcaactttgagccttgttttctgtgcctctgtggttggtggcaacatttctctcaggtaccttgctgtgtcattcaaccaggctgttggggcaaccacaccctttttcactgctgtttttg

SEQ ID NO: 233468 - DNA, 376 bp, Glycine max
ggttaaacactcttcttcatcgtcgtcgcaatgggacgtgtgatccgtgcgcagcgtaagggagcaggctcggtcttcaagtcccacacgcaccaccgcaagggccctgcccgcttccggagcctggatttcggagagcgcaacggctacctgaagggtgtcgtcactgacgtcatccacgatcctggccgtggcgcgcctctcgctaaggtcgccttccgccacccgttccgctacaagaagcagaacgagctcttcatcgccgccgagggtctctacaccggccagttcatctactgcggcaagaatgccaccctcgttgtcggcaatgtgttgcctcttcgattcattcctgaaggagctgtcatctgcaacg

SEQ ID NO: 233469 - DNA, 394 bp, Glycine max
cattgtctttgaacactcatcaccatggccaagcttgttctttccctttgtttccttcttttcagtggctgcttcgctctgagagagcaggcacagcaaaatgagtgccagatccaaaagctgaatgccctcaaaccggataaccgtatagagtcggaaggtgggttcattgagacctggaaccctaacaacaagccattccagtgtgccggtgttgccctctctcgctgcacccttaaccgcaatgcccttcgtagaccttcctacaccaacggtccccaggaaatctacatacaacaaggtaatggtatttttggcatgatattcccgggttgtcctagcacttatcaagagccgcaagaatctcagcaacgaggacgaagccagaaggccc

SEQ ID NO: 233470 - DNA, 393 bp, Glycine max
gtaaagcttttccaaacaagattgtttttgatgataagcttgtgttggctaacacacaagaattctttgatggaaattttccagtggattcttggttaccaatttttgtgaattgtctttatcctgtaagtcaattaccttcagaagctgtcgttgtaaatgttacatgtggtagtggacgtggtggtttacccaccactgcttggattagttctgcagttaataatcgctcctcagatatcaacaaaaagattcgcacagcacttgggaaaggtaagaaaattgtttttcttactagagttgatccttttccagtagctttactggctgttctttttggcgttaagaatgaaattctgagttctaacgccactaaccctatgctgacgcgac

SEQ ID NO: 233471 - DNA, 396 bp, Glycine max
ctcgagccgaatcggctcgagaattcttccaccaagttatgggtttccttgtgttgcttcttttctccctcttaggtctctcttctagttccagcatatcaactcatcgttccatattggaccttgacctaaccaagtttaccacacagaaacaggtgtcttcactgttccaactatggaagagtgagcatggacgtgtctaccataaccacgaagaagaggcaaagagacttgagattttcaagaataacttgaactatatcagggacatgaatgcaaacagaaaatcaccccattctcatcgtttaggattgaacaagtttgctgacatcactcctcaagagttcagcaaaaagtacttgcaagctcccaaagatgtgtcgcagcaaatcaaaa

SEQ ID NO: 233472 - DNA, 358 bp, Glycine max
cttcaccacctctaccgccaccacgtccggcgccggaggtgccggaatagcttctccggctaccagatccggcatctccgcgcgtccactgaagagatcttttcccgaggagccctcgccgccggcggatcctccgtcttcagaccagacgaccccgtcggaggcgaagcgcgtggtgaaccgctgctccggctgcaggaggaaggtcggactcaccggatttcggtgccgatgcggcgagctcttctgcgccgagcaccggtactccgaccgccacgactgcagctacgactacaaagccgccggaagagaagccatcgcgagggagaatccggtgattagagccgcgaagatcgtc

SEQ ID NO: 233473 - DNA, 449 bp, Glycine max
ggagagacaaacttgcatgcgatgcaggtctactctagacgatccctcggggaattccaattccacattttcaagaaataacgaggcacagatgttcatatatgaattggcattatttgatttcttattacgcctatcctgaagccaaaggatatgagatcggaattcctcggggaattccaattccacattttcaagaactaaggaggcagtaatgttcatatatgaattggaattatttgttttcttactaggcctatcctgaagccaaaggaaatgagatcggaattcctcagggaattcgaattccacattttcaagaaataaggaagcacagatgttcatatatgaattggaattatttgtattcatactaggcctatcctgaatccaaaggaaatgagatatgaattcctcgggggtaccgagctcgaattccgtatagtgag

SEQ ID NO: 233474 - DNA, 366 bp, Glycine max
ggaaatggctgaagcacaactacgagaccagcatggcaaccctgtcccactcaccgatcaatacggtaatccggttatcttaactgacgagcgcggtaatcccgtccaactcactggtgtcgctaccaccgctaccggcacagcaggttctgggtttgggtcctatggtaccggtgcttacggtggtggtgcaagtgcaaccaccgttgcagatcttttggcaacccaaccaaggagtggcagggaggctagagagcttcgtcgttcctccagttcaagctctagctcgtctgaggatgatgggcaaggtgggaggaggaagaagggagtgaaggataaaataaaagagaaactaccaggggtaag

SEQ ID NO: 233475 - DNA, 400 bp, Glycine max
cttcatagttcagtgtgtcgtttaaaaatgtcgcagttgctggataaagccaagaacttcgtgtcggagaaggtaaatgatatggccaagccggaggcgagtgtcactgacgtggacttcaagcgcgtgagcaaagataatgtcgagtacttggccaaggtctctgttcgtaacccttattcaacttccatacccatttgtgagatcaactactctttcaaaagcgcatccagggagatagcatcagggaaaattccagacccaggatcgttgaagtcaaaggacacaacaatggtggatgtgccagttaaggttccatacagcatattgatgagcttggcaaaggacattggtgctgactgggacatagactatcaattggatcctggtccgggtaatg

SEQ ID NO: 233476 - DNA, 476 bp, Glycine max
tgccaaggctacctcagccaaaggagagacttgcttgcatggctgcaggtcgactctagaggatcccctcggggaattccaattccacattttcaagaaataaggaggcaaaaatgttcatatatgaattggaattatttgttttcttattaggcctatcctgaagccaaaggaaatgagatcggaattcctcggggaattccaattccacattttcaagaaataaggaggcaaaaatgttcatatatgaattggaattatttgttttcttattaggcctatcctgaagccaaaggaaatgagatcggaattcctcggggaattccaattccacattttcaagaaataaggaggcaaaaatgttcatatatgaattggaattatttgttttcttattaggcctatcctgaagccaaaggaaatgagatcggaattcctcgggggtaccgagctcgaattccctatagtgagtcgta

SEQ ID NO: 233477 - DNA, 332 bp, Glycine max
caagcctacaggcactgagacttgatgggaatcctctcagaagcattcgaagaactgtgttggataaaggaactaaagctgttctgcaatatttgaaggacaaattgccagagcaatagtgtttttagttttttccctcctttgaaagtgttgtgcttgacatgaacagcaatatttaaagtgtccaatttttttttcaggtgtcacattctgtgtttgctctttattttgttcaattattttcccgtggtacctctgcttttgtgtgctatttcatgtaacaattttgacggtttgaatatttaacattacaaactaatttgcatggctta

SEQ ID NO: 233478 - DNA, 392 bp, Glycine max
ctccaacttcaacaatcagcttgatcaaaaccccagagtattttaccttgctgggaacccagatatagagcacccagagaccatgcaacaacagcagcagcagaagagtcatggtggacgcaagcaggggcaacaccagcagcaggaggaagaaggtggcagtgtgctcagtggcttcagcaaacatttcttagcacaatccttcaacaccaacgaggacacagctgagaaacttcggtctccagatgacgaaaggaagcagatcgtgacagtggagggaggcctcagcgttatcagccccaagtggcaagaacaagaagacgaagacgaagatgaagacgaagaatatgaacaaactccctcttatcctccaagaagaacaagccaatgga

SEQ ID NO: 233479 - DNA, 364 bp, Glycine max
cggtgagaaggaggaagacgaagatgagcaaccacgtccaatcccattcccacgcccacaacctcgtcaagaagaagagcacgagcagagagaggaacaggaatggcctcgcaaggaggaaaaacgcggagaaaagggaagtgaagaggaagatgaggatgaggatgaggaacaagatgaacgtcaattcccattcccacgcccacctcatcagaaggaagagcgaaagcaagaggaagatgaggatgaggagcagcagcgagagagcgaagaaagtgaagattctgagttacgaagacataagaataagaacccttttctcttcggctctaacaggttcgaaactctcttcaaaaaccaatat

SEQ ID NO: 233480 - DNA, 369 bp, Glycine max
  unsure (1)..(369): unsure at all n locations
gtctatttcacagcaaactgtttggaatcaaatggcaacagtgagaacaccattgaattttgatcctagcaagcagagcttttgtcaattttctattgaccttcttggtggaggaattttagtggacaaaactggagattggatcacacttatacaaaattctccaattagtaacttgttgagagttgctgcttggaagaaaggctgtttaatggttaagattgtgatgtctgggaatgcagtagtcaaaaggagtgattgggcctcattggtacaagtgtttctaacaaacagcaacagtacagagcattttgatgcatgtaagtggacaaaatcggaaccacattcctgngaattgatcttcccaat

SEQ ID NO: 233481 - DNA, 386 bp, Glycine max
cttccaccaagttatgggtttccttgtgttgcttcttttctccctcttaggtctctcttctagttccagcatatcaactcatcgttccatattggaccttgacctaaccaagtttaccacacagaaacaggtgtcttcactgttccaactatggaagagtgagcatggacgtgtctaccataaccacgaagaagaggcaaagagacttgagattttcaagaataacttgaactatatcagggacatgaatgcaaacagaaaatcaccccattctcatcgtttaggattgaacaagtttgctgacatcactcctcaagagttcagcaaaaagtacttgcaagctcccaaggatgtgtcgcagcaaatcaaaatggccaacaagaaaa

SEQ ID NO: 233482 - DNA, 376 bp, Glycine max
cacacacaactactacaagtacttccttacaatcaaaaccaacaacaactatggcaagttatcaaaagcactacgatgatcagggtcgcaaggttgacgagtatggcaacgttgagaagcaaaccgacgaatacggcaaccctgttcatgctgctagtgtcacctatgtagccaccagaactgctgctggtggttacagtgatgacattaataagcaacatgataccaccaatgcctacggcgtagacactggtagacagcattctagtggtggctacgatggtgacactaataaacatcatggaactactggtggctataatgatgacaccaatagacatcatggaactaccggtgtctatggtatagacaccga

SEQ ID NO: 233483 - DNA, 382 bp, Glycine max
gcaagaggaagatgaggatgaggagcagcagcgagagagcgaagaaagtgaagattctgagttacgaagacataagaataagaagccttttcgcttcggctctaacaggttcgaaactctcttcaaaaaccaatatggtcgcattcgcgtcctccagaggttcaaccaacgctccccacaacttcagaatctccgagactaccgcattttggagttcaactccaaacccaacaccctccttctccccaaccatgctgacgctgattacctcatcgttatccttaacgggactgccattctttccttggtgaacaacgacgacagagactcctacagacttcaatctggtgatgccctgagagtcccctcaggaaccacatac

SEQ ID NO: 233484 - DNA, 387 bp, Glycine max
attggcggagagagaaaaagagagaggtagagaaaagcgaagagtctctctcttcctatctctctctttcaatgtcagggcacaaatcttccacctctacttcttcttcttcttccttctaacctatatcagaaggaaacgcgaaaaaagaaaaaaaaaaaagaggcagaaggttctagaagccgccaatttttatttcttttaatttgtctgagtcagagacgttcgtgattgtaaccatggattcttcgtgtgtcccaaacggcgacgtttctgggttcaaagataaggagtcaatggttgaccctttcttggtcgaggctcttgagaaccctcggcaccgtgtcaccattttgcggatggagctggatatccagaggttcctga

SEQ ID NO: 233485 - DNA, 387 bp, Glycine max
cggctcgagaggctggcatggagaaaaccaaggccactgtccaggagaaggcagaaagaatgacggcacgtgatccgatgcaaaaggagttggcaacccagaagaaagaggcaaagatgagccaggcagagctggacaagcaggcggcgcgtcagcataacacggcggcgaagcaggctgccacggcagggcacatgggacaacccatggggacccatcagacgtcagctatgcccggtcatggaaccggacagcccacgggccatgtcaccgacggagtggtgggctcacaccctattggaaccaacagaggcccgggtgggactgctacagcccataatacccgtgcggggggaaacccaaatgattatgggtatggaactgggg

SEQ ID NO: 233486 - DNA, 259 bp, Glycine max
gacgtcgaacgcacgcggacctaaactcggaatacggctcgagtttttgttccgtctctgcggctagctttttgagcatcaatggcggactctgaaaccttcgctttccaggcatggagatcaaccaacttcgcagccgcatcaacaacatctgctacagcaccaatgagattctcttgcgtggactcatcaggaacgcttctgatgcttgggttaagatttgatttgagactctaaccgagaagatgaagctcgatgc

SEQ ID NO: 233487 - DNA, 373 bp, Glycine max
tcggctccgttaggttttccttccgcgtgtttgctcggaactactcctccactcatcgtttaaaatgtctgacgtggaagagtttcgttgcttcattggtggccttgcatggtcaacgtctgatagaaagttaaaggatacatttgaaaagtttggcaagcttattgaggcaaaggtggttgttgacaagttctctgggcgttctcgtggttttggatttgtcacatttgatgacaagaaagcaatggacgaggctattgatgctatgaatgggatagatttagacgggcgaactattactgttgatagagctcagcctcaacaaggatcaactagagatgatggtgatcgttaccgggagcgtggtcgtgat

SEQ ID NO: 233488 - DNA, 383 bp, Glycine max
gcactatcaatcgttcgaatgggttttagaacatggtgggattgccactgatgatgattatccttacagagctaaagagggtagatgcaaagccaataagatacaagacaaggttacaattgacggatatgaaactctaataatgtcagatgagagtacagaatcagagacagagcaagcgttcttaagcgccatccttgagcaaccaattagtgtctccattgatgcaaaagattttcatttatacaccgggggaatttatgatggagaaaactgtacaagtccgtatgggattaatcactttgttttacttgtgggttatggttcagcggatggtgtagattactggatagcgaaaaattcatggggagaagattggggaa

SEQ ID NO: 233489 - DNA, 358 bp, Glycine max
agccaatcctttgtgtaggtgctcaaccctagtaagccgcaatggtgaagtactcaagggagcctgacaatccaactaagtcttgcaaggctagaggcgccgaccttagggttcattttaagaacacaagggaaactgcctttgcaatcaggaagttgcccttggtcaaggctaaaaggtacttggaagatgttcttgcccacaagcaggcaattccattcagacgtttttgtcgaggtgttggaaggacagcccaggctaagaatagacactctaatggccaaggacggtggcctgtcaagtcagcaaaattcattcttgatttgctcaaaaatgctgagagcaatgctgaagtgaa

SEQ ID NO: 233490 - DNA, 104 bp, Glycine max
aaaaaaaaaaaaaaaaaaaaaaaaaaaaaaaaaaaaaaaaaaaaaaaaaaaaaaaaaaaaaaaaaaaaaaaaaaaaaaaaaaaaaaaaaaaaaaaaaaaaaaat

SEQ ID NO: 233491 - DNA, 376 bp, Glycine max
ccgaggcgaagagaagagaaaaattaagatggaggggaaggagcaggatgtgtcgctgggagcgaacaagttcccggagagacagccgattgggacggcggcgcagagccaagacgacggcaaggactaccaggagccggcgccggcgccactggttgacccgacggagtttacgtcatggtccttttacagagcagggatagcagagtttgtggccacttttctgtttctatacatcactgtcttaaccgtcatgggagtcgccggggctaagtctaagtgcagtaccgttgggattcaaggaatcgcttgggccctcggtggcatgatcttcgccctcgtttactgcaacgctggcatctcagggggacacata

SEQ ID NO: 233492 - DNA, 394 bp, Glycine max
ttgaaattttcacaagaggaatttcttacagcttggtcaactcaggtgcgtcctacaacaactctgttggctgatgggtgtccatatttgtatgctatggtgcatgatagttcagtgtctacaataccaggtgattttgtcattggtgttaagttgacaaccataaacaatatgtgtgcatatgggctcaatcctggtatttcaggttctcgtcttttgggtaccattcctcagtctatttcacagcaaactgtttggaatcaaatggcaacagtgagaacaccattgaattttgattctagcaagcagagcttttgtcaattttctattgaccttctcggtggaggaattttagtggacaaaactggagattggatcacacttatacaaaatt

SEQ ID NO: 233493 - DNA, 371 bp, Glycine max
ccctagggtattttaccttgctgggaacccagatatagagtacccagagaccatgcaacaacaacaacagcagaaaagtcatggtggacgcaagcaggggcaacaccagcaggaggaagaggaagaaggtggcagcgtgctcagtggcttcagcaaacacttcttggcacaatccttcaacaccaacgaggacatagctgagaaacttcagtctccagacgacgaaaggaagcagatcgtgacagtggaaggaggtctcagcgttatcagccccaagtggcaagaacaacaagatgaagatgaagatgaagacgaagatgatgaagatgaacaaattccctcccaacctcctcgccgaccaagccatggaa

SEQ ID NO: 233494 - DNA, 348 bp, Glycine max
gggaatccatctgctgcatctatgcacgtgctcatgtcactcgtctagttccatcatattctgacagcgtaccacattggtcacttgacttgcctttctttacagacagtcccaagtattctacaggttctaacaatcgcatggtaatcacggacgtgtctaccattgccactaatactctgcagccagacttgacagtttcacaagtaacttgaactatatcagggacatgaatgctcctcagcatgctccgcaatcccagcgttcatgagcgagcacgtttgctgacatcactcctcaggagttcagcatgaagtacttgcaaactccgaacgatctatctcaaca

SEQ ID NO: 233495 - DNA, 382 bp, Glycine max
atcaccattactgatggtattgacaagactagtgcaactttgcaatttagaaagttagcagattgtgattttctcaagagaaactttaagcagatgtctaatgttttgtgggtagctcctgaggacaaggcgagtttatggtcacaacttcattatgtttcgtgtaataatctggaaatgcaagaagcttatcttgtcaatctcgtaaatgtgttacgagaattgtatttgcacagtccagaggaagctcgccaattgagaaggaaagctctctctcgtattgaatggctgcaaaaagctgatgtgcctaccatagcacagattgaagagttccattcgatgcagaggatgatgaatgctcctgattcaaatgataatattg

SEQ ID NO: 233496 - DNA, 385 bp, Glycine max
caataattccttcacttgcagaacttagttctctgttgcatcatcatcatcttcattagtgttagccctaaacttcaccttcaaccatgaccacagtgccaccacacagtgtccaagtgcacacaacaacacaacgctacgaagccggcgtcgtcccgccggctcgttttgaggcgccgcgttacgaagccggcatcaaggcgccctcttccatttaccattccgagagaggtccgacgacctctcaggttctcgcagttgtcgccggccttccggtcggcggcatcctcctgctcctggcaggactgaccctggctggaactctcaccgggctggtggtggcaacaccgctcttcatcatcttcagcccggtgctgattccggc

SEQ ID NO: 233497 - DNA, 386 bp, Glycine max
gttctggacaagtacagctttctgtcgaaggagaaactgaagggggttggaggtgttgaattacggtttaacggtggcggcgaagggacaagagagggtgctgagggaactggacgaggttctggacaagtacagctttctgtcgaaggagaaactgaagggggttggaggttgggaagttttggatggttcagtttcgacggagacatcgccggaggagttacaaggatcggaagagaggaaggaagtggtggaggagcgttctggggcatactggacgacgttggcgccaaacgtggaggattacagtgggagtttcgcgagatggattgcagcagggtcggggcaagtggttagggggattctgtgggctggggatgtgactg

SEQ ID NO: 233498 - DNA, 397 bp, Glycine max
tggcaacagtgagaacaccattgaattttgattctagcaagcagagcttttgtcaattttctattgaccttctcggtggaggaattttagtggacaaaactggagattggatcacacttatacaaaattctccaattagtaacttgttgagagttgctgcttggaagaaaggctgtttaatggttaagattgtgatgtctggaaatgcagcagtcaaaaggagtgattgggcctcattggtacaagtctttttaacaaacagcaacagtacagagcattttgatgcttgtaagtggacaaaatcggaaccacattcctgggaattgatcttcccaatagaggtatgtggtcctaataatggttttgaaatgtggagttctgagtgggcaaatcaaac

SEQ ID NO: 233499 - DNA, 397 bp, Glycine max
ggaaaaagttgtattgaaattttcacaagaggaatttcttacagcttggtcaactcaggtgcgtcctgcaacaactctgttggctgatgggtgtccatatctgtatgctatggtgcatgatagttcagtgtctacaataccaggtgattttgtcattggtgttaagttgacaaccataaacaatatgtgtgcatatgggctcaatcctggtatttcaggttctcgtcttttgggcaccattcctcagtctatttcacagcaaactgtttggaatcaaatggcaacagtgagaacaccattgaattttgattctagcaagcagagcttttgtcaattttctattgaccttctcggtggaggaattttagtggacaaaactggagattggatcacactt

SEQ ID NO: 233500 - DNA, 381 bp, Glycine max
tagtgattcctcctggtgttccttactggacctataacactggcgatgaaccagttgttgccatcagtcttcttgacacctccaacttcaacaatcagcttgatcaaaaccccagagtattttaccttgctgggaacccagatatagagcacccagagaccatgcaacaacagcagcagcagaagagtcatggtggacgcaagcaggggcaacaccagcagcaggaggaagaaggtggcagtgtgctcagtggcttcagcaaacatttcttagcacaatccttcaacaccaacgaggacacagctgagaaacttcggtctccagatgacgaaaggaagcagatcgtgacagtggagggaggcctcagcgttatcaacccca

SEQ ID NO: 233501 - DNA, 374 bp, Glycine max
cggctcgagagctattgaacttatctctcttctcacttctgttgttataagtaacttccctcatcattacaaaacaatcctccacaggtttcaaaatgctgaaatcgggcatgggaattgaggagagaaagcaagtgaagaagccagcacaagccagctcgagaaaagggtgtatgagagggaaaggaggtcccgagaatgctagttgcacctacaaaggtgtgaggcagagaacatggggaaaatgggttgctgaaatccgtgaacccaatcgaggtgctaggctctggctcgggacttttgagacctctcatgaagctgctttggcttatgatgctgctgcacgtaagctctatggctctgatgccaaactc

SEQ ID NO: 233502 - DNA, 361 bp, Glycine max
atctgcacaagttccagtgccacaacttcaaggtggggttgtgctgtttctgctgttgtctcagaagagaacgctgttggttcctctttctctgcagctgatgtcttcaaactcacgtatttagagggaaacagttggatctggaatgtgggtgggataaacatattggttgatcctattttggtgggcaacttggattttggaattccttggctatatgatgctgctaagaaagtgttgcagaagttccagctcagtgatcttccggaaatcaattgcttactcattactcaaagccttgatgatcactgccatttgaagaccttaaagcctttctctcagaaattcccagatattagag

SEQ ID NO: 233503 - DNA, 384 bp, Glycine max
agcgcgtccacagaaactttttttttctgtttgccgtggaagagagaaaccctagggtttggaagaagctgatcggagaagatggtgcagcgtctcacctaccgcaagcgccacagctatgccaccaaatccaaccagcacagagtcgtcaagactcccggtggcaagcttgtttatcagaccacgaagaagagggccagcggacccaagtgccctgtcactggaaagaggattcaagggattccacatttaaggccaacagaatataagagatcaaggttacccaaaaaccgaaggactgtgaaccgtgcatatggtggtgtgttgtctggcagtgctgttagagagagaatcattcgagctttcttggttgaagagcaaaag

SEQ ID NO: 233504 - DNA, 380 bp, Glycine max
ctcgtcgctcccacctcccactattgcccccaacacaaccgcagcttccagcaacgccgccgttttgtgcacgtgaatgaattccagcgtctccagccccacattcgccaccccctccgaatctatatccaccacttgtcccgccacaagcccttccgtaccgatcgacttcgctaattccccaatcgctcgaaccacgcgtgacggcgacactccctccgtggacgctgccacgtgctcgaacgcgaaggcgaggagcgcgtcgccggcgaggaccgccacgtcctcgccgtagaccttgtggttggtcggctttccgcggcggaggtcgtcgttgtccatacatggcaggtcgtcgtggatgagcgacatggtgtgga

SEQ ID NO: 233505 - DNA, 379 bp, Glycine max
ggtggctccagggcccatttggacccctttgataccagcctctttcaaggaggaagaaacggcccaatttggagcgcaggtcccaatgaagagagctggtcaacctattgaggttgctccttcctatgtttttcttgcttccaaccaatgctcctcttacataactggacaagtccttcaccccaatggtggaaccgttgtgaatggttaaaccgttggtgatgatgatattcgggatgaatatatgtggcgagagtattaagccagtgttacgttttgtgtgaatgttttacgatgtgttttaatgcatggctaactcactcacgtcctctcatgtactgttagaggtggggcttggcggattatccacttttgaatg

SEQ ID NO: 233506 - DNA, 395 bp, Glycine max
aattcttccaccaagttatgggtttccttgtgttgcttcttttctccctcttaggtctctcttctagttccagcatatcaactcatcgttccatattggaccttgacctaaccaagtttaccacacagaaacaggtgtcttcactgttccaactatggaagagtgagcatggacgtgtctaccataaccacgaagaagaggcaaagagacttgagattttcaagaataacttgaactatatcagggacatgaatgcaaacagaaaatcaccccattctcatcgtttaggattgaacaagtttgctgacatcactcctcaagagttcagcaaaaagtacttgcaagctcccaaggatgtgtcgcagcaaatcaaaatggccaacaagaaaatgaag

SEQ ID NO: 233507 - DNA, 370 bp, Glycine max
gttcaatatcctagtataccttaataaataatttaagatactatgatgagagcacggttcccattactgttgctgggacttgttttcctggcttcagtttctgtctcatttggcattgcttactgggaaaaagagaaccccaaacacaacaagtgtctccagagttgcaatagcgagagagactcgtacaggaaccaagcatgccacgctcgttgcaacctccttaaggtggagaaagaagaatgtgaagaaggtgaaattccacgaccacgaccacgaccacaacacccggagagggaacctcagcaacccggtgagaaggaggaagacgaagatgagcaaccacgtccaatcccattcccacgcccaa

SEQ ID NO: 233508 - DNA, 357 bp, Glycine max
cttaattattaacacttccttagttcaatatggggaagcccttcactctctctctttcttccctttgcttgctactcttgtcgagtgcatgctttgctattagctccagcaagctcaacgagtgccaactcaacaacctcaacgcgttggaacccgaccaccgcgttgagtccgaaggtggtttgattcaaacatggaactctcaacaccctgagctgaaatgcgccggtgtcactgtttccaaactcaccctcaaccgcaatggcctccacttgccatcttactcaccttatccccggatgatcatcatcgcccaagggaaaggagcacttggagttgcaattccaggatgtcctg

SEQ ID NO: 233509 - DNA, 359 bp, Glycine max
aaaatgaccaagcttacaattctcctcatcgctcttctcttcatcgcccacacctgctgcgcctccaaatggcaacagcaccagcaagagagctgccgcgagcagctcaaggggatcaacctcaacccctgtgagcacatcatggagaagatccaagctggccgccgcggcgaggacggcagcgacgaagatcacattctcatcaggaccatgccgggaagaatcaactacatcaggaagaaggaaggaaaagaagaagaagaagaaggacacatgcagaagtgctgcagcgaaatgagcgagctgaaaagccccatatgccagtgcaaagcgctacagaagataatggataaccagag

SEQ ID NO: 233510 - DNA, 421 bp, Glycine max
gacgtcagacgcacgcgtacgtaaactcggaaatcggctcgagaaaatgaccaagcttacaattctcctcatcgctcttctcttcatcgcccacacctgctgcgcctccaaatggcaacagcaccagcaagagagctgccgcgagcagctcaaggggatcaacctcaacccctgtgagcacatcatggagaagatccaagctggccgccgcggcgaggacggcagcgacgaagatcacattctcatcaggaccatgccgggaagaatcaactacatcaggaagaaggaaggaaaagaagaacaagaataaggacacatgcacaagtgctgcagcgaaatgagcgagctgaaaagccccatatgccagtgcaaagcgctacagaagataatggataaccagagcgagcaactggaggggaag

SEQ ID NO: 233511 - DNA, 84 bp, Glycine max
gaggaaagtatcgggctatttaactatgacttgagctccatctatgaataaataaatcagcatatgatgcttttgttttgtgta

SEQ ID NO: 233512 - DNA, 391 bp, Glycine max
cttccaccaagttatgggtttccttgtgttgcttcttttctccctcttaggtctctcttctagttccagcatatcaactcatcgttccatattggaccttgacctaaccaagtttaccacacagaaacaggtgtcttcactgttccaactatggaagagtgagcatggacgtgtctaccataaccacgaagaagaggcaaagagacttgagattttcaagaataacttgaactatatcagggacatgaatgcaaacagaaaatcaccccattctcatcgtttaggattgaacaagtttgctgacatcactcctcaagagttcagcaaaaagtacttgcaagctcccaaggatgtgtcgcagcaaatcaaaatggccaacaagaaaatgaag

SEQ ID NO: 233513 - DNA, 397 bp, Glycine max
aacaataattccttcacttgcagaacttagttctctgttgcatcatcatcatcttcattagtgttagccctaaacttcaccttcaaccatgaccacagtgccaccacacagtgtccaagtgcacacaacaacacaccgctacgaagccggcgtcgtcccgccggctcgttttgaggcgccgcgttacgaagccggcatcaaggcgccctcttccatttaccattccgagagaggtccgacgacctctcaggttctcgcagttgtcgccggccttccggtcggcggcatcctcctgctcctggcaggactgaccctggctggaactctcaccgggctggtggtggcaacaccgctcttcatcatcttcagcccggtgctgattccggccacggtcgca

SEQ ID NO: 233514 - DNA, 506 bp, Glycine max
ggttgcgggtgggggctcgcgaatgaattaggtggcttatagagccactatgacgtcagatgcacgcggccgtggtctactctaaaggatcccctcggggaattccaattccacattttcaagaaataaggaggcaaaaatgttcatatatgaattggaattatttgttttcttattaggcctatcctgaagccaaaggaaatgagatcggaattcctcggggaattccaattccacattttcaagaaataaggaggcaaaaatgttcatatatgaattggaattatttgttttcttattaggcctatcctgaagccaaaggaaatgagatcggaattcctcggggaattccaattccacattttcaagaaataaggaggcaaaaatgttcatatatgaattggaattatttgttttcttattaggcctatcctgaagccaaaggaaatgagatcggaattcctcgggggtaccgagctcgaattccctatagtgagtcgtattaa

SEQ ID NO: 233515 - DNA, 375 bp, Glycine max
cacacaactactacaagtacttccttacaatcaaaaccaacaacaactatggcaagttatcaaaagcactacgatgatcagggtcgcaaggttgacgagtatggcaacgttgagaagcaaaccgacgaatacggcaaccctgttcatgctgctagtgtcacctatgtagccaccagaactgctgctggtggttacagtgatgacattaataagcaacatgataccaccaatgcctacggcgtagacactggtagacagcattctagtggtggctacgatggtgacactaataaacatcatggaactactggtggctataatgatgacaccaatagacatcatggaactaccggtgtctatggtatagacaccgat

SEQ ID NO: 233516 - DNA, 359 bp, Glycine max
ccaaaacccacagcacactatgctatgctatgctctctaatccgtttccgccgttccgctccttcctaccacactctccactctctctttccgacgattaaccgtttctcctcctccgcctccgccgccatggttgctcacgcgaaggacgaggcgtacctcagcgcgacgattccgaagcgcatccgtctcttcgagaccatcctggcggagcagcacactcagcgcctctcgctctcgccggatcctatcaaggttactctccccgacggcagcgtcaaggaggcgaagaagtggcatacgacgccgcttgatgttgcgcgtgaaatctcgaagaatttggccaacagcgcgctcat

SEQ ID NO: 233517 - DNA, 371 bp, Glycine max
ctttactcttctcttcacagaagcgtaaaaacaaaaggcttgactagagaaagagagagagagagcttcgaatcgaaactcagaagtagaaagaaacacaaatcacaatcgctatggctaggtacgaccgagcaatcaccgtgttctcccctgacggccatctcttccaggtcgagtacgccctcgaagccgtccgcaagggcaacgccgccgtcggcgtccgcggcaccgacaatgttgtcctcggcgtcgagaagaaatccaccgccaaactccaagactccaggtcggtgaggaagatagtgaatctggacgaccacattgcgctggcctgcgcggggctgaaggccgacgcacgcgtgctcataaac

SEQ ID NO: 233518 - DNA, 362 bp, Glycine max
cccaatgcacctagcgaacttccttaatttctcaacctcctcgtcgctcccacctcccactattgcccccaacacaaccgcagcttccagcaacgccgccgttttgtgcacgtgaatgaattccagcgtctccagccccacattcgccaccccctccgaatctatatccaccacttgtcccgccacaagcccttccgtaccgatcgacttcgctaattccccaatcgctcgaaccacgcgtgacggcgacactccctccgtggacgctgccacgtgctcgaacgcgaaggcgaggagcgcgtcgccggcgaggaccgccacgtcctcgccgtagaccttgtggttggtcggctttccgccgc

SEQ ID NO: 233519 - DNA, 384 bp, Glycine max
caggaatatggggtgtcagtggaaaacatttttgcggttcaaacaggtggttgcccttcctatgaagacattataaaactaccaaataaggttcttctatggtgtggatcacgaagctcaaacctcttgaggcacttgcaaaagggattcttgccagcaatatgctcattacctattccgggttatatgtttggcaaagctattgtctgttctgatgctgcagcagaggctgcaagatatggttttactgctgtggacaggccagaaggattcttggttttggccattgcttctctaggaaatgagattaccgaattgaaaaccccacctgaggatgcatcatctttggaggaaaagaaagttggagtgaaaggaccggggaag

SEQ ID NO: 233520 - DNA, 343 bp, Glycine max
ttttgtttatttatgtttttttcttgctcctccttgtcttagcttctgatgtgacggggaagacagcagaggcgatagattgcttgacaaggaggcacgggttccagggtagatgcttattcgacaggcaatgtgcacatgtgtgcaggagcgatggtttcatcggtggtcagtgccgaggccctcttcgcaaatgcttttgcagcaggccatgttgatcgaaattactactgccaaagaggccatgaaataaacaaacaaacaaataaataaatagctctaaccgacacatatgtacgtagtgtccgggttctagctagctaagtaaggtactgtgtccttt

SEQ ID NO: 233521 - DNA, 363 bp, Glycine max
ggagcaccgccatatccggtcgcgtgtttcctcgttcggggacattgatgattctgcttgttccgccactggctgctgttgtcgtgttccgcttctgggatcaccgcccagtgcctaaaggaacaatcttttggcgctaaattgtggtggggttcctctatttttttctttttttctccaatatgtatagatctggagcaggcatggcttggaacgtgtttaggttctgcactgccctgagaggattaggctcgatcatgatactaatggttcttggggttgtgggtgttacctattacgctgttgtgttgactaattttggacctgccttgtttcttggaggccttgatactcttatctcct

SEQ ID NO: 233522 - DNA, 395 bp, Glycine max
gaaatccttgtgcaccgtaagggttgtgaagcaggcagagaagagccatggtgcacgtttccttctaccgaaactatgggaaaaccttcaagaagcctcgtcgtccgtacgagaaggagcgtttggacgccgagttgaagctggtcggtgagtacggacttcgctgcaagagggagttgtggagggttcagtacgctctcagccgcatccgtaacaacgccagaaatcttttgaccctcgacgagaagaacccgcgccgtatcttcgagggagaagcccttctccgaagaatgttccgttacggacttctcgatgagactcagaacaagcttgattacgtgttggctctcaccgtcgagaactttctcgaacgccgcctccaaaccctcgttttc

SEQ ID NO: 233523 - DNA, 385 bp, Glycine max
ctgaatttctttgctattggtattaatgccgagaacaaccagaggaacttcctcgcaggttcgcaagacaatgtgataagccagatacctagtcaagtgcaggagcttgcattccctgggtctgcacaagctgttgagaagctattaaagaaccaaagagaatcctactttgtggatgctcagcctaagaagaaagaggaggggaataagggaagaaagggtcctttgtcttcaattttgagggctttttactgaataagtatgtactaaaatgtatgctgtaatagctcatagtgagcgaggaaagtatcgggctatgtaactatgactagagcttcaactatgaataaataaatcgacagcatatgatgcttttgtttaaaaa

SEQ ID NO: 233524 - DNA, 356 bp, Glycine max
caagaatggaatttactctccacattggaatctgaatgcaaacagtgtgatctatgtgactcgaggacaaggaaaggttagagttgtgaactgccaagggaatgcagtgttcgacggtgagcttaggaggggacaattgctggtggtaccacagaacttcgtggtggcggagcaagccggagaacaaggattcgaatacatagtattcaagacacaccacaacgcagtcactagctacttgaaggatgtgtttagggcaattccctcagaggttcttgcccattcttacaaccttcgacagagtcaagtgtctgagcttaagtatgaaggaaattggggtcctttggtcaaccctg

SEQ ID NO: 233525 - DNA, 364 bp, Glycine max
caaaacggtcgcattcgtctcctccagagattcaacaaacgctccccacaacttgagaaccttcgagactaccggattgtccagtttcagtcaaaacccaacacaatccttctcccccaccatgctgacgccgatttcctcctctttgtccttagcgggagagccatacttaccttggtgaacaacgacgacagagactcctacaaccttcaccctggcgatgcccagagaatcccagctggaaccacttactatttggttaaccctcacgaccaccagaatctcaaaataatcaaacttgccatacccgtcaacaaacctggcagatatgatgatttcttcttatctagcactcaagcccaac

SEQ ID NO: 233526 - DNA, 309 bp, Glycine max
gagagaaacaacgatgagaaactgagaaaccgttgtggaccagttcaaatgccttatactctgcttttgccttctagtaaggaaggattaactttcagaggaattcccaacagtatctctatctgaagaggtttgtggttccttaagttttgtggctttgaataaaagatagaagagaaggaatctgaatttcttcatccaacctgcacatggtaatctagtgtgtttgagtgctttcatgtttggctttaataaaataaaagcagttgttttgtaaaatgttcagaatcaataaaagcatttactgca

SEQ ID NO: 233527 - DNA, 293 bp, Glycine max
attcaaaccttgctccatactacacagtacacacactagaagaataatggcttccatcctccactactttttagccctctctctttcttgctcttttcttttcttcttatccgactcagtcacccctacaaaaccaataaaccttgttgttctacccgttcaaaatgatggttccacagggctccattgggccaacctccaaaaaagaacccctctaatgcaagtaccagtcctggtggacctcaatggaaatcacttgtgggttaactgtgagcaacagtactcatccaaaa

SEQ ID NO: 233528 - DNA, 358 bp, Glycine max
  unsure (1)..(358): unsure at all n locations
tttggttaancctcacgaacaccagaatcccaaaataatcaaacttggcatacccgtcaacaaacctggcagatatgatgatttcctcctatctagcactcaagcccaacagtcctacttgcaaggcttcagccataatattctagagacctccttccatagcgaattcgaggagattaacaaggttttgttgggagaagaagaagagcagaagcagcaagagggaatgatcgtggaactctcaaaggaacaaattccgcaactgaacagacgtgccaaatctagttcaagggaaaccatttcctccgaagatgaaccattcaacttgagaagccgcaaccccatctattccaacaac

SEQ ID NO: 233529 - DNA, 293 bp, Glycine max
gatcacagagtgaaaattcgagtatgtgtcattcaagaccaatgatacacccatgatcggcactcttgcaggggcaaactcattgttgaacgcattaccagaggaagtgattcagcacactttcaacctaaaaagccagcaagccaggcagataaagaacaacaaccctttcaagttcctggttccacctcaggagtctcagaagagagctgtggcttagagccctttttgtatgtgctaccccacttttgtctttttggcaatagtgctagcaaccaataaataataataat

SEQ ID NO: 233530 - DNA, 389 bp, Glycine max
caagcgtggttatgttgcctcgaactcaaaggatgatcctgccaaggaggctgctaacttcactgcccaggttatcatcatgaaccatcctggtcagattggaaatggctatgcccctgttcttgactgccacacttcccacattgctgtcaagtttgctgaactcatgaccaagattgacaggcgatctggcaaagagcttgagaaggaacccaagtttttgaagaatggtgatgctggttttgttaagatgattccgaccaaacccatggtggttgaaactttccctgagtaccccccacttggtcgctttgctgtcagggatatgcgtcaaactgttgctgtgggagtcatcaagaacgtggagaagaaggatcctactggagcca

SEQ ID NO: 233531 - DNA, 407 bp, Glycine max
tcttcatagttcagtgtgtcgtttaaaaatgtcgcagttgctggataaagccaagaacttcgtgtcggagaaggtaaatgatatggccaagccggaggcgagtgtcactgacgtggacttcaagcgcgtgagcaaagataatgtcgagtacttggccaaggtctctgttcgtaacccttattcaacttccatacccatttgtgagatcaactactctttcaaaagcgcatccagggagatagcatcagggaaaattccagacccaggatcgttgaaggcaaaggacacaacaatggtggatgtgccagttaaggttccatacagcatattgatgagcttggcaaaggacattggtgctgactgggacatagactatcaattggatcttggtctggttattgatgttc

SEQ ID NO: 233532 - DNA, 390 bp, Glycine max
ctctccctttcccccttttcatttcttcctcgattttccatttccataaccttagtcatcttcttctttcatctttctccctaacggtatcgagggaaaaatatggcggaagaacacagatgccaggcaccgcgcttctgcgccaacaattgcggtttctttggcagccctgccacgcagaatatgtgctccaagtgctaccgcgatttccagctcaaggagcagcaatcttccaacgccaagatggttctcaatcagtcgctggttccttcaccgccaccggcggtgatttctcagccgtcgtcttcttcttcggccgcggtagatccgtcatcggcggtggttgatgacgcgccacgcgaggcggaggaggttaaggcgccgcagcag

SEQ ID NO: 233533 - DNA, 353 bp, Glycine max
attttagggaatgatctgaacaaattgcaggaagttttacgattgcgtcatcaccaaagagatgaattaaagcgtcagaaggaagaagagcttgctcttctttatgctgatccttttgatgttgaagcacaaaagaagattgaagctgccatccgccagaaagggattgatgaaaattgggctgctgcattagaacataatcctgaagcttttgctagagtggtcatgttgtatgttgatatggaggttaatggtgtcccattgaaggcatttgtggatagtggagctcagtctaccattatatcaaaaagctgtgctgagcgtcttggattgttgagacttttagattagcg

SEQ ID NO: 233534 - DNA, 200 bp, Glycine max
attctttgtgaaaccatgacttatccaaggcaatttatggcaattaaacgtcaaggtaacaaaccaaaatatacggggcaaatgatgaaatgctcattttaaaaaaacagttgaaattccgcttgaagccgcagtatatgctgagactgattacttgaggggagtcactgaaaacataatgttaggtcaacttgccccca

SEQ ID NO: 233535 - DNA, 307 bp, Glycine max
aaaaaaaaaaaaaaaaaaaaaaaaaaaaaaacaaaaaagaaaaaagaacaaaaatacataacaaacccaaatgagagagaaacacggacccaggttctaaattgcgaccggcccccaaaaaatgggcccgtggtcccagaaattaatcccggaccggtatcggcaggcctaccacctttcccaatccggggccgtattataacgggggcaaaatttggccaaacctgtttcccgtgagaaattggtttccgcccggaattccccaatccatgcgaaccgtaaccataagttctaaaccctgaggggc

SEQ ID NO: 233536 - DNA, 304 bp, Glycine max
caagttgccgcaccttaaaaccggaaacaaaagcaatcgttacttgatttcaagaatccttcaatttttcctaattccttgtgcacgaattcctaagggaaagaaaatcaatccccgtgccgggcacagacttcgtgaaacaatttcttttccaatcctagtttatttgctgaacaatctcctatttgatataggacttcgtgtcagatttaaacttcttctgtctctttctcagttctctgtttaatttcaagttcaagctggtgaaatcttggattagtgctcccactctcctatctggtat

SEQ ID NO: 233537 - DNA, 416 bp, Glycine max
  unsure (1)..(416): unsure at all n locations
gcaatactagcgatagctgataagagagataccaacaagaaaagaaaaaaagaaagagttgagattccctttgaagaaaagatggcatcccatangcaaagctatgaagctggtcaaactaagggccgaactgaggaaaagacgaaccagacgatgggcaatattggagagaaggctcaagctgcaaaggagaagacccaggaaatggcccaagctgcaaaggagaagacccaacaaacagcccaagctgccaaggacaagacttgcgacacttcccaagcggcaaaggagaagacccaacagaatacaggagctgctcaacaaaagacctcagagatgggccagtccacgaaagaatcggcccagtcagggaanggacacacccaagggttcctgcagcagacaggggagaaggt

SEQ ID NO: 233538 - DNA, 411 bp, Glycine max
cttgcaacgattaacaatggcttcaaccgacaagtcaccggacccaacgccggcgaagggtccggatccaactccggggaagccgatgagtgttggtcagcacgtgatcgacaagagtgcaatgatggtgcagtcgctggaccccattaagcagatgagtcagcacgtgtgctccttcgctatctacagccatgacatgtctcgccagatagagacacatcactactgctccagactccaccagaacttcatacaatgtgctgtctatgattccgatgaatccaaagctcgtctcctcggggtggagtacatcgttcctgctgatgtctttgaagcctttcctccggaggagcagaaactttggcattctcatgcttatgagattaaatcaggcctgttggtgaatcctaa

SEQ ID NO: 233539 - DNA, 273 bp, Glycine max
catagtagtgttggtgggttgcaaagatgcttgggggtcttctccataggggtcataagataaaagggacagtggtgttgatgcgcaagaatgtgttggacgtgaatagcgtaaccagcgttgggggaattattggtcaaggtctcgacttagttggctcaacactcgatactcttactgccttcttgggccgatccgtgtctctccagcttattagtgctaccaaagctgatgccaacggaaaagggaaacttggaaaggctacctttttgg

SEQ ID NO: 233540 - DNA, 315 bp, Glycine max
cccgagaaagacaccggtagacatcattttggtcgtggttacgacggtgacactaacaagcaacatgatgctactggtgtttatcccggaatagacattggtagagatcatgggactaccggtgtttatggcctaaacaccgacagacatcatggaacttctggggtgaatcccgggatagacacccataaccaacaacatgggactaccgttggttatgctggtgacactggaagacagcatgggaatacaggtggcctttactatggaaccgacaccgcggacacaggaaccggtcctagaagtggaaacacc

SEQ ID NO: 233541 - DNA, 312 bp, Glycine max
gaattttgagaatgctgatgatgctgctagggctgttgaggctctcaatggcaaaaattttgatgacaaagaatggtatgttggaaaagctcagaagaaatctgaaagggagaatgaattgaaacaacgatttgagcagagcatgaaagaagctgctgataaatatcaaggcgcaaacttgtatgtaaaaaatttagatgatagcattggtgatgaaaaacttaaggagctgttctccccttttggtaccattacctcttgcaaggttatgagagacccaaatggcttaagtcgtggatcgggttttgttgc

SEQ ID NO: 233542 - DNA, 372 bp, Glycine max
  unsure (1)..(372): unsure at all n locations
aaaacccattcacttttccacaagccttagttcttctcatttattctctttttcaaaatactttcactctctctaaccttccagttctcactaaacctcgtgaagctcgtgatggacaccaagataggttcactagacgcgcccaagcccaacagcaacgacgtcgtatcatgcaacctcaccagcagcgccgccatccagccctgcttgccggcgacggtgatcaacggcgccggctgtagtgactccaccttgggcggccacctggcccgccggctggtggaaatcggcgtcaccgacgtgttctccgttcccggggacttcaacctgacgcntgctggacacctcatcgcggagccggcgctgcacctg

SEQ ID NO: 233543 - DNA, 408 bp, Glycine max
  unsure (1)..(408): unsure at all n locations
tccataggggtcataagataaaagggacagtggtgttgatgcgcaagaatgtgttggacgtgaatagcgtaaccagcgttgggggaattattggtcaaggtctcgacttagttggctcaacactcgatactcttactgccttcttgggccgatccgtgtctctccagcttattagtgctaccaaagctgatgccaacggaaaagggaaacttggaaaggctacctttttggaaggtatcattacttcattgccaactttgggagcangccaatctgcattcaaaattaattttgaatgggatgatgggagtggaattcctggagcattttatatcaagaattttatgcaaactgagtttttccttgtgagtttgactcttgaagacattccaaaccatggaagcatcc

SEQ ID NO: 233544 - DNA, 505 bp, Glycine max
cggccggcccggaatgaatttaggttgccctagaccaagagaaatgacatcgcatgcacgcgtacgtaaactcggaattcggctccagaacaaattcgccttaaaaattttgggaccttcaagactcagcgaaaaaacatcaaaagatgtccctgaatccaaataattttgggggcccaaggaacaaggtgttccattctttcccccctgaactttgggaacccttccatgaatttcaatttcccaactccccatccgccgaaaactccgcaaccgtgaacactcctgtggaatggaaataaaacccaaaagcacaagtgttcaaagctgaaaatccaaggctgaataaggaagaacttaacggtgaaaatgaagaagaataggttcctcaaattaaccgagagaacgaccctcgagatggatcaatagaactacacgtggcaccccctgcagcgtaacagttggcaccttcatgacgacgttcacgattcccggagaatgctta

SEQ ID NO: 233545 - DNA, 362 bp, Glycine max
  unsure (1)..(362): unsure at all n locations
ataatactcagcatggctaagcttgttctttccctttgttttctgcttttcagtggctgctgcttcgctttcagtttcagagagcagccacagcaaaacgagtgccagatccaacgcctcaatgccctcaaaccggataaccgtatagagtcagaaggtggcttcattgagacatggaaccctaacaacaagccattccagtgtgccggtgttgccctctctcgctgcaccctcaaccgcaacgcccttcgcagaccttcctacaccaacgctccccaggagatctacatccaacaaggtagtggtatttttggcatgatattcccgggttgtcctancacatttgaagagcctcaacaaaa

SEQ ID NO: 233546 - DNA, 489 bp, Glycine max
tgaatggactgacgtgacatatagaagagcatatgacgtcgcatgcacgcgtacgtaagctcggaattaagtcccgggtcgtggacctcacaaatccgccagtcatcaccatgggcaagctagttttttccctttgttttctgcttttcagtggctgctgcttcgctttcagttccagatagcagcctcagcaaaacgagtgccagatccaagaactcaatgccctcaaaccggataaccgtatagagtcagaaggagggctcattgagacatggaaccctaacaacaagccattcgagtgtgccggtgttgccctctctcgctgcaccctcaatcgcaacgcccttcgtagaccttcctacaccaacggtccccaggaaatctacaatccacaaaggaaagggtaattttgggaataatatcccggggtggcccaacacaattgtacagcctaatcaacctaacaatcgacggcaagcaacccgcacc

SEQ ID NO: 233547 - DNA, 368 bp, Glycine max
ccttgctctatactacacagtacacacactagaagaataatggcttccatcctccactactttttagccctctctctttcttgctcttttcttttcttcttatccgactcagtcacccctacaaaaccaataaaccttgttgttctacccgttcaaaatgatggttccacagggctccattgggccaacctccaaaaaagaacccctctaatgcaagtaccagtcctggtggacctcaatggaaatcacttgtgggttaactgtgagcagcagtactcatccaaaacgttacaagcacccttctggcactccacccaatgctctagagccaacacccaccaatgcctcagttgccccgcggcatcaag

SEQ ID NO: 233548 - DNA, 480 bp, Glycine max
taagcatgcatcaggcaagggagagaaagcttgctgcgtgcaagtcgactctagaggatcccctcggggaattccaattccacattttcaagaaataaggaggcaaaaatgttcatatatgaattggaattatttgttttcttattaggcctatcctgaagccaaaggaaatgagatcggaattcctcggggaattccaattccacattttcaagaaataaggaggcaaaaatgttcatatatgaattggaattatttgttttcttattaggcctatcctgaagccaaaggaaatgagatcggaattcctcggggaattccaattccacattttcaagaaataaggaggcaaaaatgttcatatatgaattggaattatttgttttcttattaggcctatcctgaagccaaaggaaatgagatcggaattcctcgggggtaccgagctcgaattccctatagtgagtcgtaataaattcc

SEQ ID NO: 233549 - DNA, 369 bp, Glycine max
cgaagagcttccgcggcgactatatcctcggtgagggaggcttcggcaccgtttacaaaggttacattgatgagaacgtcagagtcggactcaaatcgctccctgtcgctgtcaaagtgttaaacaaagagggtttacaaggacatcgagagtggcttacggaggtgaattttctagggcagctgaggcatcctaatctggtgaagttgattgggtactgctgcgaagatgatcacaggctgcttgtgtatgagttcatgtttcgagggagtttggaaaatcacttgttccgaaaggcaactgtccctttatcatgggctacaagaatgatgattgctcttggagcagccaaaggacttgcctttctcc

SEQ ID NO: 233550 - DNA, 348 bp, Glycine max
ccttgatgatgtggtgaagcagtgcagggggaagaatctcttcttcagcactgatgtagagaagcatgttgccgaggctgacattgtctttgtctcggtgaacaccccaacgaagactcagggtcttggagccggcaaggcagctgatctcacatattgggagagtgctgccaggatgattgctgatgtatcgaaatcagacaagatcgtggtcgagaaatcgactgtgcctgtgaaaacagctgaggcaattgagagaattctgacccataataggaaaggcatcaatttcacaattctgtcaaaccctgagtttcttgctgagggtacagcaattgcaaacctgtt

SEQ ID NO: 233551 - DNA, 383 bp, Glycine max
caaggcgagtttatggtcacaacttcattatgtttcgtgtaataatctggaaatgcaagaagcttatcttgtcaatctcgtaaatgtgttacgagaattgtatttgcacagtccagaggaagctcgccaattgagaaggaaagctctctctcgtattgaatggctgcaaaaagctgatgtgcctaccatagcacagattgaagagttccattcgatgcagaggatgatgaatgctcctgattcaaatgataatattgatcttctgttgagcattgatttgttgggtttacaaggagcaggtaaagcttttccgaacaagattgtttttgatgataagcttgtgttggctaacacacaagaattctttgatggaaattttccag

SEQ ID NO: 233552 - DNA, 495 bp, Glycine max
cgggcgccgaatgattagtgactagccaagacaatgacgtcgcatgcacgcgtacgtaagctcggaaatccgctccaagtgaatgggcctcaatgggacaagtgtttttaacaaacaagaacagttcagagcattttgatgcatgtaagtggacaaaatcggaaccacattcctgggaattgatcttcccaatagaggtatgtggtcctaataatggttttgaaatgtggagttctgagtgggcaaatcaaacttcatggcatttgagtttccttattgacaatcccaaacagtctacagtttttgaaattctcttgggaatttcccaaagattttgaaattgctggaaaaaacctaaagccaccttttcccggtcacaagggaaaggcaaatattccgaaaaaacgcggaaccctccgaaagtatcggaaaatgtgtgttctcttgcgccgtgcccgtgtgtaaatccccataggggattatgcgccacccccc

SEQ ID NO: 233553 - DNA, 222 bp, Glycine max
agagtattaccagcaatttctgttccacaggctactgccagatcttctgaaaatgcggaatcctctgcatgatctggaatttgtgttttctttcgcttgttcgtttgtttaattcaataaaggaaattaggcatgaccctcttgttgagtatgctctgcctatttgaaaatttccacacctcttttaattgtcgtaatgatgtgtgaagtgtgtgttatttt

SEQ ID NO: 233554 - DNA, 391 bp, Glycine max
  unsure (1)..(391): unsure at all n locations
catcagtaatggtgatattgacaagactagtgcaactttgcaatttagaaaatcacaatctgctaactttctcaagagaaactttaagcagatgtctaatgttttgtgggtagctcctgaggacaaggcgagtttatggtcacaacttcattatgtttcgtgtaataatctggaaatgcaagaagcttatcttgtcaatctcgtaaatgtgttacgagaattgtatttgcacagtccagaggaagctcgccaattgagaaggaaagctctctctcgtattgaatggctgcaaaaagctgatgtgcctaccatagcacagattgaagagttccattcgatgcanaggatgatgaatgctcctgattcanatgataatattgatctactgttg

SEQ ID NO: 233555 - DNA, 403 bp, Glycine max
  unsure (1)..(403): unsure at all n locations
gacgaaggaagtggggcagaagaccaaggaggttgggcaggatattcagagcaaggcacaggatacaagggaggcagctgcaagggatgcaagggaggcagctgcaagggatgcaagggaagctgctgcaagggatgcaaaggtggaggcaagggatgtaaagagaacaacagtgacagcaacaaccgcaaccgcatgatgagtaattctgatattagagggagcattaatgtgttgttgtgatgtggtttatatggggaaattaaataaatgatgtatgtacctcttgcctatgtangtttgtgtgttttgttttgttgtctagctttggttattaagtagtagggacgttcgttcgtgtctcananaaangggtactaccactctgtantgtatatggatg

SEQ ID NO: 233556 - DNA, 412 bp, Glycine max
ggtccctggagcttgaaaagggggaattcttgcttggaaatgtcataaatgcagttgttagccaagtaatgctactgttaagagaaagaaatttacagttgattcgtgatattcctgaagaaatcaagacattggctgtttatggtgatcaattgaggattcaacaagtgttgtctgatttcttattgaatatagtgcgctatgcaccatctccagatggctgggtagagattcatgtacatccaagaataaaacaaatctcagatgggctcactcttctccatgctgaatttaggtactgtggcaagatcttccaagtatttttcattattattgtcttcaagtaagtgtctatggaagataatcaaaacctcaaataagtgtttttaagagcctcaggtataaatctgtc

SEQ ID NO: 233557 - DNA, 406 bp, Glycine max
ctcaatatctacacaaaagtgttccacttgagtgaaaagtagtgtgttaagaactaaacaatttttcaatggcgtccaagaaacaagaggagcgagctgaggcagctgcgaaagttgctgccaaagaactcgaacaagtcaacagagaaagaagagaccgtgatttcggtgttgttgctgaacaacaacaacaacatcatcaggaagatcaacaaaaacgtggtgtaatcgggtccatgtttaaggcggtgcaagacacctacgagaacgccaaggaagctgtcgttggcaagaaagaagctactaataacgcgtacagtaatacagaggttattcacgatgttaacattcagcccgatgacgtgtcggcaacgggggaagtaagggacatatcagccacaaagac

SEQ ID NO: 233558 - DNA, 348 bp, Glycine max
aaaattcttccaccaagttatgggtttccttgtgttgcttcttttctccctcttaggtctctcttctagttccagcatatcaactcatcgttccatattggaccttgacctaaccaagtttaccacacagaaacaggtgtcttcactgttccaactatggaagagtgagcatggacgtgtctaccataaccacgaagaagaggcaaagagacttgagattttcaagaataacttgaactatatcagggacatgaatgcaaacagaaaatcaccccattctcatcgtttaggattgaacaagtttgctgacatcactcctcaagagttcagcaaaaagtacttgcaagc

SEQ ID NO: 233559 - DNA, 399 bp, Glycine max
attctatatcaattttggttaagagtcttgaaaaagcaagagaaaaaaaaataccaaccatggcaaccatttctgatcaacctagagggtcctactcctatggaacctcatatggagcaccctatggaaccacgtatgagaccaacaccagcattaacaacccaccttcacgccaaacagtgaagttcataactgctgccactattggcatcaaactccttctcctgtccgggtttaccctcaaaagcactgtcatacgtttgattaattgcaaccctccttcttgttatcttcagccccatcctttgtccctgctgcgtttgtgctgttcctagttgcttctggcttttttgttctctgggggctgtggtgtggctgccattgctgctttgtcctgga

SEQ ID NO: 233560 - DNA, 480 bp, Glycine max
cgtatgaatgcggtgacactataaaagagatatgacgtcgcatgcacgcgtacgtaagctcggaattcgcctcgaggccgtttttgctttatttgcaggattttactattgggtgggtaaaatctttggtcggacataccctgaaactttaggtcaaatccatttttggatcacttttttcggggttaatctgaccttctttcccatgcatttcttagggctttcgggtatgccacgtcgcattccagattatccagatgcttacgctggatggaatgcccttagcagttttggctcttatatatccgtagttgggatttgttgtttcttcgtggtcgtaacaatcactttaagcagtggaaataacataacaagggcgaacattccttgggctgtggaacaaaattcaaccacactggaatggctggtacaaagtcctccagcttttcatacttttggagaacttccagctatcaagga

SEQ ID NO: 233561 - DNA, 489 bp, Glycine max
gtttgattgcgtgacactatagaagagatatgacgtcgcatgcacgcgtacgtaagctcggaattcggctccaggaaaatggctcccaaaggtttaacctttccgggtgtgttaataagcctttcaacaatgtcactgaatccttccgttgccggggaaaggcaaaataatggccttgttaagaacttccacaaagaatcatgccctcaagctgaagacatcatcacagaacaagtcaagcttctctacaagcgccacaagaacactgctttctcctggctcaagaacatcttccatgactgtgctgttcacagttgtgatgcctcacagttgctggactccacaagaaagagcttgtctgagaaagaaacacatataaacttttggttgagaaatttcacgtacattgagaccatcacagaaactttgtgaaaagaataccctggagttgtttcatgtgctgatatcctcgttctctctgccagagaa

SEQ ID NO: 233562 - DNA, 402 bp, Glycine max
  unsure (1)..(402): unsure at all n locations
cgcgtcgctccgcaccagtttcaccgcacgaatatcttgttgtttggagcgatccgagaaaaactctgtaaacatgttggtttaccaggacctccttacaggtgatgagcttctctctgactccttccgttacaaggaaattgagaatggaatgctgtgggaagttgaggggaagtgggttgttaaaggagcagttgatgtagacattggtgcaaacccttctgctgagggtggaggagaagatgaaggagttgatgatgcagctgttaaggttgttgacattgttgacacattcagacttcangagcaacccgcattcgataagaagcagtttgttaccttcatgaagaggtttatcaagaatttgactcccaagctcgatgcagagcaacaggagttgtt

SEQ ID NO: 233563 - DNA, 518 bp, Glycine max
ggggagcccccgggtcgccagaatgaatttaagtgccctagccaagagatatgaagtcgcatgcacgcgtacgttaaccccgaattccgctccagctaaatgagaaacaacaaaaggaaataattgatcttttaaaatgcaaggaggaaagaaagctggagagtccatcaaggaaacagctgcaaacattggtgcctctgccaagggtggcatggagaaaaccaatggcaatgtccaagaaaaaggaaaaagaatgacagcacgtgattccaagcaaaaaggattgggcacccaaaataaagatgcaaagatgagccacgcagagctggacaaggcaggcggcgcgtcagcataacacggcggcgaagcatgctgccacggcatggcacatgggacaacccatggggaaccatcagacgtcagctatgcccggtcatggaaccggacagcccacgggccatgtcaccgacggaatggtgggctcacaccctattggaaccaacagaggcccgggtggg

SEQ ID NO: 233564 - DNA, 494 bp, Glycine max
  unsure (1)..(494): unsure at all n locations
cgcgcagcccgaatgaattaagtgcctagacaagacaatgaagtcgcatgcacgcgtacgtaagctcggaattcggctcgaaggtttttctttgagaagtaaaagatcttaatgcaagtaattaacatggaatctcaacaagcaaaccgttaaaaaacttattaaaaagcaaagcaaagtgaaactgttgttcctggaggaactggtgggaagaatcttgaggctcaagaacatcttgctgaaggaaagagccgtgganggcagacgaagaaacagcaactaaggtcagaggggtatcatgaaatggggaccaaagganggcagacaaggaaggaacagatggggagagaagggtaccaagagatgggacgcaaaggaggactcagcaccatggacaagtctggtggagaacgtgctgaagaggaaggcatagaaatagatgagtctaagtttanaattacctaaaaaactaaaaaaattgtgaggaagaagtt

SEQ ID NO: 233565 - DNA, 512 bp, Glycine max
cgggaatattgaggagctgaatgaataaagtgcatagccaagacaatgaagtcgcatgcacgcgtacgtaagctccggattcgggtcgagccaatgtctttgaacactcatcaccatgggcaagcttgttctttccctttggttccttcctttcaatggctgcttcgctctgagagagcaagcacagcaaaatgagtgccagattcaaaagctgaatgccctcaaaccggataaccgtatagagtccgaaagtgggttcaatgagacctggaaccctaacaacaagccaatccaatgtggcggtgttgccctctctcgctgcaaccttaaacgcaatggccttcgtaaaacttcctaaaacaaacggtccccaaggaaatctacatacaacaaagtaatggtatttttggcatgatattcccggggttgtcctagcacttatcaagagccgcaagaatctcagcaacgaggacgaagccagaggccccaagaccgtcaccaaaaggtacaat

SEQ ID NO: 233566 - DNA, 399 bp, Glycine max
taaaattcttccaccaagttatgggtttccttgtgttgcttcttttctccctcttaggtctctcttctagttccagcatatcaactcatcgttccatattggaccttgacctaaccaagtttaccacacagaaacaggtgtcttcactgttccaactatggaagagtgagcatggacgtgtctaccataaccacgaagaagaggcaaagagacttgagattttcaagaataacttgaactatatcagggacatgaatgcaaacagaaaatcaccccattctcatcgtttaggattgaacaagtttgctgacatcactcctcaagagttcagcaaaaagtacttgcaagctcccaaggatgtgtcgcagcaaatcaaaatgggcaacaagaaaatgaaga

SEQ ID NO: 233567 - DNA, 408 bp, Glycine max
aaaaaatggctgatacaggtggaggagatgcagtgagaccagtggtaatatgtgataacaagtgtggctgcacacttccatgcactggtggttccacttgcaggtctcttaagttcatgatttcaacaaagtaacttgcttaaaatagttcctttttttttttacatcgtactgatgttctgatattcgaatttatgatctcttacattttaatatactattctaattctcttccgttaggccgacctaatgttctccttgtttgctttattgctacccgaatctctctagtttctgggttcgatagatgcacaatttctttggttcgagtttttaatttcttctaaaatcaaatacttgtgttgttgaaaaattaccatattgagacttttatcaattttctgttaa

SEQ ID NO: 233568 - DNA, 411 bp, Glycine max
gaaccatggtgtgttacttgtgggatatggtgcaaaaggcttctcaattcttaggcttggcaacaaaccatactggatcatcaagaattcgtggggggagaaatggggagaagatggctattacaagctctgcagagggcatggcatgtgtggaataaacactatggtttctgctgcaatggtgcctcaaccacaaacaacacctacaaagaattatgcttcttattagctatgcacttaaggaaatctaaataaatatttttcattctaggtgatgtatcatgtatgtaccaaaatattttggtacgtaagtcttttaaaaagtttgcatctcctctttggttttccttagttctgaaagttatctcctaagaagacaatcatatgtactgtacgtagtgtgaagatata

SEQ ID NO: 233569 - DNA, 347 bp, Glycine max
ggggctacccgctgagtttaagttcttcagataagcggagagaggaatgttgaaaaagaagacaagaatgatacgtggcatcgcgtggagcgaagcagtggcaagttggtgaggaggtttagattgccggagaatgctaaagtggaccaagtgaaggcttccatggaaaatggggttctcactgtaactgttcctaaggaagagattaagaagcctgatgttaaggccatagacatctctggttaatctatgttgctctgttccttcgttgaaatgtgtttatgttttcttattctgaggatcatttgtgtgagtcgtgtgaaaaatatttcaggttttatgttggc

SEQ ID NO: 233570 - DNA, 374 bp, Glycine max
gaccgagctagctagctagcaagcaagcacagagatggaggcaaagcgaggccatgccctcatgtgcttggcacgtgtttcactcttcctctgcgctctaaccctatccgctgctcacggaagcaccacggttcaagacatcgcgagaaagttgaaactcggggacaacgagcttctgcgcacggagaagaagttcaaggttttcatggagaattacgggaggagctactccacagaggaggagtatttgcgccgtttggggattttcgcccagaacatggtcagagcggcggagcatcaggcgctggaccccaccgccgtccacggcgtcacgcagttctccgatctcaccgaggacgagtttgagaagctct

SEQ ID NO: 233571 - DNA, 344 bp, Glycine max
ctcgagccgctcgagccgttacaggataaagacaattaccttcagaagctgtcgttgtaaatgttacatgtggtagtggacgtggtggtttacctaccactgcttggattagttctgcagttaacaatcgctcctcagatatcaacaaaaagattcgcacagcacttgggaaaggtaagaaaattgtttttcttactagagttgatccttttccagtagctctactggctgttctttttggcgttaagaatgaaattctgagttccaacgccactaaccctatgctgacgcgacttcctgagaactgtaagagtctcaaatatctggttgatgaatgtcccttt

SEQ ID NO: 233572 - DNA, 388 bp, Glycine max
ggcttcctgttatcacaaacaatgtctgacggtcaagaatcaaacaagaataatgagaaaaggaaaattaagaaatttataaagggattggaaactggcccaagtaatgggaacagcatgatttctctgataatgcctccacgtgatcaaatatctcgggtcactaagatgttgggagatgaatttggaactgcttcaaacatcaaaagtatggtgaaccgacagtctgtgttgggagccattacttctgctcagcagaggttgaaactatataacaaggtccctccaaatggtttggttctttacactggaaccattgtcactgaagatggcaaaggaaaaaaggtgacaattgattttgagcctttcaagcctaacaatgcatcac

SEQ ID NO: 233573 - DNA, 166 bp, Glycine max
aaacaaccttctttctttttccgtgaacctttctttcaaggtcctaacttgattagtgtgcaatgtccaaatcaaaagggtaatttcaaaattgcaagggcaaagcatgatgtttaagggtggttccttccctgcaaaggactaccatgatcctcctccagcaccg

SEQ ID NO: 233574 - DNA, 490 bp, Glycine max
cgtatgaatgcggtggcgagacaagcttgaatgcgtgcaggtcgactctagaggatcccctcggggaattccaattccacattttcaagaaataaggaggcaaaaatgttcatatatgaattggaattatttgttttcttattaggcctatcctgaagccaaaggaaatgagatcggaattcctcggggaattccaattccacattttcaagaaataaggaggcaaaaatgttcatatatgaattggaattatttgttttcttattaggcctatcctgaagccaaaggaaatgagatcggaattcctcggggaattccaattccacattttcaagaaataaggaggcaaaaatgttcatatatgaattggaattatttgttttcttagtaggcctatcctgaagccaaaggaaatgagatcggaattcctcgggggttacgagctcgaattccctatagtgagtcgtattaaattcgtaatcatgtcata

SEQ ID NO: 233575 - DNA, 279 bp, Glycine max
caatatcctagtataccttaataaataatttaagatactatgatgagagcacggttcccattactgttgctgggacttgttttcctggcttcagtttctgtctcatttggcattgcttactgggaaaaagagaaccccaaacacaacaagtgtctccagagttgcaatagcgagagagactcgtacaggaaccaagcatgccacgctcgttgcaacctccttaagggtggagaaagaagaatgtgaagaaagtgaaatttcacgaccacgaccaacgac

SEQ ID NO: 233576 - DNA, 350 bp, Glycine max
  unsure (1)..(350): unsure at all n locations
atccatgctcttcacaaagaattggatgaagtttcatgtcctatctgcatggaccatccacataatgctgttctcctcctttgcagctctcatgagaagggctgcagatcttacatttgtgatacaagttatagacattcaaattgcctggaccgttttaaaaaaatgagggacaattttaaggagaaccaaaatttacccagttctttagtaaacacaaacaattctggatcaagacagggtgatgcccaagatccaaataggcttttagaccaacatgatgaaggaattttagaaactgctgattctgagaacttgcaggacanggctgtgattgaggatttaaatgc

SEQ ID NO: 233577 - DNA, 324 bp, Glycine max
atcataaaattcttccaccaagttatgggtttccttgtgttgcttcttttctccctcttaagtctctcctccagttccagcatatcaactcatcgttccataatggaccttgacctaaccaagtttaccacacagaaacaggtgtcttcactggtccaactaaggaagaatgagcatggacgtgtctaacataaccaagaagaagaggcaaagagacttgagattttcaagaataactttgactatatcagggacatgaatgcaaacagaaaatcaacccattctcatcgtttaggattgaacaagtttgctgacatcactcct

SEQ ID NO: 233578 - DNA, 411 bp, Glycine max
caatggtccctaaacactcatcagtcaacaacatggccaagctagttttttccctttgttttctgcttttcagtggctgctgcttcgctttcagttccagagagcagcctcagcaaaacgagtgccagatccaaaaactcaatgccctcaaaccggataaccgtatagagtcagaaggagggctcattgagacatggaaccctaacaacaagccattccagtgtgccggtgttgccctctctcgctgcaccctcaaccgcaacgcccttcgtagaccttcctacaccaacggtccccaggaaatctacatccaacaaggtaagggtatttttggcatgatatacccgggttgtcctagcacatttgaagagcctcaacaacctcaacaaagaggacaaagcagcagaccac

SEQ ID NO: 233579 - DNA, 423 bp, Glycine max
caagaaagaacttccttataaccaaaaccaacaacaactatggcaagttatcagaagcactaacatgattaaggtcccaagggccaccaattaggcaatgtttaaaaggcaactgaacaataatggaaccccggtcaagccaacaatgtcacttatgtaaccaccaaaaatgttggtggctacaatgatgacgctaataagcaacatgatattactggtgtctatcccgagaaagacaccggtagacatcattttggtcgtggttacgacggtgacactaacaagcaacatgatgctactggtgtttatcccggaatagacattggtagagatcatgggactaccggtgtttatggcctaaacaccgacagacatcatggaacttctggggtgaatcccgggatagacacccataaccaacaa

SEQ ID NO: 233580 - DNA, 414 bp, Glycine max
ggattttgtggaggatgtaagaaaacacaaacaacacaaaattcattgcacagtgttattttcagtatcagcatcatggctccaattgcagtgggagatgtcattccagacggcattttggcttacttggatgaagaaaacaaaccccaaactgtctctattcactctctcgccgccggcaagaaagtcatcatctttggggttcccggtgccttcactcctacatgcagcttgaagcacgtgcctggcttcattgagagagcagaagagctgaaaggaaagggtgtggacgaaataatctgtatcagcgtgaatgatccctttgtgatgaactcatgggccaaaacgttcccagagaacaagcatgttaagttccttgctgatggtgcagccaaatacaccaatgccctcggt

SEQ ID NO: 233581 - DNA, 405 bp, Glycine max
tgattttccctcttctctttttctctctcgtgagtctcgtccctgaagcgaaattctagaatggcggaagaagctcctgcatctgaaacctccgtcacaatgcctcaaccggcggaagtcatcaccgtcgacggaaccctaacctcttccgagaatgacaagagcggaatctccgtcgatgccgccgcgcacggcggtgaaaagacggtgtccaacgctgaaccttccggtagcgatcctcagaagtctctggagttggcgaacgagctgatggaaaaaggaaacaaggcaattaaggagaacgattttggagaagcagctgataacttcagccgtgctctcgaaatcagagtggcacattatggtgaacttgctcctgagtgtgtgcacacattatacaaatat

SEQ ID NO: 233582 - DNA, 416 bp, Glycine max
tcaaaatcggaaccacattcctgggaattgatcttcccaatagaggtatgtggtcctaataatggttttgaaatgtggagttctgagtgggcaaatcaaacttcatggcatttgagtttccttattgacaatcccaaacagtctacagtttttgatattctcttgggaatttctcaagattttgagattgctggtaatactcttatgccagctttttctgttccacaggctactgccagatcttctgaaaatgcggaatcctctgcatgatctggaatttgtgttttcttttgcttgttcgtttgtttaattcaataaaggaaattaggcatgaccctcttgttgagtatgctctgcctatttgaaaatttccacacctcttttaattatcgtaatgatgtgtgaagtgtgtgtta

SEQ ID NO: 233583 - DNA, 411 bp, Glycine max
atacacacacacacacacactaagaataatggcttctatcctccactactttttagccctctctctttctttctctttccttttcttcttatccgactccgtccccattccccaacaccacactaaccctacaaaacctataaaccttctggttctacccgttcaaaatgatgcttccacagggctccattgggccaacctccaaaaaaggacccctctaatgcaagtaccagtcctggtggacctcaatggaaaccacttgtgggttaactgtgagcaacactactcatccaaaacataccaagcacccttctgccactccacccaatgctccagagccaacactcaccaatgcctcagttgcccagcggcatcaaggccagggtgccacaaaaacacgtgtggcctcat

SEQ ID NO: 233584 - DNA, 280 bp, Glycine max
atacacacacacagacatacttcgaaaagtggcgtctccccgaaggactttttagaactcacgcgttcgttctctttccttttcgatcttagccgactccgtccccattcgccaacatgacactaagcctacataacctatacaccttctggttctagccgttcaagatgatgcttcgacagggctccattgggccaacctccaaaagaggactcctctaatgcaagtagcagtcctgggggagctcaatggaaacgacttgtgggttaactgtgagcag

SEQ ID NO: 233585 - DNA, 336 bp, Glycine max
gcgggaaaagcataaataaaagaagaaattccacaagggtacatagttactatacccgttattctacacttaacaaagggcatctaagcctttgtttcttttattcattcttatttactgctaccagcactagctagagcccaaaaggacaaaagtgtggtagcacatgcaaaaagggctctctaagccacagctctcctctgagactcctgaggtggaaccaggaagctgaaagggttgttgttcttcacctgcctggcctgctggctctttaggttaaaagtgtgctgaatcacttcctctggcaatgcgttcaacaatgagtttgcccctgca

SEQ ID NO: 233586 - DNA, 348 bp, Glycine max
gttttatgggggccatgatatcgaatttggcatttgtattccgtaatatcttttcgaaaaagggcatgaagggaaagtctgttagtggaatgaattactacgcatgtttatctattttatctcttgctattctcacacccttcgcaattgctgtggaaggaccgcaaatgtgggctgctggatggcaaacagccatgtctcaaattggaccccaattcatatggtggctagctgctcaaagtgtattctatcatctatacaatcaagtgtcatacatgtctctggatcagatctctcctttgacgtttagcattggaaacaccatgaaacgtatatctgtcattgtgt

SEQ ID NO: 233587 - DNA, 473 bp, Glycine max
  unsure (1)..(473): unsure at all n locations
tcaggtgccatatagaagaatatgacgtcgcatgcacgcgtacgtaagctcggaattcggctcgagggaccgagtgcctcccacgcccggtcgtactcataaccgcatcaggtctccaaggtgaacagcctctggtcgatggaacaatgtaggcaagggaagtcggcaaaatggatccgtaacctcgggaaaaggattggctctgagggctgggcacgggggtcccagtcccgaacccgtcggctgtcggtggactgctcgagctgcttccgcggcgagagcgggtcgtcgcgtgccggtcggaggacggattgggaacgggcccttcggggcctcttccccgggcgtcgaacagtcaactcagaactggtacggacaaggggaatccgactgtttaattaanacaaagcattgcgatggtccctgccgatgttgacgcaatgtgaatttctgccaatgctctgaatgttaag

SEQ ID NO: 233588 - DNA, 371 bp, Glycine max
  unsure (1)..(371): unsure at all n locations
cccaaaaaaaacagagtgggtagggtgacggaagcagaaaccaaacacaactcaatcgcgaaatgtcgaatttgccccaatcgctgtcgatgggcgcggccttcggcggaggcggcgctccgccgcagccatcgagtgtcggcggcggagcacagggttccggtgctggcaaggatcggaagatggcgtcggcggagcagctcgtgctcgaactcagcaaccctgagctccgtgaaaacgcgcttctcgaactctccaagaagagggagctatttcaagatcttgctccattgctatggaattcttttggtacaattgctgcacttttgcangaaatagtttcaatataccctgttcttttcacaacaaat

SEQ ID NO: 233589 - DNA, 474 bp, Glycine max
tgaatcgaattgacgtgacactagagataagatatcgcatgcacgcgtacgtaagctcggtattcggctcgagcatttttgtggggaaggattctgtggaaatgtctgctgtagtttacaaggattgggtttttacagatcaagcattgcctgctgatcttataaaaagaggaatggcaattgaggatccatcgtgccctcatggcattcgccttgtgatagaggactacccttatgctgttgatggacttgagatatgggatgctatcaagacatgggtccatgaatacgttttcttgtactacaaatcagatgacacacttagagaagatcctgaactccaagcctgctggaaagaactcgtagaggtgggtcatggagacaagaaaaatgagccatggtggcctaagatgcaaactcgtgaagagctagttgaagcttgcgctatcatcatatggactgcttcagcaactc

SEQ ID NO: 233590 - DNA, 336 bp, Glycine max
aaaattcttccaccaagttatgggtttccttgtgttgcttcttttctccctcttaggtctctcttctagttccagcatatcaactcatcgttccatattggaccttgacctaaccaagtttaccacacagaaacaggtgtcttcactgttccaactatggaagagtgagcatggacgtgtctaccataaccacgaagaagaggcaaagagacttgagattttcaagaataacttgaactatatcagggacatgaatgcaaacagaaaatcaccccattctcatcgtttaggattgaacaagtttgctgacatcactcctcaagagttcagcaaaaa

SEQ ID NO: 233591 - DNA, 354 bp, Glycine max
gtttgtgttctctcctttcattaacgttgtgttgggtttgctagtgtacttggttttcattatggcgtcttcttcagcctctcgtgagggacactacagaggagttaggaagcgaccatggggacgctacgctgcagaaataagagatccgtggaagaagacacgtgtctggctgggcacattcgatactcccgaggaagccgccctcgcctacgacggcgccgcccgctccctccgcggcgccaaggccaagaccaacttccctccggcgccgcctctctgcctcgacctcaacgtcccttcctccgattaccgctgggcccacgttccccctcgcagcctcgtcctcagcga

SEQ ID NO: 233592 - DNA, 492 bp, Glycine max
ggaatgaagttagatatgctgtgacatgacagtgacctctcacgcacgcgtacgtaagctcggaattcggctctgagctccaaggcggcttcagcggcagcgacgccacggcctccgacgaggacgacctctacagccgcctcaagaccctgcagcgccagcttgagttcatcgacatccaggaagagtacgtcaaggacgagcagaagaatctcaagcgcgagctcctccgcgcgcaggaggaggtcaagcggatccagtcggtgccgctcgtcatcggccagttcatggaaatggtcgaccagaacaatggcatcgttggatccaccaccggatccaactactacgtcagaatcctcagcaccatcaaccgcgagcttctcaagccctccgcatccgtcgcgctccaccggcactccaacgcccctcgtcgacgttcttccaccggacgccgaacccagcatctcgctcctcaaccattccgagaaaccg

SEQ ID NO: 233593 - DNA, 332 bp, Glycine max
ggcaattttagagcaagtgttgatttgcagcgcactcatcgtattaaaggaatgattaaaatggtggccacagttggtattcctgagaatacaggtatagcattggcctgtgctatgaatagttcttttagggggcgtgccagttctgatatttacaccatttgctctcaagactgtgaattatggaatcctgcttgcacaaaagcaatgactatgtcatttaatccaaatccgtgttctgatgcatggagtttggaatttctgaagcgtaccggatttcattgtgatatcatttgtgtcactggatggactgccactccaatgcaggatgt

SEQ ID NO: 233594 - DNA, 348 bp, Glycine max
aattaagctttcaagagacaaactgttttgaaaaatgggatccaaggttgttgcatacgttgcccttctcctctccatcaacattcttttcatttccatggttagctccagcagccactacgatccacagccccaaccttctcacgtcactgctcttattacacgacctagttgtccggatctgagtgtttgcctcaatattttaggcgggtatctaggaaccgtggatgattgttgtgccctcatcggtggccttggtgacattgaagccactgtgtgcctttgcatccaactcagggccctcggaatattaaaccttaaccgtaatttgcagttaatattaaacgc

SEQ ID NO: 233595 - DNA, 348 bp, Glycine max
ctcttagagagaaaaaaaaatggctgatacaggtggaggagatgcagtgagaccagtggtaatatgtgataacaagtgtggctgcacacttccatgcactggtggttccacttgcaggtgcacaagtgctggcactgccacaggagggggtgatcacgtgacatgctcgtgcggagagcactgtggttgcaatccatgctcatgtcccaagattgcggctgctggaagtggttgcagatgtggcacagattgtgcatgtgcctcctgccgcacttagtatcacaccttaaggcttaaacttcacgttttattttatgtcttcaaatcttgaatacgttttctatatat

SEQ ID NO: 233596 - DNA, 385 bp, Glycine max
cggccaacgctgtcgtttcaccgtcgccgttccgacctcagccctttctccggtcatccttctccggcgtctccgtcaagctcactccccaatccataacgctttcacgctccaagcccctcaccgtcttcgccgccaccaagaaggccgtcgccgtcctcaaggggacctccgccgtcgaaggcgtcgccactctcatccaagaagacgatggcccgacgacagtttctgttcgcatcactggccttactccggggcttcatggttttcacctacatgagtatggtgatacgacaaatgggtgtatttctacgggagcacattttaatcctaataaattgacacatggtgctcctgaggatgaagtccgtcatgcgggtgacct

SEQ ID NO: 233597 - DNA, 375 bp, Glycine max
  unsure (1)..(375): unsure at all n locations
tacttttacaccccttcgcgaatcacaagatcaagaattacctccaactgagccacccataacaagattgtttactagttctgatgggcagtggttggcagctgtgaactgctttggggatatatatgtatttaacttggagatactaagccagcactggttcatttcaagattggatggcgcctctgttacagctggtggctttcctccccagaacgacaatgtactgatagttacaacttcctcaaatcaagtgtatgcatttgacatagaggccaagcagttgggagaatggtccacaagacacacacatgctcttcctangagataccttgaatttcctggtgaagttattgggctctcattccctccatc

SEQ ID NO: 233598 - DNA, 379 bp, Glycine max
  unsure (1)..(379): unsure at all n locations
caagcttacaattctcctcatcgctcttctcttcatcgcccacacctgctgcgcctccaaatggcaacagcaccagcaagagagctgccgcgagcagctcaaggggatcaacctcaacccctgtgagcacatcatggagaagatccaagctggccgccgcggcgaggacggcagcgacgaagatcacattctcatcaggaccatgccgggaagaatcaactacatcaggaagaaggaaggaaaagaagaagaagaagaaggacacatgcagaagtgctgcagcgaaatgagcgagctgaaaagccccatatgccagtgcaaagcgctacagaagataatggataaccagagcgagcaactggangggaaggagaagaag

SEQ ID NO: 233599 - DNA, 377 bp, Glycine max
caaaatgaccaagttcacaatcctcctcatctctcttctcttctgcatcgcccacacttgcagcgcctccaaatggcagcgacagcaagatagctgccgcaagcagctccaagggggtgacctctagccctgggaaaacccattcaggggaaaatttcaagggccggggaataccatgatgattatgaccacgacaatcacattctcaggagcatgcggggaaaaatcaactacataaggggggacgaaggggaagacgaagacgaagaagaagaaggagacatgcagaagtgctgcacagaaatgagcgagctgagaagccccaaatgccagtgcaaagcgctgcagaagataatggagaaacagagcgaggaact

SEQ ID NO: 233600 - DNA, 371 bp, Glycine max
acgaaaacgagtctggtgatcaagtcgtcgctgttgagtttgacactttccggaactcttgggatccaccaaatccacacatcggaattaacgtcaattctatcagatccatcaaaacgacgtcttgggatttggccaacaataaagtagccaaggttctcattacctatgatgcctccaccagcctcttggttgcttctttggtctacccttcacagagaaccagcaatatcctctccgatgtggtcgatttgaagacttctcttcccgagtgggtgaggatagggttctctgctgccacgggactcgacatacctggggaatcgcatgacgtgctttcttggtcttttgcttccaatttgccacacgct

SEQ ID NO: 233601 - DNA, 389 bp, Glycine max
  unsure (1)..(389): unsure at all n locations
gtatgatgaaattgtgaaggaagtctcttcctacttgaagaaggttggttacaacccagacaagattccatttgtgcccatctctggtttcgagggtgacaacatgattgagaggtccaccaaccttgactggtacaagggaccaactctccttgaggctcttgaccaaatcaatgagcccaagaggccctcagacaagccactcaggcttccattgcaggatgtctacaaaattggtggtattggtaccgtgccagtgggacgtgttgagactggtgtcgtgaagcccggtatggtggtgacttttggtcccactgggctgacaactgaggttaagtctgttgagatgcaccatgaggctctcacagaggctcttccangtgacaatg

SEQ ID NO: 233602 - DNA, 332 bp, Glycine max
gggcaaatcaaacttcatggcatttgagtttccttattgacaatcccaaacagtctacagtttttgatattctcttgggaatttctcaagattttgaaattgctggtaatactcttatgccagctttttctgtcccacaggctactgccagatcttctgaaaatgcggaatcctctgcatgatctggaatttgtgttttctctcgcttgttcgtttgtttaattcaataaaggaaattaggcatgaccctcttgttgagtatgctctgcctatttgaaaatttccacacctcttttaattatcgtaatgatgtgtgaagtgtgtgttatttt

SEQ ID NO: 233603 - DNA, 360 bp, Glycine max
gagaaacaaagaaaggaaataattgatctttgaaaatgcagggaggaaagaaagctggagagtccatcaaggaaacagctgcaaacattggtgcttctgccaaggctggcatggagaaaaccaaggccactgtccaggagaaggcagaaagaatgacggcacgtgatccgatgcaaaaggagttggcaacccagaagaaagaggcaaagatgagccaggcagagctggacaagcaggcggcgcgtcagcataacacggcggcgaagcaggctgccacggcagggcacatgggacaacccatggggacccatcagacgtcagctatgcccggtcatggaaccggacagcccacgggccatg

SEQ ID NO: 233604 - DNA, 382 bp, Glycine max
aatttttgaagcgtaccggatttcactgtgatatcatttgtgtcactggatggactgccaccccaatgcaggatgttcaggttacaattgattggtttatttcctctcaggaatgtgttcccaggacttattgtgttttaaatccacaaaatccttttgtgttaaataggtggatggggaaactgactttcccccagggcacttcccgaaatgttaagagaatgcctctttctatagggggaggagctggtgcaaagaatgctattctcatgaatatgccaaatgctgttctttcaatgtggagatattttgttggagatctcgtctttgaagtttctaagatgacttctccctacattaaatgtacagtctctttcttcat

SEQ ID NO: 233605 - DNA, 369 bp, Glycine max
caaaccttgctctatactacacagtacacacactagaagaataatggcttccatcctccactactttttagccctctctctttcttgctcctttcctttcctcctaaccgactcagttcaccccaaaaaaccaataaaccctggtggtccaaccgttcaaaatgatgggtccaaaagggtccaatgggccaaactccaaaaaagaacccctccaatgcaagttccaatcctggtggacctcaatggaaatcacttgtgggttaactgtgaacagcagtactcatccaaaacgtaccaagcaaccttctggcaatccacccaatgctctagagccaacacccaccaatgcctcagttgccccgcgggatc

SEQ ID NO: 233606 - DNA, 371 bp, Glycine max
gctgtagtttacaaggattgggtttttacagatcaagcattgcctgctgatcttataaaaagaggaatggcaattgaggatccatcgtgccctcatggcattcgccttgtgatagaggactacccttatgctgttgatggacttgagatatgggatgctatcaagacatgggtccatgaatacgttttcttgtactacaaatcagatgacacacttagagaagatcctgaactccaagcctgctggaaagaactcgtagaggtgggtcatggagacaagaaaaatgagccatggtggcctaagatgcaaactcgtgaagagctagttgaagcttgcgctatcatcatatggactgcttcagcacttcatgc

SEQ ID NO: 233607 - DNA, 394 bp, Glycine max
cacacaactactacaagtacttccttacaatcaaaaccaacaacaactatggcaagttatcaaaagcactacgatgatcagggtcgcaaggttgacgagtatggcaacgttgagaagcaaaccgacgaatacggcaaccctgttcatgctgctagtgtcacctatgtagccaccagaactgctgctggtggttacagtgatgacattaataagcaacatgataccaccaatgcctacggcgtagacactggtagacagcattctagtggtggctacgatggtgacactaataaacatcatggaactactggtggctataatgatgacaccaatagacatcatggaactaccggtgtctatggtatagacaccgataggcaacaacatgggacta

SEQ ID NO: 233608 - DNA, 195 bp, Glycine max
tgcagaccgagctagctagctagcaagcaagcacagagatggaggcaaagcgaggccatgccctcatgtgcttggcacgtgtttcactcttcctctgcgctctaaccctatccgctgctcacggaagcaccacggttcaagacatcgcgagaaagttgaaactcggggacaacgagcttctgcgcacggggaaaa

SEQ ID NO: 233609 - DNA, 392 bp, Glycine max
ggataaattcgtaaagtactatgaagatcctggttcaagacctatttttgagactgtggatgagatgctgcagtgggctggtctgtataatcttactaccaggactttgcgggatgaattggtggatgctgggttgtctacctcgttgatcaatgaacttgttactgtcatcacacgcattaattatggccagagtgtctccatgagtgggttgggtggtgtggtttctctagcaggatcaggtggaggattatggtccatcgaaggaggcaactggcaaatggctgctggactgattaatcagtcagatgtggcattacacctgcatgaagaaataaaatctgttgctgaccttggagattactacgaactcaactcaacaaaaggaaaca

SEQ ID NO: 233610 - DNA, 470 bp, Glycine max
cgattgattgacgtgcactatagaagatatatgacgtcgcatgcacgcgtacgtaagctcggcggctcgagtgcaggtgttgaaatcgatgaactccctaagcaaattgatgatacacagtacccaaaaacattcttctataaagaagaccttcatccaggcaaaacaatgaaagtacaattcaccaagcgtccctatgcacaaccttatggtgtatatacatggttaacggatattaaagacatctcttcaaaactatatccttctttagaggtgtctttctatcttgctgggaaccaagagcaagagtttctaaaatatcagcaagagcaaggaggtcatcaaagccagaaaggaaagcatcagcaagaagaagaaacgaaggaggcagcatattgagtggcttcaccctggaattcttggaacatgcattcagcgtggacaagcagatagcgaaaaacctacaagga

SEQ ID NO: 233611 - DNA, 342 bp, Glycine max
aaataaaatcaccatgtctatcatcccaaacttgttcggtggtagacgaagcaacgtcttcgacccattctctctggacgtatgggaccctttcgaggggtttcctttttccacaggtcacgtgccttcctctggtggggaaagcagtgccatagccaacactcgcgtggactggaaggagactccggcggctcacgtgttcaacgttgatcttcccgggttgaagaaggaggaagtgaaggttgaagttgaagatgggagggtgctgcagattagtggtgagaggaccaaagaacaagaacagaaagatgataggtggcaccgcgttgaaagaagcactgg

SEQ ID NO: 233612 - DNA, 393 bp, Glycine max
cacaactactacaagtacttccttacaatcaaaaccaacaacaactatggcaagttatcaaaagcactacgatgatcagggtcgcaaggttgacgagtatggcaacgttgagaagcaaaccgacgaatacggcaaccctgttcatgctgctagtgtcacctatgtagccaccagaactgctgctggtggttacagtgatgacattaataagcaacatgataccaccaatgcctacggcgtagacactggtagacagcattctagtggtggctacgatggtgacactaataaacatcatggaactactggtggctataatgatgacaccaatagacatcatggaactaccggtgtctatggtatagacaccgataggcaacaacatgggactac

SEQ ID NO: 233613 - DNA, 363 bp, Glycine max
  unsure (1)..(363): unsure at all n locations
atgacaattctttgaattctgatggaaatgctgctgatagaggggcaaaattagagaatgctgttttgtcatggtcaaagggcatctctaaggacacacgcaggggtggggctacagaaaaatccgatcagaatccaaatgctggtaaatttcctccattaaggagaagaaaacatctgtttgtcattgctgtggattgtgataccacttcaagccttcttgaaactattaaagccatctttgagtctgctggaaaggatanggcagagagcattgtaggtttcatattgtcaacatcattaacaatatcagagatacagtcatttctaatctcaagtggcttgagtcccattgattttgatg

SEQ ID NO: 233614 - DNA, 368 bp, Glycine max
  unsure (1)..(368): unsure at all n locations
gatttagaaaaaagagatgatttgtttccacagattctaagagacgaggcagtggcaaggctttatgagcttgggaaggtgagtgatgctagcggttatttggagaggacattcttgagtcctgcatccatgagggcaatcaattttattcgtaaatggatggaggatgctggtttgagaacttgggtggaccaaatgggaaatgtacatggtcgcgttgatggtgctaatgcaaatgctgaagctttattgattggatctcacatggacactgttgttgatgctgggatgtttgatggatcactangaattgtctctgcaatatctgccttgaaggctatgcatgtcaatggaaagctacaaaagct

SEQ ID NO: 233615 - DNA, 393 bp, Glycine max
ctcgagccgcgctcacagttatttgcaatagcatttttaatgagatgctcattagatatagctatgaaaaattactgcgccaggctagagctccaagcatgtttttacaatccttcaaaaattttgtttctttgtgtgtgtatggtgatgataacttaattagtgttcatgaatatgtcaagccttactttagtggttctaaattgaaaagctttctagctggtcataatatcaccattactgatggtattgacaaaactagtgcaactttgcaatttagaaagttagcagattgtgattttctcaagagaaactttaagcagatgtctaatgttttgtgggtggctcctgaagacaacgcgagtttatggtcacaacttcattatgtttcgt

SEQ ID NO: 233616 - DNA, 386 bp, Glycine max
acatcgctgacatggcggtgccgccgtcggatggttcacggaaacgtcccaagctggatctcagggaccgcgataacgtagttcaaaattgcgacgaatccactggacacaaggtggtgaaaaaagaagccaaagtggaaatccacgacaatatttccgaaacgaaaaacgtaactgttgcggatgcttcggaagttgaagattctcctaagttcggcgtgacgtcagtttgcggcaggagaagagacatggaagattccgtttcggtgcggccttccttcacccaaggcttccactactttggcgttttcgacggtcacggttgctctcatgtcgcgactatgtgcaaggagcggttacacgagatcgtgaatgaagagattgac

SEQ ID NO: 233617 - DNA, 352 bp, Glycine max
aaaattcttccaccaagttatgggtttccttgtgttgcttcttttctccctcctaagtctctcctccagttccagcatatcaactcatcgttccatattggaccttgacctaaccaagtttaccacacagaaacaggtgtcctcactggtccaactatgggagagtgagcatggacgtgtctaccataaccacgaagaaaaggcgcagagacttgtgattttcacgaataacttgtactatatcacggacatgaatgcacacagaaaatcaccccattctcatcgtttaagattgaacaagtttgctgacatcactcctcaagagttcagcaaaaagtacttgcaagctccc

SEQ ID NO: 233618 - DNA, 339 bp, Glycine max
ctctattcctctgacttcccatagaccacaatacactcaccccaggcaaaaaatttcgtttcaaaattgtgatatggacggaagagcgagcagcagcgtgggcggagaagcatcgccagctccagcaccggtgccgataacgaatgcgaacgcgccgccgcctttcttgagcaagacatacgagatggtagaggacccttcgacggactcgatagtgtcgtggagtccaacgaacaacagtttcgtggtttggaaccctcccgagttcgccagagatctcttgcccaaacacttcaagcacaacaacttctccagcttcgttcgccaattaaacaccta

SEQ ID NO: 233619 - DNA, 394 bp, Glycine max
gtttggaaagaaagcgataaacccagttgccatgaatccatgatcccctttccttccttcttcctctaattttcttgtatgctaagacttcctcgtcattgattattattcgcatccaacgccgtcagcataatttgtgtattcccctttgaatgttgaaagaaacaaaaacccacagaacctgcgatttcaacacaattaggttttcccttcaatggccgctaattcccacagattgggttcttcctacggcggcgctgccccttaccgatcaagagatgggcttagcacccgtcccgttggtgcctcggaggagatccaattgcgaattgatcccctggacttggacgatgagatcaccggtcttcatcgccaagttagaaggttgaaacat

SEQ ID NO: 233620 - DNA, 385 bp, Glycine max
ctcgtctttgaagtttctaagatgacttctccctacattaaatgtacagtctctttcttcatagcatttggaaatttggctgatgacaccatcaattttgaggcttttccccacaagctggtgcagtttggagagattcaggaaaaagttgtgttgaaattttcacaagaggaatttcttacagcttggtcaactcaggtgcgtcccgcaacgactctgttggctgatgggtgcccatatttgtatgctatggtgcatgatagttcagtgtctacaataccaggtgattttgtcattggtgttaagttgacaaccataaacaatatgtgtgcatatgggctcaatcctggtatttcaggttctcgtcttttgggcaccattcctc

SEQ ID NO: 233621 - DNA, 289 bp, Glycine max
cagaatcccagagcgataaccttgagtctgtgtcaatcaggaccaatgatacaccctcgatgggaaaccttgcaggggcatcctcattgttggacgcattgccacaggaagtgattcagcacacttttaccctagagagccagcaggccaagcaagtgaagagcaacaaccctttcagcttcctggctccacctcaggagtctcagaggagagctgtggcttagggagccctttttgcatgtgctaccacacttttgtccttttgggctctagctagtgctggtagcag

SEQ ID NO: 233622 - DNA, 183 bp, Glycine max
cgacagagactcctacagacttcaatctggtgatgccctgagagtcccctcaggaaccacatactatgtggtcaaccctgacaacaacgaaaatctcagattaataacactcgccatacccgttaacaagcctggtagatttgagagtttcttcctatctagcactgaagctcaaaaatccta

SEQ ID NO: 233623 - DNA, 315 bp, Glycine max
gaaagatagaggaggaagaggagagaaagagagaggaggaagaggacgagaagaagagaaggagagaggatgaagaggaggagaagaagaaggaagaggatgaagagaagagaaagagagatgacgaagaggctaaaaggcaacaagaagagagggaaaagaagcgagaggaggaagaagctaggagagagaacgaaagggaaagagaagaggaggcagaaagggagcaagaacaagctaaaagagaagcagaagcagcagcacagagggaacaagaacaagctaaaagagagcaagaaaggatagaaaggagac

SEQ ID NO: 233624 - DNA, 363 bp, Glycine max
ggtttcaaggtttacgggatggattggcttggccacggtggaagtgatgggttgcatggttatgtccattctcttgatgatgttgtttctgatacgaaaatatttttggagaaggttcttaacgaaaatcctgggcttccatgtttctgctttggacactcaacaggagcagccattattcttaaggctctgcttgacccaaaggttgaatctcgcatagctggtgctgttttgacatcaccagcagttggtgtttccccttctcatccaattttgctggcacttgctcctatagcttcaattttgctgccaacgtatcaatgtagttctgcatataagaaggggtcaccagtgtctagagac

SEQ ID NO: 233625 - DNA, 388 bp, Glycine max
  unsure (1)..(388): unsure at all n locations
cttctgcctgcgctctttcgcttcctgcgaatctttccgagaatcgagtcacagagtagagcgaaatcggcgtagagatacaaaaatgccaaaagtaaagacaaatcgtgttaaatacccagagggctgggaattgattgagcctacactccgtgaacttcaagcaaagatgagggaagctgagaatgatccacatgatggcaaaagaaaatgtgagacattatggccaatatttaagattgcacaccagaagagccgctacatatttgacctctaccatcggaggaaggaaatttctaaagaactgtatgaattctgtttagatcaaggatatgctgaccgcaatctaattgcaaaatggaagaagcctggntatgaacgtctttgc

SEQ ID NO: 233626 - DNA, 370 bp, Glycine max
aaaaaaaaaaaaaaaaaaaaaaaaaaaaaaaaaaaaaaaaaaaaaaaaaaaaaaaaaaaaaaaaaaaaaaaaaaaaaaaaaaaaaaaaaaaaaaaaaaaaaaaaaaaaaaaaaaaaaaaaaaaaaaaaaaagggggggcccccaacaattgaccccttcaacccggaatttatttcgggccgggtccctgaaggcttacaatttttcccaaaagtgattcgtattaaactttggcttaaccagggccaaactttttcccggtgtaaatttgttacccgcccaaatttccacaaaacatacaacccggaaccataatttttaaaccctgggttcccaaaggattgacctaccccaaattatttgctttgcc

SEQ ID NO: 233627 - DNA, 368 bp, Glycine max
ttttgttcctcactgaccaagccatggcgatgagaaccaaactttctttagctatctttttcttttttcttttagccttattttcaaacctagcctttggcaaatgtaaagaaaccgaggtagaagaagaagaccctgagctcgtaacatgcaaacaccaatgccaacagccacagcaatacactgagggtgacaagcgggtatgcttgcaaagatgtgacaggtatcatcgtatgaagcaagagcgagagaaacaaatccaagaggaaactcgtgagaagaaagaggaggaaagccgtgaaagggaagaagaacaacaagagcagcatgaggaacaagatgaaaatccctacatttttgaggaagat

SEQ ID NO: 233628 - DNA, 388 bp, Glycine max
gaataatcttgtgaatcgcgtaagctctctcaactcaactggatccgggtcacaaccgtcttgaaattaagaccaactgggtcattgatcacaatctcaattggtagcacaacatcaagggaaagtgaaaaagaaaggtatatttgatcagggatatggcaactcgaagatatgagtttggaaggatgaatgaggctagccacccagactccatcagagctgccttggctgaattcctctccacttgcatctttgtctttgctggagaaggctctgcccttgctttgcgacaaatttacaaggaaccagggtcatcagcgggtgagctagtggtaattgcactagctcatgcatttgctctatttgctgctatttctgctagcatgca

SEQ ID NO: 233629 - DNA, 401 bp, Glycine max
gatgttcctttcttgtgatccgaggagaacgaagagtcgttcctgagaagctcgtcgctatgggttctctccctgtgcccgcatttccatccaaacactgccttgacgagagcagccacattgacgaagccaccctctcggcgctattcaagtcgcagcagagccacctgaacttcttcttcgaccacatcgaccactcccaaaccctagccttcacgcgcgcgctcctcaatgccgccggcaccgtcttcttcaccggcgtcggaaaatccggcttcgtcgcgcacaagatctcgcagacgctcgtctctctgggcgttcgctccgcgttcctctcgccggtggacgctctccacggcgacattggaatcctcaccaatcgcgatgtgctcaacctcctc

SEQ ID NO: 233630 - DNA, 372 bp, Glycine max
  unsure (1)..(372): unsure at all n locations
cacaaacacatgcaggttatcttggtcttttcaacgaaaacgagtctggtgatcaagtcgtcgctgttgagtttgacactttccggaactcttgggatccaccaaatccacacatcggaattaacgtcaattctatcagatccatcaaaacgacgtcttgggatttggccaacaataaagtagccaaggttctcattacctatgatgcctccaccagcctcttggttgcttctttggtctacccttcacagagaaccagcaatatcctctccgatgtggtcgatttgaagacttctcttcccgagtgggtgaggatagggttctctgctgccacgggactcgacatacctgnggaatcgcatgacgtgcttt

SEQ ID NO: 233631 - DNA, 383 bp, Glycine max
gacagaacacatgcacggtagcttggtcatttcaacgaaaacgagtctggtgatcaagtcgtcgctgttgagtttgacactttccggaactcttgggatccagcaaatccacacatcggaattaacgtcaattctatcagatgcatcaaaacgacgtcttgggatttggccaacaataaagtagccaaggttctcattacctatgatgcctccagcagcctcttggttgcctctttggtctacccttcacagagaaccagcaatatcctctccgatgtggtcgatttgaacacgtctcttcccgaatgggttaggatatggttctctgctgccagcggactcgacatactggggaaacgcatgacgtgctttcctgggctttt

SEQ ID NO: 233632 - DNA, 397 bp, Glycine max
  unsure (1)..(397): unsure at all n locations
gcacaagttgaacttccgtgacgagcatgggaaacccagttgaactaacagatgcatatgggaatccggtttggttaacggacgagaaaggcaacccggtgcacctcacggctgtggcaaccaatgcacacaaatctatgcttcagaatgacaccccacaagagcttcctcactccaagagttcaagctcgtctgaggatgaagggcatggagagaggatcaggaagggactgaaggataacatagaagaaaagttaccagctggagaaggagtagtgaaggagaataaacacaccacaattgctgcttctacttctacaacagatactagtgatgctaatcaccacccaaccactgagcatgagaagaagagtatcatagacangattaaagaaaa

SEQ ID NO: 233633 - DNA, 390 bp, Glycine max
aaatgccaggtcttaccatcggagacactattcctgatcttcaagttgaaactaaccaaggcaaaatcaagcttcatcagttctgtgctgatggctggaccatccttttctctcacccaggtgatttcaccccggtttgtaccactgagcttggtaagatggctcagtatgctaaggagttttatcaacgaggagtgaagctcttaggtttatcttgtgatgatgtgcaatcccacaatgagtggatcaaagacattgaagcctacactccaggtgcgaaagtgaattatccaataattgctgatccgaagagagaaatcatcaagcaactcaacatggttgaccctgatgagaaagactcccactggcaactaacctcaagggctcttc

SEQ ID NO: 233634 - DNA, 393 bp, Glycine max
cgaggagaagcagaaggagcaaaagcaatggcgccgaagaagccgagaaccacgacaaggaaccctgatttggttagggggattggcaagtattcgaggtcgcagatgtaccacaagaggggcatctgggccatcaaggccaaaaacggtggcgttttgccccgccacgatcccaagcccaagcccgaggccccggcccagaagccgcccaagttctaccccgcggacgatgttaagaagcccctcgtcaacaagcacaagcccaaacccgcgaaactcagggctagcattactccagggactgtgttgatcctgcttgctgggaggttcaagggaaagagggttgttttcctgaagcagctcccatctggattgcttcttgtaactggtccc

SEQ ID NO: 233635 - DNA, 378 bp, Glycine max
taaaattcttccaccaagttatgggtttccttgtgttgcttcttttctccctcttaggtctctcttctagttccagcatatcaactcatcgttccatattggaccttgacctaaccaagtttaccacacagaaacaggtgtcttcactgttccaactatggaagagtgagcatggacgtgtctaccataaccacgaagaagaggcaaagagacttgagattttcaagaataacttgaactatatcagggacatgaatgcaaacagaaaatcaccccattctcatcgtttaggattgaacaagtttgctgacatcactcctcaagagttcagcaaaaagtacttgcaagctcccaaggatgtgtcgcagcaaatcaaaa

SEQ ID NO: 233636 - DNA, 366 bp, Glycine max
attcctaattgtttaaacctaattctcatttcttcatcgttcgattcttctcctcctaaagatgcagatcttcgtgaaaactttgaccggtaagaccatcacccttgaggtggagtcctccgacaccatcgataacgtgaaagctaagattcaagacaaggaagggatcccacctgaccagcagagacttatctttgcgggtaaacagcttgaggatggtcgaacccttgccgactacaacatccaaaaggaatccactctccacctcgtgcttcgcctcaggggtggcatgcaaatctttgtcaagactttgactggcaagaccatcaccctcgaggtcgaatcctcggacaccattgataatgt

SEQ ID NO: 233637 - DNA, 381 bp, Glycine max
gcttaggaggggacaattgctggtggtaccacagaacttcgtggtggcggagcaagccggagaacaaggattcgaatacatagtattcaagacacaccacaacgcagtcactagctacttgaaggatgtgtttagggcaattccctcagaggttcttgcccattcttacaaccttcgacagagtcaagtgtctgagcttaagtatgaaggaaattggggtcctttggtcaaccctgagtctcaacaaggctcaccccgtgttaaagtcgcataaatgacaagcatgatggtgtgaggatgaggccatcttatgaaataataacaaataaataaattttgtatgataataaaaagtatggcccatgtaccatcccagcgagc

SEQ ID NO: 233638 - DNA, 377 bp, Glycine max
caaggccactgtccaagagaaggcagaaagaatgacagcacgtgatccggtgcaaaaggagttggcaacccaaaagaaagaggcaaagatgaaccaggcggagctggacaagcaggcggcgcgtcagcataacacggcggccaaacagtccgccaccacggctgggcacatgggacatggccaccacaccaccggaaccgggactggaaccgccacgtattccaccaccggggaatatggtcagcccatgggggcccaccagacgtcggcaatgcctggccatggaaccgggcagcccacgggccatgtcaccgaaggagtggtgggctcacatcccattggaaccaacagagggccgggtgggaccgctacagctc

SEQ ID NO: 233639 - DNA, 344 bp, Glycine max
cagtggctgctgcttcgctttcagttccagagagcagcctcagcaaaacgagtgccagatccaaaaactcaatgccctcaaaccggataaccgtatagagtcagaaggagggctcattgagacatggaaccctaacaacaagccattccagtgtgccggtgttgccctctctcgctgcaccctcaaccgcaacgcccttcgtagaccttcctacaccaacggtccccaggaaatctacatccaacaaggtaagggtatttttggcatgatatacccgggttgtcctagcacatttgaagagcctcaacaacctcaacaaagaggacaaagcagcagaccacaag

SEQ ID NO: 233640 - DNA, 363 bp, Glycine max
ccttgacctaaccaagtttaccacacagaaacaggtgtcttcactgttccaactatggaagagtgagcatggacgtgtctaccataaccacgaagaagaggcaaagagacttgagattttcaagaataacttgaactatatcagggacatgaatgcaaacagaaaatcaccccattctcatcgtttaggattgaacaagtttgctgacatcactcctcaagagttcagcaaaaagtacttgcaagctcccaaggatgtgtcgcagcaaatcaaaatggccaacaagaaaatgaagaaggaacaatattcttgtgaccatccacctgcatcatgggattggaggaaaaaaggtgtcatcaccca

SEQ ID NO: 233641 - DNA, 390 bp, Glycine max
tctagactcttctttttctctaagtctaaggggtgccctgagatcactttgagcaatggtgaaggctgtggcagttcttggcagcagcgagggtgtcactggaactattttcttcactcaggagggaaatggtccaaccaccgtaactggatctcttgctggtcttaagcctggtctccatggcttccatgtccatgccttgggggacactaccaatggttgcctgtcaactggagcgcatttcaatcctaataacaacgagcacggtgcccctgaggacgagaatcgtcatgctggtgatcttgggaatgttaatgtcggtgatgatggtaccgttagcttcagtattaccgacagtcagattcctctcactggaccaaactccatcat

SEQ ID NO: 233642 - DNA, 368 bp, Glycine max
  unsure (1)..(368): unsure at all n locations
gggaaagtgaaaaagaaaggtatatttgatcagggatatggcaactcgaagatatgagtttggaaggatgaatgaggctagccacccagactccatcagagctgccttggctgaattcctctccacttgcatctttgtctttgctggagaaggctctgcccttgctttgcgacaaatttacaaggaaccagggtcatcagcgggtgagctagtggtaattgcactagctcatgcatttgctctatttgctgctatttctgctagcatgcatgtgtctggtggacacgtcaaccctgccgtcacttttggcgctcttcttggtggaaggatctccgtccttagagcagtttactantgggttgctcaac

SEQ ID NO: 233643 - DNA, 374 bp, Glycine max
ctctccattgtctttgaacactcatcaccatggccaagcttgttctttccctttgtttccttcttttcagtggctgcttcgctctgagagagcaggcacagcaaaatgagtgccagatccaaaagctgaatgccctcaaaccggataaccgtatagagtcggaaggtgggttcattgagacctggaaccctaacaacaagccattccagtgtgccggtgttgccctctctcgctgcacccttaaccgcaatgcccttcgtagaccttcctacaccaacggtccccaggaaatctacatacaacaaggtaatggtatttttggcatgatattcccgggttgtcctagcacttatcaagagccgcaagaatctcag

SEQ ID NO: 233644 - DNA, 393 bp, Glycine max
  unsure (1)..(393): unsure at all n locations
aaaattcttccaccaagttatgggtttccttgtgttgcttcttttctccctcttaggtctctcttctagttccagcatatcaactcatcgttccatattggaccttgacctaaccaagtttaccacacagaaacaggtgtcttcactgttccaactatggaagagtgagcatggacgtgtctaccataaccacgaagaagaggcaaagagacttgagattttcaagaataacttgaactatatcagggacatgaatgcaaacagaaaatcaccccattctcatcgtttaggattgaacaagtttgctgacatcactcctcaagagttcagcanaaagtacttgcaagctcccaaggatgtgtcgcagcanatcaaaatgggcaacaagaaaat

SEQ ID NO: 233645 - DNA, 393 bp, Glycine max
cggctcgaggctcactacaccgccttttccacacttccatcgtccggcacttcatggccgcggcggagcccactataagcccatctaacacgcgcgtgggctggatcggcacgggcgtcatgggccagtccatgtgcgcccacctcatccgtgccggctacaccctcaccgtcttcaaccgcaccccctccaaggcccagcccctcctcgacctcggggcctacttcgccccctccccccacgccgtcgcagcccgctccgacgtcgtcttctccatcgtcggctacccctcggacgtccgctcagtcctcctccacccctcctccggcgccctctccgccctccgccccggcggcgtcctcgtcgacatgaccacctccgaaccctccctcg

SEQ ID NO: 233646 - DNA, 364 bp, Glycine max
gttgtgcttaatttgtctcagaatcagttagaggtgattcctgattcaatagcaggactacagaggcttgtggagctggatgtttcatctaatgttttagagtccctacctgactctattggattgttggttaatctgaagatctttaatgtgtcagcaaacaagctaactgctcttcctgaatccattgctctttgcaggtcactagtcgaattggatgcaagctttaacaacttaatgtgtctgccaacgaacatgggttttggacttgttaaccttgagaagctcttgatccatttgaacaagatacgatttcttcccgcctccattggagaaatgaaatctctcaggcatcttgatgttc

SEQ ID NO: 233647 - DNA, 350 bp, Glycine max
caaggagaagaaaggcaacagtgaagaagtcatcaggatccttactacaagaagcaaaactcaacttgtggcaactttcaaccgctacagagatgaacatggaatttccatcagtaagaaattgttggatcaaacatctgatgacttccacaaggtgttgcacactgctattcgctgcatcaatgaccataagaagtactatgagaaggttttgcgcaatgcagtcaagaagtttggaactgacgaggatggactaagccgtgtgattgttacaagggctgagaaggatctgaaggacatcaaagagctctactacaagagaaacagtgttcacccttgagatgaagtgt

SEQ ID NO: 233648 - DNA, 347 bp, Glycine max
cttgtttgcttcccaagtctctcgaagcatctttctttctcttcctgcagaagctatccgtgttacttgttcccaagtctccaacaagcaaagtacatggttgatttggaaatccaggtccccagcgcattcgacccgtttgccgaggcgagagaatcagatgcccccggggcaaaggagtatgtgcacatacgaattcagcagaggaatggaaagaagagtctgacaacagtgcaagggctgaagaaggagttcagctacgagaagatcctcaaggacctcaagaaggacttctgctgcaacgggactgtggtgcaggacaaggagcttggcaagattatccaact

SEQ ID NO: 233649 - DNA, 360 bp, Glycine max
caaggagaagaaaggcaacagtgaagaagtcatcaggatccttactacaagaagcaaaactcaacttgtggcaactttcaaccgctacagagatgaacatggaatttccatcagtaagaaattgttggatcaaacatctgatgacttccacaaggtgttgcacactgctattcgctgcatcaatgaccataagaagtactatgagaaggttttgcgcaatgcagtcaagaagtttggaactgacgaggatggactaagccgtgtgattgttacaagggctgagaaggatctgaaggacatcaaagagctctactacaagagaaacagtgttcaccttgaggatgaagtgtccaaggaaac

SEQ ID NO: 233650 - DNA, 223 bp, Glycine max
  unsure (1)..(223): unsure at all n locations
atcataaaattcttccaccaagttatgggtttccctgtgttgcttcntttctccctcttaggtctctcttcgagttccagcatatcaactcatcgttccatattggaccttgacctaaccaagtttaccacacagaaacaggtgtcttcactgttccaactatggaagagtgagcatggacgtgtctaccataaccacgaagaagagggatagagacttgaga

SEQ ID NO: 233651 - DNA, 314 bp, Glycine max
gaagcggttgggcgttttctgccacgggagccatagaagcagcacatgcaatagcaacaggagaccttgttagcctttctgaacaagaactcgtagactgtgtggaagaaagcgaaggttgttacaatggatggcactatcaatcgttcgaatgggttttagaacatggtgggattgccactgatgatgattatccttacagagctaaagagggtagatgcaaagccaataagatacaagacaaggttacaattgacggatatgaaactctaataatgtcagatgagagtacagaatcagagacagagcaagcg

SEQ ID NO: 233652 - DNA, 359 bp, Glycine max
tgctgctattcgggaggacatcagtattaatcttggaccgctggaggagctttctaacctcttcaaagcagatatacttctttgtgaatctgggggagataacctggctgccaatttcagcagggaattggctgactatattatttacataatagacgtgtctggcggtgataaaattcctcggaaaggtggtcctggaatcacgcaagctgatctccttgtgataaacaagactgaccttgctcctgcaattggggctgatttggcagtcatgcagcgggatgctctgcggatgagagatggagggccatttgtctttgcacaggtgaagcataagattggagtagaagaaattggga

SEQ ID NO: 233653 - DNA, 408 bp, Glycine max
atcagaaccacattcctgggaattgatcttcccaatagaggtatgtggtcctaataatggttttgaaatgtggagttctgagtgggcaaatcaaacttcatggcatttgagtttccttattgacaatcccaaacagtctacagtttttgatattctcttgggaatctctcaagattttgaaattgctggtaatactcttatgccagctttttctgttccacaggctactgccagatcttctgaaaatgcggaatcctctgcatgatctggaatttgtgttttctttcgcttgttcgtttgtttaattcaataaaggaaattaggcatgaccctcttgttgagtatgctctgcctatttgaaaatttccacacctcttttaattgtcgtaatgatgtgtgaagtgtgtg

SEQ ID NO: 233654 - DNA, 329 bp, Glycine max
  unsure (1)..(329): unsure at all n locations
acaagagctatgacatcgcatgcacgccttacttaacaccggaatccggtccaagtaaaatttgaaatttggaaaaacggcaataaaaggttgccgaaccttaaaaacggganacaaaaagcaatccgttacttgaattcaagaatctctcaatttcttcctacttctttgtgtacgatttcttaagggaaagaaaatcactctctgtgctggccacagacttcgtgaatcattttcttttccactcttagtttatttgctgaacactctcctatttgatataggacttcgtgtcagatttaaacttcttctgtttctttctcagttct

SEQ ID NO: 233655 - DNA, 370 bp, Glycine max
  unsure (1)..(370): unsure at all n locations
catagggttattgagattgaaaatcccaacttagtaaagccaaagaccttgaaagctagagatgttgatgttggaaaaacaacagaactttcaaggcgtgaaagggaggagatagagaaacagagagcccatgagcgctatatgaggctgcaagagcaaggaaaaacagaacaagcaaagaaggatttagaacgtttagctcttatacgtcagcaaagggaagatgctgctaaaaagcgagaagaagagaaagctgcgaaagagcagaagaaggctgaagcgcgcaagtgaatttcctggaaaatgtcatgttgccaaatttactccatattagtangaggatatgtactcttactacacttcaacatta

SEQ ID NO: 233656 - DNA, 402 bp, Glycine max
  unsure (1)..(402): unsure at all n locations
cctaaccagagagcagacttggtattagcctgcaggatccgtgaaaggaaagagtcggtgacagtgttactatgtggcactagtggctgcggcaaatctacattgtctgcattgctgggaagtaggttgggaatcacgacagtggtatcgaccgattctattcggcacatgatgagaagttttgctaatgataaagaaaaccccttgttgtgggcttctacgtaccatgcatgggagtgtttggaccctgttgctgttgcagaagcaaaggctagaaggaaagcaaaaaagctggctggtgtgtcacattcagttttcaaaggaacatgtaactgagggtcacaattctagcanatctgatgttaggacgttggagatgagctctggtcctactgaactgct

SEQ ID NO: 233657 - DNA, 271 bp, Glycine max
aacaaacaacttttcacacatgaccatgctacctcattcattaactatgattgcaacactaataatcatttttcttgcacaaacacttgtgggggtgagttcacttcctgaagctgataaaataaccaatttgccggggcagccacgggtcgaatttcagcaatattctggttatgtcaccgtggatgatcaaaatcaaagagctttgttttactactttgttgaggctgaagaaaacccttcttccaagccattagtcctatggttgaat

SEQ ID NO: 233658 - DNA, 486 bp, Glycine max
gatatgaatgacgtggcatatagaagagctatgacgtcgcatgcacgcgtacgtaagctcggaattcggctcgaggccaaatgtctcttctattacgaagaccacctggtcgcgaagcttatccaggggatgttttttatttacattcacgtcttttggaaagagccgctaaattaagttctcagttaggcgaaggaagtatgactgctttaccaatagttgaaactcaatcgggagatgtttcagcttatattcctactaatgtaatttccattacagatggccagatattcttatctgccgatctattcaatgctggaatcagacccgctattaatgtaggtatttccgtttccagagttggatcggcggctcagattaaagccatgaaacaagtagctggtaaattaaaattgggattagcacagttcgcagaattagaagcttttgcccaattcgcattcgatctcgatagaactactcaga

SEQ ID NO: 233659 - DNA, 392 bp, Glycine max
caagaaccaacctaccttttgcaatctcaattcaatggcgtcctctctcattgcgaagcgcttcctctcctcttccctcctctccaggtccctccttcgccccgccgcttccgcttcccaccgctctttcaacaccaacgccatgcgccagtatgacaaccgcgccgacgaccacagcaccgacatcgatcgtcactccgaacgctctttccctagcactgcgcgccgcgacgatatcttctcagatgtgttggatccattttttccgactcggagtttgagccaggttctgaacatgatggaccaggtcatggacaatccgttcctctccgcgtcgcgcgggatcggagctggcgctggagtgcgtcgcggatgggacgcgagggagacag

SEQ ID NO: 233660 - DNA, 392 bp, Glycine max
ctggtagcatcacaaccgccaccagccttgacttcccagccctctggcttctcaaactcagtgcccagtatggatcactccgcaagaatgctatgttcgtgccacactacaccctgaacgcgaacagcataatatacgcattgaatgggcgggcattggtacaagtggtgaattgcaatggtgagagagtgtttgatggagagctgcaagagggaggggtgctgatcgttccacaaaactttgcggtggctgcaaaatcccagagcgataactttgagtatgtgtcattcaagaccaatgatagaccctcgatcggaaaccttgcaggggcaaactcattgttgaacgcattgccagaggaagtgattcagcacacttttaacctaaagagc

SEQ ID NO: 233661 - DNA, 383 bp, Glycine max
atttgtgtcactggatggactgccactccaatgcaggatgttcaggttacaattgattggtttatttcctctcatgaatgtgttcccaggacctattgtgttttaaatccacaaaatccttttgtgttaaataggtggatggggaaactgactttcccccaaggcacttcccgaagtgtcaaaagaatgcctctttctatagggggaggagctggtgcaaagaatgctattctcatgaatatgccaaatgctgttctttcaatgtggagatattttgttggagatctcgtctttgaagtttctaagatgacttctccctacattaaatgtacagtcactttcttcatagcatttggaaatttggctgatgcacacatcaattt

SEQ ID NO: 233662 - DNA, 426 bp, Glycine max
taaccccggaatccggtccaaaatcgggaatttgggtttccttccgctggtccgttggttaaattcaataaaggaaattaggcatgacgtttgaaatgtggagttctgagtgggcaaatcaaacttcatggcatttgagtttccttattgacaatcccaaacagtctacagtttttgataatctcttgggaatttctcaagattttgaaattgctggtaatactcttatgccagctttttctgttccacaggctactgccagatcttctgaaaatgcggaatcctctgcatgatctggaatttgtgttttctttcgcttgttcgtttgtttaattcaataaaggaaattatgcatgaccctcttgttgagtatgctctgcctatttgaaaatttccacacctcttttaattgtcgtaatgatgtgt

SEQ ID NO: 233663 - DNA, 308 bp, Glycine max
  unsure (1)..(308): unsure at all n locations
tctcaagactgtgaattatggaatcctgcttgcacaaaagcaatgactatgtcatttaatccaaacccgtgttctgatgcatggagtttggaatttctgaagcgtaccggatttcattgtgatatcatttgtgtcattgggtccnaaatcccattgacagacacgtgggaaattcacaagatttcgaatgtgctggtaataatcttatgcaagctttgtcagttcgacatgctaatgacagatcttctgaaaatgcggaatcctctgcaagatctggaacttgagttttccttcgcttgttcgattgt

SEQ ID NO: 233664 - DNA, 323 bp, Glycine max
ggcaacagtgagaacaccattgaattttgattctagcaagcagagcttttgtcaattctctattgatcttcttggtggaggaattttagtggacaaaactggagattggatcacacttatacaaaattctccaattagtaacttgttgagagttgctgcttggaagaaaggctgtttaatggttaagattgtgatgtctgggaatgcagcagtcaaaaggagtgattgggcctcattggtacaagtgtttttaacaaacagcaacagtacagaacattttgaagcaagttaatggacaaaatccggaacaaaatcctgggaaa

SEQ ID NO: 233665 - DNA, 354 bp, Glycine max
aggaaccctagctagggtttggaagaagctgatccgagaagatggtgcagcgtctcacctaccgcaaacgccacagctatgctaccaaatccaaccagcacagagtcgtcaagactcccggtggcaagcttgtttatcagaccacgaagaagagggccagcggacccaagtgccctgtcactggaaagaggattcaagggattccacatttaaggccagcagagtataatagattaaggttacacagaaaccgaaggactgtgaaccgtgcatatggtggtgtgttgtctggcagtgctgttagagaaagatcattcgagcttccttggttgaagagcaaaagattgtgaaaaa

SEQ ID NO: 233666 - DNA, 381 bp, Glycine max
  unsure (1)..(381): unsure at all n locations
tagaatttgtagtaattattataagtattagaagcagcaattcttatttatttcagattaatacttgataacctaaacaatatatctatatatagaatatagatagatatatatataatagaacgtacaagaaaaaaagaataataaatagaaaaaggagcatgttgattatatagaaagtaaagggcaacaatcatttttgtttaccatgggtaaggacaccatcgctgacataataacctatataagaaatgctgacatgaataataaaggaatggttcanataccatttactaacataacagaaaacattgtacaaatactttacgcgagggttttgttgaaaacgtcagagtacatanagaaaacgacaaatatttt

SEQ ID NO: 233667 - DNA, 357 bp, Glycine max
caagcctacaggcactgagacttgatgggaatcctctcagaagcattcgaagaactgtgttggataaaggaactaaagctgttctgcaatatttgaaggacaaattgccagagcaatagtgtttttagttttttccctcctttgaaagtgttgtgcttgacatgaacagcaatatttaaagtgtccaatttttttttcaggtgtcacattctgtgtttgctctttattttgttcaattattttcccgtggtacctctgcttttgtgtgctatttcatgtaacaattttgacggtttgaatatttaacattatcaactaatttgcatggcttaaaaaaaaaaaaaaaaaggccggccc

SEQ ID NO: 233668 - DNA, 404 bp, Glycine max
  unsure (1)..(404): unsure at all n locations
gatgcagatcttcgtcaagaccctcaccggcaagaccatcacccttgaggtggaaagctctgacaccatcgacaacgtcaaggccaagatccaggacaaggaaggaatccccccggaccagcaacgtctcattttcgccggaaagcaacttgaggacggccgtacccttgctgactacaacattcagaaggagagtactcttcacctcgtcctccgtctccgtggtggcatgcagatcttcgttaagacactcaccggcaagaccataaccctagaggttgaaagctccgacaccatcgataacgtcaaggccaagatccaggacaaggagggtatccccccggaccagcaacgtctcatcttcgccggaaagcagctcgaggacngccgcaccctcgccgact

SEQ ID NO: 233669 - DNA, 384 bp, Glycine max
atggagtttggaatttctgaagcgtaccggatttcattgtgatatcatttgtgtcactggatggactgccaccccaatgcaggatgttcaggttacaattgattggtttatttcctctcaggaatgtgttcccaggacctattgtgttttaaatccacaaaatccttttgtgttaaataggtggatgggaaaactgactttccctcagggcacttcccgaagtgttaagagaatgcctctttctatagggggaggagctggtgcaaagaatgctattctcatgaatatgccaaatgctgttctttcaatgtggagatattttgttggagatctcgtctttgaagtttctaagatgactttcccctacattaaatgtacagtctc

SEQ ID NO: 233670 - DNA, 375 bp, Glycine max
atggcgtttggaatttctgaagcgtaccggatttcattgtgatatcatttgtgtcactggatggactgccaccccaatgcaggatgttcaggttacaattgattggtttatttcctctcaggaatgtgttcccacgacctattgtgttttaaatccacaaaatccttttgtgttaaatacgtggatgggaaaactgactttccctcatggcacttctcgaagtgttaagagaatgcctctttctatacggggacgagctggtgcaaagaatgctattctcatgaatatgccagatgctgttctttcaatgtggagatattttgttggagatctcgtctttgaagtttctaagatgacttctccctacattaaatg

SEQ ID NO: 233671 - DNA, 505 bp, Glycine max
ggtgtcgtcgtggaatgagtcatgtgtgcctatgccagagctatgacgacgcatgcacgcgtacgtaacctcggaattcggctccaaggcattttgatgcatgtaagtggacaaaatcagaaccacattcctgggaattaatcttcccaatagacgtatgtggtcctaataatggttttgaaatgtggagttctgagtgggcaaatcaaacttcatggcatttgagtttccttagtgacaatcccaaacagtctacagtttttgatattctcttgggaatctctcaagattttgaaattgctggtaatactcttatgccagctttttctgttccacaggctactgccagatcttctgaaaatgcggaatcctctgcatgatctggaattcgtgttttctttcgcttgttcgtttgtttaattcaataaaggaaattaggcaatgacctcttgttgagtatgctctgcctatctgaaaaatttcacaccttcttttaattgtcgta

SEQ ID NO: 233672 - DNA, 491 bp, Glycine max
tgaatgaattaggttgactatgcaagactatgacatcgcgtgcacgcgtacgtaagctcggaattcagctccgcgaacgttgcttccagtttgtcgcgcgttttcgcacaaaagtcgctggaatggttcatcacactggaagtagttggacctaataaagggtttgacatgtggagatctgagtgggtaaatgatttttcatggaatattgagtatccgaagtgacaatcggagccagtctacagtttttggaaatgtcttgggaatctctcaggattttgatattgctggtaatactcttatgccagctttttctgttccacatgctactgccagatcttctgaagatacaggatcctctgcatgatctggaattcgtgttttctttcgcattgtcctttggtttaagtcagtacaggaaatttaggcatgaacctcttgtttagtatgctctgcctatctgaaaatttcaacacctctttaaattgctc

SEQ ID NO: 233673 - DNA, 373 bp, Glycine max
ggaatccggcccaaaaccaaaatgaccaatttaacaatcctcctcatctctcttcccttctgcatcgcccaaacttgcagcgcctccaaatggcagcaccagcaagatagctgccgcaagcagctccagggggtgaacctcacgccctgcgagaagcacatcatggagaagatccaaggccgcggcgatgacgatgatgatgatgacgacgacaatcacattctcaggaccatgcggggaagaatcaactacataacgaggaaccaaggaaaagacgaatacgaagaagaagaaggacacatgcacaagtgctgcacagaaatgagcgagctgagaagcccaaatgccagtgcaaagcgctgcagaagataat

SEQ ID NO: 233674 - DNA, 502 bp, Glycine max
gacgacgctcgcgcaagctatccgcatgcaaggacagaacacttgcatgcgtgcaggtcgactctagaggatcccctcggggaattccaattccacattttcaagaaataaggaggcaaaaatgttcatatatgaattggaattatttgttttcttattaggcctatcctgaagccaaaggaaatgagatcggaattcctcggggaattccaattccacattttcaagaaataaggaggcaaaaatgttcatatatgaattggaattatttgttttcttattaggcctatcctgaagccaaaggaaatgagatcggaattcctcggggaattccaattccacattttcaagaaataaggaggcaaaaatgttcatatatgaattggaattatttgttttcttattaggcctatcctgaagccaaaggaaatgagatcggaattcctcgggggtaccgagctcgaattccctatagtgagtcgtattaaattcgtaatcatgt

SEQ ID NO: 233675 - DNA, 376 bp, Glycine max
ctcaatctcacttcttacccatttcatcgtcgcctcattctcctttcttgttctgtttttagtttcactgttctctgataacaacgttgttaattgtcaccatggttgttctgtctcaaccagcattaaaccagtttttccttctgaatacatgcaagcccacgcccttgttcgcggggattcctgtggtcgacctcacagatcccgatgccaagaaccacatagtcaatgcctgcagggacttctgcttcttcaacctcgtgaaccacggtgttccgttacagttcatggacaatttggaaaacgaaaccctcgggttcttcaaaaaacctcaatcccataaatacacggctggtcgccctgactcttttggcta

SEQ ID NO: 233676 - DNA, 357 bp, Glycine max
aggacgcacctgctgttggcttgttgttcaaggatggcaatttgtaagaaagatgtttggagagttgaatgtggaatcccttctggatttccgctcacagttatttgcaatagcatttttaatgagatgctcattagatatagctatgaaaaattactgcgccaggctaaagctccaagtatgtttttacaatccttcaaaaattttgtttctttgtgtgtgtatggtgatgataacttaattagtgttcatgaatatgtcaagccttactttagtggttctaaattgaaaagctttctagctagtcataacatcaccattactgatggtattgacaaaactagtgcaactttgcaa

SEQ ID NO: 233677 - DNA, 405 bp, Glycine max
cgccaattcaccacttgcctttctcgctaccctacttcaaagggtgctataatattcggggatgcacctaacaacatgcgacagtttcaaaaccaagatattttccacgatttggccttcaccccattaaccatcaccctgcagggagagtacaacgtgagagtcaactcaataagaatcaaccagcacagtgtgttcccactgaacaagatatcatccaccatcgtagggtcgacctctggaggaaccatgattagcacctcaactcctcacatggttctccagcaatccgtgtaccaggctttcactcaggtgtttgctcagcagctaccaaaacaagcacaggttgaaatctgtggcaccattttgggtaatgcctcaactccaacaagatcaatgcatatc

SEQ ID NO: 233678 - DNA, 505 bp, Glycine max
  unsure (1)..(505): unsure at all n locations
gcccagcgcgccgccacgaatgaattaggttgactatgcaaaactatgactacncatgcacgcgtacgtaagctcggaattcggctccagggaagttccgacttccaaaactggaaagcacggtcacgctaagtgtcactttgttggaattgatattttcactgccaagaaacttgaggatattgtgccctcttctcacaactgtgatgttcctcatgtgaatcgtactgattaccagctcattgatattgctgaggatggatttttgagtctgcttactgaaaatggtaacactaaggatgacctcaagcttcccactgatgagagtctgctcactcagataaaggatggatttgctgagggcaaggatcttgttgtgtctgtcatgtctgctatgggtgaggaacagatttgtgccctcaaggatattgggccaaagaactagcttttggtgcttgttgcctgttaatttcaatttctatttaagcanagatatttttgtaac

SEQ ID NO: 233679 - DNA, 378 bp, Glycine max
  unsure (1)..(378): unsure at all n locations
atgcacgcgtacgtaagctccggaatccgctccagaaacaaaggttcccaagaaaaaaaagtgctggaaattcatgttgagaaaggcatgcagcagggtcagaagattgtttttgaaggacaagctgatgaagctcctgacacaatcacaggagacattgtttttgtattgcaagtaaaggatcacccaaagttcagaagggagcaggatgacctctatattgatcacaatctcagcttaaccgaggcactctgtggcttccagtttgctgtcaaacatcttgatggtangcaactattgatcaaatcaaaccctgnggaagtcatcaaaccaggtcaatataaagcaataaatgatgaaggaatgccacaacacaat

SEQ ID NO: 233680 - DNA, 401 bp, Glycine max
  unsure (1)..(401): unsure at all n locations
ctctctctctcctgtatttgtcttgattccgatgcgaatggtaattgcagaaaccccaaccctcctttcctctccctcctcctagatcgagtcagaatcatggccaaagctgaaggtggcaaggaaccaataaatgaacaagcagtagcaaatatgtatgctgcaatgaggtctgagctcaaccaaatttactccaaaataactgaactggagatggaagttagtgagcacacattggttaccaatgccattcaaccacttgaccaatctagacgatgctatcgtatgattggaggggtgcttgtggagagaaccatcaaagaggtcttgcctgctgtgcagcgaaataaagaaggactcgaanaggttgtggcaaggcttaacgaggcgttggaaaagaa

SEQ ID NO: 233681 - DNA, 374 bp, Glycine max
cacagaatgagaatgatccaaataatacgactatttttgttggcaatttggatcctaatgtaaccgatgatcatctgaggcaagttttcagccagtatggagaattagttcatgtgaagattccagcaggcaagcgatgtgggtttgtccaatttgcagacaggagctgtgctgaagaggcccttcgggtgttgaatgggacgctgttgggtggacaaaatgtgcgtctttcatggggtcgcagtccttcaaacaaacatgctcaggcagatccaaaccagtggaatggtgctgctggtgctggttctggtggtggatattatgggtatgctgctcaaggatatgaaaattatggttatgctcctgctggacag

SEQ ID NO: 233682 - DNA, 401 bp, Glycine max
aacaaatccttcacttgttgctcgtcttagtttctgtgttgtgtcatttttattgctatatcctaattaaacttcaccctcaaaatgagtgatcccacactagcacaaccacacctagtcgaagtccacacaacactcgaaaccgttgttaccacacacaaccataaccatagaccctcaataaatgcctcaggtgaaaagaagaaaattgtgggggtgttctacaaagggaatgagtatgctaaattgaaccccaatttcgtggggtgtgttgaaggagcattgggtatacgtgagtggctggaatcacagggtcatcagtacattgtcactgatgacaaagaaggaccagattctgaacttgagaaacacattccagatgcccatgtcatcatatctac

SEQ ID NO: 233683 - DNA, 489 bp, Glycine max
  unsure (1)..(489): unsure at all n locations
tgaattgaatttaggtggacactatagaagagcatatgacgtcgcatgcacgcgtacgtaagctcggaaagtagccaaggttctcattacctatgatgcctccaccagcctcttggttgcttctttggtctacccttcacagagaaccagcaatatcctctccgatgtggtcgatttgaagacttctcttcccgagtgggtgaggatagggttctctgctgccacgggactcgacatacctggggaatcgcatgacgtgctttcttggtcttttgcttccaatttgccacacgctagcagtaacattgatcctttggatcttacaagctttgtgttgcatgaggccatctaaatgtgacagatcgaaggaagaaagtgtaattagacgactctcactactcgattgccagtgattggcantggtaaataatataattgtaatcctttcacaactaggaaaaaccggatcgcccttcacgccgtgggcag

SEQ ID NO: 233684 - DNA, 361 bp, Glycine max
gattgtttctcctgagactaagaactctctctctgatccctaccctttcaatttgatgtttcagacttccattggtccctccggcttcagccctggctttatgagacccgagactgcccagggcattttcgtcaattttaaggatttgtattattacaatggcaacaagcttcctttcgctgctgcgcagattggccaagcgtttaggaatgaggtgggttcatgattttcgtggcaatttagactttattttttttatactttctaaattagatatagtctttgcatgaattgggttggatgttgtttgtgtgtttagatatctccacgacaggggcttctgagagtgcgggagttcacg

SEQ ID NO: 233685 - DNA, 391 bp, Glycine max
aattattaacacttccttagttcaatatggggaagcccttcactctctctctttcttccctttgcttgctactcttgtcgagtgcatgctttgctattagctccagcaagctcaacgagtgccaactcaacaacctcaacgcgttggaacccgaccaccgcgttgagtccgaaggtggtttgattcaaacatggaactctcaacaccctgagctgaaatgcgccggtgtcactgtttccaaactcaccctcaaccgcaatggcctccacttgccatcttactcaccttatccccggatgatcatcatcgcccaagggaaaggagcacttggagttgcaattccaggatgtcctgagacgtttgaggagccacaagaacaatcaaacagaag

SEQ ID NO: 233686 - DNA, 522 bp, Glycine max
  unsure (1)..(522): unsure at all n locations
agcnctcagtggtcgccgcgcctcgaattgaattacgtgtgactatgcaagagcagtgacgtcgcatgcacgcgtacgtaagcccggaattcggctcgaggtccggtagacgtcggcaggaggccccgggaaagagttatcttttctgtttaacagcctgcccaccctggaaacggctcagccggaggtanggtccagcggctggaagagcaccgcacgtcgcgtggtgtccggtgcgcccccggcggcccttgaaaatccggaggaccgagtgcctcccacgcccggtcgtactcataaccgcatcaggtctccaaggtgaacagcctctggtcgatggaacaatgtatgcaatggaagtcggcaaaatggatccgtaacctcgggaaaaggattggctctgaaggctgngcacggnggtcccagtcccgaacccgtcngctgtcggtggactgctcgagctgcttccgcngcgagagcgggtcgtcccgtgccggtcgggggacggattggggaacgggc

SEQ ID NO: 233687 - DNA, 402 bp, Glycine max
gctaaattactttctttccattttccttcgttttctctctctttctcagtttctcagtttctcagtcatcaccatcgcagcagcaagatgtggaaccaaccattcggaaaaaccgatttggaaagcggttctcggcctctgtatccgatgatgctcgagagccctgaactgcggtggtcgttcatcagaaaagtgtactccataatcgccatccagttgctcgtaaccatcgtcgtcggcgccgtcgtcgtcaccgtccgcccaatcagtgtcttcttcgccaccaccggcgccggactggctctctacatcgtcctcatttttgttccctttataacgttgtgtccactttactactattcccagaagcatcccgtcaattacttgctcctaggggttttc

SEQ ID NO: 233688 - DNA, 225 bp, Glycine max
gcaagaacaagactgccgagactgctgaggcagcgaagcagataaccgcacatgcaaaggacaacgccaaggaaaatgtgagtggtgcagatgaaggagcaaggaggaaaatggaggacctaaggcttcgaggtaaagggtatggaagtcatgaatctgcacgggggcgtggagataaggtggtggtgataatgctgacacagtaatcaggggcatttgcagctt

SEQ ID NO: 233689 - DNA, 392 bp, Glycine max
  unsure (1)..(392): unsure at all n locations
aagaatcaaagaaaggggtggtggctgcttcgaaagcttaataatttgtttatttccagaacatcatagttttcgcagcagcaaactaacaaattactcatatcatataataagatggcccgttctctctcgcaagccaaacgtattggtgtccttgttgctcaatctatctccctaattcccgttcatcggcgaggttacgcagtggcatccgatgtatcggtaagagttggattgggtaatattgggcgaaggaatggaatcgtgggaggtgtagaagagaagcctgatacaagagatggttcanaagcctactcaactgattgggccccagacccagtaacaggttactatanggccattaaccacacccctgaaattgacccggtgga

SEQ ID NO: 233690 - DNA, 372 bp, Glycine max
aagaatcaaagaaaggggtggtggctgcttcgaaagcttaataatttgtttatttccagaacatcatagttttcgcagcagcaaactaacaaattactcatatcatataataagatggcccgttctctctcgcaagccaaacgtattggtgtccttgttgctcaatctatctccctaattcccgttcatcggcgaggttacgcagtggcatccgatgtatcggtaagagttggattgggtaatattgggcgaaggaatggaatcgtgggaggtgtacaagagaagcctgatacaagagatggttcagaagcctactcaactgattgggccccagacccagtaacaggttactataggcccattaaccacacc

SEQ ID NO: 233691 - DNA, 262 bp, Glycine max
ctcaaacgaagcccttttctctctctcttcaatttcacccttttagcatttgtacattcctttcccttccttgaatcgttcttaattgcgagaggggatatcggagaagttgattggcctcccattaattgcaggtctgaatgatctgatggagtctaaagttgggaagaagaagtcgtctagtagtaagtcccttttgtacgaagctcctctcgattacaccattgaagacgttcgaccacacggtggaattaagaagttc

SEQ ID NO: 233692 - DNA, 389 bp, Glycine max
gatcttcttccttaccatttccttgtggggagttaaggtatcaagtgaagagcaccaccaccatggcaaatctaaagagggaaaggaggagacaggaagaagaagctaaaaaatgggcagaagagaaggctgaaagggagcaagaacaagctacgagagaagcagaagaagcacagagggaacaagaacaagctaaaagagaagcagcacagagggaacaagaacgggcaaaaagagagcaagaaaggaggcggcgagaagaagtagctggaaagggagaagaggaggaagaacacgcaggaagagggcacgaaaggagaaaagaagaagaagaaacagcacggagggaacaagaacaagaacaggctgaaagacagcaacaaaagaga

SEQ ID NO: 233693 - DNA, 361 bp, Glycine max
aaaaaaaaaaaaaaaaaaaaaaaaaaaaaaaaaaaaaaaaaaaaaaaaaaaaaaaaaaaaaaaaaaaaaaaaaaaaaaaaaaaaaaaaaaaaaaaaaaaaaaaaaaaaaaaaaaaaaaaaaaaaaaaaaaaaagaagggggggcccccaaaaatgggccccgtcacccgggaaattatttcgggccgggtcctggaggggttaaaattttccccaagggggatcccttttaggcttggggttacccagggcaaaagctgttcccgggggaaatttgttaccggcccaaatttccaaaaacttaagaaccggggaccaaaagttttaacccgggggggccctaaggggtgggaaaccccaaa

SEQ ID NO: 233694 - DNA, 384 bp, Glycine max
gaagaacatgggtttgacgaacaccatggtagtgctaacggtgtgtatggtgctacttttccttgtgaggggtactacaagtgccaacttgatgctaagtaaccttggcctgcgcatgaaaagtgatcatcatcagcactcaaatcatgatcagtcctcaaaaccatgctgtgatcaatgcgcatgcacaaagtcataccctcctcaatgccgctgttcatatatgaggctgaattcgtgccattcagcttgcagatcttgtaattgcacattaacgtctcctgcacaatgtttctgtgctgacataagcgcattctgctatgaagcttgcagacccagtgaggatgacaacgatttctactaatgaacaagtgttacgcatgt

SEQ ID NO: 233695 - DNA, 389 bp, Glycine max
gctactggaagcccatttgtgtgcagggttcatattgccctcaagttgaagggagttcaatacaaatatgtcgaagaaaatttgaggaacaagagtgaactgcttctcaaatccaacccagttcacaagaaggttccagtgtttattcacaatgagaagcccatagcagagtctcttgtgattgttgaatacattgatgagacatggaagaacaaccccatcttgccttctgatccttaccaaagagccttggctcgtttctggtccaaattcattgatgataaggtttttggtgctgcatggaaatccgttttcacagctgatgagaaagagcgtgagaagaatgttgaggaagcaattgaggctctgcagtttcttgagaatgagat

SEQ ID NO: 233696 - DNA, 341 bp, Glycine max
agggtgatttgatcgcagtgcctactggtgttgcatggtggatgtacaacaatgaagacactcctgttgttgccgtttctattattgacaccaacagcttggagaaccagctcgaccagatgcctaggagattctatcttgctgggaaccaagagcaagagtttctaaaatatcagcaagagcaaggaggtcatcaaagccagaaaggaaagcatcagcaagaagaagaaaacgaaggaggcagcatattgagtggcttcaccctggaattcttggaacatgcattcagcgtggacaagcagatagcgaaaaacctacaaggagagaacgaaggggaagac

SEQ ID NO: 233697 - DNA, 407 bp, Glycine max
  unsure (1)..(407): unsure at all n locations
ctcgagccgattcggctcgagaggcaacatgggaacatcggtggcccttactatggaaccaacaccgcagacaccggtactggtcccagaagtggaaccacgggcggcaccggttatggaggcactggtggcactgattatggaacaactggtggcactggttatggaagtggaactgggtatggagtcaacactgggggtgcgcacactgaagcaggatatangaaggaacatcgtcagcatgaccaatctcatggtgatcagaacgagaagaaagggattatggacaagattaaggagaagcttcctggaggacacagtgacaagtagatgcatcgtgcatcatgcatgcatgcatatatataatattgttgtctttgaataaatttgctgcatatgtacttacg

SEQ ID NO: 233698 - DNA, 400 bp, Glycine max
aaagattagaaatcgacatatggggggagcaaagagttactcttgttttgcagtaatagctgtggccttggttttgctacttctgaatgtggctgtggtttgcaatggaggcaagacaagcacattcattaggaaggttgagaaaactgaggacatgccccttcatagtgatgtatttgttgccccttctggctataatgctcctcagcaggttcatataacacaaggtgaccaagtgggaagggccatgatcgtgtcatgggtgactgtggacgaaccaggaaagagtctagtgcattactggagtgacgccagccagcacaagagagtggccaagggaaatcatgtcacatatagatacttcaattattcttctggttttatacatcactgcaccctt

SEQ ID NO: 233699 - DNA, 362 bp, Glycine max
taaaattcttccaccaagttatgggtttccttgtgttgcttcttttctccctcttaggtctctcttctagttccagcatatcaactcatcgttccatattggaccttgacctaaccaagtttaccacacagaaacaggtgtcttcactgttccaactatggaagagtgagcatggacgtgtctaccataaccacgaagaagaggcaaagagacttgagattttcaagaataacttgaactatatcagggacatgaatgcaaacagaaaatcaccccattctcatcgtttaggattgaacaagtttgctgacatcactcctcaagagttcagcaaaaagtacttgcaagctcccaaggatgtg

SEQ ID NO: 233700 - DNA, 380 bp, Glycine max
cttttcacttcaactctaaaaggttccaaactctcttcaaaaaccaatatggccacgttcgcgtcctccagaggttcaacaaacgctcccaacagcttcagaatctccgagactaccgcattttggagttcaactccaaacccaacacccttcttctcccccaccatgctgacgctgattacctcatcgttatccttaacgggactgccattcttaccttggtgaacaacgacgaccgagactcttacaaccttcaatctggcgatgccctaagagtccctgcaggaaccacatactatgtggttaaccctgacaacgacgagaatctcagaatgataacactcgccatacccgttaacataccccgtagatttgagagt

SEQ ID NO: 233701 - DNA, 405 bp, Glycine max
  unsure (1)..(405): unsure at all n locations
atgagtttgaagaacaacatggtggtgctaaaggtgtgtttgttgcttcttttccttgtgggggttacagctgcacgcatggaactgagcttcttcaaaagtgatcagtcatcaagttatgatgatgatgagtattcaaaaccatgctgtgatctctgcatgtgcacacgctcaatgcctcctcaatgcagctgtgaagatattaggctgaattcatgccactcagattgtaagagctgtatgtgcacacgctcacagccaggacagtgtcgttgtcttgacaccaacgacttctgctacaaaccttgcaagtccagagatgactagaaaaactaatagctctctcaaatggacgaagcccctttaggctttgtttgttatgttaagggagacanataaaacaag

SEQ ID NO: 233702 - DNA, 314 bp, Glycine max
accccggaattcggtccaaggtcatggaaaacaaacctacccttttgcttttgcccttggtcctttgcaatggattggcaacaacaacaatggccttcaataatgataagggtggtgataaaaattcaccaaaaagtttgtttttgatgagcaactccacaagggttttcaaaacggatgcaggggaaatgcttttgctgaaaacccatggtggtaggatattttataggcaaatgcacattggcttcacctcaatggaaccaaagtccttgtttgttccccattacctcgactccaatctcatcatattcatc

SEQ ID NO: 233703 - DNA, 197 bp, Glycine max
gacatcgcatgcacgccgtacgttaaccccggaatccggcccaagcaaaacttccacttgagagacaatagtgtatgaacactacacattttcaatttttcaatggcgtcgaggcagcctaccgaggatcgagctgaggcagctgcgaaagttgctgcgaaagaactcgaacaactcaaccgacaaagataccgtga

SEQ ID NO: 233704 - DNA, 268 bp, Glycine max
tggaaatgtctgctgtagtttacaaggattgggtttttacagatcaagcattgcctgctgatcttataaaaagaggaatggcaattgaggatccatcgtgccctcatggcattcgccttgtgatagaggactacccttatgctgttgatggacttgagatatgggatgctatcaagacatgggtccatgaatacgttttcttgtactacaaatcagatgacacacttagagaagatcctgaactccaagcctgctggaaagaactcgt

SEQ ID NO: 233705 - DNA, 400 bp, Glycine max
aaactttcatttcagagattttcatcatctcagcaaaggaatcaatcaatcaagccatggcaggcttcagtggcgacgaaaccgctcctttcttcggcttcctcggtgccgctgcggccctcgtcttctcctgtacgggagcggcgtatggaacggcgaaaagtggggtgggggtggcgtcgatgggagtgatgaggccggagctggtgatgaagtcgatcgtgccggtggttatggctggagtgttggggatttacgggttgattactgcagttattatcagcactgggataaacccaaacgctaagtcttactagctctttgatggatatgctcatttgtcctctggccttgcctgtggcctatctgagctctctgctggaatggccattgggattgt

SEQ ID NO: 233706 - DNA, 404 bp, Glycine max
agagagagaaaaatggctgatacaagtggaggagatgcagtgagaccggtggtaatatgtgataacaagtgtggctgcacagttccatgcactggtggttccacttgcaggtgcacaagtgtcggcatgacaactggaggcggtgatcacgtgacatgctcgtgcggagagtactgtgggtgcaatccatgctcatgtcccaagactgcggcttctggaactggttgcagatgtggcacagattgctcatgtgcctcttgccgcacttaacatcataccttaattaagtctcaaacttcacaaatcttgaatgtgctttaaatctagctatgtactagatagtctcgttcaatgttagtgttcaaattgtggatgtgatttctaatattagtctactactctat

SEQ ID NO: 233707 - DNA, 402 bp, Glycine max
ctcagaaccaaactcgccaaaactagggttttgcattgatggcactgtgcaaccgcgtcagatcgggaatctctctcttcaccaaatccacgttccttacttcccagcgatccagtctccaacgatccctcgttgcccctttcatttccctcgcctccagaaattacgccaacgtgccggggcaaaaggaaaccaaagttaaggtccctctggctttgtttggaggttcaggaaactaagcctccgctttggataatgcaaccgttaaagccaatgcaattgaaaagggtgagactgagcttctgcaatttgttgaggcagtaaagaatagtcccatattttcacagtttataagggacttgtctgtggctaaggatgttagagtgaaagttatccaggata

SEQ ID NO: 233708 - DNA, 366 bp, Glycine max
cttcaccgaggccaccgtcacacggccgtggaaattcaagcaccaacagtggaccaaagccaaccaggagggaaaggagatgaggaaacagttctcctccagtttggtaaagtaggggatgatacttttaccatggattatagacagcccctatctgctttccaggcttttgccatttgcttaactagctttggcactaaacttgcttgtgagtaatataattttggtgtcactgcttatttattccgtggatggatgttttaagtgaatagttgttttcttttttactcggctttaagtctacaatttgattgcaggaagcttgttgtaaatgttatatcatcaataggacatgacatctttcat

SEQ ID NO: 233709 - DNA, 394 bp, Glycine max
  unsure (1)..(394): unsure at all n locations
atatcctagtacaccgtattaaagaatttaagatatactatgatgagagcgcggttcccattactgttgctgggagttgttttcctggcatcagtttctgtctcatttggcattgcgtattgggaaaagcagaaccccagtcacaacaagtgcctccgaagttgcaatagcgagaaagactcctacaggaaccaagcatgccacgctcgttgcaacctccttaaggtggaggaagaagaagaatgcgaagaaggtcaaattccacgaccacgaccacaacacccggagagggaacgtcagcaacacggtgagaaggaggaagacgaaggtgagcagccacgtccattcncattcncacgcccacgccaacctcatcaagaggaagagcacgagc

SEQ ID NO: 233710 - DNA, 364 bp, Glycine max
tccctttctcacagcaatggccgccgcagcacgccctctcgtcaccgtgcaggccctcgacggtgacatggcaaccgatgcctccgccaccgttcccatccctgacgtcatgaaggcctctatccgccccgacatcgtcaatttcgtacactcgaacatctccaagaacagccgccagccatacgccgtcagtcgtcgcgctggtcaccagacctccgccgaatcctggggtaccggccgagccgtctcccgtatcccccgtgttcccggcggcggaacccaccgcgccggccaaggagcctttggaaacatgtgccgcggcggacgcatgttcgccccgaccaagatctggcgccgctggcat

SEQ ID NO: 233711 - DNA, 357 bp, Glycine max
  unsure (1)..(357): unsure at all n locations
gttgcaggacgcacctgagttgaccaagctgtggtgcatgatagttcagtgtctacaataccaggtgattttgtcattggtgttaagttgacaaccataaacaatatgtgtgcatatgggctcaatcctggtatttcaggttctcgtcttttgggcaccattcctcagtccatttcacagcaaactgtttggaatcaaatggcaacagtgagaacaccattgaattttgattctagcaagcagagcttttgtcaattctctattgatcttcttggtggaggaattttagtggacaaaactggagattggatcacacnttatacaaattctccaattagtaacttgttgagagttgct

SEQ ID NO: 233712 - DNA, 246 bp, Glycine max
gttattatcaaataattaattaaattcctcgtggaatcttgttgaagccatgtctacagctggtcaggtcatcaagtgcagagctgcggtggcatgggaagcagggaagccactatcgatagaaaccatagaagtggcaccaccccagaaaggtgaagtgcgtttgaagatcctcttcaactccctttgccgtacagatgtttactggtgggatgctaagggccagactccgctgtttcctcgtat

SEQ ID NO: 233713 - DNA, 387 bp, Glycine max
tatcattcaggtaactctctgcagctgttgcgttgaaaatgccaggcattaccattggagacactattcctgaccttcaagttgaaactaaccaaggaaaaatcaaccttcatcagttctgtgctgatggctggaccatccttttctctcacccaggtgatttcaccccggtttgtaccactgagcttggcaagatggctcagtatgctaaggagttttatcaacgaggagtgaagttattgggtttatcttgtgatgacgtacaatcccacaatgagtggatcaaagacattgaagcctacactccaagtgcgaaggtgaactatccaataattgctgatcccaagagagaaatcatcaagcaactcaacatggttgaccctgatg

SEQ ID NO: 233714 - DNA, 401 bp, Glycine max
atctaaacaaaaaatcaagaacaatggcttatgctaggcttgctcctatggctgtcttcttgcttgccacttccaccataatgttcccaacgaagatagaagcagcagattgtaatggtgcatgttcacctttcgagatgccaccgtgccgctcacgtgattgtcgttgtgtccctataggactagttgctggtttctgcatacatccaactggactttcatctgttgcgaagatgatcgacgaacatcccaacttatgtcaatctgatgatgaatgcatgaagaaaggaagtggcaatttttgcgctcgttaccctaataattatatcgattatggatggtgttttgattctgattctgaaccactgaaaggcttcttggccatgcctagggcaaccacc

SEQ ID NO: 233715 - DNA, 386 bp, Glycine max
  unsure (1)..(386): unsure at all n locations
aaaagacacaacccagaagacctagacaagaagaaccacgtgaaagaggatgcgagacaagaaacggggttgaggaaaatatctgcaccttgaagcttcacgagaacattgctcgcccttcacgcgctgacttctacaaccctaaagctggtcgcattagtaccctcaacagcctcaccctcccagccctccgccaattccaactcagtgcccaatatgttgtcctctacaagaatggaatttactctccacattggaatctgaatgcaaacagtgtgatctatgtgactcgaggacaaggaaaggttagagttgtgaactgccaagggaatgcagtgttcgacggtgagcttangangggacaattgctggtggtaccacagaac

SEQ ID NO: 233716 - DNA, 394 bp, Glycine max
acaagacgaggacgaggacgaagatgaagataaacctcgtcctagtcgaccaagccaaggaaagcgtgaacaagaccaggaccaggacgaggacgaagatgaagatgaagatcaacctcgcaagagccgcgaatggagatcgaaaaagacacaacccagaagacctagacaagaagaaccacgtgaaagaggatgcgagacaagaaacggggttgaggaaaatatctgcaccttgaagcttcacgagaacattgctcgcccttcacgcgctgacttctacaaccctaaagctggtcgcattagtaccctcaacagcctcaccctcccagccctccgccaattccaactcagtgcccaatatgttgtcctctacaagaatggaatttactctcca

SEQ ID NO: 233717 - DNA, 379 bp, Glycine max
  unsure (1)..(379): unsure at all n locations
cttcttcgtctcaaatctcttcgttccttcgattcgttccatttcttccaaaatggccaaagacccagttcgcgttctcgtcactggagctgcagggcaaattgggtatgctcttgtccctatgattgctangggagtgatgttgggtcctgaccagcccgtgatcctccacatgcttgacattcctccggcagcagagtcattgaatggggttaaaatggaattggtggatgctgcattccctcttcttaaaggtgttgttgccacaactgatgtggttgaggcatgcactggggtcaatattgccgtgatggttggtggattcccaagaaaagaaggtatggagaggaaggatgtgatgactaagaacgtctccatt

SEQ ID NO: 233718 - DNA, 440 bp, Glycine max
ctgccgaatgaattaggtgacatatagaagagcactgacgtcggacgcacgcgttcgttaaccccggaattcggctccgagaagaaatgaagagtactatcttctttgctctctttctagtttgtgccttcaccatctcatacctgccttcagccaccgctcagttcgtgctcgacactgatgatgatcctcttcaaaacggtggcacatactatatgttgccagttatgagaggaaagggcggtggaatagaagtagattcaactggaaaagaaatatgccctctcactgttgtgcaatcacccaatgagctcgataaggggattggaccagtctttacatctccattacatgccctttttatcgccgaaggctatcctttgagcattaagtctggttcatttgcagttataacgctgtgtgccggcatgcctactgag

SEQ ID NO: 233719 - DNA, 346 bp, Glycine max
agctgaggaagaatccccagaaggcttacttgaagactattacaccaaagtttcagacccttattgacctttctgttatagaaatcttgtcaaggcatgcatctgatgaggtgtaccttggggagagggacaatccaaattggacatctgatacaagagcattagaggcttttaaaaggtttggaaataaactggcacaaattgagaataaactctcagagagaaacaacgatgagaaactgagaaaccgttgtggaccagttcaaatgccttatactctgcttttgccttctagtaaggaaggattaactttcagaggaattcccaacagtatctctatctgaag

SEQ ID NO: 233720 - DNA, 366 bp, Glycine max
acaaggcagaaagcaagctcatcctagagttttaaaaatggcagcagcctcctccatggctctctcttccccatccttggctggcaaggccgtgaagctgggcccatcagcccccgaagtcgggagggtcagcatgaggaagaccgtcaccaagcaggcctcctccggaagcccatggtacggcccagaccgcgtcaagtacttgggcccattctctggcgagcccccgtcctacctcactggcgagttcccaggtgactacggctgggacactgctgggctttcggccgacccagaaaccttcgccagaaaccgtgagctcgaagtgatccactccaggtgggccatgctcggggccttgggctg

SEQ ID NO: 233721 - DNA, 380 bp, Glycine max
  unsure (1)..(380): unsure at all n locations
aatatgtcaagccttactttagtggttctaaattgaaaagctttctagctagtcataacatcaccattactgatggtattgacaaaactagtgcaactttgcaatttagaaagttagcagattgtgattttctcaagagaaactttaagcagatgtctaatgttttgtgggtggctcctgaggacaaggcgagtttatggtcacaacttcattatgtttcgtgtaataatctggaaatgcaagaagcttatcttgtcaatctcgtaaatgtgttacgagaattgtatttgcacagtccagaggaagctcgccaattgagaaggaaagctctctctcgtattgaatggctgcnaaaagctgatgtgcctancatagcacag

SEQ ID NO: 233722 - DNA, 349 bp, Glycine max
gtcgcgttgtgttgcgtcgtgtcgtgcgctgttcctctgtctgtcgtttttgttttcagaccaaaccctagctccgcatcgcaaccatgtcgaccaagcaaggtggaaaagctaagcctttgaagaaacccaagtctgataagaaggattacgacgaggttgacatggctaacattcagaagaaaaaggaagaggagaaggcgctaaaggagttgaaagccaaggcgcaacagaagggaagctttggaggttctgggctcaagaaaagtggaaagaaataagggctctttatcatgattgtatacatccaatattgagccctgtagtttattaccatgataacttctgt

SEQ ID NO: 233723 - DNA, 376 bp, Glycine max
caggcgcagagtagagcagcacagaagagggaaaacggcaccgccgccgtagaagaaaacaaccatggtgcacgtctccttttacaggaactatgggaagacattcaagaagccgcgtcgtccgtacgagaaggagcgtctcgacgcggagttgaagctggttggtgagtacgggcttcggtgcaagagagagctgtggagggtgcagtacgcgctcagccgcatccgcaacaacgcgcggaacctcctcaccctcgacgagaagaacccgcgccggatcttcgagggagaggcgctgctccgaaggatgttccgttacggtctcctcgatgagacacagaacaagcttgattacgtcctcgccctcaacgtccaa

SEQ ID NO: 233724 - DNA, 370 bp, Glycine max
ctttccttagttcaatatggggaagcccttcttcactctctctctttcttccctttgcttgctactcttgtcgagtgcatgctttgctattacctccagcaagttcaacgagtgccaactcaacaacctcaacgcgttggaacccgaccaccgcgttgagtccgaaggtggtcttattgaaacatggaactctcaacaccctgagctgcaatgcgccggtgtcactgtttccaaacgcaccctcaaccgcaacggcctccacttgccatcttactcaccttatccccaaatgatcattgtcgttcaagggaagggagcaattggatttgcatttccgggatgtcctgagacgtttgagaagccacaacag

SEQ ID NO: 233725 - DNA, 339 bp, Glycine max
ggcgttgtctctccaagcctgcagaggaaagactcctcggacttcgcgttcgcaaatgaaaacttgaaaccgccggtttccgccagattcagccaccggaaatccgttagagccagtcccgaaggagggaaggtggtggcgttgggagtggcgaaggcgaagaagcaggagacgttggagagcacgtggaggacgataacggaggggagagcgatgccgttaacgcggcatctgaagaaggcggagacgtgggagagggagacgccgttacgggacttgaacggagggggcaaattgatgaagaagtcggagacgttcgcggggagggagaagaacgcg

SEQ ID NO: 233726 - DNA, 362 bp, Glycine max
gcttgacaagctcaaggctgagcgcgaaagaggaattaccattgatattgctttgtggaagtttgaaaccaccaagtactactgcacagtcatcgatgcccccggacatcgtgactttatcaagaacatgattactggtacctcccaggctgattgtgctgtccttatcattgactccaccactggtggttttgaagctggtatttctaaggatggacagactcgtgagcatgctcttcttgctttcacccttggtgtgaagcagatgatctgctgctgtaacaagatggatgccactaccccgaagtactctaaggctaggtatgatgaaattgtgaaggaagtctcttcctacttgaaga

SEQ ID NO: 233727 - DNA, 351 bp, Glycine max
gtcttccatagccccccaaaaatgaagagcaccatcttctttgctctctttctcttttgtgccttcaccacctcatacctaccttcagccatcgctgatttcgtgctcgataatgaaggtaaccctcttgaaaatggtggcacatattatatcttgtcagacataacagcatttggtggaataagagcagccccaacgggaaatgaaagatgccctctcactgtggtgcaatctcgcaatgagctcgacaaagggattggaacaatcatctcgtccccatatcgaatccgttttatcgccgaaggccatcctttgagccttaagttcgattcatttgcagttaaaatgctg

SEQ ID NO: 233728 - DNA, 355 bp, Glycine max
gctcaccacaacaatcatcatgaaggtttcatgaatttcattcacagggatgacgaggttaattacttcccttcaaggtatgatcctgttcgtcatgcagaaacgttccccatacctcgtgctatctgcagtggaaggcgtgaaaagtgtggaattgagaacgagaacaactttaagcagcccggagagagataccgatcttgggcacctgacacgcaagatagatttaatcgccgatgggttgatgctttatctgacccacgggtctaccaagaaatccgcactttccggaaatcctaacggtcccaagctgaacgttctccaagccaaaacattgcaactccttcgaacctta

SEQ ID NO: 233729 - DNA, 378 bp, Glycine max
tgaagatgccaaacgcgggtcctgcaaagtggagacagattgttggagatgccatgattgaggtatccaaattgactacgaccgacacaagcgtgtaattctctctcagcacagcacattgagatggttgagctgcagacatcatcgattttcgaggcctttcaccataagctggtacattctggcgagattcaagagacagttgtacggaagatttcacaagaggaatggcttacagcttggtcgacacaggtgcgtcctgcaacaaccctgtgggcggatcggtgtccagagctgtacgacacggtgcatgacagtggagtgtcaacagtagcaggtgatcttgtcacaggtgtgaacttgacaacccttggccat

SEQ ID NO: 233730 - DNA, 487 bp, Glycine max
cgaatgtattaggtgacactatagaagagatatgacgtcgcatgcacgcgtacgtaagctcggaattcggctcgaggaaaaggattggctctgagggctgggcacgggggtcccagtcccgaacccgtcggctgtcggtggactgctcgagctgcttccgcggcgagagcgggtcgtcgcgtgccggtcgggggacggattgggaacgggcccttcggggcctcttccccgggcgtcgaacagtcaactcagaactggtacggacaaggggaatccgactgtttaattaaaacaaagcattgcgatggtccctgcggatgttgacgcaatgtgatttctgcccagtgctctgaatgtcaaagtgaagaaattcaaccaagcgcgggtaaacggcgggagtatctatgactctcttaaggtagccaaatgcctcgtcaaccaatttattacacccacatgattggattaccgagattcccactgtccc

SEQ ID NO: 233731 - DNA, 350 bp, Glycine max
ctgatgcaatactgctttctggggaaactgctcacggaaagttcccgctaaaagccgtgaaaggaatgcataccgtagcattactgacagaagccaccatacccggtggtcacatgccaccaaatattggtcaagtattcaacgagccacatgagtgagatatgtgcttaccatgcaaccatgatgtctaataccctcggaacctcaactgttgtcttcaccatattacgcttcatagctatccttttgagccactatcgagcttcaggcatcatatttgcttttacagattaccagaggatacaccagaagttggctttgtatcaaggagtctgtcctatttacatgga

SEQ ID NO: 233732 - DNA, 386 bp, Glycine max
agcgaaaccccaaataccaatccaatcctctcccaactcacaaagccatgtctccaggtcccgttgtcgacgcttcccctgaggttgatgcagagcaacaacttccctccgtcgatgacgccactcagaagaagataccccaaccacaggaggacgatgctccccttgtcgaggacttgaaggatgatgacaaagacgacgacgatgaagacgacgacgacgacgacgaagatgacaaggaagacgatgctcaaggtggtgctgagggttcaaagcagagcagaagtgagaagaagagccgaaaagcaatgttgaagctgggactgaaacctgttactggtgttagtagggtcacaatcaagagaacaaaaaatattcctttcctc

SEQ ID NO: 233733 - DNA, 365 bp, Glycine max
caccaagttatgggtttccttgtgttgcttcttttctccctcttaggtctctcttctagttccagcatatcaactcatcgttccatattggaccttgacctaaccaagtttaccacacagaaacaggtgtcttcactgttccaactatggaagagtgagcatggacgtgtctaccataaccacgaagaagaggcaaagagacttgagattttcaagaataacttgaactatatcagggacatgaatgcaaacagaaaatcaccccattctcatcgtttaggattgaacaagtttgctgacatcactcctcaagagttcagcaaaaagtacttgcaagctcccaaggatgtgtcgcagcaaatcaa

SEQ ID NO: 233734 - DNA, 356 bp, Glycine max
cgcgtattaccagatggttcgctgatggagattaccaaagtttatccattggatgcagtttttgacaatcttgatgatgtgccagaagatataaaagcaaacaagcgctatgccggttcatctaaatggacagttcaggaagttgctgaatctgttaaagaagactttggcagcatagatatccttgtgcactcacttgccaatggaccagaggtgaccaaaccattgttggagacatctcggaaaggatatcttgctgcaatatctgcatctagttactcctatgtttctttactcaagcattttcttccaatcttgaacccaggtggatcttcaatctctctgacatacattgc

SEQ ID NO: 233735 - DNA, 381 bp, Glycine max
ccgatgtgaatctatttgtttagttttctatcggtatgtatataggtgaataatccaacatgcctttttgtgaagtaaaaaaactaccctcgatccatgcctcaaaagggttgataataagtaaaaaaaatcaatgaattcatgataaaacccttctgcgtttttttattataaatttttttgtcaataaagggatcaaggggttgggggatcaaatggtaaagttcttttgttggtaaattggaggattagaaacatgactattgctttccaattagctgtttttgcattaattgctatttcatttattttattgattagtgtacctgttgtatttgcttctcctgaaggttggtcgaataacaaaaatgttgtaatttc

SEQ ID NO: 233736 - DNA, 385 bp, Glycine max
aacttattaacactttccttagttcaatatggggaagcccttcttcactctctctctttcttccctttgcttgctactcttgtcgagtgcatgctttgctattacctccagcaagttcaacgagtgccaactcaacaacctcaacgcgttggaactcgaccaccgcgttgagtccgaaggtggtcttattgaaacatggaactctcaacaccctgagctgcaatgcgccggtgtcactgtttccaaacgcatcctcaatcgcaacggcctccacttgccatcttactcaccttaatcccagatgatcattgtcgttcaagggaagggagcaattggatttgtatttccgggatgtcctgagacgtttgagaagccacaacagcaa

SEQ ID NO: 233737 - DNA, 340 bp, Glycine max
ctgcctctcacccgcagggtttagagaaaatttaacaattatggttgcttctcctttgccgacccatggctcccaaagctgatagttcaaagaaggctgatccaaaggcacaggccttgaaaactgccaaggcagttaagtccggtgctaactttaacaagaagagcaagaagatccgaacatctgttaccttccatcgaccaacgactttgagaaaggataggaaccccaaatatccacgcattagtgctccacccaggaacaagcttgatcactatcagatattgacgtttcctctcacgactgagtctgcaatgaagaagattgaagacaactacac

SEQ ID NO: 233738 - DNA, 365 bp, Glycine max
atgctcttgcagagattagtcaagggaattgggaaggctgccttcgatcagaaatatatactcccgaaattcagggcttaattgacaggttccagccagattttactgcaccttctggtgaatcacttagacaagtagaattccggatgattcacttcttaaatggaactgtccttgcattacatgaaaaactattagatttatcatcacatcaaaatgacaaccaggcatttgcacagaacaactcccatgctcttctcactaactcacttcacgaccaagatggaccttctctccctccaaaccaatgggatttgctcaacaggcaccggcctccattctcaaggaaaaagtctggtaagagc

SEQ ID NO: 233739 - DNA, 508 bp, Glycine max
  unsure (1)..(508): unsure at all n locations
cgcggcccngttcatggattgaatttaggtgacactatagaagagctatgacgtcgcatgcacgcgtacgtaagctccgaaatccgctccaaggtcaattatcccaagtataacctaataaattaattaagataccatgatgagagcacggttcccaatactggtgccgggacttggtttcctggcttcaatttccggtccaattgggattgcctaacgggaaaaaggaaaacccaaaacacaacaggtgtctccagagttgcaataccgagagagactcgtacaggaaccaagcatgccacgctcgttgcaacctccttaaggtggagaaagaagaatgtgaagaaggtgaaattccacgaccacgaccacgaccacaacacccggagagggaacctcagcaacccggtgagaaagatgaagacgangatgagcaaacacgtccaatcccattcccaaagccaacanctctcttcaggaagaagagcacgagcagagagatgaacag

SEQ ID NO: 233740 - DNA, 382 bp, Glycine max
taaacactcatcagtcatcaccatggccaagctagtttttttccctttgttttctgcttttcagtggctgctgcttcgctttcagttccagagagcagcctcagcaaaacgagtgccagatccaaaaactcaatgccctcaaaccggataaccgtatagagtcagaaggagggctcattgagacatggaaccctaacaacaagccattccagtgtgccggtgttgccctctctcgctgcaccctcaaccgcaacgcccttcgtagaccttcctacaccaacggtccccaggaaatctacatccaacaaggtaagggtatttttggcatgatatacccgggttgtcctagcacatttgaagagcctcaacaacctcaacaaag

SEQ ID NO: 233741 - DNA, 255 bp, Glycine max
gcgatctgtcacatttagatggcatgacgtgctttcttggtcttttgcttccaatttgccacacgctagcagtaacattgatcctttggatcttacaagctttgtgttgcatgaggccatctaaatgtgacagatcgaaggaagaaagtgtaataagacgactctcactactcgatcgctagtgattgtcattgttatatataataatgttatctttcacaacttatcgtaatgcatgtgaaactataacacatt

SEQ ID NO: 233742 - DNA, 357 bp, Glycine max
gagaccggtgtcttgaagcctggaatggtggtgacttttgcaccaactggactgacaactgaagtcaagtctgtggagatgcaccatgaatctcttacagaggcacatcctggtgacaatgtgggattcaatgttaagaatgttgctgttaaggatttgaagcgtggttatgttgcctcaaactcaaaggatgaccctgcaaaggaggctgctaacttcacagcccaagtcatcatcatgaaccaccctggtcagattggaaatggctatgcccctgtcctcgactgccacacttctcacattgctgtcaagtttgctgaactcatgaccaagattgacaggcgatccggcaaagag

SEQ ID NO: 233743 - DNA, 348 bp, Glycine max
acttaatcgatcatcacttcacttcactaagacatcatggcagacgagacccagaacaagtatgagagctctgaggttgaggtccaggatcgtggtgtttttgactttctcggtaagagtaaggatgaagaagacaagcctcatcctcaggaggaggtcatcgccaccgagtttcaaaaagtcactgtcgcagaccatggagagaagaagcacagcctcttagaaaagcttcaccgatctgacagcagctctagctcttcaagtgaggacgaaggagaagatggagagaaaaggaagaagaagaataaggaaaagaaagggctgaaagagaagatcgaggagaaaata

SEQ ID NO: 233744 - DNA, 366 bp, Glycine max
ggagggctcattgagacatggaaccctaacaacaagccattccagtgtgccggtgttgccctctctcgctgcaccctcaaccgcaacgcccttcgtagaccttcctacaccaacggtccccaggaaatctacatccaacaaggtaagggtatttttggcatgatatacccgggttgtcctagcacatttgaagagcctcaacaacctcaacaaagaggacaaagcagcagaccacaagaccgtcaccagaagatctataacttcagagagggtgatttgatcgcagtgcctactggtgttgcatggtggatgtacaacaatgaagacactcctgttgttgccgtttctattattgacaccaacagc

SEQ ID NO: 233745 - DNA, 383 bp, Glycine max
  unsure (1)..(383): unsure at all n locations
cctttgttcactcttcttctcttgcggctagggttttagcgcagcttcttctagatttaaggaagatgggtaaggaaaaggttcacatcagtattgtggtcattggccatgtcgactctgggaaatccactaccactggtcacctgatttacaagcttggaggcattgacaagcgtgttattgagaggtttgagaaggaagctgctgagatgaacaagaggtctttcaagtatgcctgggtgctggacaaacttaaggctgagcgtgaaagaggaatcaccattgatattgctttgtggaagtttgaaacaacaaagtattattgcacagttattgatgcgcctggacatanggatttcattaagaatatgattactgggaaa

SEQ ID NO: 233746 - DNA, 363 bp, Glycine max
ctcgagccgcaatcggccagcaccaacagcatcggcggcgacagtcactctccgacaacaacacttccgcggcgaaaaatgtctctggtggcgaacgaggatttccagcacattctgcgtgtgctgaacaccaacgtggatgggaagcagaagataatgttcgctatgacctccatcaagggtattggaaggagattcgccaacatcgcttgcaagaaggccgatgttgacatgaacaaaagggctggtgagttgagtgctgcagagttggatagtgtgatgactgtggtggcgaaccctaggcaattcaagatcccggattggtttttgaacaggaagaaggattacaaggatggaaagtac

SEQ ID NO: 233747 - DNA, 380 bp, Glycine max
  unsure (1)..(380): unsure at all n locations
gcaattcactctgtacaattcttcgttcgttctctgcagttatatcctttttgagcttcaatggcggacgctgaaaccttcgctttccaggctgagatcaaccagcttctaagtctcatcatcaacacattctacagcaacaaggagattttcttgcgtgaactcatcagcaatgcttctgatgtaagcctcttttgttatcactcactcactcttcgtagtccctgtttttttctttttttatgactcgaataaaagttcatcagttatatggcacatgaaatcaatcgcgtgtntttaatgaatgtggctttggttatactatgttgttcgaacattattgtttggttagtttgattctagaacactgaattgaattg

SEQ ID NO: 233748 - DNA, 477 bp, Glycine max
  unsure (1)..(477): unsure at all n locations
tgtgtattaggtgacactatagaagagctatgacgtcgcatgcacgcgtacgtaagctcggaattcggctcgaggtgaagcagaattcaccaagtgttggattctacccgccgctcgatgggaattgcgcttcaaggcgtctcgtagggctaatccgcctcacgagggtcaccaacggcacgtgcctttggggggccgaggccccctactgctggtcggcaaacggacggcgggcgcacgcgtcgcttctagcccggattctgacttagaggcgttcagtcataatccaacgcacggtagcttcgcgccactggcttttcaaccaagcgcgatgaccaattgtgcgaatcaacggttcctctcgtactatgttgaattactattgcgacactgtcatcagtanggtaaaactaacctgtctcacgaccgtctaaacccaactcacgttccctattggtgggtgaacaatcaagaagg

SEQ ID NO: 233749 - DNA, 504 bp, Glycine max
  unsure (1)..(504): unsure at all n locations
cggggggncgtcncacgaattgaatttaggtggacactatagaagacaatgacgtcgcatgcacgcgtacgttagctccggaattggctcgagtctgaagataaacctttcaacttgagaagccgcgaccccatctattccaacaagcttggcaagttgtttgagattaccccagagaaaaaccctcagcttcgggacttggatgtcttcctcagtgttgtggatatgaacgagggagctctttttctgccacacttcaattcaaaggccatagtggtactagtgattaatgaaggagaagcaaacattgaacttgttggcattaaagaacaacaacagaggcagcaacaggaagagcaacctttggaagtgcggaaatatagagctgaattgtctgaacaagatatatttgtaatcccagcaggttatccagttgtggtcaacgctacctcagatctgaatttccttggctttgggaaccaatgccgagaacaaccagaggaa

SEQ ID NO: 233750 - DNA, 375 bp, Glycine max
aattcttccaccaagttatgggtttccttgtgttgcttcttttctccctcttaggtctctcttctagttccagcatatcaactcatcgttccatattggaccttgacctaaccaagtttaccacacagaaacaggtgtcttcactgttccaactatggaagagtgagcatggacgtgtctaccataaccacgaagaagaggcaaagagacttgagattttcaagaataacttgaactatatcagggacatgaatgcaaacagaaaatcaccccattctcatcgtttaggattgaacaagtttgctgacatcactcctcaagagttcagcaaaaagtacttgcaagctcccaaggatgtgtcgcagcaaatcaaaa

SEQ ID NO: 233751 - DNA, 351 bp, Glycine max
ctcggagagaaagagagagagagagagaaaaatggctgatacaagtggaggagatgcagtgagaccggtggtaatatgtgataacaagtgtggctgcacagttccatgcactggtggttccacttgcaggtgcacaagtgtcggcatgacaactggaggcggtgatcacgtgacatgctcgtgcggagagtactgtgggtgcaatccatgctcatgtcccaagactgcggcttctggaactggttgcagatgtggcacagattgctcatgtgcctcttgccgcacttaacatcataccttaattaagtctcaaacttcacaaatcttgaatgtgctttaaatctagctatg

SEQ ID NO: 233752 - DNA, 361 bp, Glycine max
gcaagagcaaggaggttcccaaagccagaaaggaaagcaacaagaagaagaaaacgaaggaagcaacatattgagtggcttcgcccctgaattcttgaaagaagcgttcggcgtgaacatgcagatagtgagaaacctacaaggtgagaacgaagaggaggatagtggagccattgtgacagtgaaaggaggtctaagagtcacagctccagccatgaggaagccacagcaagaagaagatgatgatgatgaggaagagcagccacagtgcgtggagacagacaaaggttgccaacgccaaagcaaaaggagcagaaatggcattgatgagaccatttgcacaatgagactttgccaaaac

SEQ ID NO: 233753 - DNA, 368 bp, Glycine max
ctgttctctcacacactcactctccttctctctcctattgcggctagggtttgggtttttcactttcagcctctccattccttcaaccttcttcttctctttgatctctgatggagacgttccgtgtttagtagcaagggttagttgaggccttgtgtttggaaacgtacggtgtcgttttggagttgggaaaacaaataattctgagagatggcaaccacgaacccttttgatttgttgggtgacgacgctgaggacccttctcagctcatcgccgccgagcaactcaaggcggcggctgctgctgcggctgccaccgccgctcccaagaaggcgccggctcagcagatcaagccggctcagctccc

SEQ ID NO: 233754 - DNA, 381 bp, Glycine max
aagggtctcaggttcctttggttcccattcctaggttgaagcctcagcaacctgcttcagcccccaagagtaaaaagagtgagagtaagaagagtgaggggaaaactaagaaggttgctagtattagtttgttgggtttgtttttctttatcatgctttttggtgggcttgttcctgttgttgattttaggtttgggggtttagtggacaatgttcccggtactggtagttctaattatgttagtgatagggtgtatggtcatggtggagggaaggtttggtctttgaatggtcctaggaatgggtctggaagagatggggatgtaggattttctaatgggaggtttagtgtttctgacagagtgaagaattatgagaaga

SEQ ID NO: 233755 - DNA, 359 bp, Glycine max
ggatccttgacttcttctctcactttccagaaagccttcacatgttcacctttttatttgatgatttgggtgttccacaagattacaggcatatggatggttttggagttaacacatatacgctgatcaacaaggctgggaaagcagtgtatgtgaaatttcactggaagaccactagtggtataaagtgtctattggaggaagaggccattaaggtgggaggagccaaccacagccatgccactcaagacctccatgattcaattgctgctggtaactatcctgagtggaaactgtttgttcagacaatagatcctgagcacgaagacaaatttgactttgaccctcttgatgttact

SEQ ID NO: 233756 - DNA, 377 bp, Glycine max
tggtccttaaacactcatcagtcatcaccatggccaagctagttttttccctttgttttctgcttttcagtggctgctgcttcgctttcagttccagagagcagcctcagcaaaacgagtgccagatccaaaaactcaatgccctcaaaccggataaccgtatagagtcagaaggagggctcattgagacatggaaccctaacaacaagccattccagtgtgccggtgttgccctctctcgctgcaccctcaaccgcaacgcccttcgtagaccttcctacaccaacggtccccaggaaatctacatccaacaaggtaagggtatttttggcatgatatacccgggttgtcctagcacatttgaagagcctcaacaa

SEQ ID NO: 233757 - DNA, 367 bp, Glycine max
atggttcagcggatggtgtagattactggatagcgaaaaattcatggggagagtacagaatcagagacagagcaagcgttcttaagcgccatccttgagcaaccaattagtgtctccattgatgcaaaagattttcatttatacaccgggggaatttatgatggagaaaactgtacaagtccgtatgggattaatcactttgttttacttgtgggttatggttcagcggatggtgtagattactggatagcgaaaaattcatggggagaagattggggagaagatggttacatttggatccaaagaaacacgggtaatttattaggagtgtgtgggatgaattatttcgcttcatacccaaccaaag

SEQ ID NO: 233758 - DNA, 355 bp, Glycine max
tcgaaatctcccaaaaccctcgaccttcctctcccatgaccgacgaccgcccctctcccgcggcggaagacgctctccattataacgacgcttccaccgccgacgtcgtcctccgcctcttcatcgacgctccctctccgctcgattccgtttccaactccgaccaccacgtctacctccactccgacgtcctccgccgctccaaatacttctccgcgctcctctccgaccggtggatcggccacgtcgcgccggagctctcgtcctcctcctcctgcaaccgcgaccgcgacctcgacctcttccgcctcaacctcggtgtggctcccaccggcggctcgatccaatcgcatct

SEQ ID NO: 233759 - DNA, 391 bp, Glycine max
gctttgcaagagcattaaccccgatgaggccgttgcttatggagcagctgtacaggctgctattttgagtggtgagggcaacgagaaggtgcaggatttgctgttgttggatgttacacccctttctcttggtttggaaactgccggcggcgtcatgactgttctcattcccaggaacacgactattcccaccaagaaggagcaagtgttctctacttactcagacaaccaacctggtgtcttgattcaggtgtatgagggagagagagctagaaccagggacaacaacttgttgggtaaatttgagctttctggcattcccccagcacccaggggtgttcctcagattactgtctgctttgatatcgatgccaatggtatcttgaatgtc

SEQ ID NO: 233760 - DNA, 185 bp, Glycine max
cagatcttctgaaaatgcggaatcctctgcatgatctggaatttgtgttttctttcgcttgttcgtttgtttaattcaataaaggaaattaggcatgaccctcttgttgagtatgctctgcctatttgaaaatttccacacctcttttaattgtcgtaatgatgtgtgaagtgtgtgttatttta

SEQ ID NO: 233761 - DNA, 389 bp, Glycine max
  unsure (1)..(389): unsure at all n locations
ctagttcaatatcctagtataccttaataaataatttaagatactatgatgagagcacggttcccattactgttgctgggacttgttttcctggcttcagtttctgtctcatttggcattgcttactgggaaaaagagaaccccaaacacaacaagtgtctccagagttgcaatagcgagagagactcgtacaggaaccaagcatgccacgctcgttgcaacctccttaaggtggagaaagaagaatgtgaagaaggtgaaattccacgaccacgaccacgaccacaacacccggagagggaacctcagcaacccggtgagaaggaggaagacgaagatgagcaaccacgtccaatcccattcncacgcncacaacctcgtcaagaaga

SEQ ID NO: 233762 - DNA, 385 bp, Glycine max
ggcaattgaggatccatcgtgccctcatggcattcgccttgtgatagaggactacccttatgctgttgatggacttgagatatgggatgctatcaagacatgggtccatgaatacgttttcttgtactacaaatcagatgacacacttagagaagatcctgaactccaagcctgctggaaagaactcgtacaggtgggtcatggagacaagaaaaatgagccatggtggcctaagatgcaaactcgtgaagagctagttgaagcttgcgctatcatcatatggactgcttcagcacttcatgcagctgttaattttggacagtatccctatggaggtttaatcttaaaccgtccaactcttagtaggcgattcatgcctgagaaa

SEQ ID NO: 233763 - DNA, 262 bp, Glycine max
aagaaagggtcctttgttcccctcctctttctgtggatgctcagcctcagcagaaagaggatgggaacaatggaagaaagggtcctttgtcttcaattttgaaggctttttactgaataagtatgtagtactaaaatgtatgctgtaatagctcatagtgagcgaggaaagtatcgggctatttaactatgacttgagctccatctatgaataaacaaatcagcatatgatgcttttgttttgtgtaaaagaaataaacatg

SEQ ID NO: 233764 - DNA, 340 bp, Glycine max
attcggcccaagataaatcaacgcagtcctatatacaggcggctattactaaccatccggataagggaggagatcctgaaaagtttaaggatttaggtcaagcataggaagttttaagtgatcctgaaaagatggaactgtattaccagtatggtgaagatgcccttaaagaagggattgggggaggaggctcgtttcataatccatttgatatatttgaatcattttttggaggagcaagctttggtggtggtggtacttcccgaggtacaagacacaagcatggtgaagatgttgtgcattctttaaaggtttcccttgacgacgtttataatcgcac

SEQ ID NO: 233765 - DNA, 357 bp, Glycine max
agcaaagcaatggctacttcaaagttgaaaacccagaatgtggttgtatctctctccctaaccttaaccttggtactggtgctactgaccagcaaggcaaactcagcggaaactgtttctttcagctggaacaagttcgtgccgaagcaaccaaacatgatcctccaaggagacgctattgtgacctcctcgggaaagttacaactcaataaggttgacgaaaacggcaccccaaaaccctcgtctcttggtcgcgccctctactccacccccatccacatttgggacaaagaaaccggtagcgttgccagcttcgccgcttccttcaacttcaccttctatgcccctgacacaaaa

SEQ ID NO: 233766 - DNA, 405 bp, Glycine max
atcccctcggggaattccaattccacattttcaagaaataaggaggcaaaaatgttcatatatgaattggaattatttgttttcttattaggcctatcctgaagccaaaggaaatgagatcggaattcctcggggaattccaattccacattttcaagaaataaggaggcaaaaatgttcatatatgaattggaattatttgttttcttattaggcctatcctgaagccaaaggaaatgagatcggaattcctcggggaattccaattccacattttcaagaaataaggaggcaaaaatgttcatatatgaattggtattagttgttttcttattatgcctatcgtgaagccatacgaaatgagatcggaattcctcgggggtaccgagctcgaattccctatag

SEQ ID NO: 233767 - DNA, 396 bp, Glycine max
ctttaaacgccgaaggttcatccaatctccgaaggccttcaccggattgcaaccatgtcgaggagaaaggttagagagccaaaggaggaaaacgtgactctgggcccagctgttagagatggtgaacatgtttttggagtcgctcgcatctttgcctccttcaatgacaccttcattcatgtcactgatctgtctgggagggaaacacttgtccgcatcactggcgggatgaaggttaaagctgacagagatgaatcatctccatatgctgctatgcttgctgcgcaggatgttgctgctagatgcaaggaactgggcataactgctcttcatatcaagctccgtgccacaggtggaaacaagacaaaaacaccaggtcctggtgctcaatcagct

SEQ ID NO: 233768 - DNA, 399 bp, Glycine max
cgtttcattgctctctctcttgtgcggacacaatttttgatggggatatacctcagcactcccaaaacagagaaggcctctgaagatggtgagaacgacaagcttcgcttcggtttgtcttccatgcagggctggcgtgctaccatggaagatgctcatgcagctcatccatgtttggacgagtccacgtcatactttggtgtttatgatggccatggaggcaaagcagtttcaaaattctgtgccaagtatctacacctgcaggtgcttaagagtgaagcttacttagctggagatttaggcacatctttacagaaatcttttctcagaatggatgagatgatgcgtggacaaagagggtggagagaattagcaatcttgggggataaaatagaaaag

SEQ ID NO: 233769 - DNA, 399 bp, Glycine max
gaacgggccaaagatcaaaagtacaattcttcaccatctctatgagaagcagagacagagcccttactatgacaatctctgtcgccctgtttcagatttgcttccatttattgccaatgggatcagaggtgtcactaccaacccagcgatttttgaaagagctatttcatcctcaaatgcctacgatgatcagttgagggaattggtaggggcagggaaggacatagaaagtgcttattgggaattggttgtgaaggacatacaggatacttgcaaacttctggagccaatttacaatgaaacagatggggaagatggacatgtatctcttgcagtttccccaaagctagcaaatgacaccaaggggacaattgaggcagcaaaatggcttcataatat

SEQ ID NO: 233770 - DNA, 397 bp, Glycine max
cagaatgataacactcgccatacccgttaacaaacccggtagatttgagagtttcttcctatctagcactcaagctcaacagtcctacttgcaagggttcagcaagaatattctagaggcctcatacgacaccaaattcgaggagataaacaaggttctgtttggtagagaggaggggcagcaacaaggggaggagaggctgcaagagagtgtgattgtggaaatctcaaagaaacaaattcgggaactgagcaaacatgccaaatctagttcaaggaaaaccatttcttctgaagataaacctttcaacttgagaagccgcgaccccatctattccaacaagcttggcaagttgtttgagattaccccagagaaaaaccctcagcttcgggacttg

SEQ ID NO: 233771 - DNA, 394 bp, Glycine max
gcaaaaagaaagaatcccaggcgaggagaaagatggaggggaaggagcaggatgtgtcgttgggagcgaacaagttccccgagagacagccgattgggacggcggcgcagagccaagacgacggcaaggactaccaggagccggcgccggcgccgctggttgacccgacggagtttacgtcatggtcgttttacagagcagggatagcagagtttgtggccacttttctgtttctctacatcaccgtcttaaccgttatgggagtcgccggggctaagtctaagtgtagtaccgttgggattcaaggaatcgcttgggccttcggtggcatgatcttcgccctcgtttactgcaccgctggcatctcaaggggacacataaacccggcggtgac

SEQ ID NO: 233772 - DNA, 332 bp, Glycine max
tacgtaaactcgacattcggctcgagtgagaggcaccatggcgacactggattccgacgtgaccatggttccggccggcgaaccctccaccagcgccggtccttcttcgtccaccaggaagccgaagcgattcgagatcaagaagtggagtgccgtttctctctgggcttgggatattgttgtggataattgcgctatttgccgcaaccatatcatggatctctgtattgagtgccacgccaaccaggctagcgccactaccgaggaatgcactgtaccttggggagtttgtaaccactcttttcaattctattgcgtaagccgatggctca

SEQ ID NO: 233773 - DNA, 389 bp, Glycine max
ggaaaatagaagagaattattgaatagtgaataataataataataataataataataataatagtagtgtggaattggatcagatctgtttgttagagagagatgtcacgggggagatctgattccggaaggtggttgaagggctgtccggtggttttcccaatggtctcaacgttgggcctgtgtggccctgctccttactggcgaatcaagaacgccatcaatctccgcaacaacaacaacaaactctcttgcccttcctgcctctgtgactggcctccccctctctcgctcttccaacttgctcctgggctggccaatctctctgtctcagaatgtggaagtaatgacccggattcaaaggacgagatggagaagcagtttgtgga

SEQ ID NO: 233774 - DNA, 388 bp, Glycine max
gatacctttggccgctaatcctcttgatagtacagtagtagcatctaaatgtgcaaatgtcgtagcaggcgcaggatcggttaaatcgtcttcgggtacataaactgcttgaatagaagttatggacccctctttggtagaagtgattctttcttgtaaagaacccatttcattactaagagtgggttgataacccacagcagaaggcattcgacccaataaggcagatacttcagatcctgcttggacgaagcgaaagatattgtcgataaatagaagtacatcttgttcattgacatctcgaaaatattccgccatagtcagggcagttaaaccaactctcatacgagctccgggcggttcattcatttgaccatatactagagct

SEQ ID NO: 233775 - DNA, 323 bp, Glycine max
ttcggctcgagtgagatgcaccatgacgacactggattccgacgttaccagggttccggccggcgaaccctccatcatcgccggtccttcgtcatccaccaagatgcctaagcgattccagatcaacaattggggtggcgtttctctcagggcttgggatattgttgtggataactgctctatttgccgctgccagatcatggatctctgtcatgagtgccgggccaagtattctacctccattagccacgaattctctgtaacctgtcgattgtgtcatcaagcgttgcagctttattgcataagcttatgggccaataccc

SEQ ID NO: 233776 - DNA, 397 bp, Glycine max
gtcagaaggagggctcattgagacatggaaccctaacaacaagccattccagtgtgccggtgttgccctctctcgctgcaccctcaaccgcaacgcccttcgtagaccttcctacaccaacggtccccaggaaatctacatccaacaaggtaagggtatttttggcatgatatacccgggttgtcctagcacatttgaagagcctcaacaacctcaacaaagaggacaaagcagcagaccacaagaccgtcaccagaagatctataacttcagagagggtgatttgatcgcagtgcctactggtgttgcatggtggatgtacaacaatgaagacactcctgttgttgccgtttctattattgacaccaacagcttggagaaccagctcgaccagatg

SEQ ID NO: 233777 - DNA, 394 bp, Glycine max
acttcaaagttgaaaacccagaatgtggttgtatctctctccctaaccttaaccttggtactggtgctactgaccagcaaggcaaactcagcggaaactgtttctttcagctggaacaagttcgtgccgaagcaaccaaacatgatcctccaaggagacgctattgtgacctcctcgggaaagttacaactcaataaggttgacgaaaacggcaccccaaaaccctcgtctcttggtcgcgccctctactccacccccatccacatttgggacaaagaaaccggtagcgttgccagcttcgccgcttccttcaacttcaccttctatgcccctgacacaaaaaggcttgcagatgggcttgccttctttctcgcaccaattgacactaagccac

SEQ ID NO: 233778 - DNA, 392 bp, Glycine max
  unsure (1)..(392): unsure at all n locations
aaaaatgcagcctcagcaaccagggtataacagttcaagggtttacctagagcttatctctgatcttccctggcagaaggccagtgaagaaattgaactggacttgagagctgcacagaaacggctggatagtgatcactatggtttagtgaaggttaagcaacggataattgaatacctggcggttcgcaagcttaaaccagatgcaaggggtcctgtgttgtgctttgttggaccaccaggtgttgggaaaacatcattggcatcttctattgctgctgctttgggaagaaaatttgtacgcatatcccttggtggagtcaaggatgaggctgatattagaggacataggagaacatatgttggaagcatgcctgngaggcttatagatg

SEQ ID NO: 233779 - DNA, 387 bp, Glycine max
acattttcccctctttggagaaatcaaaagaggggaacccatgattcctcctccatcttcctttctcttccagttcctcctcctctttcctctcatactctcccattccgattccgattccggtcaccccgtgctcccgcgcccgctgatcgtggagtacccggagttcgacgcggtgctgcggtgcggcgcgtggcgcgtggcgggggaggcgaacaacctacgcgcgtgggcgataattcccgaggaatgcgcggagtacgtgaaggactatatgagcgggaaaggctacgcgcttgacctggaaatggtctccaaagaggccgaggagtacgcgaggactgtgccactcggctacgacgggaatgacgcgtgggttttcgacat

SEQ ID NO: 233780 - DNA, 385 bp, Glycine max
cacatactcaccatggaggctaagttggccaccaccataatacttattttctccgtaatttggcttatgagggtgaatggcatagacccttgtgcctctcaagcggataattccgacctgaacgtgattcccatctacagcaaatgctcaccgttcaaaccaccaaagtcagactcatcgtgggacaacagaattataaacatggcctcaaaagacccactccgattcaaatacttgtccaccttagtgggccaaaagaccgtgtccacggccccaatcgcttcgggccagaccttcaacatcggcaactacgtcgtcagggtcaaattgggaacccctggtcaacttttgttcatggtcctcgacaccagcaccgacgaggcct

SEQ ID NO: 233781 - DNA, 346 bp, Glycine max
tgctgaggctttgctgtatggactcctccagctgcagaaaaagatcaataggcgcaaagacttcctccattggtggacaaagtgaggtcgattcaatctattttcttggcatcgaagctattttataataagcaactacatggtagtttaccttgctaagaagcacccatgtttgatggagattgtgtccatacaataccttgtcacagtttctgaatgcttttacggggtttcaggcccctttgaggttgaatgtttattatctgtacctgagagtaaacaatttctgaatgactaatgtttggtttgtaagttacggttcttacattggaccaatttcagtctc

SEQ ID NO: 233782 - DNA, 390 bp, Glycine max
aaagcgccctccatttaccattccgagagaggtccaacgacttcccaggtcctcgccgtcctcgccggcctcccggtcggtggcatcctgctcctcctggcgggattgaccctggcaggaaccctcaccggactggcagttgccacgccgctcttcgtcctcttcagcccggtgctggttccagccacggtcgccatcggcctggccgtggccgggttcctgacgtcgggggccttcgggctcacggcgctgtcttccttctcctggatcctgaactacatccgggagacccagccagcctcggagaacctcgccgccgccgcgaagcatcacctcgccgaggcggcggagtacgtggggcagaagacgaaggaagtggggcagaagacc

SEQ ID NO: 233783 - DNA, 422 bp, Glycine max
acgcgtaagtaaactcggatttcggctcgagctaaacaattcaattcaatctgcctctgatcatgtgagaggaaaacatttgggtttttgttcttgctcctccttgtcttagcttctgatgtgacggtgaagagagcagaggcgaaagattgcttgacaaggaggcacgggttccagggtagatgcttattcgacaggcaatgtgcacatgtgtgcaggagcgatggtttcatcggtggtcagtgccgaggccctcttcgcaaatgcttttgcagcaggccatgttgatcgaaattactactgccaaagaggccatgaaataaacatacatacaaataaataaatagctctaaccgacacatatgtacgtagtgtcggggttctagctagctaggtaggtacgtgtgtcttttgttatcgat

SEQ ID NO: 233784 - DNA, 385 bp, Glycine max
caacatctcacaattcattcaccttttaattcatctcactcacaaatcacaatgctcttcctttcttccttaataataataccataataatctgttacgttacggggcccaaatgtctgttacggagctcaaggagcgtcactctgctgccaccgacaccgtcaacaatctcagacaccgtttaaagcagaagcgcctttcgttgctcgacacagatatttctgggtatgcaaggtctcaaggtagaacgcctgtgacctttggacctacggatctggtttgctgtagaaccttgcagggtcacacgggaaaggtgtaatcaatggattggacttctgaaaaaagtcagattgttagtgcatctcaagatgggcgattaataatg

SEQ ID NO: 233785 - DNA, 393 bp, Glycine max
tgcgaaaattgttatggattaaattataaaaaattttttaaatcaaaaatgaatatttgtgaatactgtggatatcatttgaaaatgggcagttcagatagaatcgaacttttgattgattcgggtacttggaatcctatggatgaagacatggtttctctggatcctattgaatttcattccgaagaggaaccttataaagatcgtattgattcttatcaaagaaaaacgggattaactgaggctgttcaaacaggtactggtcaactaaatggtattcctgtagctattggaattatggattttcagtttatggggggcagtatgggatccgcagtaggtgagaaaatcacccgtttggtagaatatgctactaatcaacttttacctctt

SEQ ID NO: 233786 - DNA, 368 bp, Glycine max
tggtgctgctgttcaggctgcaattttaagtggtgagggcaatgagaaggttcaggatcttctcctccttgatgtcacccctctatctcttggtttggagactgctggcggtgtgatgactgtcttgatccctaggaacactacaattccaaccaagaaggaacaggttttctcaacatactctgacaaccagcctggtgtgttgatccaggtctttgaaggtgaaagagcaaggactaaagataacaatttgttgggcaaatttgaactttctggcattcctcctgcccccaggggtgttcctcagattactgtgtgctttgacattgatgccaatggtattttgaacgtctctgccgaagataaga

SEQ ID NO: 233787 - DNA, 396 bp, Glycine max
caagtttgctgacatcactcctcaagagttcagcaaaaagtacttgcaagctcccaaggatgtgtcgcagcaaatcaaaatggccaacaagaaaatgaagaaggaacaatattcttgtgaccatccacctgcatcatgggattggaggaaaaaaggtgtcatcacccaagtaaagtaccaagggggctgtggaagcggttgggcgttttctgccacgggagccatagaagcagcacatgcaatagcaacaggagaccttgttagcctttctgaacaagaactcgtagactgtgtggaagaaagcgaaggttgttacaatggatggcactatcaatcgttcgaatgggttttagaacatggtgggattgccactgatgatgattatccttacagagc

SEQ ID NO: 233788 - DNA, 284 bp, Glycine max
ccaactaacaataattccttcacttgcagaacttagttctctgttgcatcatcatcatcttcattagtgttagccctaaacttcaccttcgaggatgaccacagtgccatcacacagtgtcgaggtgcacacaacaacacagcgctaccaagccggcgtcgtcccgccggctcgttttgaggcgccgcgttacgaatccggccataaggtgccctcttcgatttaccattcctacagacgtccgacaaacgtctcacgttctcgcagttgtcgccgggctttct

SEQ ID NO: 233789 - DNA, 389 bp, Glycine max
attgaattttgattctagcaagcagagcttttgtcagttttctattgaccttctcggtggaggaatcttagtggacaaaactggagattggatcacacttatacaaaattctccaattagtaacttgttgagagttgctgcttggaagaaaggctgtttaatggtcaagattgtgatgtctgggaatgcagcagtcaaaaggagtgattgggcctcattggtacaagtgtttttaacaaacagcaacagtacagagcattttgatgcatgtaagtggacaaaatcagaaccacattcctgggaattgatcttcccaatagaggtatgtggtcctaataatggttttgaaatgtggagttctgagtgggcaaatcaaacttcatggcatt

SEQ ID NO: 233790 - DNA, 397 bp, Glycine max
  unsure (1)..(397): unsure at all n locations
cattgtctttgaacactcatcaccatggccaagcttgttctttccctttgtttccttcttttcagtggctgcttcgctctgagagagcaggcacagcaaaatgagtgccagatccaaaagctgaatgccctcaaaccggataaccgtatagagtcggaaggtgggttcattgagacctggaaccctaacaacaagccattccagtgtgccggtgttgccctctctcgctgcacccttaaccgcaatgcccttcgtagaccttcctacaccaacggtccccaggaaatctacatacaacaaggtaatggtatttttggcatgatattcccgggttgtcctagcacttatcaagagccgcaagaatctcagcaacgaggacgaagccagaggcnccaag

SEQ ID NO: 233791 - DNA, 403 bp, Glycine max
cgggagagtccattaaggaaacagctacaaacattggtgcttctgccaaggctggcatggagaagaccaaggccactgtccaagagaaggcagaaagaatgacagcacgtgatccggtgcaaaaggagttggcaacccaaaagaaagaggcaaagatgaaccaggcggagctggacaagcaggcggcgcgtcagcataacacggcggccaaacagtccgccaccacggctgggcacatgggacatggccaccacaccaccggaaccgggactggaaccgccacgtattccaccaccggggaatatggtcagcccatgggggcccaccagacgtcggcaatgcctggccatggaaccgggcagcccacgggccatgtcaccgaaggagtggtgggctcacatcc

SEQ ID NO: 233792 - DNA, 398 bp, Glycine max
cggttgcagagatgagtggatgaattaattgatgaatgaaattcaaatactaattgttgctatcacaattcacaagagattggattttggaatggaaagggtgttgtcagtagatgagatatcggagcaatactgggtggctgcatcatcttcttcatcatcatcatcatcatcgttcaagtcaaagatgaaccggagcgaatccgaatgggcctttcagcagttcctacagcaggaagctgcttcttcttcatctaattctgatcatgatgatgatcatcatcatgctaaactcaaaaaggaatccaacaccaacatccctgttactctacatgttgattcccaagactaccatgctattcttaagaccaagcttaatctcgcatgcgctgctgttg

SEQ ID NO: 233793 - DNA, 391 bp, Glycine max
acaaaacaaaaagtttacgttacaaatcgcataataaccgtcctaagtttattgagagaattttgcaagtgtgagaaacatggcatctcgtcaaaacaacaagcaagagcttgatgaaagagcaaggcaaggagagactgttgtcccgggtggaactggtggcaagagcctggaggctcagcaacaccttgctgaaggaaggagcaagggagggcaaacaaggaaggaacagctgggtacagaagggtaccaggaaatgggacgcaaaggacggttgagcactgtggacaaatcatgagaagaacgtgctcaagaggaaggcattggcatcgatgagtccaagttcaggactggtaataacaagaaccagaatcagaacgaagaccaggat

SEQ ID NO: 233794 - DNA, 397 bp, Glycine max
gttcaatatcctagtataccttaataaataatttaagatactatgatgagagcacggttcccattactgttgctgggacttgttttcctggcttcagtttctgtctcatttggcattgcttactgggaaaaagagaaccccaaacacaacaagtgtctccagagttgcaatagcgagagagactcgtacaggaaccaagcatgccacgctcgttgcaacctccttaaggtggagaaagaagaatgtgaagaaggtgaaattccacgaccacgaccacgaccacaacacccggagagggaacctcagcaacccggtgagaatgacgaagacgaagatgagcaaccacgtccaatcccattcccacgcccacaacctcgtcaagaagatgagcacgagc

SEQ ID NO: 233795 - DNA, 418 bp, Glycine max
gactctaaaggatccctcggggaattccaattccacattttcaagaaataaggaggcaaaaatgttcatatatgaattggaattatttgttttcttattacgcctatcctgaagccaaaggaaatgagatcggaattcctcggggaattccaattccacattttcaagaaataaggaggcaaaaatgttcatatatgaattggaattatttgttttcttattaggcctatcctgaagccaaaggaaatgagatcggaattcctcggggaattccaattccacattttcaagaaataaggaggcaaaaatgttcatatatgaattggaattatttgttttcttattaggcctatcctgaagccaaaggaaatgagatctgaattcctcgggggtatcgagctcgaattctctatagtga

SEQ ID NO: 233796 - DNA, 257 bp, Glycine max
aagaaagggtcctttgttcccctcctctttctgtggatgctcagcctcagcagaaagaggaggggaacaagggaagaaagggtcctttgtcttcaattttgagggctttttactgaataagtatgtagtactaaaatgtatgctgtaatagctcatagtgagcgaggaaagtatcgggctatttaactatgacttgagctccatctatgaataaacaaatcagcatatgatgcttttgttttgtgtaaaaaaactat

SEQ ID NO: 233797 - DNA, 329 bp, Glycine max
gtgagaacaccattgaattttgattctagtaaacagagcttttgtcaattttctattgaccttctcggtggaggaattttagtggacaaaactggagattggatcacacttatacaaaattctccaattagtaacttgttgagagttgctgcttggaagaaaggctgtttaatggttaagattgtgatgtctgggaatgcagcagtcaaaaggagtgattgggcctcattggtacaagtgtttttaacaaacagcaacagtacagagcattttgatgcatgtaagtggacaaaatcggaaccacattcctgggaattgatcttcccaat

SEQ ID NO: 233798 - DNA, 395 bp, Glycine max
ttggcatgatattcccgggttgtcctagcacttatcaagagccgcaagaatctcagcaacgaggacgaagccagaggccccaagaccgtcaccaaaaggtacatcgcttcagagagggtgatttgatcgcagtgcctactggtgttgcatggtggatgtacaacaatgaagacactcctgttgttgccgtttctattattgacaccaacagcttggagaaccagctcgaccagatgcctaggagattctatcttgctgggaaccaagagcaagagtttctaaaatatcagcagcagcagcaaggaggttcccaaagccagaaaggaaagcaacaagaagaagaaaacgaaggaagcaacatattgagtggcttcgcccctgaattcttgaaagaa

SEQ ID NO: 233799 - DNA, 391 bp, Glycine max
cataagtttcttatcgatggcttccctagaagccaggagaaccgtatagcttttgaacaaattattggagctgaaccgcatatggtacttttctttgattgtcctgaagaagaaatggtgaaacgtgtgctgagtcgtaatcagggtcgaattgatgacaacataaatacaatcaagaaccgtcttcaagtatttgagtcattaaatcttcccgtgattgactattatgctaagaaagggaaactttacagggtaactctatttagtttcattaagtcttttttaggtttgacttgaatgaagattggtctccggattcacttgtatgcttgttatactttatatatagatgtgatggtatatgcaatggaaaatatttgaaaaaaaaaca

SEQ ID NO: 233800 - DNA, 377 bp, Glycine max
aaaagtcatcattttgggcgctctttttctatggagtgctttcacaaagtgtggtaacctcgattggaccatcacgcttttttctctttccactctaccaaacacactcatcgtgggcgtccctcttctgacggccatgtatggagactcatcaggtagcctgatgagtcaaatctttgtcatgcagggcgtcgtgtggttcactctaatgttgttcttgtacgaatacagaggcgccaagagcctaatttcgaaccaattccccgagaatggaggctccatcgcctcgtttactgttgattctgatgttaactctctcaacggtaacgagccgctgcaggccgacctggaaatgaaggaaaatggagaacttcatg

SEQ ID NO: 233801 - DNA, 399 bp, Glycine max
gtcgtagcaggcgcaggatcggttaaatcgtctgcgggtacataaactgcttgaatagaagttatggacccctctttggtagaagtgattctttcttgtaaagaacccatttcagtactaagagtgggttgataacccacagcagaaggcattcgacccaataaggcagatacttcagatcctgcttggacgaagcgaaagatattgtcgataaatagaagtacatcttgttcattgacatctcgaaaatattccgccatagtcagggcagttaaaccaactctcatacgagctccgggcggttcattcatttgaccatatactagagctacttttgattctgcaatattttgttcattaattactccagattctttcatttccatataaagatcattt

SEQ ID NO: 233802 - DNA, 399 bp, Glycine max
  unsure (1)..(399): unsure at all n locations
agaagaaccacgtgaaagaggatgcgagacaagaaacggggttgaggaaaatatctgcaccttgaagcttcacgagaacattgctcgcccttcacgcgctgacttctacaaccctaaagctggtcgcattagtaccctcaacagcctcaccctcccagccctccgccaattccaactcagtgcccaatatgttgtcctctacaagaatggaatttactctccacattggaatctgaatgcaaacagtgtgatctatgtgactcgaggacaaggaaaggttagagttgtgaactgccaagggaatgcagtgttcgacggtgagcttangaggggacaattgctggtggtaccacagaacttcgtggtggcggagcaagccggagaacaaggattcgaata

SEQ ID NO: 233803 - DNA, 395 bp, Glycine max
  unsure (1)..(395): unsure at all n locations
aaacaaaatccccatctaatgagattgattcgagaccatcaagctgacttccttcgcctgataaatgaacctgcagaaggtgctgaagggaacatattggggcagatggcttctgcgatgccacaagcagtaaccgtcactcctgaggagcggcaggcaattgaacgtcttgaagcaatgggttttgatcgtgcaatcgtattggaggtgtacttcgcttgtaacaaaaatgaggaattggctgccaactaccttttggatcacatgcatgagttcgaggaacaatagatctcctttcgaatttgccaaattanttcgtgtcatcttttttctcgatgggtctttgttacatactatgtttaatgaggtaatgcttttgataatgtcaaatctca

SEQ ID NO: 233804 - DNA, 483 bp, Glycine max
gggtggctgagaatcaatcgctggtcgtatagtaaagcactgaggtcggacgcacgcgtaagtaaactcggaattcggctcgagattgattcgatgatccccataggacgtggccaacgagaattaattattggagacagacaaacgggtaaaacagcagtagccacagatactattctcaatcaacagggacaaaatgtaatatgtgtttatgtagctattggtcaaaaagcatcttctgtggctcaagtggtgaataccttacaagaaagaggagcaatggaatacactattgtagtagctgaaacagcggattctccagctacattacaatacctcgccccttatacaggagcagctctggctgaatattttatgtaccgtgaacgtcacactttaatcatttatgacgatctctccaaacaagcacaggcttatcgccaaatgtctcttctattacgaagaacacctggtcgcgaagct

SEQ ID NO: 233805 - DNA, 266 bp, Glycine max
aacccgaaattcggtccaaggaccgacctacctacctaccagccaagcccaaaaatggaggcaaaccaaggccatgcccccaggtgcttggaacgtgtttcatccttcctcggggctctaaccctatccgcggctcacggaagcaccacggttcaagacatcgcgagaaagttgaaactcggggacaacgagcttctgcgcacggagaagaagttcaacgttttcatggagaaatacgggaggagctactccacagaggaggagta

SEQ ID NO: 233806 - DNA, 140 bp, Glycine max
gccagattgagacaaagaatagattctcaatacaatgaggttcaggctcagatggaaacaaatttgtttaaattgtctcttgatgatgttgaaactcctaaaggttccatgttggatctgaaaatttctcaatctaaaat

SEQ ID NO: 233807 - DNA, 366 bp, Glycine max
agaagatgggtttgaagaacaacatggtggtgctaaaagtgtgtttggtgctacttttccttgtggggggtactactagtgccaacttgaggctgagtaagcttggcctgctcatgaaaagtgatcatcatcaacactcaaatgatgatgagtcttcaaaaccatgctgtgatcaatgcgcatgcacaaagtcaaaccctcctcaatgccgctgttcaaatatgaggctgaattcgtgcaatcaagcttgcaaaccttgaatttcccaataaccttacccggaaaatggttttgggttgacaaaaaccgattccgccaagaaacttgcaaacccaattaagagtaccagggaaactactaatggac

SEQ ID NO: 233808 - DNA, 391 bp, Glycine max
  unsure (1)..(391): unsure at all n locations
taccttaataaataatttaagatactatgatgagagcacggttcccattactgttgctgggacttgttttcccggcttcagtttctgtcccatttggcattgcttactgggaaaaagagaacccaagcacaacaagtgtcctcagagtttcanttacgagagagactcgttcaggaaccaagcatgccacgctcgttgcaacctccttaaggtggagaaggaagaatgtgaagaacgtgaaattccacgacgacgaccacgaccacaacacccggagagggaacctcagcaacccggtgagaaggaggaagacgaagatgaacaaccacgtccaatcccattcccacgcccacaacctcgtcaagaagaagagcacgagcatagagaggaa

SEQ ID NO: 233809 - DNA, 381 bp, Glycine max
aactaacaataattccttcacttgcagaacttagttctctgttgcatcatcagcatcttcattagtgttagccctaaacttcaccttcaaccatgaccacagtgccaccacacagtgtccaagtgcacacaacaacacaccgctacgaagccggcgtcgtcccgccggctcgttttgaggcgccgcgttacgaagccggcatcaaggcgccctcttccatttaccattccgagagaggtccgacgacctctcaggttctcgcagttgtcgccggccttccggtcggcggcatcctcctgctcatggcaggactgaccctgcctggaactctcaccgggctggtggtggcaacaccgctcttcatcatcttcagcccggtgg

SEQ ID NO: 233810 - DNA, 385 bp, Glycine max
cacaactacaagaaagaacttccttataaccaaaaccaacaacaactatggcaagttatcagaagcactacgatgatcagggtcgcaaggtcgacgagtatggcaatgttgagaggcaaactgacgaatatggcaacccggttcatgccactagtgtcacttatgtagccaccaaaagtgttggtggctacagtgatgacgctaataagcaacatgatattactggtgtctatcccgagaaagacaccggtagacatcattttggtcgtggttacgacggtgacactaacaagcaacatgatgctactggtgtttatcccggactagacattggtacagatcatgggactaccggtgtttatggcctaaacaccgacagacatca

SEQ ID NO: 233811 - DNA, 384 bp, Glycine max
ttgtgaagtagaaatcggtgcaagaaattctccactttatctaaaaaaattcggtgagtttgtgaagacaaaaaatcactagctactcaaaaatggccacagtaggaaggaacgttgcagctcctttgctgtttcttaacttgatcatgtattttattgttcttggctttgctagttggtgcctcaacaggttcatcaatggccaaacttaccaccctagttttggtggaaatggtgcaaccatgtttttcttaaccttctccatactagcagctgttctgggcatcgtgtccaaacttttgggtgggaatcacatgaggacatggaggagtgacagtttagcatctgcaggagccacatcaatggttgcttgggcagtcacag

SEQ ID NO: 233812 - DNA, 268 bp, Glycine max
aaagaggggaaatcggccaaattaaaattaccttccggggaagtccgtttgatatccaaaaactgctcggcaacaatcggacaagtgggaaatgttggagtaaaccagaaaaatttaggtaaagcccgaattaaatgttggctaagtaagcgtcctgtagtaagaggagtagttatgaaacccgtagaccatccccatgggggtggtgaagggaggggcccaattggtagaaaaaaacccgcaaccccttggggtttcctgcactttg

SEQ ID NO: 233813 - DNA, 132 bp, Glycine max
cggggaattccaattccacattttcaagagataaggaggcacaacttgttcacatatgaattggaattatttgttttcttattaggcctatcctgaagccaaaggaaatgagatcggtattcctcggggaat

SEQ ID NO: 233814 - DNA, 201 bp, Glycine max
cagataactacaataggagcaagtttcctgggcaaagtggctaagggacaattgttcaaaggaatgttaccacatggaacaatagttgcagttaaaaagtcaaaagagattgaaaggaaccagataaagacttttgtcaatgaagtagtcattttatctcagatcaaccacaggaacattgtaaaactattaagttgttgt

SEQ ID NO: 233815 - DNA, 297 bp, Glycine max
ctcgagccgttcgtttgttgttcaatctaacaaacttctctatatcgtttactttttcaacacaccttacacacttctttatttgagcctttcatataaatatcatggcttcgagggtggtttcggttttggtgatagcgatgatgttgtttgccatgaactgtaactgcactagtgttggccacatgccttcaaccaaagaggaaggtcacaattttcaggaggctaaagccagaacaccacaaactgcaaccaaggccatggaacctggtaaaaatgggaaaaaacccccaaatt

SEQ ID NO: 233816 - DNA, 385 bp, Glycine max
aaaacagtaaagctaacttcaacacctttaattttctaaaagtaattcagcggctgaataccaagcggagaagatgagtcaggagcagccacggcgtcccaaaggccaaaaccccatcaaatacggcgacgtttttgtcgtctccggcgaccttgcacagaagcccgtcgcaccggaagatgctgccatgatgcaaagcgcggaaactcgagtgctcggacaaacccaacccggcggagcagcttccgtcatgcaatctgccgccaccaggaatgaacaggctggccttgtcggtcaccgggacgttcacgacgttacgggcgaccgtggcgtcacagtcacagaaactaaagtccctggaagacgcattataaccgaggctgtt

SEQ ID NO: 233817 - DNA, 383 bp, Glycine max
aaaacagtaaagctaacttcaacacctttaattttctaaaagtaattcagcggctgaataccaagcggagaagatgagtcaggagcagccacggcgtcccaaaggccaaaaccccatcaaatacggcgacgtttttgtcgtctccggcgaccttgcacagaagcccgtcgcaccggaagatgctgccatgatgcaaagcgcggaaactcgagtgctcggacaaacccaacccggcggagcagcttccgtcatgcaatctgccgccaccaggaatgatcatgctggccctgtcggtcaacgggacgtcaccgacgttaccggcgaccgtggcgtcacagtcacagaaactaaagtctctggaagacgcattataaccgaggctg

SEQ ID NO: 233818 - DNA, 251 bp, Glycine max
cggctcgagggcacccaaacattggtttgttgtaggaagaggaatcttgaaaaatggcaggggacagcaagagcaagattctgttcatcggatggactggttacatcggaaaattcatcgtggaagccagcgccaaagctggccacccaactttccttttggtgagggagtccactctctccaaccccgcaaaatcacccctcatcgacaatttcaaaagcctcggtgtcaatcctgttttacgagatcta

SEQ ID NO: 233819 - DNA, 120 bp, Glycine max
gaatccggtccagccgagctagctagctagcaagcaagcacagagattgaagcaaagccaagccatgccctcatgtgcttggcacgtgtttcaatcctcctctgcgctctaaacctaacc

SEQ ID NO: 233820 - DNA, 281 bp, Glycine max
caaccacgggcattatgtcagtcttgtgaaaagccataaccactggttattttttgatgacgaaaatgtagagatgattgacgagtctgctgtgcagacgttctttggatcatcacaggagtattcaagtaatacagaccatgggtacattttattctatgagagcattggctctggtaacaggaattaagcggaggatttctacaaccccctaaatcaattggacttccttttcacaaggtttccaaaattaatttcccttccaacgttttccccttaat

SEQ ID NO: 233821 - DNA, 279 bp, Glycine max
ctcgagccgctccattggtccttaaacactcatcagtcatcaccatggccaagctagttttttccctttgttttctgcttttcagtggctgctgcttcgctttcagttccagagagcagcctcagcaaaacgagtgccagatccaaaaactcaatgccctcaaaccggataaccgtatagagtcagaaggagggctcattgagacatggaaccctaacaacaagcgattccagtgtgccggtgttgccctctctcgctggaccctcaaacggaaagccc

SEQ ID NO: 233822 - DNA, 279 bp, Glycine max
gcaaagcaatggctacttcaaagttgaaaacccagaatgtggttgtatctctctccctaaccttaaccttggtactggtgctactgaccagcaaggcaaactcagcggaaactgtttctttcagctggaacaagttcgttgcgaagcaaccaaacatgatcctccaaagagacgctattgtgacctcctcgggacatttacaactcaataaagttgaacaaaacggcaccccaaaaccctcgtctcctggtcacgccctctactccacccccatccaca

SEQ ID NO: 233823 - DNA, 384 bp, Glycine max
  unsure (1)..(384): unsure at all n locations
cattgatgagaccatttgcacaatgagacttcgccaaaacattggtcagaattcatcacctgacatctacaaccctcaagctggtagcatcacaaccgccaccagccttgacttcccagccctctggcttctcaaactcagtgcccagtatggatcactccgcaagaatgctatgttcgtgccacactacaccctgaacgcgaacagcataatatacgcattgaatgggcgggcattggtacaagtggtgaattgcaatggtgagagagtgtttgatggagagctgcaagagggaggggtgctgatcgttcaacanaactttgcggtggctgcaaaatcccagagcgataactttgagtatgtgtcattcaagaccaatgatag

SEQ ID NO: 233824 - DNA, 381 bp, Glycine max
ttgtctttgaacactcatcaccatggccaagcttgttctttccctttgtttccttcttttcagtggctgcttcgctctgagagagcaggcacagcaaaatgagtgccagatccaaaagctgaatgccctcaaaccggataaccgtatagagtcggaaggtgggttcattgagacctggaaccctaacaacaagccattccagtgtgccggtgttgccctctctcgctgcacccttaaccgcaatgcccttcgtagaccttcctacaccaacggtccccaggaaatctacatacaacaaagtaatggtatttttggcatgatattcccgggttgtcctagcacttatcaagagccgcaagaatctcagcaacgaggacgaag

SEQ ID NO: 233825 - DNA, 343 bp, Glycine max
acgtaaactcggaattcggctcaagtcggcatggatgaccgatgaagaatttgcaaaaaaaatggttgcggttgtaaatccatgcgtaattcgtggccttcaaaagtttcctccaaaaagcaatctggatcctaaaatctatggtgagcaaaccagtaagataacagcagatgcccttgatctagatggatacacaatggacgaggcactaacaaatccgaggttatttaagttagattaacatgatgtattcatgccatatataaggcggataaatcagacatatgccaaggcttatgcgacaaggactaacctttttctgagagaaaatggaaccttaaag

SEQ ID NO: 233826 - DNA, 377 bp, Glycine max
tcttttcttaagaattttttcagaatatctcctggattttgtttcgctgatggtcttgcttcactagctcttttacggcaaggaatgaaagataaaacaagtgatggggtgtttgattggaatgttactggggcttccatctgttatcttgctgttgagagctttagttactttctgttgacgcttgcacttgaaatgtttccttctctcaatttgacttcattcatgatcaagaagtggtggggaaaaattaatatcttccagcataataatccctatttggaacctctgttagaatcatcttccgaaactgttgctatggacttcgatgaagatgtagatgtgaaaacagagagaaatagagtactttcaggttc

SEQ ID NO: 233827 - DNA, 384 bp, Glycine max
gttaaagaaagcagcactgaagggcttccaatggaggatagtccctatgtgaaatacaaggatttggaggattataagcgtcagggttatggtacacaaggtcatcaagaaccaaagacaggtcgtggagctggagccactgaagcacccactctctctggtgctgcagtttcatctgatgcacaagtcgctgccactgatgccattaacagtaaaggagtcccttaattattcacacttcctagaatagatcgttcctttgctaataagaaatcgttttcttaatttggggtggcgttttttaaatgtgtgaacatctcagtaatttgtattattattacttacacgtttgaagtttgcatttagcatattgtactactttta

SEQ ID NO: 233828 - DNA, 296 bp, Glycine max
tggtaatactcttatgccagctttttctgttccacaggctactgccagatcttctgaaaatgcggaatcctctgcatgatctggaatttgtgttttctttcgtttgttcgtttgtttaattcaataaaggaaattagacatgaccctcttgttgagtatgctctgtctatttgaaaatttccacatctcttttaattgtcgtaatgatgtgtgaagtgtgtgttattttaaaaaaattcataaaaaaaatcattcatttgcaaaaaaaaaaatcattttcataaattggggtaaaa

SEQ ID NO: 233829 - DNA, 197 bp, Glycine max
tggtaatacacttatgccaactttttctgttccacaggctatcgctatatcttctaaaaaggcttaatcctctacatgatctggaatttgtgttttctttcgtttgttcattgggttaactcactaaaggaacttccacatcaccctcttgttgattacgctatgtctattcttacattttccacctctcttttaat

SEQ ID NO: 233830 - DNA, 210 bp, Glycine max
gaaagtcttccatagccccccaaaaatgaagagcaccatcttctttgctctctttctcttttgtgccttcaccacctcatacctaccttcagccatcgctgatttcgtgctcgataatgaaggtaaccctcttgaaaatggtggcacatattatatcttgtcagacataacagcatttggtggaataagagcagccccaacgggaaatga

SEQ ID NO: 233831 - DNA, 300 bp, Glycine max
  unsure (1)..(300): unsure at all n locations
agcagattgtgattttctcaagagaaactttaagcagatgtctaatgttttgtgggtggctcctgaggacaaggcgagtttatggtcacaacttcattatgtttcgtgtaataatctggaaatgcaagaagcttatcttgtcaatctcggtanatgtgtttacgagaaattgtatttgcacattcaagaggaacctcgcaatttgaaaaggaaagcccccccccgtattgattggtggcaaaaactgaagttgctaacaatacaaaaattggaaaatttcaatccaatccaaaggataat

SEQ ID NO: 233832 - DNA, 245 bp, Glycine max
ctcgagccgaaaatgaccaagttcacaatcctcctcatctctcttctcttctgcatcgcccacacttgcagcgcctccaaatggcagcaccagcaagatagctgccgcaagcagctccagggggtgaacctcacgccctgcgagaagcacatcatggagaaggatcacggccgcggcgatgacgatgatgatgatgacgacgacaatcacattctcagggacatggcggggaagaatcaactaca

SEQ ID NO: 233833 - DNA, 385 bp, Glycine max
ctgcgacgcacacaccttcaattacctcgtcgacaatggctacacatattgtgttgttgcagatgaatcaattggaagacagttacccatggcttttctagagcgtgtcaaagatgaatttgtggcaaaatatggtggtggaaaggctgccactgctcctgtgaacagccttaacaaggaatttgggccaaagttgagggaacatatgcagtactgtgttgatcatcctgaagagataagcaagcttgcaaaggtgaaagctcaagtttctgaagttaaaggtgtcatgatggagaatattgaaaaggttctagacaggggtgacaagatagagcttctggtggacaagactgagaaccttcataaccaggcacaagatttcaga

SEQ ID NO: 233834 - DNA, 382 bp, Glycine max
ccaaaactgaaaaaaaaaacaaacaataccataacatggcttcttccaccatcacctcctccttcctaacatcacccccttcatctctcttcaacaaatcatcatccccttccttccatgccacccctactctccgccccctcgcgccacgcgcctccatgtccgcctcagcgccgccctacgacttcggatcgttccggttcgatccgattagagagtcgattgtgtcgcgcgagatgacccgcaggtacatgatcgacatggtcatccacgccgacaccgacgtcgtcatcgttggcgcgggctccgcgggtctctcgtgcgcctacaagctctccagaaacccctccatcaacatcgccattgttgagcagtccgtcag

SEQ ID NO: 233835 - DNA, 207 bp, Glycine max
aagcagcagagggaggagcggcattaaaaatgcagatcttcgtgaaaaacccaaacgggaaaaacaataaccctcaaggtccaaagcagcaacaccattgacaatgtcaaggctaagattcaggacaaggaaggcatccctccggataagcaccgtttgattttcgccggaaagcaacttgaatatggaaggaccttggccgattac

SEQ ID NO: 233836 - DNA, 197 bp, Glycine max
caaaaattttactttacaaatcgcataaaaaccgtccaaagttaatgagagaattttgcaagtgtgagaaacatggcatctcgtcaaaacaacaagcaagagcttgatgaaagagcaaggcaaggagagactgttgtcccgggtggaactggtggcaagagcctggaggctcagcaacaccttgctgaaggaaggag

SEQ ID NO: 233837 - DNA, 385 bp, Glycine max
ctttttagccctctctctttctttctctttccttttcttcttatccgactccgtccccattccccaacaccacactaaccctacaaaacctataaaccttctggttctacccgttcaaaatgatgcttccacagggctccattgggccaacctccaaaaaaggacccctctaatgcaagtaccagtcctggtggacctcaatggaaaccacttgtgggttaactgtgagcaacactactcatccaaaacataccaagcacccttctgccactccacccaatgctccagagccaacactcaccaatgcctcagtttgcccagcggaatcatagccaaggtgccacaaaaacacgtgtggcctcatgtccaccaaccccatcaccca

SEQ ID NO: 233838 - DNA, 172 bp, Glycine max
caagctgcgctccaaaccccaaaaggaaagttagaaaagctttttgatcaacagaacgagggaagtattttcgcaataagcagagaacaggtgcgtgcgttggcccctaccaagaacagctcttggtggccatacggcgccactgcgccgacccccatcaagagactcctcg

SEQ ID NO: 233839 - DNA, 384 bp, Glycine max
gcttccattgtgctcactcatctcttacaacgaaaccctcttcatcttgttctatctgtgacgagcatcatggcctcaagagcagtgttattgttggctatgtgtgtgcttccggcgatggttgtggccattcgcccagcaaagaaccctttttgcgtgaagggtcgtgtctactgtgacccttgccgtgctggttttgagacctcagctaccacctacattgctggtgctgagattatgttgcaatgcaagagcagggttagcaacgaggttgtgtacacgaagaacgggtacaccgactcacccggagcatacacaatgtacgtggatgaggatcacgcagatcagatctgcagtgccaagcttgtaagcagccctcaccct

SEQ ID NO: 233840 - DNA, 271 bp, Glycine max
  unsure (1)..(271): unsure at all n locations
cgcattagcaccctcaacagtctcaccctcccagccctccgccaattcggactcagtgcccaatatgttgtcctctacaggaatggaatttactctccacattggaacttgaacgcgaacagtgtgatctatgtgactccagggaaacgaagagttagagtggtgaactgccaagggaatgcaatgttcgacggtgagctaacgaggggacaattgctattggtgccgcanaactttgtggtggctgaccaagggggaaaacaaggattgg

SEQ ID NO: 233841 - DNA, 416 bp, Glycine max
  unsure (1)..(416): unsure at all n locations
acttaaccccgaaatccggcccaagggccaaaaaacttcaaacaaaaaggatccaaaggaaagaaaccaacttgcagtcatttgaaaagctccgccaggtcaggcgcaaccttgaccaagctaaaagcttgttggaagcgttgatcaacatggaagagaaaaaaagagaagtaatggagagtgaagttatgctgcagaagatgcaaatgaagtacaagcatgaaaccgagtttttggaagacaacatagcactctccggatttactcccttcacttccaagtttgtttccagtgaagaggaatatttcgattcagatgatgtcatgataaaccgtcttncccgcacacggtctactgcagtacagtatttgccttctcatgaaaccaacgttcccatggttcctgccgttagtaca

SEQ ID NO: 233842 - DNA, 377 bp, Glycine max
taagattcttccaccaagttatgggtttccttgtgttgcatcatttctcactcttaggtctctcttctagttccagcatatcaactcatcgttccatattggaccttgacctaaccaagtttaccacacagaaacaggtgtcttcactgttccaactatggaagagtgagcatggacgtgtctaccataatcacgaggaagaggcacagagacttgaaatttccagacataatttgaccaaaacaagggaaatgatgcaaacaagacatccacccaattccaacctttaagaattgaccagtttggtggcattaagcctcaagaattcaacaaaaagttactggcagctcccaaggatgtgtcccaagaaattaaaa

SEQ ID NO: 233843 - DNA, 397 bp, Glycine max
  unsure (1)..(397): unsure at all n locations
taaaattcttccaccaagttatgggtttccttgtgttgcttcttttctccctcttaggtctctcttctagttccagcatatcaactcatcgttccatattggaccttgacctaaccaagtttaccacacagaaacaggtgtcttcactgttccaactatggaagagtgagcatggacgtgtctaccataaccacgaagaagaggcaaagagacttgagattttcaagaataacttgaactatatcagggacatgaatgcaaacagaaaatcaccccattctcatcgtttaggattgaacaagtttgctgacatcactcctcaagagttcagcagaaagtacttgcaagctcccaaggatgtgtcgcagcanatcacaatggccaacaggaaaatgaa

SEQ ID NO: 233844 - DNA, 98 bp, Glycine max
gtgtgggtgaattctcacgaagtgtgggcaccatgccttcagcaagtaccaatgggttgatgacgttgtgggtttgacccttcagtcaacacttttag

SEQ ID NO: 233845 - DNA, 414 bp, Glycine max
aggtcgaatctagatgatcccctcggggaattccaattccacattttcaagaaataaggaggcaaaaatgttcatatatgaattggaattatttgttttcttattacgcctatcctgaagccaaaggaaatgagatcggaattcctcggggaattccaattccacattttcaagaaataaggaggcaaaaatgttcatatatgaattggaattatttgttttcttattaagcctatcctgaagccaaaggaaatgagatccgaattcctcggggaattccaattccacattttcaagaagtaacgaggcaaaaatgttcatatatgaattggaattactttgtttttctaataggcctatccggatgccaaaggaaatgacatcggaattcctcgggggtaccgagctcgaatt

SEQ ID NO: 233846 - DNA, 365 bp, Glycine max
cacgcgtacgtaagctcggaattcggctcaaggtcctgcgaaccttcttgctttggttcggttggtacggatttaaccccggttcatttaacatgatcccacatacttactgtggctcaggaaattactacggtctatggagcgcggttggcagacccgcggtcaccactaccctagcggggtcaacagctgccttgaccacgctattcggtaaacgggtgacatccggtcactggaacgtgaccgatgtctgcaacatgctgttacgccgtttcgcggcgataacagacggttgctccgtggtttagccatgggcacccatcgtagccggttttgttgcctctacagtattagcagattgcaac

SEQ ID NO: 233847 - DNA, 378 bp, Glycine max
ctttctctctctagaattctcagatttgcggggcgagatgatgcagcagccaggacccggcatggcacctcccaccatgggccagcagccgccgcaacagtaccagcagcctccggcgcagcagcagcaaccctacgtcatgatgccgcgcatgcccaggccccgcaagccatgtgggccccctccggccaacctccgcctcagcagcaacccggcagcgccgaccaggtccgaacctctggatcggggatcggcagtactggatggacgagaactatccctatacctgctttgctcaaaccggcgaggttacatcggttaaagtaattcgaaacaagcaaactagtcaatctgaaggttatgggtttattgagttta

SEQ ID NO: 233848 - DNA, 349 bp, Glycine max
  unsure (1)..(349): unsure at all n locations
atgctatggtgcatgatagttaatgtcacaatacaggtgattgcattggggtaattaaacataaaatagttttaaagggctaatccggtattcaggttccgtcctttgggcaccattcctcagtccatttcacagcanactgtttggaatcaaatggcaacagtgagaacacattgaattttgattctagcaagcagagcttttgtcaattctctattgatcttcttggtggaggaattttagtggacaaaactggagattggatcacacttatacaaaattctccaattagtaacttgttgagagttgctgcttggaagaaaggctgtttaatggttaagattgtgat

SEQ ID NO: 233849 - DNA, 383 bp, Glycine max
ctgaaagactgaccgttcaggtttctgatgtaaagaatgtcattatctggggcaatcactcatcaacccagtatcctgatgttaatcatgcaactgttgcaacctcagctggggagaagcccgtccgtgagcttatagctgatgatgcctggttgaatggggaattcattactactgttcaacaacgtggcgctgcaattatcaaagctagaaagctttcaagtgcactatcagctgctagtgctgcttgtgaccatattagagactgggttcttggaactcctcatggcacttgggtatcaatgggagtatattctgatggttcctacaatgttccagctggacttatatattcattcaccgtcacttgtgccaatggggaa

SEQ ID NO: 233850 - DNA, 339 bp, Glycine max
ctcgaatctggaaagccgctaacacgaaccgttgccgagaaccggcccggttcgtgtcccggttcggtttcgctttccggttcggatgttgttgacgtctcgggcgtcgtgccgttaccgtgtgggctcacattggggtcccacataacggtcgttgggaagccgttggcggcgaagcccgatttcgagccgaagataacggtggtgacggagaacgagcccgtgatggtgtcgcaattcgtggtggagttgcaggggctgaagaccgttgacggtgaagagcctcctagggtttttcatttcaacccgaggttgaagggggattggattggtaaacct

SEQ ID NO: 233851 - DNA, 401 bp, Glycine max
acaaaattgaactgtaattgtagtagtagacagtagcaccatgagccaggaacagctcaagaaacctcaaggggagcaggaccccatcaaatacggcgacgttttcaaagtctccgacgaactcgctttcaaacccatcgcgccaagagacgcagctctcatgcaagccacggagaaccaagcattgggccaaactcaaaaaggaggtcccgcctcggtgatgcaatccgccgcaaccgaaaacctccgcgccggcgtcgtgggccgccaagacatctccgacgtggcgaggaacgaaggcgtgagcgtgaccgaaaccaaagtgggctgccaccgcgtcatcacggagttcgtgggaagacacgtggtggggcagttcttggagcccgacgtccccatga

SEQ ID NO: 233852 - DNA, 347 bp, Glycine max
  unsure (1)..(347): unsure at all n locations
ggctataatgatgacaccaatagacatcatggaactaccggtgtctatggtatagacaccgataggcaacaacatgggactactggtggctatgccggtgacactggtaggcaacatgggaacatcggtggcccttactatggaaccaacaccgcagacaccggtactggtcccagaagtggaaccacgggcggcaccggttatggaggcactggtggcactgattatggaacaactggtggcactggttatggaagtggaactgggtatggagtcaacactgggggtgcgcacactgaagcaggatatangaaggaacatcgtcagcatgaccaatctcatggtga

SEQ ID NO: 233853 - DNA, 316 bp, Glycine max
taaaatgtcagtcttcacattttattaaggcgattgaaaggtacaacgccactcagatataaacatacgctcgctgggatggtacatgggccatactttttattatcatacaaaatttacttatttgttattacttcatacgatggcctcatcctcacaccatcatgcttgtcatttatgcgacacaccaaatcggggttgaggaaaatatctgcatcttgatccttcactagaacattgctcgctcttcacgcgctgacttctataatcctaacgctggtcgcatctatatccgccaacaccctcatcctcccag

SEQ ID NO: 233854 - DNA, 367 bp, Glycine max
  unsure (1)..(367): unsure at all n locations
gaaaagttagggttcacaacttttccttttccttttgcttgcgaatctgaatcaaataatcaatcatccattcattattcatcatgtcgtcggcgaagaaaatcacgctgaagagttcggacggcgaggctttcgaggtggaggaggcggtggcgctggagtcgcagacgataaagcacatgatcgaggacgactgcgccgacagcggcatccctctgccgaacgtgacgagcaagatcctggcgaaggttatcgagtactgcaagaagcacgtcgaggccgcgaatcccgaagacaaaccctccgaggacgatctcaaggcctgggacgctgaattcgtcaaggtcgnacaggccacgctcttcga

SEQ ID NO: 233855 - DNA, 378 bp, Glycine max
  unsure (1)..(378): unsure at all n locations
caaagtttcttcctttctctgctctttgccttctctgacacatttggtgccttgtagagcgtgttttggcaggaaggtggtatggcgaaggacgttgaggttgctgagcgtggctccttctctgggaaggactaccaggaccctccaccagcaccactcattgatgctgaggagctcacaaagtggtccttttacagggctctcattgctgaattcattgccactttgctcttcctctacattactgtgctcacagtcatanggtacaagcaccagactgacctcaaggaaaatggtgaaatctgtggtggggttggcattcttggcattgcatgggcctttggtggcatgatcttcatccttgtccactgcactgct

SEQ ID NO: 233856 - DNA, 315 bp, Glycine max
agctaagaattcagctcgaggttcttcttccgcttccggtaaatcaaaaggtaatctttcacattctgctagggacgagattagaaaaacaatgaaacccataggttgacgccacaaattccatccccaaaaaccatattttgattgtgcatcaactatatcaactgtacttaaactgttagataatcccaatcggtgaagacatttgttgtataactaaaaaaaaaaaaaaaaaaaaaaaacaaaaaacaaaacaaaaaaaaaaaaaaacacaaaaaaaaaaggggggtcccaaaaaaaaaaaaggggggcccc

SEQ ID NO: 233857 - DNA, 387 bp, Glycine max
acgggcacgtaagctcggaaatcggctcgaggcaaagcaatggctacttcaaagttgaaaacccacaatgtggttgtatctctctccctaaccttaaccttggtactggtgctactgaccaacaagggaaactcaacggaaactgtttctttcaactggaacaagttcgtgccgaagcaaccaaacatgatcctccaaggagacgctattgtgacctcctcgggaaagttacaactcaataaggttgacgaaaacggcaccccaaaaccctcgtctcttggtcgcgccctctactccacccccatccacatttgggacaaagaaacccgtaacgttgccagctttgccgcttccttcaacttcaccttctaagcccctgaaacaaaa

SEQ ID NO: 233858 - DNA, 349 bp, Glycine max
cttgttggaggagcattagctcttttttggacttttgatgttttcaaggaggaatcagagggcaagttgaagggaattcttggttacactgaagatgatgtggtctccactgactttatcggcgatagcagatcaagtatttttgatgcaaaggctggaattgcattgaataagaactttgtgaagcttgtttcttggtacgacaacgagtggggatacagctcacgtgtcattgatcttcttgtattcgttgccaagaagtctctttaaggtgttacttcaaagtagcttgtcttcacattattaccgtatgtttatgtttagctgcgatttagtgtcttgctcgagc

SEQ ID NO: 233859 - DNA, 338 bp, Glycine max
cgcgcctttgccgccgaaccaaccaccgaacctcagaaaccctctccaaagaaaaccgtcgacaccttcggccaacgcacctccatctaccgcggcgtcacccgacatagatggacgggaagatacgaagctcatctatgggacaatagttgtagaagagaaggccaaagcaggaaaggaagacaagtttacctgggtggttatgacaaggaagataaggcagccagggcttacgatctcgcagctctcaagtactggggtccaactaccaccaccaactttcccatttccaactatgagaaagaactggaggagatgaagaacatgaccaggcaaga

SEQ ID NO: 233860 - DNA, 417 bp, Glycine max
agctcagaattcagctcgagcacaactactacaagtacttccttacaatcaaaaccaacaacaactatggcaagttatcaaaagcactacgatgatcagggtcgcaaggttgacgagtatggcaacgttgagaagcaaaccgacgaatacggcaaccctgttcatgctgctagtgtcacctatgtagccaccagaactgctgctggtggttacagtgatgacattaataagcaacatgataccaccaatgcctacggcgtatacactggtagacagcattctagtggtggctacgatggtgacactaataaacatcatggaactactggtggctataatgatgacaccaatagacatcatggaactaccggtgtctatggtatagacacccataggcaacaacatgggactactggt

SEQ ID NO: 233861 - DNA, 472 bp, Glycine max
  unsure (1)..(472): unsure at all n locations
agctcagaattcagctcgaggaaccattcttcgagcttttggagctgagttagtcctcactgatcccgccaaaggtatgaaaggagctgttcagaaggcagaagagattcgggataagactccaaattcttatattcttcagcaatttgaaaatcctgccaacccaaaaatccattatgaaaccactgggacggagatctggaanggctccagttggaaaggttgatccctgtcccgggaattgggactggaggtacaataacaggtgctggaaaatatctgaaagatcagaaccctgatataaagctatatggcattgaaccagtagaaagtccaatactgtctggaggaaaacctggccctcataagatccaaggaattggtgctggcttcatccctggtgttctggatgtcaatttacttgatgaagttgttcaaatttcaagtgaagaagccattgaaactgctaaac

SEQ ID NO: 233862 - DNA, 308 bp, Glycine max
tttggtttggtaaggtaaccttgtgttgttgttccaaaaaataaaaagttttgttaaagttaaactacttcctaagtaccccaaaatccacttttaagggtaagggtcctaataataatggaataaaatttggttaaaagaccaaaaaaaaaaaaaaccacaaaaatcctactctcgaacaccaaagttcacatccaacctctcacaacaaaaaaacaaaaaaaaaaaaggggggccccccccaatagtgcccccctaccccgggaaaaaattcccgcccggttcttcacgggtgtaaaattttcccc

SEQ ID NO: 233863 - DNA, 401 bp, Glycine max
cgaaccgcggcgcgtggcgttccatcattgacaaggtctcacgcgcccgcgccctctctctcctccacaagccccacgaccacctcacctaccttgccttcaacgccctctccttcaccaaactgcgtcgtttcaacgaagcctctgcggaactcgattccctcgaagacctcgacagctcccactaccgctacgaaacctaccccaaaatctaccccaatcggatcggatccatggtccccttctccctccggtggctccacgccctaatccccatcaaattagggcaacgtcagcaaggcatggaccgattctacattcttctcgatttcgtgcgcgggaagattaacgaaaaggagaaactgagcaacctcggggtctcccttaatctgtggagaaaa

SEQ ID NO: 233864 - DNA, 242 bp, Glycine max
gaaggaaattggggtcctttggtcaaccctgagtctcaacaaggctcaccccgtgttaaagtcgcataaatgacaagcatgatggtgtgaggatgaggccatcttatgaaataataacaaataaataaattttgtatgataataaaaagtatggcccatgtaccatcccagcgagcctatgtttatatctgagtggcgttgtacctttcaatcgccttaataaaatgtcagtcttcacgttt

SEQ ID NO: 233865 - DNA, 61 bp, Glycine max
aaaaaaaaaaaaaaaaaaaaaaaaaaaaaaaaaaaaaaaaaaaaaaaaaaaaaaaaaaaaa

SEQ ID NO: 233866 - DNA, 370 bp, Glycine max
gttcaatatcctaatataccttaataaataattttagataacatgaatagaacaacggttccaataatgtttccgggaactgttttcctggcctcaatttccgtcccaatttggcatgcttaatgggaaaaaaaaaaacccaaaaaacacaaagtgtctccagaatttgcaataaccagaaagacccttacaagaaacaaccatgccacgctccttgcaacctccttaaagtggagaaagaagaatgtgaagaacgtgaaattccacgaccacgaccacgaccacaacacccggagagggaacctcagcaaccccgtgagaacgacgaagacgaagatgagcaaccacgttcaatcccattcccacgccc

SEQ ID NO: 233867 - DNA, 395 bp, Glycine max
  unsure (1)..(395): unsure at all n locations
gtacaaactcacctccaagtccatgctttttgttcttgcaagagtaacagagaagaagtggacaaacaaagctataatttttaaaagggttaccaccctcaccttctgccaaaccaaacccaaccttttctctctttaagctactattgtgctgagagctgaagaggagatggggggtggaaatcaagaagcagtgaagcagctgcagaccctgatggaaaatgtggatgatgagcagctgaagaacacattccagattatgcaccagggttatcaaactgaaacgttaatacggtttctcaaagctagggactggaatattgccaaagcccataaaatgttaattgattgtttgaactgganggtggaaaatgagattgacaatgttttaagga

SEQ ID NO: 233868 - DNA, 477 bp, Glycine max
  unsure (1)..(477): unsure at all n locations
cgtcgactgcacgcgtgcctaagctcagaattcagctcgagattctcttaacacttcgggaagtgccctgggggaggagctggtgcaaagaatgctattctcatgaatatgccaaatgctgttctttcaatgtggagatattttgttggagatctcgtctttgaagtttctaagatgacttctccctacattaaatgtacagtctctttcttcatagcatttggaaatttggctgatgataccatcaattttgaggcttttccccacaagctggtgcagtttggagagattcaggaaaaagttgtantgaaattttcacaagaggaatttcttacagcttggtcaactcacgtgcgtcctgcaacaactctgttggcggatgggtgtccatattggtatgcaatggtgcatgatagttcagtgtcaacaataccaggtgattttgtcatgggtgtcaagttgacaaccataaccaat

SEQ ID NO: 233869 - DNA, 347 bp, Glycine max
ctcctttttcctatctacatacacaacatacacaaagcaaagcatgggagtgactctggagtttatgacacagaaggacgttatgtgccagcaaatattgagaacatattcagtaagtatgctcgtacagtacctgacaagctcacacttggggagctctgggacttgacagagggaaaccgaaatgcttttgacatatttggctggcttgcagcaaaatttgaatggggggttctgtacattctggcaagggatgaggaaggtttcctgtctaaagaagctgttagaagatgctttgatgggagcttatttgaatactgtgctaaaatgcatactactagtgatgc

SEQ ID NO: 233870 - DNA, 361 bp, Glycine max
attggtccttaaacactcatcagtcatcaccatggccaagctagttttttccctttgttttctgcttttcagtggctgctgcttcgctttcagttccagagagcagcctcagcaaaacgagtgccagatccaaaaactcaatgccctcaaaccggataaccgtatagagtcagaaggagggctcattgagacatggaaccctaacaacaagccattccagtgtgccggtgttgccctctctcgctgcaccctcaaccgcaacgcccttcgtagaccttcctacaccaacggtccccaggaaatctacatccaacaaggtaacggtaattttggcatgatataaccgggttgtcctagcaca

SEQ ID NO: 233871 - DNA, 400 bp, Glycine max
gctgaaaagctttatttataccaaggttttgatcctgccgctgtgaacttccctccacagaacggaaggctagaaactaaaatggaagttgttaaccaaagagatgcagaacttttcttcatgtggcaaatgtatcagagatcaaaccatcagccagaaaagaagacagacatcctcaaacagatagcggagacagtgaagcatacgaaacacatagatggtagcgtggaattgattggagttttattgtatggaccaggaaaaggttcttctgttctacaatccatgagggctcctggtcctgcccttgttgatgactggacatgcctaaaatcaatggttcgggtgtttgagacacactgtgggacactgactcactatggcatgaaacacatgcgag

SEQ ID NO: 233872 - DNA, 328 bp, Glycine max
attatgctagttttgatggttattaccaagcaagttatgagcaagatggcagaaatgatcaacagtctttgtggtggtgatgaaaaactgatgcgtgaaaggacacacctgctgttggcttgttgttcaaggatggcaatttgtaagaaagatgtttggagagttgaatgtggaatcccttctggatttccgctcacagttatttgcaatagcatttttaatgagatgctcattagatatagctatgaaaaattactgcgccaggctaaagctccaagtatgtttttacaatccttcataaattttgtttccttgtgtgtgtatggtg

SEQ ID NO: 233873 - DNA, 392 bp, Glycine max
attaacactttccttagttcaatatggggaagcccttcttcactctctctctttcttccctttgcttgctactcttgtcgagtgcatgccttgctattacctccagcaagttcaacgagtgccaactcaacaacctcaacgcgttgggaacccgacaccgcgttgagtcgaaagtgggcttattgaaacatggaactctcaacaccctgagctgcaatgcgccggtgtcactgttttcaaacgcaacctcaaccgcaaacgccctccacttgccatcttactcaacttatccccaaatggatcattgtcgttcaagggaagggagcaattggatttgcatttccgggatgtcctgagacgtttgagaagccacaacagcaatcaagcagaag

SEQ ID NO: 233874 - DNA, 482 bp, Glycine max
cgtcgactgcacgcgtgcctaagctcagaattcagctcgaggcaatggctacttcaaagttgaaaacccagaatgtggttgtatctctctccctaaccttaaccttggtactggtgctactgaccagcaaggcaaactcagcggaaactgtttctttcagctggaacaagttcgtgccgaagcaaccaaacatgatcctccaaggagacgctattgtgacctcctcgggaaagttacaactcaataaggttgacgaaaacggcaccccaaaaccctcgtctcttggtcgcgccctctactccacccccatccacatttgggacaaagaaaccggtagcgttgccagcttcgccgcttccttcaacttcaccttctatgcccctgacacaaaaaagctttcagatgggcttgccttctttctccaccaattgacacctaaccacaaacacatccacgtaatcttggccttttcaacgaaaaca

SEQ ID NO: 233875 - DNA, 339 bp, Glycine max
agctcagaattcagctcgagaaaagaaagaaagaaaaaaaaaaacagcgccctagatttgctcttctttgcttcggaagaaagagaaaaacaaataacaatggcgttcgcttctttcctcggcagagttctcttcgcttccgtcttcatactctctgcttaccaagaatttaacgaatttggagttgatgggggacctgcagcaaaagcactcagacctaagtttgatgcctttacaaatcgagtgcattctcaagttggctttcaacttcctgagattgatctgaaatttttaattgccggggctattgctctgaaaggccttggaagggttcctttc

SEQ ID NO: 233876 - DNA, 461 bp, Glycine max
gtgcctaagctcggaattcagctcgagctcttatcattcttttttccacttgacattgccgacgccaccaaatacacaaccttaactttcccacaacactacccatccatcattcgttttctctctagattttttcagttagttattgctgtcttctttttgtgtgtgccaacaacacagaaagagagagaaagacatggctctgaaccaatcaaaggccgtgttgttgagggtgagtttggtggtggtggcgctgtgtatagcaggatacatagtgggtccccctctctactggcatttcgttgcagtgaacaaccactcttcatcttctacttgtgcaccctgcatctgcgattgctcttcacaaccaattctttctattccacaaggacttagcaacacttcctttggagattgtgcaaagcctgaccaagaagtgagtggagacactgaaaagaatt

SEQ ID NO: 233877 - DNA, 404 bp, Glycine max
ctattgtgttttaaatccacaaaatccttttgtgttaaataggtggatggggaaactgactttcccccagggcacttcccgaagtgtcaaaagaatgcctctttctatagggggaggagctggtgcaaagaatgctattctcatgaatatgccaaatgctgttctttcaatgtggagatattttgttggagatctcgtctttgaagtttctaagatgacttctccctacattaaatgtacagtctctttcttcatagcatttggaaatttggctgatgacaccatcaattttgaggcttttccccacaagctggtgcagtttggagagattcaggaaaaagttgtattgaaattttcacaagaggaatttcttacagcttggtcaactcaggtgcgtcctgcaa

SEQ ID NO: 233878 - DNA, 372 bp, Glycine max
cttggcttcaaacatgatcaagaatccaccactaagaaagtctctgactatgccggtgatgctgctcagaaatcaaaggactatgccggtgacactgctcaaaaaaccaaggactatgccggtgacactgctcaaaaaaccaaggactatgccggtgacactgcacagacatcaaaggactatgccggtgatgctgctcagaaatcaaagggctatgtcggtgatgctgcacaaaagaccaaagaatatgttggtgatgctgcccagaagaccatggattatgccactgatgcagcacagaagaccaaagattatgctactcagaagactaaggactatgcaagtgatgcaactgatgctgcaaaaaagact

SEQ ID NO: 233879 - DNA, 375 bp, Glycine max
aaaacacattgctaccagtggaacacatactgcagcaatcacagaatcaggggagctttatatctggggtcgagatgaaggggatggccgattgggccttggtcctggtcggggcccagatcatgcaggtggacctagtatcccttccaaagtaaaagagttaccttaccctattgctgctgtatcctgtgggggatttttcacaatggcattgacagtggatggacaattatggaactggggagccaattccaactatgaacttgggagaggtgataagattggtggttggaaaccaagaccagtacccagccttgagaatgttaaaataattcaattagcaagtggtggatatcactcccttgcattaacaga

SEQ ID NO: 233880 - DNA, 382 bp, Glycine max
  unsure (1)..(382): unsure at all n locations
gtcgactctgggaagtcaactaccactggtcactttatccacaagctttgaagtattgaacagcctgtgattgagaggttccagaaagaggctgccgagatgaacaagaggtcattcaagtatgcctgggtgctcgacaagctcaaagctgagcgtgaaagaggaattaccattgatattgctttgtggaagtttganaccaccaagtactactgcacggtcattgatgctcctggacatcgtgactttatcaagaacatgattactggtacctcccaggccgactgtgctgtccttattattgactccaccactggtggttttgaagctggtatttctaaggatggacagacccgtgagcatgctcttcttgctttcaccc

SEQ ID NO: 233881 - DNA, 333 bp, Glycine max
cgtgcctaagctcagaattcagctcgagtcttggtggaggaattttagtggacaaaactggagattggatcacacttatacaaaattctccaattagtaacttgttgagagttgctgcttggaagaaaggctgtttaatggttaagattgtgatgtctgggaatgcagcagtcaaaaggagtgattgggcctcattggtacaagtgtttttaacaaacagcaacagtacagagcattttgatgcatgtaagtggacaaaatcggaaccacattcctgggaattgatcttcccaatagaggtatgcggtcctaataatggttttgaaatgtgga

SEQ ID NO: 233882 - DNA, 380 bp, Glycine max
gtacctaagctcggaattcagctcgagctcgagccgcgcaagaatgctatgttcgtgccacactacaccctgaacgcgaacagcataatatacgcattgaatgggcgggcattggtacaagtggtgaattgcaatggtgagagagtgtttgatggagagctgcaagagggaggggtgctgatcgttccacaaaactttgcggtggctgcaaaatcccagagcgataactttgagtatgtgtcattcaagaccaatgatagaccctcgatcggaaaccttgcaggggcaaactcattgttgaacgcattgccagacgaagtgattcagcacacttttaacctacagagccagcacgccaggcacgtgaagaaacacaaccc

SEQ ID NO: 233883 - DNA, 434 bp, Glycine max
  unsure (1)..(434): unsure at all n locations
gttatgggtttccttgtgttgcttcttttctccctcttaggtctctcttctagttccagcatatcaactcatcgttccatattggaccttgacctaaccaagtttaccacacagaaacaggtgtcttcactgttccaactatggaagagtgagcatggacgtgtctaccataaccacgaagaagaggcaaagagacttgagattttcaagaataacttgaactatatcagggacatgaatgcanacagaaaatcaccccattctcatcgtttaggattgaacaagtttgctgacatcactcctcaagagttcagcanaaagtacttgcaagctcccaaggatgtgtcgcagcaaatcaaaatggccaacaagaaaatgaagaaggaacaatattcttgtgaccatccacctgcatcatgggattggaggaaaaa

SEQ ID NO: 233884 - DNA, 398 bp, Glycine max
gagagagagaagcctggggagtataattggggagggtacgtggaactcatggaaatggcgaagaagcatggcctcaaggtgcaggctgttatgtcatttcaccaatgtggcggtaacgtcggagactcttgcactattcctttgcccaaatgggttgtggaggagattgataatgaccacgatcttgcatatactgatcaatggggaagaagaaactatgaatatatatcacttggatgtgatactttgccggtgctcaagggacgatccccagttcaatgttatgctgatttcatgcgtgctttcagagacactttcaagcacctccttggtgataccattgtggaaatccaagttgggatgggaccagcacgtgagttgcgttacccttcgtaccc

SEQ ID NO: 233885 - DNA, 404 bp, Glycine max
gatgcggccaactttatctcggaagttcaattcatatgtgctgcctacaccagttgatgcgaagagttcaatatctatgaggtcaagtaatcaagtacctttgaaaataaagacaaatttaaatgagcctatgaagaatttatggcattcatccccactagaacaaaagaaatatgaaaacatttttggagatgggggattatctggtcctaatgcacagtctgtactgaaggagagtaacagcaatactgcctactcaagattgccacctcctttaatcgatggtaatttatcctctagtcatgattatattaccgcttactctaaaaagatcaaaagacatgccttttctggtccattggtaagtaatgcatggccaaccaagcctgtctcgttagaaagtg

SEQ ID NO: 233886 - DNA, 395 bp, Glycine max
  unsure (1)..(395): unsure at all n locations
acccatatatatattactataagcctataagttgcatttaatttacagccttgcacgtgtgaagtgaagaataatcttgtgcattgcctaagctctctcaactcaactgaatcagggtcacaattaatcgtcttgaaattaagaccagctgggtcattgatcacaatctcatcaagggaaagtagtgaaaaaataaaggtttattgatcatcanggatggcaactcgaagatatgagtttggaaggatgaatgaggctagccacccagactccatcagagctgccttggttgaattcctctccacttgcatctttgtctttgctggagaaggctctgcccttgctttgcgacaaatttacaagggaacaaggtcatcagcgggtgagttagtggt

SEQ ID NO: 233887 - DNA, 334 bp, Glycine max
atctcctttaccaccattctagatatcagagaactttgcagctctcttaggtttttaaaaaacaccacgcaaacagcaagatggccacttccgacagtaacatgctactaaattatgttccagtttatgtgaatgctccactcggagttgtcaatgtttacaatgttttttaagacccagattggccttaaaaaacaactcttgcagcttccaacctgccgggtgtttaacgggttaatcgttgaagttctggtgggggattcaaaaaactgaacgggcctaagcagtatgattggagagcctacaggagtttgtttcagccggttcaagaatg

SEQ ID NO: 233888 - DNA, 376 bp, Glycine max
gtacctaagctaagaattcagctcgagacaagccattccagtgtgccggtgttgccctctctcgctgcaccctcaaccgcaacgcccttcgtagaccttcctacaccaacggtccccaggaaatctacatccaacaaggtaagggtatttttggcatgatatacccgggttgtcctagcacatttgaagagcctcaacaacctcaacaaagaggacaaagcagcagaccacaagaccgtcaccagaagatctataacttcagagagggtgatttgatcgcagtgcctactggtgttgcatggtggatgtacaacaatgaagacactcctgttgttgccgtttctattattgacaccaacagcttggagaaccagct

SEQ ID NO: 233889 - DNA, 354 bp, Glycine max
  unsure (1)..(354): unsure at all n locations
agctaagaattcagctcgagcagcattttaatgtacttatttcctcatttcaacaggtttctccatgacaaggttaagccacaagttgtgcatcgagatatacgcactagcaacgtactgctggatgaggaatttggagcacgccttatgggggttggtctgtccaagttcgtgccatatgaggtaatgcatgagaggactgtgatggcaggtggaacttatggatatcttgctccggagtttgtgtacagaaaacgagctcacaacaaagagtgacgtatatagtttcggtgtgctactacttgaaatagtaagtggacgtagacctgcacaggcantggattccgtgggttg

SEQ ID NO: 233890 - DNA, 402 bp, Glycine max
ctcaaagaaattaagagagttttttttgttcctcactgaccaagccatggcgatgagaaccaaactttctttagctatctttttcttttttcttttagccttattttcaaacctagcctttggcaaatgtaaagaaaccgaggtagaagaagaagaccctgagctcgtaacatgcaaacaccaatgccaacagccacagcaatacactgagggtgacaagcgggtatgcttgcaaagatgtgacaggtatcatcgtatgaagcaagagcgagagaaacaaatccaagaggaaactcgtgagaagaaagaggaggaaagccgtgaaagggaagaagaacaacaagagcagcatgaggaacaagatgaaaatccctacatttttgaggaagataaggattttga

SEQ ID NO: 233891 - DNA, 399 bp, Glycine max
gtgaggcttcaatttccaattagggtttcgcttagagtaaccaattaccatgggagtcttcacctttgtcgttcgcaaatccggcgccgaatggagcgccaagcaacattccggcgacatcgaggcctccgccgactccacctacgatctccaaaggaagctcgtgcaagccgctctcgccgttgattcctccggtggagtccagtcctccttctctcccgtgtctcctacctccgctgtgttccaggtgatagtgggtggtgctgtattcgttggaggtggcggtggtgctgttgcagctgcacctgcaggtggtgctgctgcagctgatgctgccccggctgctgagaaaaaggaagaaaaggtggaagaagagtccgatgatgatatgggattggg

SEQ ID NO: 233892 - DNA, 389 bp, Glycine max
  unsure (1)..(389): unsure at all n locations
gatgttttccctcctctaaggtcccaattttttcttaaaccctagaacacacactctctctcacagaagaagaagctgctgcagaagagaatttccaaaatgtcgatgtcgaagagttccaagatgcttcagtacatcaactaccgtttgcgtgtcaccattcaggacggtcgccagctcgtcggaaaattcatggccttcgaccgccacatgaacctcgtcctcggcgactgtgaggagttccgcaagcttcctccggccaagggcaagaagccagccgaaggcgccgaccgcgaggaccgccgcacgctcggcctcgtcctcctccgcggcgaggaggtcatcntcatgaccgtcgagggccctcctccgccggaagagtcccgctc

SEQ ID NO: 233893 - DNA, 391 bp, Glycine max
cacactgtcaccgttccgttccgttttcctctgttttttttttctttctttcaaatccccgcttcgtggaaatcccgaaccagaaaccatgcttctccgaaccgctgctgcttctgcttcgtccctctccctcttcagcccgaacgccgaacctccccgttcggttcccgctcgtggattggtggttcgcgcagcgaaaggatccacgaaccaccgcgccctgaccggagtgatttttgaaccgttcgaagaggtgaagaaggagctcgatctcgttcccaccgttccgcaagcttctctcgcgcgccaaaaatacgttgacgaatctgagtccgccgttaacgaacaaatcaatgtggagtataacgtttcgtacgtttaccatgccatg

SEQ ID NO: 233894 - DNA, 382 bp, Glycine max
  unsure (1)..(382): unsure at all n locations
atggctgtagcaggattagcagctgatggcagacaaattgttgccagggctaagtctgaagctactaactatgacagcgtatatggcgaaccaattcctgttaaggaacttgctgaccgtgtggctagttatgtgcacctctgtacgctatattggtggctcagaccttttggatgtggtgtcatactaggaggttatgacagggatggaccacagttgtacatggttgaaccttccggtgtttcctatagatatttcggtgctgcaattgggaagggcangcaggctgctaaaacagagattgaaaagttaaagcttgctgatatgacatgtcgacaaggggttattgaagtggctaaaattatatatggagttcatgatg

SEQ ID NO: 233895 - DNA, 427 bp, Glycine max
gagtgcaggcatcatattgtatattcttctgagtggtgtaccacctttttgggctgaaactgaaaagggaatatttaatgccatattggaaggtgaaattgattttgtaagtgaaccatggccatccatatcagacagtgctaaagacctagtcaggaagatgctgacacaggatccaaacaagcggattacttcttctcaagtccttgaacacccatggatgagagaacgtggagatgcatctgataaaccaatcgatagtgcagttctatccagaatgaaacaattcagggcaatgaataagctcaagaagctagcattgaaggttatccctgaaaatctatcacaagaggagattaaaggtctcaaagcaatgtttgccaacatggacactgacaatagtggcactatcacctatgaagaatta

SEQ ID NO: 233896 - DNA, 405 bp, Glycine max
agctcagaattcagctcgagactgaccaagccatggcgatgagaaccaaactttctttagctatctttttcttttttcttttagccttattttcaaacctagcctttggcaaatgtaaagaaaccgaggtagaagaagaagaccctgagctcgtaacatgcaaacaccaatgccaacagccacagcaatacactgagggtgacaagcgggtatgcttgcaaagatgtgacaggtatcatcgtatgaagcaagagcgagagaaacaaatccaagaggaaactcgtgagaagaaagaggaggaaagccgtgaaagggaagaagaacaacaagagcagcatgaggaacaagatgaaaatccctacatttttgaggaagataaggattttgagaccagagtcgaaactg

SEQ ID NO: 233897 - DNA, 359 bp, Glycine max
tcctcaccgattgctagaatggaatttcgatgctcagtcatctcttttaccattctcttctctcttgctcttgcaggagagagccatgtccatgcatcgctacctgaggaagattattgggaagctgtttggccaaacactcccattcccactgcactgcgagagcttctaaagcctctccctgcaggtgttgaaatcgatgaactccctaagcaaattgatgatacacagtacccaaaaacattcttctataaagaagaccttcatccaggcaaaacaatgaaagtacaattcaccaagcgtccctatgcacaaccttatggtgtatatacatggtttacggatatttaagacacctc

SEQ ID NO: 233898 - DNA, 405 bp, Glycine max
ataaccggccaaagcttctctctcttccatttatcccccataaataaaactaggtgaaaaaaatatactctgtgcttctcatgatgatagtgtagctgaagctgcttctgctgcagcattggtgatttggacacaaaaaaagtttcaaacttttcagttctctgagcttctggtttatcaattttgaaggagttcaatactttaccctattagttggttccctgaaatttgtattggtattgctgtatcagaaattcttctgaacaatctctttaatcaaccatgtcattattggctaaactacgctgtgtcaccatagatgttactggtaccctaatggcttacaaaggggagctccgtgactattattgcatggcagccaaagctgcaggcaaaccttgccca

SEQ ID NO: 233899 - DNA, 400 bp, Glycine max
ccaccctcaccattactatcctcaccaccccaaaaaaaaacaaacccctcgtttccactctcctctcctcccacccttcgattcaaaccctaatcctccccttcccctctcacccttctctccctcccggcatcgaaaacgccaaagacatgcccctctccattcgccccatcatgctctctctctccaacctccaccaacctctcacgaactggttccgctcccacccttcccctccacgcttcatcatctccgacatgttctgcggatggacccaacccctcgcttccgagctcggaattcaaagactcgtcttctccccctccggcgcctttgcgtactccaccatgtgctttctctggaaggaaactccaaaacgcgaaaacgaacaagaccaaaa

SEQ ID NO: 233900 - DNA, 476 bp, Glycine max
  unsure (1)..(476): unsure at all n locations
tgccccggcttnatgcccctaatnncctagtcccgtcggacgcacgcgtacgtaaactcggaattcggctcgagctggcgatgcgggatgaaccggaagctgggttacggtgcccaactgcgcgctaacctagaccccacaaagggtgttggtcgattaagacagcaggacggtggtcatggaagtcgaaatccgctaaggagtgtgtaacaactcacctgccgaatcaactagccccgaaaatggatggcgctaaagcgcgcgacctatacccggccgtcggggcaaggaccaagccccgatgagtaggagggcgcggcggtcgctgcaaaacccagggcgcgagcccgggcggagcggtcgtcggtgcagatcttggtggtagtagcaaatattcaaatgagaactttgaacgccgaagaggggaaaggttccatgtgaacggcacttgcacatgggttagtcgatcctaacgg

SEQ ID NO: 233901 - DNA, 369 bp, Glycine max
agctcagaattcagctcgaggagaaaaatggctgatacaagtggaggagatgcagtgagaccggtggtaatatgtgataacaagtgtggctgcacagttccatgcactggtggttccacttgcaggtgcacaagtgtcggcatgacaactggaggcggtgatcacgtgacatgctcgtgcggagagtactgtgggtgcaatccatgctcatgtcccaagactgcggcttctggaactggttgcagatgtggcacagattgctcatgtgcctcttgccgcacttaacatcataccttaattaagtctcaaacttcacaaatcttgaatgtgctttaaatctagctatgtactagatagtctcgttcaatg

SEQ ID NO: 233902 - DNA, 284 bp, Glycine max
caacagctttcatgggatgatgattagcagggttttcgatgattacacaggcatgttgcggctggtccacttttggcttggggatgctgcaacatacgcggcaggaggtcatggtatgggtttgggcaactccacctgcgagccagttccatggtcgttcggtcatatcatgggtgacctttttacccacggatattgccaatgaaagcatcgctctcgcgaatttaatccatgcatccgtgtccttggcaccatgacagtgtccataatcataattatggtgt

SEQ ID NO: 233903 - DNA, 423 bp, Glycine max
gacgttagacgcacgcgtccgtaagctcggaaatcggctcgaggcaaagcaatggctacttcaaagttgaaaacccagaatgtggttgtatctctctccctaaccttaaccttggtactggtgctactgaccagcaaggcaaactcagcggaaactgtttctttcagctggaacaagttcgtgccgaagcaaccaaacatgatcctccaaggagacgctattgtgacctcctcgggaaagttacaactcaataaggttgacgaaaacggcaccccaaaaccctcgtctcttggtcgcgccctctactccacccccatccacatttgggacaaagaaaccggtagcgttgccagcttcgccgcttccttcaacttcaccttctatgcccctgacacaaaaaggcttgcagatgggcttgccttc

SEQ ID NO: 233904 - DNA, 453 bp, Glycine max
ttcagtagctgtagagtcgagggacggtagacgcatgggtccgtaagctcggaaatcggctcgaggtcggatcgcacggcctttgtgccggcgacgcatcattcaaatttctgccctatcaactttcgatggtaggatagtggcctaccatggtggtgacgggtgacggagaattagggttcgattccggagagggagcctgagaaacggctaccacatccaaggaaggcagcaggcgcgcaaattacccaatcctgacacggggaggtagtgacaataaataacaataccgggctcattgagtctggtaattgggatgagtacaatctaaatcgcttaacgaggattcattggagggcaagtctggtgccagcagccgcggtaattccagctccaatagcgtatatttaagttgttgcagttaaaaagctcgtacttggaccttgggttggg

SEQ ID NO: 233905 - DNA, 376 bp, Glycine max
gcgaaacctccctcgacgccacgctccagatcgccctccgcacgctcgacacgcgccgcaccgctgccctctccgccctcctcaccgacgccgacgacatcatcaacagctcccccgacggtgaggtcgacgacaccaccggcctcatcctcaaactcaagtccttctgcctccgcatggacgcattcgggttcttcgccttcgtcagcgccaagaagaaggagctcgacggcctacgcgccgagatgcctgtggctctggcggagtgcgttgatccggcgaaattcgtgctggaggcgatctccgaggtgtttccggtcgacaagagaggggcacaagtcggccacgacttgggctgggcctgcgtccttgtcct

SEQ ID NO: 233906 - DNA, 380 bp, Glycine max
gttgagtttgacactttccggaactcttgggatccaccaaatccacacatcggaattaacgtcaattctatcagatccatcaaaacgacgtcttgggatttggccaacaataaagtagccaaggttctcattacctatgatgcctccaccagcctcttggttgcttctttggtctacccttcacagagaaccagcaatatcctctccgatgtggtcgatttgaagacttctcttcccgagtgggtgaggatagggttctctgctgccacgggactcgacatacctggggaatcgcatgacgtgctttcttggtcttttgcttccaatttgccacacgctagcagtaacattgatcctttggatcttacaagctttgtgtt

SEQ ID NO: 233907 - DNA, 403 bp, Glycine max
gtaagctcggaaatcggctcgagcattggtacaagtgtttttaacaaacagcaacagtacagagcattttgatgcatgtaagtggacaaaatcggaaccacattcctgggaattgatcttcccaatagaggtatgcggtcctaataatggttttgaaatgtggagttctgagtgggcaaatcaaacttcatggcatttgagtttccttattgacaatcccaaacagtctacagtttttgacattctcttgggaatttctcaagattttgaaattgctggtaatactcttatgccagctttttctgttccacaggctactgccagatcttctgaaaatgcggaatcctctgcatgatctggaatttgtgttttctttcatttgtccgtttgtttaattcaataa

SEQ ID NO: 233908 - DNA, 368 bp, Glycine max
accgcacagagcagaaaatcatcacaggaaacaactggttatgtattcttaagatgcgttatcacgggtaatggaggaaattcatatgcatatcttggacgaccgtggggcccttttggaagggtggtctttgcatacacttacatggatcaatgtataaggcatgttggctgggataactgggggaaaatggagaatgaaagaagtgtttgcttttatgaatacaggtgttttggacctggttgctgtccatcaaaaagagtaacctggtgtagagaattgttggatgaagaaactgagcagttcctcacgcatcctttcattgatccagaaacagagaaaccttgggttgctcaaaggatggccct

SEQ ID NO: 233909 - DNA, 382 bp, Glycine max
aacaaagtatagagtgaaagaatgggtgagaaaagcaagattttgatcataggaggcaccggctacatcggcaaacatatagtggaagcaagcgcaaaggctggaaatcccacttttgctttggtgagggaatccacactctctgacccctccaaggcacaactcatccacaattttgaggctttgggcgttaatttggtccgcggggatctgtacgatcatgagaagttggtgaaagctatcaagcaagtagatgtcgtcatatccacgctgggtcacctgcagcttgccgatcagctcaagatcatcgctgccattaaggaagccggtaatgttaagaggtttttcccttcggaattcggtaacgacgtggatcgtgtcc

SEQ ID NO: 233910 - DNA, 227 bp, Glycine max
aactaacaataattccttcacttgcagaacttagttctctgttgcatcatcatcatcttcattagtgttagccctaaacttcaccttcaaccatgaccacagtgccaccacacagtgtccaagtgcacacaacaccacaccgctacgaagccggcgtcttcccgccggttcgttttgaggccccgcgttacgaatccggcatcaaggcgccttcttccattaacaat

SEQ ID NO: 233911 - DNA, 399 bp, Glycine max
gtaagctcggaaatcggctcgagcaaaaacccattcacttttccacaagccttagttcttctcatttattctctttttcaaaatactttcactctctctaaccttccagttctcactaaacctcgtgaagctcgtgatggacaccaagataggttcactagacgcgcccaagcccaacagcaacgacgtcgtatcatgcaacctcactagcagcgccgccatccagccctgcttgccggcgacggtgatcaacggcgccggctgtagtgactccaccttgggcggccacctggcccgccggctggtggaaatcggcgtcaccgacgtgttctccgttcccggggacttcaacctgacgctgctggaccacctcatcgcggagccggcgctgcacctggt

SEQ ID NO: 233912 - DNA, 429 bp, Glycine max
gacgtaagacgcacgggcccgtaaactcggaaatcggctcgagacaagtacttccttacaatcaaaaccaacaacaactatggcaagttatcaaaagcactacgatgatcagggtcgcaaggttgacgagtatggcaacgttgagaagcaaaccgacgaatacggcaaccctgttcatgctgctagtgtcacctatgtagccaccagaactgctgctggtggttacagtgatgacattaataagcaacatgataccaccaatgcctacggcgtagacactggtagacagcattctagtggtggctacgatggtgacactaataaacatcatggaactactggtggctataatgatgacaccaatagacatcatggaactaccggtgtctatggtatagacaccgataggcaacaacatgggactactgg

SEQ ID NO: 233913 - DNA, 425 bp, Glycine max
gacgtcagacgcacgggcccgtaaactcggaaatcggctcgagggaaagcgtgaacaagaccaggaccaggacgaggacgaagatgaagatgaagatcaacctcgcaagagccgcgaatggagatcgaaaaagacacaacccagaagacctagacaagaagaaccacgtgaaagaggatgcgagacaagaaacggggttgaggaaaatatctgcaccttgaagcttcacgagaacattgctcgcccttcacgcgctgacttctacaaccctaaagctggtcgcattagtaccctcaacagcctcaccctcccagccctccgccaattccaactcagtgcccaatatgttgtcctctacaagaatggaatttactctccacattggaatctgaatgcaaacagtgtgatctatgtgactcgaggac

SEQ ID NO: 233914 - DNA, 385 bp, Glycine max
gcctcaccctcccagccctccgccaattccaactcagtgcccaatatgttgtcctctacaagaatggaatttactctccacattggaatctgaatgcaaacagtgtgatctatgtgactcgaggacaaggaaaggttagagttgtgaactgccaagggaatgcagtgttcgacggtgagcttaggaggggacaattgctggtggtaccacagaacttcgtggtggcggagcaagccggagaacaaggattcgaatacatagtattcaagacacaccacaacgcagtcactagctacttgaaggatgtgtttagggcaattccctcagaggttcttgcccattcttacaaccttcgacagagtcaagtgtctgagcttaagtatga

SEQ ID NO: 233915 - DNA, 400 bp, Glycine max
gactctacaggatcccctcggggaattccaattccacattttcaagaaataaggaggcaaaaatgttcatatatgaattggaattatttgttttcttattaggcctatcctgaagccaaaggaaatgagatcggaattcctcggggaattccaattccacattttcaagaaataaggaggcacaaatgttcatatatgaattggcattatttgttttcttattaggcctatcctgaagccaaaggaaatgagatcggaattcctcggggaattccaattccacattttcaagaaataaggaggcaaaaatgttcatatatgaattggaattatttgttttcttattaggcctatcctgaagccaaaggaaatgagatcggaattcctcgggggtaccgag

SEQ ID NO: 233916 - DNA, 380 bp, Glycine max
tgaccaagttcacaatcctcctcatctctcttctcttctgcatcgcccacacttgcagcgcctccaaatggcagcaccagcaagatagctgccgcaagcagctccagggggtgaacctcacgccctgcgagaagcacatcatggagaagatccaaggccgcggcgatgacgatgatgatgatgacgacgacaatcacattctcaggaccatgcggggaagaatcaactacataaggaggaacgaaggaaaagacgaagacgaagaagaagaaggacacatgcagaagtgctgcacagaaatgagcgagctgagaagccccaaatgccagtgcaaagcgctgcagaagataatggagaaccagagcgaggaactggaggag

SEQ ID NO: 233917 - DNA, 373 bp, Glycine max
cttgtgggcactatcatatacgagatagatgaacatccattccaaagcaccttttttaatggcactgttgaagttgttgaatctggtgcttttctaagcatggaatctgtttttcttgttactcttggggttgcactccttgtcctcctggggctatggattcatggtcaaatacaacacctatctaagaaaacaaagagggcgccaaaagttgaagttgggactaggactactgatgcttcaacagatgaatggctgcagggaactgcatatactcagtctatgtcaagcaagtcaaagaagaagaagtagataagcaatttctcacgttcagccacacacaagactctatcatggatatggaatacagaat

SEQ ID NO: 233918 - DNA, 423 bp, Glycine max
acgtcagacgcacgggtccgtaaactcggaaatcggctcgagggccaggcaagccccactcaaccaccacacctctcctcgttcacgctacccctttctgctcttcttctacctttcaagttttaaaagtataaagatggcagagacattcctatttacctcagagtcggtgaacgagggacaccctgacaagctctgcgaccaaatctccgatgctgtcctcgacgcttgcctcgagcaggacccagacagcaaagttgcctgcgaaacatgcaccaaaaccaacttggtcatggtcttcggagaaatcacgaccaaggccaacgttgactacgagaagatagtgcgtgacacctgcaggaacatcggcttcgtctcaaatgatgtgggactggatgccgacaactgcaacgtcctcgtcaa

SEQ ID NO: 233919 - DNA, 383 bp, Glycine max
ctcgagccgcttggaacatgcattcagcgtggacaagcagatagcgaaaaacctacaaggagagaacgaaggggaagacaagggagccattgtgacagtgaaaggaggtctgagcgtgataaaaccacccacggacgagcagcaacaaagaccccaggaagaggaagaagaagaagaggatgagaagccacagtgcaagggtaaagacaaacactgccaacgcccccgaggaagccaaagcaaaagcagaagaaatggcattgacgagaccatatgcaccatgagacttcgccacaacattggccagacttcatcacctgacatctacaaccctcaagccggtagcgtcacaaccgccaccagccttgacttcccagccctct

SEQ ID NO: 233920 - DNA, 368 bp, Glycine max
acgggcccgtaagctcggaaatcggctcgagacgcattgccagaggaagtgattcagcacacttttaacctaaagagccagcaggccaggcaggtgaagaacaacaaccctttcagcttcctggttccacctcaggagtctcagaggagagctgtggcttagagagccctttttgcatgtgctaccacacttttgtccttttgggctctagctagtgctggtagcagtaaataagaatgaatacaagaaacaaaggcttagatgccctttgttaagtgtagaataacgggtatagtaactatgtacccttgtgtaatgagtcactcaagtacctatgcgggaaaagcatacataacagaagaaattcc

SEQ ID NO: 233921 - DNA, 377 bp, Glycine max
gaagagagcgtcctagtcgcaaccctaataagaagaaccacagcttcaagcgagtgacatccaccagccatgggtcgtatgcacagccgcggtaagggtatatcctcttctgctttgccctacaaaaggacaccccctagctggctcaagatctcttcgcaagatgtggaagaaaatatctgcaagtttgcgaagaagggtttgaccccgtctcagattggtgtcattcttcgagattctcacggtattgctcaggtcaacagcgtcactggcagcaaaatccttcgcatcctcaaagctcacgggcttgcgcctgaaattccagaggatctttaccatttgattaagaaggcagtttcaattaggaagcatcttga

SEQ ID NO: 233922 - DNA, 385 bp, Glycine max
tcggggaattccaattccacattttcaagaaataaggaggcaaaaatgttcatatatgaattggaattatttgttttcttattacgcctatcctgaagccaaaggaaatgagatcggaattcctcggggaattccaattccacattttcaagaaataaggaggcaaaaatgttcatatatgaattggaattatttgttttcttattaggcctatcctgaagccaaaggaaatgagatcggaattcctcggggaattccaattccacattttcaagaaataaggaggcaaaaatgttcatatatgaattggaattatttgttttcttattaggcctatcctgaagccaaaggaaatgagatcggaattcctcgggggtaccgagct

SEQ ID NO: 233923 - DNA, 383 bp, Glycine max
  unsure (1)..(383): unsure at all n locations
gttcgcaacacgatcactattctgcgacgatggtggcacattcgagttcttggggaagggcactcgtcgcgatctcgccctacaccttctccgccatcggcatcgccgtcgctatcggcgtctccgtcctcggcgccgcctgggggatctacatcaccggaagcagcttgatcggcgctgcaatcagggctcctcgaatcacttccaaaaatctcattagtgtaatcttctgtgaagctgttgctatatatggtgttattgtggctattattcttcaaaccaaattagaaagtgttccagcatcaaatatttatgcaccagagtctcttanggctggatatgcaatctttgcatcgggattaattgtgggcttcgcaaatctt

SEQ ID NO: 233924 - DNA, 421 bp, Glycine max
gacgtacgacgcacgcgtccgtaagctcggaaatcggctcgaggctgatcgttccacaaaactttgcggtggctgcaaaatcccagagcgataactttgagtatgtgtcattcaagaccaatgatagaccctcgatcggaaaccttgcaggggcaaactcattgttgaacgcattgccagaggaagtgattcagcacacttttaacctaaagagccagcaggccaggcaggtgaagaacaacaaccctttcagcttcctggttccacctcaggagtctcagaggagagctgtggcttagagagccctttttgcatgtgctaccacacttttgtccttttgggctctaactagtgctggtagcagtaaataagaatgaataaaagaaacaaaagcttagatgccctttgttaagtgtagaat

SEQ ID NO: 233925 - DNA, 406 bp, Glycine max
tctaaaggatcactcggggaattccaattccacattttcaagaaataaggaggcacaaatgttcatatatgaattggaattatttgttttcttattaggcctatcctgaagccaaaggaaatgagatcggaattcctcggggaattccaattccacattttcacgaaataaggaggcaaaaatgttcatatatgaattggaattatttgttttcttattaggcctatcctgaagccaaaggaaatgagatcggaattcctcggggaattccaattccacattttcaagaaataaggaggcaaaaatgttcatatatgaattggaattatttgttttccttattacgcctatcctgaagccaaacgaaatgacatttgaattcctcggcgacattcaattccacatt

SEQ ID NO: 233926 - DNA, 392 bp, Glycine max
cggctcgagcaactaacaataattccttcacttgcagaacttagttctctgttgcatcatcatcatcttcattagtgttagccctaaacttcaccttcaaccatgaccacagtgccaccacacagtgtccaagtgcacacaacaacacaccgctacgaagccggcgtcgtcccgccggctcgttttgaggcgccgcgttacgaagccggcatcaaggcgccctcttccatttaccattccgagagaggtccgacgacctctcaggttctcgcagttgtcgccggccttccggtcggcggcatcctcctgctcctggcaggactgaccctggctggaactctcaccgggctggtggtggcaacaccgctcttcatcatcttcagcccggtgct

SEQ ID NO: 233927 - DNA, 374 bp, Glycine max
agattcaggaaaaagttgtattgaaattttcacaagaggaatttcttacagcttggtcaactcaggtgcgtcctgcaacaactctgttggctgatgggtgtccatatttgtatgctatggtgcatgatagttcagtgtctacaataccaggtgattttgtcattggtgttaagttgacaaccataaataatatgtgtgcatatgggctcaatcctggtatttcaggttctcgtcttttgggcaccattcctcagtccatttcacagcaaactgtttggaatcaaatggcaacagtgagaacaccattgaattttgattctagcaagcagagcttttgtcaattttctattgaccttctcggtggaggaatttta

SEQ ID NO: 233928 - DNA, 381 bp, Glycine max
cggctcgagattaacactttccttagttcaatatggggaagcccttcttcactctctctctttcttccctttgcttgctactcttgtcgagtgcatgctttgctattacctccagcaagttcaacgagtgccaactcaacaacctcaacgcgttggaacccgaccaccgcgttgagtccgaaggtggtcttattgaaacatggaactctcaacaccctgagctgcaatgcgccggtgtcactgtttccaaacgcaccctcaaccgcaacggcctccacttgccatcttactcaccttatccccaaatgatcattgtcgttcaagggaagggagcaattggatttgcatttccgggatgtcctgagacgtttgagaagccac

SEQ ID NO: 233929 - DNA, 343 bp, Glycine max
ggaagcatcattggagagagctttcaaggagttcaagaaaaagggagtgaagtgatggcaagcattggtgaaaaactgggaagtgctgcacatacattagtgaagaagccattggataaggccactgagggagggagagaggtgttgggagctgtacgtgaaactgtggttgagattggtgaaaacatggtgaaaaaaccagcacagaaagtgcagcagcatcaaggtgaaggtggaggaggggtgctgaatgccattggtgaaaccatagcagagatagcagagacaactaaggtgattgttgctggagagggagaaaaggagataatagtaaaaccacatg

SEQ ID NO: 233930 - DNA, 454 bp, Glycine max
aatcaggtagctgatatgccagagtgacgtaggacgcacgcgtacgtaagctcggaaatcggctcgagctttgaacactcatcaccatggccaagcttgttctttccctttgtttccttcttttcagtggctgcttcgctctgagagagcaggcacagcaaaatgagtgccagatccaaaagctgaatgccctcaaaccggataaccgtatagagtcggaaggtgggttcattgagacctggaaccctaacaacaagccattccagtgtgccggtgttgccctctctcgctgcacccttaaccgcaatgcccttcgtagaccttcctacaccaacggtccccaggaaatctacatacaacaaggtaatggtatttttggcatgatattcccgggttgtcctagcacttatcaagagccgcaagaatctcagcaacgaggacgaagccagaggcc

SEQ ID NO: 233931 - DNA, 387 bp, Glycine max
ctggagactcatggttcaactgtcagaagctccatctgcctgagaattgcgggtatgaattccagatgcagtatggatccattggttggtcagtaggtgctactcttggatatgcacaggctgcaacagacaagcgtgtaattgcttgcattggtgatggcagttttcaggtaacagcacaggatatttcaacaatgattcgctgtggacaaaagaccatcatctttctcatcaataatggaggttatacaattgaagttgagattcatgatggtccatacaatgtgataaagaattgggactacactcgctttgtggacgctatccataatgggcaaggcaaatgctggactgccaacgtacgtacagaggatgatctgactgaag

SEQ ID NO: 233932 - DNA, 384 bp, Glycine max
caaaaggctctctcacgcagtcgcagtgagtgaaaaggaaaaccctaattgcggtattctcagtgccttcgagagaaagaaaaaatggcagataatcttgttctccgtggcaccatgcgcgcccacaccgacgttgtgacggcgattgccactcccatcgacaactccgacatgatcgtcaccgcctcacgcgacaaatccatcatcctctggcatcttaccaaggaggacaagacttacggtgtcccccgccgccgcctcaccggccattctcattttgtccaggacgtcgtcctctcttctgacggccagtttgccctatccggctcctgggacggcgagctccgcctctgggaccttgctgctggcacctccgctcgccgc

SEQ ID NO: 233933 - DNA, 383 bp, Glycine max
gattctagcaagcagagcttttgtcaattttctattgaccttctcggtggaggaattttagtggacaaaactggagattggatcacacttatacaaaattctccaattagtaacttgttgagagttgctgcttggaagaaaggctgtttaatggttaagattgtgatgtctggaaatgcagcagtcaaaaggagtgattgggcctcattggtacaagtgtttttaacaaacagcaacagtacagagcattttgatgcatgtaagtggacaaaatcagaaccacattcctgggaattgatcttcccaatagaggtatgtggtcctaataatggttttgaaatgtggagttctgagtgggcaaatcaaacttcatggcatttgag

SEQ ID NO: 233934 - DNA, 373 bp, Glycine max
ggtgaagcgtgaggacttatggatcacctccaaactctggtgttcagatcatgcttcagaagatgtgcccaaagcattggataaaacattgcaggatttgcaacttgattaccttgacctctatctgatccactggccagtgcgcatgaaaagcggatcagttggattcaagaaggaatatctcgatcaaccggacattcccagcacatggaaagcaatggaggcactctatgactcaggcaaggcaagagccataggagttagcaatttctcttcaaaaaagcttcaagatctcatgaatatagcaagagtgcctcctgctgttaaccaagtggaattgcacccaggatggcagcagccaaagctgcatgca

SEQ ID NO: 233935 - DNA, 385 bp, Glycine max
ctttgttttgagtttgaggaatataagaaaaatgaaaatgggtaaaggaattgtttttattgttgctctggtggccatttgccttggtgggaaatgggtggaagcgcaggtgcatcatgttgtcggagcagaccgtggttgggatcaaacctccgacctcgtttcttggtctgcaagcagagtcttcagggttggagaccaaatttggctcacttactctgtggctcagggattagtcgctgagctgaaaagcagagaggaatatgaggcatgtaatgtgagcaaccccatcaacgtgtacacagagggtttgcatactatccctcttgagagtgaaggaatgaggtattttgtgagcagcgagccagagaattgcaaaaatggt

SEQ ID NO: 233936 - DNA, 385 bp, Glycine max
ctcgagccgctcgagccgaatcggctcgagcaattttggttaagagtcttgaaaaagcaagagaaaaaaaaataccaaccatggcaaccatttctgatcaacctagagggtcctactcctatggaacctcatatggagcaccctatggaaccacgtatgagaccaacaccagcattaacaacccaccttcacgccaaacagtgaagttcataactgctgccactattggcatcacactcttgctcctgtctgggttgaccctcacaggcactgtcataggtttgatcattgcaacccctcttcttgttatcttcagccccatccttgtccctgctgcgtttgtgctgttcctagttgcttctggctttttgttctctgggggctg

SEQ ID NO: 233937 - DNA, 410 bp, Glycine max
ggatcactcggggaattccaattccacattttcaagaaataaggaggcaaaaatgttcatatatgaattggaattatttgttttcttattaggcctatcctgaagccaaaggaaatgagatcggaattcctcggggaattccaattccacattttcaagaaataaggaggcaaaaatgttcatatatgaattggaattatttgttttcttattaggcctatcctgaagccaaaggaaatgagatcggaattcctcggggaattccaattccacattttcaagaaataaggaggcaaaaatgttcatatatgaattggaattatttgttttcttattaggcctatcctgaagccaaaggaaatgagatcggaattccccggggggtaccaactcgaattccctatagtgag

SEQ ID NO: 233938 - DNA, 430 bp, Glycine max
tgacgtcagacgcacgcgtccgtaaactcggaaatcggctcgagcaaactttccccatcgtcatctttttcctcatttcagtctcagattctctcctttgacaatcctaacccaacctcatcttccaacaccaccacccagttttatgggtttgactgtaccttaaacccaacacagaacgagatggtgtcagtgtcagtccccaacatgagaaaaccacggttcccaactcaaaccgcaaaaggttcaccgaaaaatcaaaactttgaaacaaaaacctcacatggtaagaggtctccagctcatgctcaagatcacatcatggctgaaagaaaacgaagagagaaactcagccagagcttcattgcccttgcagctcttgttcctggcctaaagaagatggacaaggcttctgtgttaagggacgcta

SEQ ID NO: 233939 - DNA, 382 bp, Glycine max
tcaggttctcgtcttttgggcaccattcctcagtccatttcacagcaaactgtttggaatcaaatggcaacagtgagaacaccattgaattttgattctagcaagcagagcttttgtcaattttctatcgaccttctcggtggaggaattttagtggacaaaactggagattggatcacacttatacaaaattctccaattagtaacttgttgagagttgctgcttggaagaaaggctgtttaatggtcaagattgtgatgtctgggaatgcagcagtcaaaaggagtgattgggcctcattggtacaagtgtttttaacaaacagcaacagtacagagcattttgatgcatgtaagtggacaaaatcagaaccacattcct

SEQ ID NO: 233940 - DNA, 385 bp, Glycine max
cacagtctgtgacattcccccaactggcttgaagatggcttcaacattcattggtaactctacctccattcaggaaatgttccgtagagtgagtgagcaattcactgctatgtttaggaggaaggctttcttgcattggtataccggggaaggcatggacgagatggagttcacagaggctgagagcaacatgaacgatctcgtgtcggagtatcagcagtaccaggatgccactgctgatgaggatgagtatgaagaggaagaggaggaggaggagtttgcccaacatgatatgtgaatttgaacttgggtgtggtgtattgcggtggctttagacaagaagatggataacaagctgcaacttcctgttgccggttgatgattg

SEQ ID NO: 233941 - DNA, 373 bp, Glycine max
ccacgtgaaagaggatgcgagacaagaaacggggttgaggaaaatatctgcaccttgaagcttcacgagaacattgctcgcccttcacgcgctgacttctacaaccctaaagctggtcgcattagtaccctcaacagcctcaccctcccagccctccgccaattccaactcagtgcccaatatgttgtcctctacaagaatggaatttactctccacattgggatctgaatgcaaacagtgtgatctatgtgactcgaggacaaggaaaggttagagttgtgaactgccaagggaatgcagtgttcgacggtgagcttaggacgggacaattgctggtggtaccacagaacttcgtggtgggggagcaagccg

SEQ ID NO: 233942 - DNA, 394 bp, Glycine max
caaaaatgaagagcaccatcttctttgctctctttctcttttgtgccttcaccacctcatacctaccttcagccatcgctgatttcgtgctcgataatgaaggtaaccctcttgaaaatggtggcacatattatatcttgtcagacataacagcatttggtggaataagagcagccccaacgggaaatgaaagatgccctctcactgtggtgcaatctcgcaatgagctcgacaaagggattggaacaatcatctcgtccccatatcgaatccgttttatcgccgaaggccatcctttgagccttaagttcgattcatttgcagttataatgctgtgtgttggaattcctaccgagtggtctgttgtggaggatctaccagaaggacctgctgt

SEQ ID NO: 233943 - DNA, 356 bp, Glycine max
caactatggcaagttatcaaaagcactacgatgatcaaggtcgcaaggttgacgactatggcaacgttgagaagcaaaccgacgaatacggcaaccctgttcaagctgctaatgtcacctatgtagccaccagaactgctgctggtggttacagtgatgacattaatacgcaacatgataccaccaatgcctacggcgtagacactggtagacagcattctagtggtggctacgatggtgacactaataaacatcatggaactactggtggctataatgatgacaccaatagacatcatggaactaccggtgtctatggtatagacaccgataggcaacaacatgggactactggg

SEQ ID NO: 233944 - DNA, 399 bp, Glycine max
cataaaattcttccaccaagttatgggtttccttgtgttgcttcttttctccctcttaggtctctcttctagttccagcatatcaactcatcgttccatattggaccttgacctaaccaagtttaccacacagaaacaggtgtcttcactgttccaactatggaagagtgagcatggacgtgtctaccataaccacgaagaagaggcaaagagacttgagattttcaagaataacttgaactatatcagggacatgaatgcaaacagaagatcaccccattctcatcgtttaggattgaacaagtttgctgacatcactcctcaagagttcagcataaagtacttgcaagctcccaaggatgtgtcgcagcagatcaaaatggccaacaggaaaatgat

SEQ ID NO: 233945 - DNA, 395 bp, Glycine max
gtggaataagagcagccccaacgggaaatgaaagatgccctctcactgtggtgccttcaccacctcatacctaccttcagccatcgctgatttcgtgctcgataatgaaggtaaccctcttgaaaatggtggcacatattatatcttgtcagacataacagcatttggtggaataagagcagccccaacgggaaatgaaagatgccctctcactgtggtgcaatctcgcaatgagctcgacaaagggattggaacaatcatctcgtccccatatcgaatccgttttatcgccgaaggccatcctttgagccttaagttcgattcatttgcagttataatgctgtgtgttggaattcctaccgagtggtctgttgtggaggatctaccagaaggac

SEQ ID NO: 233946 - DNA, 393 bp, Glycine max
gtgcatgacagttcagtgtctacaataccaggtgattttgttattggtgttaagttgacaaccatagacagtatgtgtgcatatgggctcaatcctggtatttcaggttctcgtcttttgggcaccattcctcagtctatttcacagcaaactgtttggaatcaaatggcaacagtgagaacaccattgagttttgattctagcaagcagagtttttgtcaattttctattgaccttctcggtggaggaattttagtggacaaaactggagattggatcacacttatacaaaattctccaattagtaacttgttgagagttgctgcgtggaagaaaggctgtttaatggttaagattgtgatgtctgggaatgcagcagtcaaaaggagtgat

SEQ ID NO: 233947 - DNA, 401 bp, Glycine max
aggagacgtactagtgattcctcctggtgttccttactggacctataacactggcgatgaaccagttgttgccatcagtcttcttgacacctccaacttcaacaatcagcttgatcaaaaccccagagtattttaccttgctgggaacccagatatagagcacccagagaccatgcaacaacagcagcagcagaagagtcatggtggacgcaagcaggggcaacaccagcagcaggaggaagaaggtggcagtgtgctcagtggcttcagcaaacatttcttagcacaatccttcaacaccaacgaggacacagctgagaaacttcggtctccagatgacgaaaggaagcagatcgtgacagtggagggaggcctcagcgttatcagccccaagtggcaag

SEQ ID NO: 233948 - DNA, 387 bp, Glycine max
ctcggggaattccaattccacattttcaagaaataaggaggcaaaaatgttcatatatgaattggaattatttgttttcttattaggcctatcctgaagccaaaggaaatgagatcggaattcctcggggaattccaattccacattttcaagaaataaggaggcaaaaatgttcatatatgaattggaattatttgttttcttattaggcctatcctgaagccaaaggaaatgagatcggaattcctcggggaattccaattccacattttcaagaaataaggaagcacatatgttcatatatgaattggaattatttgttttcttattagggctatcctgaagccaaaggaaatgagatttggaatcctcggggggtaacgagct

SEQ ID NO: 233949 - DNA, 486 bp, Glycine max
tggccgtcgaaagaatgaatcgctagtcgtatacacccaactgagtcagacgcacgcgtaagtaagctcggaattcggctcgagggatacctaggcacccagagacgaggaagggcgtagtaagcgacgaaatgcttcggggagttgaaaataagcgtagatccggggattcccgatataggtcaacctttcgaactgctgctgaatccacgggcaggcaagagacaacctggtgaactgaaacatcttagtagccagaggaaaagaaagcaaaagcgattcccgtagtagcggcgagcgaaatgggagcagcctaaaccgtgaaaacggggttgtgggagagctatacaagtgtcgtgctgctaggcgaagcagcagagaatgctgcaccctagatggcgagagtccactagccgaaagcatcactagcttacgctctgacccgattagcatggggcacgtggaatcccgtgtgaatcagcaagg

SEQ ID NO: 233950 - DNA, 383 bp, Glycine max
  unsure (1)..(383): unsure at all n locations
cattggtccttaaacactcatcagtcatcaccatggccaagctagttttttccctttgttttctgcttttcagtggctgctgcttcgctttcagttccagagagcagcctcagcaaaacgagtgccagatccaaaaactcaatgccctcaaaccggataaccgtatagagtcagaaggagggctcattgagacatggaaccctaacaacaagccattccagtgtgccggtgttgccctctctcgctgcaccctcaaccgcaacgcccttcgtagaccttcctacaccaacggtccccatgaaatctacatccaacaaggtaagggtanttttggcatgatataccgggttgtcctagcacatttgaagagcctcaacaacctc

SEQ ID NO: 233951 - DNA, 379 bp, Glycine max
tggacgtgtctaccataaccacgaagaagaggcaaagagacttgagattttcaagaataacttgaactatatcagggacatgaatgcaaacagaaaatcaccccattctcatcgtttaggattgaacaagtttgctgacatcactcctcaagagttcagcaaaaagtacttgcaagctcccaaggatgtgtcacagcaaatcaaaatggccaacaagaaaatgaagaaggaacaatattcttgtgaccatccacctgcatcatgggattggaggaaaaaaggtgtcatcacccaagtaaagtaccaagggggctgtggaagcggttgggcgttttctgccacgggagccatagaagcaacacatgcaatagcaacagga

SEQ ID NO: 233952 - DNA, 422 bp, Glycine max
  unsure (1)..(422): unsure at all n locations
gtacgtaagctcagnattcggctcgaggtagatccattggcttcaagcacatgggaggaggtttccccagaagatgtgcttatcactcaagtgcagtgcaaggctttgtcgagacaatttcacggagaaactgagtatacagttactcaagctatttcagctcaggaggcctacaagcggagtaacaattggttacctcctccatgggcaataatggcaatggtcatacttggttttaatgaatttatgttgctactaaaaaatcctctctacctgatgtttatatttgttgcctatctactcggaaaggccatctgggtacaaatggacatagctggagagtttcgacatggcactctgcctggactactatccatttcatcaaagtttcttcccacatttatgaaccttatcaaacgtct

SEQ ID NO: 233953 - DNA, 282 bp, Glycine max
catttttattgctatatcctaatcaaacttcactctcaaaatgagtgatcccacactagcacaacagcatctagtcaaagtccacacaacaacacacgaaacagttgttaccacacacaatcagaaccaaacaccctcaatagatgcctcaggtgaaaagaagaagattgtgggggtgttctacaaagggaatgaatatgctacattgaatccacattttgttggacgtgtggaaggtgcactgggaatacgtgagtggctggaagcacagggtcatgagtc

SEQ ID NO: 233954 - DNA, 404 bp, Glycine max
ctctgccactgccatcagcattctcaacacctcctccctcactcactcatcaatggcatcaacaatatcagcaatggccatgatcaacgccaaatgcgtcaacccaaagttccccaaccccaccaagctcgtaccatcaaaaccttcccttcaggtcaaccttccaaagggcctaatagcctcacccgaaaacaccaaactttccactgcgacagcaatcgcaggagcaatattcacaaccctcggaacctgcgacgccgctttcgccgttcaacagatagccgacataccagaaagcgacaaccgcggtctggcactgttgctgcccataattcctgcaatacggtgggttctgttcaacattctgcagccggcgctgaaccaactgaaccgcatgcgcagca

SEQ ID NO: 233955 - DNA, 392 bp, Glycine max
gttcccgatgaacttgttaagctgatagatattctgaaccctaaaaacaagcctggaagaattacagtcattgttagaatgggagctgagaatatgcgagtgaagcttccacatcttatcagggcagttcgcagagcaggtcaaattgtcacttgggttagtgaccccatgcatgggaacaccattaaagctccatctggacttaaaacccgctcttttgatgcaataagggctgagctgagggcattctttgatgtgcatgatcaagaaggaagctacccaggaggggttcatttagagatgacagggcagaacgtgacagaatgtgttggaggctcaaggactattacttatgatgacttgagctcacgctaccacacacattgtgatcc

SEQ ID NO: 233956 - DNA, 484 bp, Glycine max
  unsure (1)..(484): unsure at all n locations
ggggatngtgatcgactaacatcgtctagtcgtanngaacgcgacatgaggccgcccgcacgcgtacgtaagctcggaattcggctcgaggacgcaatgtgatttctgcccagtgctctgaatgtcaaagtgaagaaattcaaccaagcgcgggtaaacggcgggagtaactatgactctcttaaggtagccaaatgcctcgtcatctaattagtgacgcgcatgaatggattaacgagattcccactgtccctgtctactatccagcgaaaccacagccaagggaacgggcttggcggaatcagcggggaaagaagaccctgttgagcttgactctagtccgactttgtgaaatgacttgagaggtgtacgataagtgggagctggaaacagcgaaagtgaaatagcactacttttaacgttattttacttattccgtgaatcggaagcggggcactgctcctctttttggacccaaggtcgg

SEQ ID NO: 233957 - DNA, 403 bp, Glycine max
  unsure (1)..(403): unsure at all n locations
cagaaagctggagaatacaaggattataccgctgagaaggcaattgaagggaaggacagtgcagtggggaagcttggggagctaaaggaatctgctgctgatgctgctaaaagggctatgggtttcttcaccggtggcaacaaagaccaaactagagaggaggaggaggaaacgaggcggagtatgcaggaggtgagggtgcaagataaggagtatggaacgggacgtggtactggagagaagttggtgataaaaatggaagagtcgcggccaggagcggtggcggatgcgctcaaagcagcgaatagggccatggacggcgatatggaggaggaaggcgtgcttcatgtggagcgtcgtanggagaaaatgtgattctccttctcatccatcatcataataa

SEQ ID NO: 233958 - DNA, 385 bp, Glycine max
aaaattcttccaccaagttatgggtttccttgtgttgcttcttttctccctcttaggtctctcttctagttccagcatatcaactcatcgttccatattggaccttgacctaaccaagtttaccacacagaaacaggtgtcttcactgttccaactatggaagagtgagcatggacgtgtctaccataaccacgaagaagaggcaaagagacttgagattttcaagaataacttgaactatatcagggacatgaatgcaaacagaaaatcaacccattctcatcgtttaggattgaacaagtttgctgacatcactcctcaagagttcagcagaaagtacttgcaagctcccaaggatgtgtcacagcaaatcaaaatgggcaac

SEQ ID NO: 233959 - DNA, 213 bp, Glycine max
acgcgtaagtaagctcggaattcgctcgagaaatgtgctgacctcttcaactttgccaatgcatgatgagccaagatcgcgagactttttataatatgcttatttataattaagcaagcatctactacatgttatggttaataaaagtaataatgtaagaataaagactttgaactaaataataatatgaacgattctctttcgttgttcaaa

SEQ ID NO: 233960 - DNA, 347 bp, Glycine max
ggcaaagctattgtctgttctgatgctgcagcagaggctgcaagatatggttttactgctgtggacaggccagaaggattcttggttttggccattgcttctctaggaaatgagattaccgagttgaaaaccccacctgaggatgcatcatctttggaggaaaagaacgttggagtgaagggaccggggaagaagaaaacagatgaatcggagcattttgtttggaaagatgatataaaagttccttgcggtaaactagttgcctcagaccatcaagatagccccctggaatacaacgagtatgctgtctacgataaaaagcgggcacgcataagctacttggtggg

SEQ ID NO: 233961 - DNA, 395 bp, Glycine max
tctaaagctagtaagtagtaagtagtaagccactatcgtttctctctaacagcaaaaaagttctaacctcaccaaacccacactaccatgggtaatgagaatcgcgagcttcacgtattattcttccccttcccagctaatgggcacataataccaagcattgacttagccagagtctttgcttcaagaggaatcaaaaccaccgtagtcaccactcccctcaacgttccactcatttcaagaaccataggaaaagccaacatcaaaatcaaaacaatcaagtttccttctcatgaggaaactgggttgcccgaaggttgtgaaaattccgattctgccctctcctctgacttgatcatgacgttcctgaaggccaccgtgctcctgcgggaccc

SEQ ID NO: 233962 - DNA, 397 bp, Glycine max
gagagatggggctaagaagtaaattaagaatgtcagcgtcagtggtgcagcaggggatgaaggaaataagaaggagcgtgacgtacatgcctcgaccgggggacggtgcgccgcggggggtgacgctgataccgggggacggaattgggcctctggtgactcatgcggtggagcaggtgatggaggcgatgcacgcccccatatacttcgagaagtacgatgtgcacggggacatgaggcgtgtgccggaggaggtgctggattcgatacggaagaacaaggtgtgcttgaagggtggtttgaggactccggtgggtgggggtgtgagctccctcaacgttcagctcagaaaggacctcgatctctacgcttccctcgtcaattgcttcaacttgcc

SEQ ID NO: 233963 - DNA, 395 bp, Glycine max
  unsure (1)..(395): unsure at all n locations
tttaatccaaacccgtgttctgatgcatggagtttggaatttttgaaccgtaccggatttcactgtgatatcatttgtgtcactggatggactgccaccccaatgcaggatgttcaggttacaattgattggtttatttcctctcangaatgtgttcccaggacttattgtgttttaaatccacaaaatccttttgtgttaaatacgtggatggggaaactgactttcccccagggcacttcccgaaatgttaagagaatgcctctttctatagggggaggagctggtgcaaagaatgctattctcatgaatatgccaaatgctgttctttcaatgtggagatattttgttggagatctcgtctttgaagtttctaagatgacttctccctacat

SEQ ID NO: 233964 - DNA, 404 bp, Glycine max
tataactcggtcccacttgccttcttctgtaacgtgtaaaaaacaaacactataaatctcccgcacccccgagcccggaaagagatctagtgtgtctgtgactgtcagaaacaaacattatttggttttctgaattgtttggattgcgagaaaaaaaaagggggggaaatggcaaaggatattcgattcttcgacctcaacacgggcgccaagatcccttcagtcggcttgggaacttggcagtctgatcctggccttgttgctgaagccgtcgcggcggccatcaaggttggttaccgccacattgattgtgctcaaatctatggcaatgagaaggagattggctctttgttgaagaatctgtttgaggacggtgtagtgaagcgcgaggatttgtggattac

SEQ ID NO: 233965 - DNA, 392 bp, Glycine max
ggggaaatgatactacaagccactaggcatgggtctagcaaaggaaacaataatgggaggtggaggccgtgtggccaaagttgaaattcagcagaagaagcctctctcaagggttccaaacacaaagccaccattcactgttggccaactcaagaaagccattccaccgcactgctttcagcgttccctcctcacttcattgtcctatgttgtttatgacctttcattggctttcattttctacattgccaccacctacttccacctcctccctcaccccttttccctcattgcatggccaatctattgggttctccaaggttgcattcttactggcgtgtgggtgattgctcacgagtgtggtcaccatgccttcagcaagtacccatggg

SEQ ID NO: 233966 - DNA, 400 bp, Glycine max
cccattttcaattccttctcagtttccttttctctgaaaaaagatgttgagggttgcagctaggaggctctcttctctctcctcttcttctccgttgcggcccaatcacgccgcttccgcttttctctctcgaaacgacgtcgtcgtcgatgaccacagatctgttccttcctcccatccccttcttcccttccgaggttttgctactgaatccctgatccacccaatagaaaacagcattattccccagattctgccaactgttactgctgttaagaaccctacttctaagattgtctatgatgatcacaaccatgaaagatttcccccaggtgacccaagcaagagggcatttgcctacttcgtacttacaggtggtacgtttgcttatgcctctctg

SEQ ID NO: 233967 - DNA, 392 bp, Glycine max
gacagtaggaaccgttggcgcgggacgaattgggaagcttttactccagaggttgaaaccttttaactgtaatcttctgtattttgatcgacttaggatcgatcctgaattggagaaagagattggagcaaaatttgaggaggaccttgatgcaatgcttccaaagtgtgatgtaattgttatcaacacccctctcactgagcagacaaggggattgtttgacacaaatagaattgcgaagtgcaagaaaggtgtcttgactgttaacaatgctcgaggggcaattgcggacacccaagcaattgcagatgcttgctccagtggccacgttgcaggttatagtggtgatgtttggttcccacagccagctccaaaggattatccatggcgtt

SEQ ID NO: 233968 - DNA, 401 bp, Glycine max
  unsure (1)..(401): unsure at all n locations
attggtccttaaacactcatcagtcatcaccatggccaagctagttttttccctttgttttctgcttttcagtggctgctgcttcgctttcagttccagagagcagcctcagcaaaacgagtgccagatccaaaaactcaatgccctcaaaccggataaccgtatagagtcagaaggagggctcattgagacatggaaccctaacaacaagccattccagtgtgccggtgttgccctctctcgctgcaccctcaaccgcaacgcccttcgtagaccttcctacaccaacggtccccaggaaatctacatccaacaaggtaagggtatttttggcatgatatacccgggttgtcctagcacatttgaagagcctcaacaacctcaacanagaggacaaagca

SEQ ID NO: 233969 - DNA, 157 bp, Glycine max
attggtccttaatcactcatcactcatcaccatggctatactacttttttccctttgttttctgcttttcactggctgctgcttcgcttgcagttccatagagcatcctcagcacaacgagtcccacatccagctcctcaatgcccttataccggtt

SEQ ID NO: 233970 - DNA, 396 bp, Glycine max
catgaacaagaattatgttaggaggattgagctcttctaagaacgcacttgttcatggagaagctaatgagatgggcaggctcaagcagaagctcataagtcaatttgctgatcgcaacactaaaattcttactccaaaaaactgtcaatctgttgaaatgtatttcaattcgcagaaaatggcaaaaaccatagggaagctggctgaaaaaaacaccagaagttggtgaaactgtcagtggtttgcttgtaaaaaaaggcttcacatatcagattatggcagctgatgatctccatgtcgtttcacaactatcaacagcaaacattactcagaggattaccatcccttattcaagtgcctttaatgtgatacagcatagactcaaacagatatat

SEQ ID NO: 233971 - DNA, 372 bp, Glycine max
tgcagtgttcgacggtgagcttaggaggggacaattgctggtggtaccacagaacttcgtggtggcggagcaagccggagaacaaggattcgaatacatagtattcaagacacaccacaacgcagtcactagctacttgaaggatgtgtttagggcaattccctcagaggttcttgcccattcttacaaccttcgacagagtcaagtgtctgagcttaagtatgaaggaaattggggtcctttggtcaaccctgagtctcaacaaggctcaccccgtgttaaagtcgcataaatgacaagcatgatggtgtgaggatgaggccatcttatgaaataataacaaataaataaattttgtatgataataaaaag

SEQ ID NO: 233972 - DNA, 371 bp, Glycine max
  unsure (1)..(371): unsure at all n locations
ctagttcaatatcctagtataccttaataaataatttaagatactatgatgagagcacggttcccattactgttgctgggacttgttttcctggcttcagtttctgtctcatttggcattgcttactgggaaaaagagaaccccaaacacaacaagtgtctccagagttgcaatagcgagagagactcgtacaggaaccaagcatgccacgctcgttgcaacctccttaaggtggagaaagaagaatgtgaagaaggtgaaattccacgaccacgaccacgaccacaacacccggagagggaacctcagcaacccggtgagaaggangaagacgaagatgagcaaccacgtccaatcccattcccacgccc

SEQ ID NO: 233973 - DNA, 364 bp, Glycine max
gattttcagaggaacaatggcgggtaaggttgcggcttgctgcgtgcacgagtttgctcgttgtcgcgctcctccgtttgagatcgccagctgaggaagcatcgtgataacgagttcgtactcacattggatcaggctaacttacaggagactgctagcaatcacgatttcatcctcgtcgatttctaggcacgatggtgtggctactgatagaagcctgctctggattatgagaatgctgcttctacctagactagacaggattctccggttgtcatggctacaggtgatcctgatgaagagacgagtatagaccatgcatctcattctgatgttaggggatgaccaacaattgggattctga

SEQ ID NO: 233974 - DNA, 397 bp, Glycine max
aggaagagagaacagaggagcaagaactgaagtacctggaattcgtgcaattcgcgaccatacaggctctgatgcgctgcgccatcctctactcatacgccaaggagcgcgcgggtcctctgaagcccggtgtcgacaccgtggaggaggccgtgaagaccgtcgtggctccggtctacgataggttccaccttgtccccggcgaggtcctcaaatacgcggatcggaaggttgccgagttagacagccacgttccctccaacgtgaagaaggtctcctcccaggcctgctccgtcgtctctgaagtccgccgcgatggcgtctccgcctacgccaagaccgtttactccaagtacgagcctacggcggagcagtgcgcagtgtctgcatggcggaa

SEQ ID NO: 233975 - DNA, 394 bp, Glycine max
actcaaactcccctgctattcttcttctccctcaattctctctcaccaaaaccctttgcacccaataccctcaaactcaacttcaattgctaatttttataaagctagccggagatgatggttcaaaaggaagatttgggtttgagtttaagtctcaatttccctcatcacagtaccccaaatcctcaacatctgagtctcatgtcatcctctactcattcctcttccccttctggtttcaaccctcaaaaaccctcttggaacgaggctttcgcttcttcggatccagatcgaaactccgacacatgcagaggcgaaacacggtcgttcctgcggggaatcgacgtgaaccggttaccttccgccgtggacgccgaggaggaagcgggagttt

SEQ ID NO: 233976 - DNA, 405 bp, Glycine max
tgccgtttctattattgacaccaacagcttggagaaccagctcgaccagatgcctaggagattctatcttgctgggaaccaagagcaagagtttctaaaatatcagcaagagcaaggaggtcatcaaagccagaaaggaaagcatcagcaagaagaagaaaacgaaggaggcagcatattgagtggcttcaccctggaattcttggaacatgcattcagcgtggacaagcagatagcgaaaaacctacaaggagagaacgaaggggaagacaagggagccattgtgacagtgaaaggaggtctgagcgtgataaaaccacccacggacgagcagcaacaaagaccccaggaagaggaagaagaagaagaggatgagaagccacagtgcaagggtaaagacaaaca

SEQ ID NO: 233977 - DNA, 401 bp, Glycine max
gggtcaggagggttaaatcttgatggaatagaaccagaatacaagctggtcctacgcaaagtgctaaagtttcataagcatccagttactgcacttcacctcacgaccgacctgaaacagttattgagtggggattcaggcgggcatttgctttcctggacactgcctgaagagagtctgcgaggttcattaaatcaggggtgagattggtaaatgatggttcgttatgctgacttaagcatttggccagcctttaattgttgaatcctaacattggcttgagtggatctcaattgttgaaagatggattcatgttcataattcgagagaattgaaaaagaatgctggccagattgaaacagagcaagcaagattgtaaaagaaaagatgatataacggcg

SEQ ID NO: 233978 - DNA, 385 bp, Glycine max
gaacaccattgaattttgcttctagcaagcagagtttttgtcaattttctattgaccttctcggtggaggaattttagtggacataactggagattggctcacacttatacagaattctccaattagtaacttgttgagagttgctgcttggaagaaaggctgtttaatggttaagattgtgatgtcagggaatgcagcagtcaaaaggagtgattgggcctcattggtacaagtgtttttaacagacagcaacagtacagagcattttgatgcatgtaagtggacataatcggtaccacattcctgggaattgatcatcccaatagaggtatgtggtcctaagaatggttttgaaatgtggagttctgagtgggcaaatcaaac

SEQ ID NO: 233979 - DNA, 397 bp, Glycine max
ctggggagaagatggctacatcaggttagaaagaaatcttgctaacagcagatcaggcaagtgtggaattgcaattgagccatcttatccccttaagaatggtccaaatccacctaatcctggaccatcacccccttcacctgtgaagccaccaaatgtctgtgacaactactacagctgtgctgatagtgctacttgttgctgtattttcgagttcggaaatgcttgctttgagtggggttgctgtcctcttgagggtgctacctgctgtgatgaccactacagttgctgccctaacgactatcccatctgcaacacttatgctggaacttgtctcaagagcaagaacaacccattcggagtgaaggcattgaagcgtactccggctaaaccccaa

SEQ ID NO: 233980 - DNA, 386 bp, Glycine max
atcggagcgtaccgcggaggccagagaagcagggactggtgcgacccttcatcaccattcactgatttgtgggaccctcgtcgtgtcggtgacgctgatgatatcacctcctctctcgcccatgctcacgttgactggcgtgagactgataaagctcatatcttccgtgctgatcttccaggggtgaagaaagaggatctgaatgtgcacgtggaggagaataagatcctgcagataagcggggagagggtgaaggagaaggaggaccagaacgacaagtggcaccgcgtcgagaggcagtgcggaagcttcctccgccgcttccggctgccgggaggatgcgcaacccaaccagattagctgcacgctcgaaaaccggggtgctg

SEQ ID NO: 233981 - DNA, 395 bp, Glycine max
ctcgagccgattcggctcgaggctggtgcagtttggagagattcaggaaaaagttgtattgaaattttcacaagaggaatttcttacagcttggtcaactcaggtgcgtcctgcaacaactctgttggctgatgggtgtccatatttgtatgctatggtgcatgatagttcagtgtctacaataccaggtgattttgtcattggtgttaagttgacaaccataaacaatatgtgtgcatatgggctcaatcctggtatttcaggttctcgtcttttgggcaccattcctcagtctatttcacagcaaactgtttggaatcaaatggcaacagtgagaacaccattgaattttgattctagtaaacagagcttttgtcaattttctattgaccttc

SEQ ID NO: 233982 - DNA, 411 bp, Glycine max
cgactctaaagaatcccctcggggaattccaattccacattttcaagaaataaggaggcaaaaatgttcatatatgaattggaattatttgttttcttattacgcctatcctgaagccaaaggaaatgagatctgaattcctcggggaattccaattccacattttcaagaaataaggaggcaaaaatgttcatatatgaattggaattatttgttttcttattacgcctatcctgaagccaaaggaaatgagatcggaattcctcggggaattccaactccacattttcaagaaataaggaggcaaaaatgttcacatatgaattggaattacttgttttcttattacgcctatcctgaagccaaaggaaatgagatctgaattcctcgggggtaccgagctcgaattcc

SEQ ID NO: 233983 - DNA, 396 bp, Glycine max
tgcaccttcaccttcccttcgagatggcaaagtctaagaatcacacagcgcacaatcagtcctacaaggcccacaaaaacggcatcaagaaacccaagaggcatcgccacacttccaccaaagggatggatcccaagtttctgaggaatcagaggtacgcgaggaagcacaacaagaagagcggcgaaattgccactgaggaagagtgaagtggcactttctaacggaaccattagggtttttttttaagctcggtttttttttgttttattttgtttttaatggttgactttgtttgaaatcaacgttcagtagtataattaaatttgttttcagagaatgcagtgctcttatagcaattattttcctggtttctgctgaagacccttgaattat

SEQ ID NO: 233984 - DNA, 401 bp, Glycine max
gaagaaaaaagagaagaagatgggtttgaagaacaacatggtggtgctaaaggtgtgtttggtgctacttttccttgtggggggtactactagtgccaacttgaggctgagtaagcttggcctgctcatgaaaagtgatcatcatcaacactcaaatgatgatgagtcttcaaaaccatgctgtgatcaatgcgcatgcacaaagtcaaaccctcctcaatgccgctgttcagatatgaggctgaattcgtgccattcagcttgcaaatcttgtatttgcgcattatcgtatcctgcacagtgtttttgtgttgacataaccgatttctgctatgaaccttgcaaacccagtgaggatgacaaggaaaactactaatgaacaagtgttatgcatgtaagct

SEQ ID NO: 233985 - DNA, 370 bp, Glycine max
ccgactctcattagcctttcagtgatagagatcttgtcgacacatgcttctgatgaggtctaccttggccagagggacaacccacattggacctctgattcaaaagcattacaagcctttcaaaagtttggaaacaagctcaaggaaattgaggaaaaacttgtgaggaggaacaatgatccgagtctgcagggcaatcgacttggcccggttcaactgccatacactttgctttaattgttctcaaataagccttttcatggttattaatcatttcttcatattctggggtgcctttctcaggaagcaaccttctagaagcagttgggcggttcattatcaaacctcccggctcgagcggctcgagaac

SEQ ID NO: 233986 - DNA, 398 bp, Glycine max
tgcagaccgagctagctagctagcaagcaagcacagagatggaggcaaagcgaggccatgccctcatgtgcttggcacgtgtttcactcttcctctgcgctctaaccctatccgctgctcacggaagcaccacggttcaagacatcgcgagaaagttgaaactcggggacaacgagcttctgcgcacggagaagaagttcaaggttttcatggagaattacgggaggagctactccacagaggaggagtatttgcgccgtttggggattttcgcccagaacatggtcagagcggcggagcatcaggcgctggaccccaccgccgtccacggcgtcacgcagttctccgatctcaccgaggacgagtttgagaagctctacactggcgtcaatggcggc

SEQ ID NO: 233987 - DNA, 392 bp, Glycine max
atttcactagctactactcttcttagtttctctgttgtatcatttttattgctatatcctaatcaaacttcactctcaaaatgagtgatcccacactagcacaacagcatctagtcaaagtcgacacaacaacacacgaaacagttgttaccacacacaatcataagcaaacaccctcaataaatgcctcaggtgaaaagaagaagattgtgggggtgttctacaaagggaatgaatatgctaaattgaatccaaattttgttggatgtgttgaaggtgcattgggaatacgtgagtggctggaatcacagggtcatcagtacattgtcacggatgacaaagacagacctgattctgaacttgagaaacacattccagatgcacatgtcatc

SEQ ID NO: 233988 - DNA, 402 bp, Glycine max
aggcaaagtacagacaaagttagttagaaattgaaagggaaagggaaacgaaaatgagtagtagggtttggtgtgtggtgatggtatcagcgttggcgttgatgttacaatggcacgaagcattcagctcctacgctggctccgcaagtgcgatcatcgacccttccaaggtcaaacaagtttcgtggaaaccgagagctttcgtttacgagggttttctgacggaattggaatgcgatcacttgatttccatcgccaaatcggagctcaagagatccgcggtggccgataatttgtccggcgagagcaagttgagcgaagtcagaacgagctccggcatgttcattcccaagaacaaggatctgattgttgctggtattgaagacaagatttcatcatgga

SEQ ID NO: 233989 - DNA, 394 bp, Glycine max
gccatggataattttccttgcacatcgcgtacttggatattcttcttgtatctgttatgcagaagagggatcatttgctgaaccaatggggagagagagttttcaaaagctctggcagaaatacaaggtggacattgccatctatggccatgtgcacaattatgagaggacatgccccatatatcagaatatctgcactaatgaagagaaacaccactataagggaagaaccttaaatgggaccatacatgttgtagctggtggtggtggagcaagcctttcagcatttacttccctcaaaaccaaatggagcatctttaatgactatgactatgggtttgtaaaactaactgcttttgattattcaaatttgttgtttgagtacaagaagagc

SEQ ID NO: 233990 - DNA, 352 bp, Glycine max
agatgatgcaggctggacccggcggcatggcccaacaagcgaaccaacaatacgcacagcaacagcaacaaccctacatgatgatgccgccgcagcctcagccccctcagatgtgggccacatcggcccagcctccgtcccagtcggtggctcctccgcaacccaccagcgccgatgaggtccgtaccctctggatcggtgatttgcagtactggatggacgaaaattatctctacacctgtttggcacacaccggcgaggtggcttcagttaaagtcattcggaacagacaaactagtcaatcggagggatatgggtttattgagtttactagtcgtgctggtgctgagag

SEQ ID NO: 233991 - DNA, 352 bp, Glycine max
taaagttagatatatgattttattatttctccattttatgcccattggtgttccaagagtaccctttcgaagccctggggaagaagatgcatcttgggttgatatatacaatcgactttatcgagaaagattactttttttaggtcaagaggttgatagtgaaatatcgaatcaactaattagtcttatggtatatcttagtatagaagaagagaataaagatttgtatctgtttataaattctccgggggggtgggtaatacccggaatagctatttatgatactatgcaatttgtacaaccagatgtacagacagtatgtatgggattagccgcttcaatgggatccttt

SEQ ID NO: 233992 - DNA, 234 bp, Glycine max
cacaaagtaggactcactttgtggatgctcagcctcagcagaaagaggaggggaacaagggaagaaagggtcctttgtcttcaattttgagggctttttactgaataagtatgtagtactaaaatgtatgctgtaatagctcatagtgagcgaggaaagtatcgggctatttaactatgacttgagctccatctatgaataaataaatcagcatatgatgcttttgttttgtgt

SEQ ID NO: 233993 - DNA, 382 bp, Glycine max
ccacggcacagttacccgccattttagggttcatcagaagggaggcgaaaccagcacaaatagcatagcatccatctttgcctggacaagagggctagcccacagggcaaaactggatgacaatgctaaactcttggatttcactgaaaagctagaggcagcttgcattggagtagtagaggctgggaagatgaccaaggatttggcacttattcttcatggatccaagctgtcaagggagcattatttgaacacagaggaattcatcgatgccgtggcagccgagcttagtgcgaggctttctgcatagacttgattcaagacaagcggaaaaaagacgttagcaacaaggagcgtgcgtgcgtctgctactctcttctat

SEQ ID NO: 233994 - DNA, 394 bp, Glycine max
ctcgagccgctcgagccgtttctgtagagaaaaaatgtatctattagcttatcgaaccatgaaggacatgcatagtaaaggccatcaacctgtggaggaactctgctcctctttaatatcccaccttggtcaggtaaatgcttattcagaggcattctctgtttacaatatgttgaaatatagcaagagaacaatgtgcaagtcacttcatgagaagattctgcacattctcttagcaggacagcttttgaaggatgcgtatgtagtagtcaaggataatgcacaatttatttctcgtccagccaccaaaaaatttgctagtgcatttatgaagtcaggtaacctcaactatataaatgatgttctaaagaccctccatgattgtggctacaag

SEQ ID NO: 233995 - DNA, 347 bp, Glycine max
gcgatagctgataagagagataccaacaagaaaagagtaacagaagagttgagattccctttgaagaaaagatggcatcccataagcaaagctatgaagctggtcaaactaagggccgaactgaggaaaagacgaaccagacgatgggcaatattggagagaaggctcaagctgcaaaggagaagacccaggaaatggtccaagctgcataagagaagactcaagaaacagcccaagctgccaaggacaagacttgcgacacttcctaagcggcaaaggagaagacccatcagaatacaggagctgctcaacaaaagacctcagagatgggccagtccacgagtgaa

SEQ ID NO: 233996 - DNA, 392 bp, Glycine max
gtcaaaaggagtgattgggcctcattggtacaagtgtttttaacaaacagcaacagtacagagcattttgatgcatgtaagtggacaaaatcggaaccacattcctgggaattgatcttcccaatagaggtatgcggtcctaataatggttttgaaatgtggagttctgagtgggcaaatcaaacttcatggcatttgagtttccttattgacaatcccaaacagtctacagtttttgacattctcttgggaatttctcaagattttgaaattgctggtaatactcttatgccagctttttctgttccacaggctactgccagatcttctgaaaatgcggaatcctctgcatgatctggaatttgtgttttctttcatttgtccgtttgttt

SEQ ID NO: 233997 - DNA, 345 bp, Glycine max
gtcaaaaggagtgattgggcctcattggtacaagtgtttttaacagacagcaacagtacagagcattttgatgcatgtaagtggacaaaatcggaaccacattcctgggaattgatcttcccaatagaggtatgcggtcctaataatggttttgaaatgtggagttctgagtgggcaaatcaaacttcatggcatttgagtttccttattgacaatcccaagcagtctacagtttttgacattctcctgggaatttctcaagattttgaaattgctggtaatagccctatgccagctttttctggtccacaggctacagccagatctgtccgaaaacgcggcatc

SEQ ID NO: 233998 - DNA, 329 bp, Glycine max
tggggttgcagatgtaccagggtgctgctggacctggtggagatgttcctatgggtgctgacatgcctgctgctggtgctggacctaaaattgaagaagttgactaagcttgtggaatatcactaacttcaactttgggttgcttctttcttattaggtgctctgccagagatgtaagctttaataatgtaagttttagtgatgtaaggtttcatgaatcgtgaataaggtctttttagtttcatgtgaatttcagagatgatggagcttgagattaatgtaatttttatactgtttggctttttaaaaaagacaccggcacatcctct

SEQ ID NO: 233999 - DNA, 385 bp, Glycine max
cctccaccagcctcttggttgcttctttggtctacccttcacagagaaccagcaatatcctctccgatgtggtcgatttgaagacttctcttcccgagtgggtgaggatagggttctctgctgccacgggactcgacatacctggggaatcgcatgacgtgctttcttggtcttttgcttccaatttgccacacgctagcagtaacattgatcctttggatcttacaagctttgtgttgcatgaggccatctaaatgtgacagatcgaaggaagaaagtgtaataagacgactctcactactcgatcgctagtgattgtcattgttatatataataatgttatctttcacaacttatcgtaatgcatgtgaaactataacacatt

SEQ ID NO: 234000 - DNA, 392 bp, Glycine max
gcttgttggagattacgccagagaaaaaccctcagcttcgggacttggatgtcttcctcagtgttgtggatatgaacgagggagctctttttctgccacacttcaattcaaaggccatagtggtactagtgattaatgaaggagaagcaaacattgaacttgttggcattaaagaacaacaacagaggcagcaacaggaagagcaacctttggaagtgcggtaatatagagctgaattgtctgaacaagatatatttgtaatcccagcaggttatccagttgtggtcaacgctacctcagatctgaatttcattgcttttggtatcaatgccgagaacaaccagaggaacttccttgcacgttcgaaagacaatgtgataagccagatacct

SEQ ID NO: 234001 - DNA, 478 bp, Glycine max
gttcctcgcctagtcgtagagaagggaactcgactggacgcacgcgtacgtaagctcggaattcggctcgaggttagttttaccctactgatgacagtgtcgcaatagtaattcaacctagtacgagaggaaccgttgattcgcacaattggtcatcgcgcttggttgaaaagccagtggcgcgaagctaccgtgcgttggattatgactgaacgcctctaagtcagaatccgggctagaagcgacgcgtgcgcccgccgtccgtttgccgaccagcagtagggggcctcggccccccaaaggcacgtgccgttggtgaccctcgtgaggcggattagccctacgagacgccttgaagcgcaattcccatcgagcggcgggtagaatcctttgcagccggctttctgagctcattggtatccagattgtcaaggccgaggacagtattggtccagaagtagaaaagttggtggcttct

SEQ ID NO: 234002 - DNA, 399 bp, Glycine max
ctctcttctagttccagcatatcaactcatcgttccatattggaccttgacctaaccaagtttaccacacagaaacaggtgtcttcactgttccaactatggaagagtgagcatggacgtgtctaccataaccacgaagaagaggcaaagagacttgagattttcaagaataacttgaactatatcagggacatgaatgcaaacagaaaatcaccccattctcatcgtttaggattgaacaagtttgctgacatcactcctcaagagttcagcaaaaagtacttgcaagctcccaaggatgtgtcgcagcaaatcaaaatggccaacaagaaaatgaagaaggaacaatattcttgtgaccatccacctgcatcatgggattggaggaaaaaaggtgtc

SEQ ID NO: 234003 - DNA, 114 bp, Glycine max
aaaattcttccaccaagttatgggtttccttgtgttgcatcgtttctccctcttacgtctctcttctagttccagcatggctacccggcgcttccatattggaccttgacccaa

SEQ ID NO: 234004 - DNA, 399 bp, Glycine max
aggtcgacatctagaggatcccctcggggaattccaattccacattttcaagaaataaggaggcaaaaatgttcatatatgaattggaattatttgttttcttattaggcctatcctgaagccaaaggaaatgagatcggaattcctcggggaattccaattccacattttcaagaaataaggaggcaaaaatgttcatatatgaattggaattatttgttttcttattaggcctatcctgaagccaaaggaaatgagatcggaattcctcggggaattccaattccacattttcaagaaataaggaggcaaaaatgttcatatatgaattggaattatttgttttcttattaggcctatcctgaagccaaaggaaatgagattggaattcctcggggg

SEQ ID NO: 234005 - DNA, 366 bp, Glycine max
gaattgggttttcactgatcaagcactacctgcagatcttatcaagagaggagtggcaattaaggatccatcaaccccacatggagttcgtcttctgatagaggactatccttatgccgctgatggactggagatatgggctgcaattaagacatgggttcaagaatatgtgcccttgtactatgcaagagatgatgatgtcaaaaatgattctgaactccaacattggtggaaagaagctgtagagaaaggccatggtgatttgaaagacaagccatggtggcctaagttgcagacacttgaagaccttgttgaagtttgcctcattatcatatggattgcttcagctctccatgcagccgttaa

SEQ ID NO: 234006 - DNA, 359 bp, Glycine max
cttttgttaacaaagggggtcaaattggtgaactggattttcgcttcccaattggggcaccaatacacgggataagggcgtttttgaccacaaatcagcgtaatacttatgataaggctagaaatgctgtgggtcttgcactcagtccagttgtcaaaactcttgttgatccagatggtgcactgatggacatattgaatttggatagtactatcttttcagattggctcttatccaaaggtggcacacgcatgagtattacagccatgtgggatccaattgcctatgaccctgggtttatcgactgtgataaaatcagtgctcgctgcatgctcaacatatttgcattggtttgcaca

SEQ ID NO: 234007 - DNA, 393 bp, Glycine max
  unsure (1)..(393): unsure at all n locations
ggcctctatccgccccgacatcgtcaatttcgtacactcgaacatctccaagaacagccgccagccatacgccgtcagtcgtcgcgctggtcaccagacctccgccgaatcctggggtaccggccgagccgtctcccgtatcccccgtgttcccggcggcggaacccaccgcgccggccaaggagcctttggaaacatgtgccgcggcggacgcatgttcgccccgaccaagatctggcgccgctggcataggaagatcaacgtgaaccagaagcgctacgccgtcgtctccgccattgctgcctccgccattccttcnctcgtcctcgcccgcggccaacgcatcgagtctgtcccggagctcccccttgtcgtcagcgactccgccgaagg

SEQ ID NO: 234008 - DNA, 397 bp, Glycine max
tacgaaaacaagagatatcgaagatggctctgcccaaagctaaggagatcgtgtcgtccaattccgtcgtcgttttcagcaaaacctattgccctttctgcgtcgatgtgaagaagctcttcggtgacctcggtgccaattacaaggccatcgaactcgacactgaatccgatggaaaagagctccaagcagcattagttgagtggacggaccagcgaaccgtgcctaatgtgtttattggtggaaaccacattggtggctgtgactcaacaactgccctgcacactcaggggaagctggttcctctgctgatatctgctggagctgttgccaaatcaactgcttaaaggatctcccatttctaggttatgcagttaaataaaaataaaaacccaag

SEQ ID NO: 234009 - DNA, 342 bp, Glycine max
agcaataagatgaaaatgaaagtgcttgttttgtttgttgctacagttttggtagcatatgaatgccatggctcagactaccagaagttccctctccagatgaaaactgggtttggtgggcaatacagcaatgaggtggcatgtgccagttggaggcttggcgtggaagcaaacaacgtagtcaagtggcaaactgttcctgcagcttgcggagagtacatagctgactacgttctaggagaccaatatagatcagattccaaaacagttaaccaacaagcttatttctatgctaaatccctcaaactcaccaacatagatgtctttgtcttggacgttgac

SEQ ID NO: 234010 - DNA, 367 bp, Glycine max
aaaaccctaggtagagagctcttcctccctttctcacagcaatggccgccgcagcacgccctctcgtcaccgtgcaggccctcgacggtgacatggcaaccgatgcctccgccaccgttcccatccctgacgtcatgaaggcctctatccgccccgacatcgtcaatttcgtacactcgaacatctccaagaacagccgccagccatacgccgtcagtcgtcgcgctggtcaccagacctccgccgaatcctggggtaccggccgagccgtctcccgtatcccccgtgttcccggcggcggaacccaccgcgccggccaaggagcctttggaaacatgtgccgcggcggacgcatgttcgcccccga

SEQ ID NO: 234011 - DNA, 395 bp, Glycine max
cagagagaagcgtcttaataaacgctcttctctgaaaaacctgatttcttctcttcttctcttctctttcgtttcgatcttcgatctctgaaaatgagagagtgcatttcaatccacatcggtcaggccggtattcaggtcggaaacgcctgctgggagctctactgcctcgaacacggcattcagcctgatgggcagatgccaagtgataagactgttggtggaggtgatgatgctttcaacaccttcttcagtgaaactggggctggaaagcacgtgcctcgtgggaattttgtagatctcgagcctactgtgattgatgaagttaggactgggacataccgccaactattttcaacctgagcagctcattaccggaaaagaggatgctgcaa

SEQ ID NO: 234012 - DNA, 354 bp, Glycine max
cctgtaacaccttcacctccttccccttcaacaccttcaccgtttccttcacctacgacacctgtaacgccttcacctccttcgccatttccttcacctacgccacctgtaacaccttcacctccttccccttcaacaccttcaccgtttccttcacctacgacacctgtaacgccttcacctccttcacctacaacaccttcaccatttccttcacctacgacacctgtaacaccttcacctccttcgccatttccttcacctacgccagctgtaactccttcaccagtaccttcacctccatcacctacaacagtaccacctgttcatagtccttctccagggtatttgcca

SEQ ID NO: 234013 - DNA, 406 bp, Glycine max
  unsure (1)..(406): unsure at all n locations
tgtgacacaagaagatggccctgaagttgacggggagctcacacagcttactcgtggtgttgatgggtcttcaacaaaggctctacctacaatctggttagaagtgatgcgtttcttcacaaatcctcataaacctatgatcttagccttgtcaaggccagatccgaaaaagaacataaccactttgttaaaagcctttggagaatgccgccccttaagagaattagctaatcttacgcttataatgggaaacagggatgacatagatgaaatgtcctctggcaatgctagtgtgctcacaacagtgttganattgattgataagtatgacctgtacgggcaagtggcatacccaaaacatcacaatcaatctgatgttccagagatatacagatttgctgcaaaa

SEQ ID NO: 234014 - DNA, 389 bp, Glycine max
  unsure (1)..(389): unsure at all n locations
gtaattcgtggagggaatacttttccattacgcacgcactttaattacagacgagacaattataattaatagtaatacagacagcagcatgcgcccaccggttattctcaaaactacgacctctcttttggattcttcttcttcttcaccaccctgtgatcgcagactcaacactctcgctagacacttccttccgcatatggcttctcacgacagcatctccgcatcgccaaactccgcttctggatccgtcttcaagcacctcgtacgtgctcccgaagatcctatcctcggggtaactgtcgcttacaacaaagatccangtccagttaagctcaacttgggagttggtgcataccgaactgaggaatgaaaacctcttgttttga

SEQ ID NO: 234015 - DNA, 386 bp, Glycine max
cttcagttggaaaaccccgtgttaacttcagagaaactgttactcaacgtgctgattttgactatttgcataagaagcaaagtggaggacaaggtcaatatggacgggtaattgggtatattgaaccacttcctgcagggtcatcaactaagtttgcatttgaaaacttgcttgtgggtcaagctattccatcaaattttatccctgcaattgagaaaggtttcaaagaagctgccaactctggtgccttaattggacatccagttgaaaatcttcgagttgtcttgacagatggtgctgcgcatgctgttgattccagtgaacttgcgtttaagttggcttctatctatgcttttagacagtggtatgcagctttcagaccggtt

SEQ ID NO: 234016 - DNA, 381 bp, Glycine max
aattgcggaatcagctagaattttctaataatggccaaagacgttgagcaagttacagagcaaggtgaatactccgcgaaggattaccatgacccacctccggcgccgttgatcgacccagatgagctcactaagtggtccttgtacagagccgccatagctgagttcatagcaacactccttttcctttacatcaccgtgttgaccattattggctacaagagacagagtgacaccaaaatccccggtaacaccgagtgcgacggcgttggcattttgggcatcgcttgggccttcggtggcatgatcttcatccttgtttactgcaccgccggcatctctgggggacacatcaaccctgcggtgacattcgggttgttc

SEQ ID NO: 234017 - DNA, 408 bp, Glycine max
cggctcgagaagaaatttaagtgaggagctagagaatgatgatgaagtctgctatgtgtgcagtggtggttgtagcacttcttcttctggcggaggtggggcccatggctgaggctgtgacatgcaccccaacagagttgagtccgtgtcttccagcaatcacttccggtgctaaaccttccaatgcttgttgcacgaagctgaagcagcaaaaaccatgcttatgtggctacctcaaaaacgctagcttgaagcagtatgttaactctcctaatgcccgaaaaaccgttgcttcttgtgggattccctttccaacttgttaattaattaagccttcttataattaaagtgtgggatatatatatatatatagataaacagtttaatttatacacactttgatcctac

SEQ ID NO: 234018 - DNA, 380 bp, Glycine max
atcaaaacaaccttctttctttcaggttcttgatcagtgtcaaaaccaaaagggtggttgcaaattgcaatggctaagcatgatgttgagggtggttccttcgctgcaaaggactaccatgatcctcctccagcaccattgattgatgctgaggaactcacacagtggtccttctacagggctttgattgctgagttcattgccacaatgctcttcctttacatcacagtgctcactgtgattggttacaagagccagagtgatgtaaaggctgggggtgatgtgtgtggtggagttggcattcttggcattgcttgggcctttggtggcatgatcttcattctggtgtactgcactgctggaatctcaaggggtcacat

SEQ ID NO: 234019 - DNA, 319 bp, Glycine max
ctcagtttctttcttcaacgtttccatcatacacagatcccaatcctctctcaagccctaatttcccctcatttccatggccacagaagagcccactgtcgcggtggaacccgctcccgaacctgcctccgccgatcctcccccggaggagaaggaggagaccaaacctgaagccaaggctaagaaaaccaaggagcccaaacctaaaaaggtttccagacctcgcaaccctcccactcatccttcctacgaagagatggttaaagatgcaattacctcgctgaaggagaaaaccggttcgagccaatacgcgattgcg

SEQ ID NO: 234020 - DNA, 421 bp, Glycine max
ctcgacccggcttttccctcgttgaaatgaaaatgggttcttctttgtggactttgtgtctaattttggcttcactagcctcttctgcattctgtgcctttccacggaggccagtggatgttccattcggcagaaactacgttcccacttgggcttttgatcacatcaaatacttcaatggaggttctgagattcaacttcatcttgacaagtacactggtactggcttccagtccaaagggtcatacttgtttggtcacttcagcatgaacataaagatggttcctggcgattcagctggcacagtcactgctttttatttatcttctcaaaatgcggagcacgatgagatagattttgagttcttggggaacagaacaggacaaccttacattttgcaaacaaatgtgttcaccggagg

SEQ ID NO: 234021 - DNA, 412 bp, Glycine max
aattaaactacagatttgggatactgctggacaagaacgattatgacaataactagtagctactatcgtggagcacatggaatcattattgtttatgacgtgacagatgaagatagcttcaataatgtgaagcaatggctcagtgaaattgaccgctatgccagtgataatgttaacaaacttttggttggaaacaagagtgatctgacagcaaatagagttgtctcatatgacacagctaaggaattcgcagatcaaattggcatacctttcatggaaacaagtgcaaaagatgctacaaatgtggaagatgctttcatggccatgtctgctgccatcaagaatagaatggctagtcagccttcagcaaacaatgcaaggcctccaacagtgcagatcagagggcaacctg

SEQ ID NO: 234022 - DNA, 401 bp, Glycine max
  unsure (1)..(401): unsure at all n locations
gttttctcttcttcgttcgtttcgttgaaaagcgactttttctctctgcaactctcccttttcttccttcgtagatcgaaagggaatcttcttccatggcctccaagcggattctgaaggagcttaaggacctccagaaagaccctccaacctcttgcagcgccggtcctgtagcggaagatatgtttcattggcaagcgactataatgggtccccctgatagcccttatgctgggggtgtttttctagttactattcattttcctccggattatccattcaagccacccaaggttgcatttangactaaagttttccacccaaatatcaacagcactggtagtatttgtcttgatatcttaaaggagcagtggagccccgccttgacaatatctaaggtt

SEQ ID NO: 234023 - DNA, 359 bp, Glycine max
gagagagaacaatggaagacataacagagggagtgaacaacatcaacatctctgattcgtataagaaaaatcgcattcaggtctctaacaccaagaagcccctcttcttctacgttaatctggccaagagatatatgcaacagcatgatgaggtcgagctctcagctctaggaatgggtattgaaatccctctcgccttttttcctcttttattccttgaatttcgcttgttggttctattggttgcttattgattagtaacgtggactcgttcttttcgtcattcaggtattattctagttatagccttataggcttgctacatataactttatgtgaaaaactcacagaatgataac

SEQ ID NO: 234024 - DNA, 367 bp, Glycine max
gtgccctccctctttctagctatttccatctcttaaaacaatttacaaagatatatcatatcatatcaactcgaaatgatgaaaaatattgggttgtttcttcttgtggtggtggttacttttgtggtggtacacacagctggtatcttttaccatcactttgaaatatcatggggtggtgagcgtgccaaaatctatgagaatggaaatcttctcatcctctccctagacacagcctctggctctggctttcgttccaaacaacagtacttgttcggaaaaattgacatgtatctcaagctcgtgcctggtaactctgctggaacagtcattgcatattatttaccttccctggggcctactcatg

SEQ ID NO: 234025 - DNA, 276 bp, Glycine max
ctcttacacaccgaagcactgctactactactactttctctctagatatgggttctggtgctgtgcaactgtttctgatcttggggctcttggctagctcatgcttaacccaagcatcatgtgctgcaccgtcataatcacccactacaaccccatcaccaccaacacccagaatcaacacctgcaccaacatccatcacatcagcaaccccagcatcagcaaccccaacatcagcagcagctccaacatcagcagcaactccaccaccagcaagc

SEQ ID NO: 234026 - DNA, 409 bp, Glycine max
ggtcatagaccttaagaaaagcctattaagtctgataggctggcttatttagcacaaatatttttttaaaaaaaattattattattatgatatataatattatagttatttcaatgaaattgcgaaattattttaatgatttgacgatttgaatcattttaatgtttggaatatgttgattcctataagtgtaaatgagtaccaggaataaaggctcttttcttttggtggaactcaaaagactttggtagcctatcacgtgtaatatcaataggcaagttttggccacatcttgtggtgtaaaattgtcgttttgtttttaatgaaaatctttggctttgttaaaggaaaaaaaaagtaaataggaatgcaatgcaaccaattttgggtaacttacgaataacatata

SEQ ID NO: 234027 - DNA, 420 bp, Glycine max
  unsure (1)..(420): unsure at all n locations
agtttttgaaatgttgtcaccccttcttctatttctnggcctaatccttcctttgtttttgttgtccttcttcaaataccgtataaccttcaagaatccaccacttccaccaggtcctagaggccttcccataatagggaatcttcatcaactagatagtccttctcttcatgagcagctatggcatctctcaaagaaatatggtcctttattgtcccttcaatttggattaaggccagccatagttgtttcctctccaaaattggccaaagaggtaatgaaagacaatgaccttgagtgctgtggacaacctacattactaggccaacacatactaacctataatgggttagacatgggattttcctcatacgatagttattggagagatatccgaaaaatttgtgttgtccacgtcct

SEQ ID NO: 234028 - DNA, 362 bp, Glycine max
gcctcactaccgtgacacaatgaatatcaatgcacttgcacgacaatcgctcatcatcgcagatggcgttatcgagcgatcatttttgcccggcaaatactctctggagatgtcttcggcagtttacaagagttgggttttcactgatcaagcccttcctgcagatcttatcaagagaggaatggcaattgaggattcctgtgccccccacggccttcgccttgtgatagaggactacccttaagctgttgatggactagaaatatgggatgctattcagacatgggttaagaactatgttcccttgtattacccaacagatgatgcaattaacaaagactctgaagctcaagcttggtgga

SEQ ID NO: 234029 - DNA, 407 bp, Glycine max
ccggagggaggaagagatgttggggagcagcgagagctcaccctactcccccaaatccatcaagcacaccagatctctccccagatcgatcaactacctcctccgcgagcagcgcctcttgttcatcctcgtcggcatcctcatcggctccaccttcttcatcatccagcccactctctcacgcatgggcccacccgagccggcccacacattcctccctcgaaccgggcttgcccgcttcagcggcacaaggcctcgcacgggccgcgttccggtcgggatcggcggcaggaggcagcgaatcgtcgtcaccggcggcgcgggcttcgtctggagccacctcgtcgacaaactcatcgctcgcggtgacgacgtcatcgtgattgagaatttctcacgggaagaaa

SEQ ID NO: 234030 - DNA, 450 bp, Glycine max
gacgtaggacgcacgcgtccgtaaactcggaaatcggctcgagcaatgggcattgatagtgaatacgtgatatctcacaaggcctatgcgagggtgggattgcttgggaacccgagcgatgtctactacggcaaaacgatagcgttaagcgtcgccaacttcttcgccaccgtcacgctgcgtccctccgaccagttaatcctccaaccccaccccctccacgatctccttcatttctcatcgctccctcaattggtcaacaggttgagctcccaaggttactatggaggcgtgcgattgcttatggctatttgcaatgtcttctacgcgtattgcagagagaacgccatcgatcttggcgacgacaatttcactctctcctacgacaccaatatccctcgccaagctggtctttcgggttctagcgggatcgtgtgtgctgcgttgaac

SEQ ID NO: 234031 - DNA, 251 bp, Glycine max
  unsure (1)..(251): unsure at all n locations
atgggttgtgtaattgcgcctctcaaattctggatgtgttggactgcccttgatattggctcacctgatggcccttancaagcaccacacgctgttaaattcatggaaattgtcatacatggcgtacagggattctcagagcttccgaagtactgcctgcaaaggtgtggtggtttcgttttggcacccatagttatcagccttctaacggatgtcactcctaagaaattctcacagtatatagctaaccc

SEQ ID NO: 234032 - DNA, 264 bp, Glycine max
  unsure (1)..(264): unsure at all n locations
tcatgccctgaaaaaagggtctgctgagtatgcacctttggctaagaaccctgagaaagagtttttgaagactattactggcaagaaggagaccctcattgaccttacaattatagaaatcttgtcaaggcacacatctgatgagttctaccttggggagagagatggtggtgactattggacttctgatgctggtccactagangccttcaagangtttggaaagaagcttcaagagattgaacaaaagcttatacagaagaa

SEQ ID NO: 234033 - DNA, 380 bp, Glycine max
  unsure (1)..(380): unsure at all n locations
gctacctttggagaactgttccaaggaaaatgcttgaaagccctctggattggtgcaggattggtcttgtttcagcagatcacagggcaacctagtgtgctctactatgctggatcaatctttcagagtgcaggattctctggagcatctgatgcaacccgagtctctattctccttggggtttttaagttgattatgactggagttgctgttgtcgttgttgataaacttggaagaaggcctttactacttgggggagtttcagggatagtaagttccttcttgtttctttgattgtgtagtaatatcctgagaagagaaaacttcctcagttcctcatntctacctcaaattgagagggttatgccaatctgctaatc

SEQ ID NO: 234034 - DNA, 422 bp, Glycine max
cagtgaaagagaatccgaggcgaagagaagagaaaaattaagatggaggggaaggagcaggatgtgtcgctgggagcgaacaagttcccggagagacagccgattgggacggcggcgcagagccaagacgacggcaaggactaccaggagccggcgccggcgccactggttgacccgacggagtttacgtcatggtccttttacagagcagggatagcagagtttgtggccacttttctgtttctatacatcactgtcttaaccgtcatgggagtcgccggggctaagtctaagtgcagtaccgttgggattcaaggaatcgcttgggccttcggtggcatgatcttcgccctcgtttactgcaccgctggcatctcagggggacacataaacccggcggtgacatttgggctgtttttggc

SEQ ID NO: 234035 - DNA, 233 bp, Glycine max
ggaagatctagtccatatgcgatagcgaagtacatggacgagaagcacaaggcggtgcttcctgcgaatttcaagaagatactaagtctgcaactgaagaaccaagctgcgacagggaaactcgtcaggatcaaggcttcgtacaagttatccgaagccgccaagaacgtgaaggagagcaccgccaaagcgacgaacgaatcgcctccgaaacgaaacacaatcgcaaccgc

SEQ ID NO: 234036 - DNA, 399 bp, Glycine max
aaaagaagaaaaaaaaaagcaaagaaaatcctgtttcccgataaaaaccccgtccgtacatggtctggtcacgcggatcgggttgattgagatgcacaccgcgagcaggagcaacggcggcggcggcggcgtgctggcgtcgcggacgagttcgcggtcggtgacggagacggtgaacgggtcgcacaagttcgtgataaagggatactcgctggcgaaggggatcggagtcggaaaacacatcgcgagcgagacgttcacggtaggagggtaccagtgggcgatatacttctaccctgacggcaagaacccagaggacaactccgcctacgtctccgtcttcatcgcgctcgcctccgagggcaccgacgtccgcgccctgtttgagctcacgctgct

SEQ ID NO: 234037 - DNA, 407 bp, Glycine max
ctggaactgtctccacagcaccttaatggcaatacttttgctgataaattaaggttttccaattcaacctacagggaggagccatcttcaggaagcattttgaactcatcagcatagccttgggataggcaaattgggaataccgatttgcacgttaccagtggtcaagaggaacttgtttatgatgaaaactctggacatggattcttaaatgatgtttttgcagggaattctcttgtgaatgatacagatttgaaccctttggagtttttagcttctctattccctggttttgcttcagaaagccttgctgaagttttcttcgccaatgcatgcgatttacatctgaccattgagatgctcactcagttagagattcaagttgatggtggcttcaatcagaatcc

SEQ ID NO: 234038 - DNA, 397 bp, Glycine max
cttgcccgcagaccaaggtgctgaaagtacaatttggctaattgccaaggcatatgttgttgtcaatgactcctgctatcatcaactcatgagccactggttaaatactcatgctgtgattgaaccatttgtcatagcaacaaacaggcatcttagtgtgctccaccctatttataaacttttgttgcctcactatcgtgacaccatgaacatcaatggactcgcaagacaatcactcatcaatgcaggtggcattattgagcaatcatttctgcctgggccatttgctgtggagatgtcttcggcagtttacaaggggtgggttttcactgatcaagcccttcctgcggatcttatcaagagaggaatggcagtggaggattcatcctctccctat

SEQ ID NO: 234039 - DNA, 348 bp, Glycine max
  unsure (1)..(348): unsure at all n locations
gcagttttaagcgcttaattagtaggctttggcctatttcttgtcctttcctgagatgaagaatggtggtatcgatccaaacccaaaatcagattcaaattcaatggattggttattgtttcattctgatcacattgtcatatccataaagaagggggggaaaaaaagttagcactttgcagaagcattgcaattattttaagttgcaatagctagctgttagaaatgaaccactactgtgaaagatgttgaatcatacgtacgtgtgttctatcagagaagctgcttttgatcntgtgttactacggtagatgccaaatgagtggaaattgttcctgtttgagtttg

SEQ ID NO: 234040 - DNA, 406 bp, Glycine max
ctgagaatgtctccttgagtattgaggaggggaaagccagccccaccaatagaagaatctaccttagtaaagcacaagatgcagttacaagtatgctggcaaaaggttcagcaataagacaagatgcagtgaacaaagctaaagcatttgatgaaaagcatcagttgactgccaatgcatctgcaaaggtcatttctttggacaagagagttggactcacagagaaattgacagtaggcattgctgcagtgaaccagaaagtcaagtctgtggatcagaggcttcaaggtttcggataagacaatggcagcaataattgcagctgagaggaagataaataacactggatcagctgtcaaaacaagcagatatgtgactgctggaacagcatggtttaacggtgctt

SEQ ID NO: 234041 - DNA, 412 bp, Glycine max
  unsure (1)..(412): unsure at all n locations
agcgaagagaaggccacgaaaaaaagaaaacccagaaaaactctgaagaagagttcgttgctttctgcttcactgcgaagatgaacggaggcccatctggtttcacaaatgctcccgtcacaagggctttcatcatcacttcggcgcttttcacaatcttctttgggatccaaggccgtttcagcactctggggttgtcgtatcaggatatttttggaaagcttcgcctttggaagttgatcatttccatattttccttctcgtcaacaccagagttgatgtttggattgtatcttctatattacttcagggtctttgagagacagataggttccaatanatactcagtctttattgtgttctccatattaanctcactactgcttgaggtccttgctgtancacttttaaa

SEQ ID NO: 234042 - DNA, 230 bp, Glycine max
tgcatttgtacttcacttttcattaggacaatcttcatttggggtcattagtttttgttggtcggatttgtgtttgcttttatttattggtattgctcattagtattttctacttgtttgctctgtcccttgttttagtagcttggattaactgtgtctcaccatgcatttgtacttcacctttcatgttttttggggtaccactatgaaacttggaaaattgggtgcaa

SEQ ID NO: 234043 - DNA, 214 bp, Glycine max
  unsure (1)..(214): unsure at all n locations
atgccccgaagtccatgaatgagaacaaatcgagagctacttcggtcgcaagatcgccattgacgctagcatgagcatttaccagttccttattgttgtgggaagaagcggaactganatgctcactaatgaggctggtgaagttacagtcatttgcaagggatgttttcgcggacaatcagacttctataagctgggataaaaccagtatatg

SEQ ID NO: 234044 - DNA, 368 bp, Glycine max
gatggccgttttgttccaaatattacaattggacctcttgtggttgatgcattgcgccctgtgacagatcttcctttggatgtacacctgatgattgtacagcctgaacaaagggtaccagattttagtaaggcacgagctgatatagtcagtgttcattgtgaacaatcttccaccatccatttgcatcgtactgttaatcaagtgaaaagtctgggagctaaagctggagttgtcttaaaccctgctacccccttaagtgcaatagaatatgtccttgatgtggtggatttggtcctaattaagtccgtaaaccctggctttggtggccacagttttaatgagagtcaagtaaagaaaatttctga

SEQ ID NO: 234045 - DNA, 256 bp, Glycine max
agaagaaggcaaagatagtggcagagctccaagctgtgaagcacaacagtggcaagtcctacaatcagttagcggaggagactggactcaccaacgtctatgttgctcagcttctcaggagacaggctcagctcaatccccaaactgcccctctacttcgggcagcgctgcccgacctgccccaagaccttgtttctgagatgatgagaccccctttgaagtcttatgaccctaatctcatcccaagacccactgt

SEQ ID NO: 234046 - DNA, 359 bp, Glycine max
ctctgttccaaaaccctaatccttcgtcttccagaaaatggctgattctccccttgcaaggaattcaaggtccccttccccgtggaaagctcagtcgagatctaggtctaggtcaagatctaggtcgaggtctaggcctagacaaaggccaagatcccgttctagaagtcatggcaggtcaagatcaccaattcatggaaggtcaaggtcacccattcatggaaggtccgagccttcaaatcctggtgacacactttatgtaaccggtctatcttcaagggtcactgaaagagacctagaggagcatttctccaaggaaggaaaggtttcttcatgttttcttgtggtggagccccgta

SEQ ID NO: 234047 - DNA, 354 bp, Glycine max
tgaattttctctacccttccatattaaatatatagaaatattgcatattgattgctagtgtgtccaagaataaacatgtcggccaagttcctgaccgtgccgccatttgagtgcgcctggagagaggatttgaaattccgggaggcaggccggggttgcgtcgcctttgaagcattcgcctgcaacgatgtcacactggttttccgggagaatgtgggaagccagggctaccattataaaagagatagcagtcctcactacacaatcatattggggagtcacaggaatcggcgactcagaattgaggtcaatggaaaagctgttgtcgatgtggcaggggttggcctctgctgc

SEQ ID NO: 234048 - DNA, 394 bp, Glycine max
gaagcttacaacggaagcctctcgggaaaccctggtttatgcagcgtcgacgcgattaactcgttcccgcgttgccctgcttcctctggcatgtcgaaggagatgcgcgcgctcataatatgcttcgcggtggcttcgattttgttgctctcgtgtttgggcgtttacttgcaactcaagaggaggaatgaagatgcggagaaatacggagagcgttcgctgaaggaagaaacgtgggacgtgaaatcgttccacgtgttgagtttctcggagggagagattctatattccatcaagcaggataatctcataggaaaaggatgctcggggaacgtgtacagggtcactctttccaatgggaaagaactcgccgtgaagcatatttggaacaacg

SEQ ID NO: 234049 - DNA, 396 bp, Glycine max
attcgttccgttccttctttctccgctcctcacttcgctctctcattctccattctcacttctcaaattgaatcgaacgaattcacaaaccctagttttcgaggatgggtcagatccagtactccgagaagtacttcgatgacacttacgaatatagacatgtggttcttcctcctgaagtcgcaaaactgcttcccaagaatcgtcttctctccgaaaatgagtggcgggcaattggggttcagcagagccgtggctgggttcattatgcaattcatcgccctgagccacacataatgctcttcaggaggcctttgaattatcagcagcagcaggaaaaccaggcccagcaaagcatgcttgtcaaatgaacactatctatgcaaatctgaaagt

SEQ ID NO: 234050 - DNA, 369 bp, Glycine max
gacggcagaaccctcgccgactacaacatccaagaggagtccacgctccacctcgtcctccgcctccgcggtggcatgcaaatcttcgtcaaaagccttactggcaaaacaatcacgctagaggtggagttctccgacacaatcgataacgtgaaagccaagattcaagataaggaagggattcctccggatcaacaacgtttgatcttcgccggaaaacaactccaagacggcagaaccctcgccgattacaatatccagaaagaatccactctgcatttggtgcttcgtctccgcggagggatgcagatcttcgtgaaaaccctaaccggcaaaacgattacgctagaggtaaagtcctctgacaca

SEQ ID NO: 234051 - DNA, 430 bp, Glycine max
gacgtcggacgcattaaaaccggaattcggtccaagaaaaatcaattcaccaattaaaaaaatcaactgtatttccaaaataaccaaaattggtttccttcctttaaaataaaatccctggaaaggggaataattcaacaactggttaattggcctcaaataaatcattttttctgcaactattgctggtggtgatgcatctctcgatgggagctttgtgatttaaaggttcgattagttgctgacaaagatacaaataagcccaggggttatgctttcattgagtatctgcatacaagagacatgaaagctgcttataaacaagctgatggtacgaaaattgatggtacaatggtgcttgtggatgttgagcgtgggaggactgttccaaattggagaactcgccgcctaagtggtgggcttggtacta

SEQ ID NO: 234052 - DNA, 376 bp, Glycine max
gtgagtcttgggtgtgaaaatgtcgcacagcgataccataccccttcacccatcttcccaatccgacatcgacgagatcgagaacctcatcaatgccagcgttcaccaatcagtcccttcggcgagaccccccagtcccccacgcgcctccatccccgtctccgtctccgtctccactgccccttcccccttcatctcttccaacctccctccgccccctcccctccccaaatcctccgtctccgccgtcactccgtccccacctccgcctcgccccggcatcgccacctccgggttcggtcccgcccccaacacgctcaccgagcccgtctgggacaccgtgaagcgcgatctctcgagaatcgtgagcaatctg

SEQ ID NO: 234053 - DNA, 378 bp, Glycine max
cgcggccactcagtgggtgaacgcgaacgtcttgccctactacccggcgagcaacatcactctcatcaccgtcggaaacgagattttgaccttagccgaccagggtctactgtctcagctcgtcccggcgatgcgaaatgtccaaaatgccctcggcgcggcctcgctcggtggcaagatcagggtctcgacggtgcactcgatggccgtgttgactcagtcggacccgccgtcgtccgggttgttcaacccggcgctgcaagacacgctgaaacagctgctggcgcttctgaaggacaacaaatcgccgttcacgattcaaccgttaccgttcttcgcttaccagagcgaaccaagattcgagacgctggcgttttg

SEQ ID NO: 234054 - DNA, 409 bp, Glycine max
  unsure (1)..(409): unsure at all n locations
gataattgctttgatgcagacgtcatctatgcttttctggatgcaaatggaattggcaaaactcattccattttctacatttcatatgctttgcatttggaatctaagaacaagtttaaagctgccaatcagatgatggagcttggcatatctaggaatgctcaaccggttgataaattgaaggctgcttatagacaattttttgcacgctcaatggcaaggcctatagctatagatgatgcagtagaaaaactggcacccacgcgtagctttggaactgttcttgccaagggagaaaatcgtgcaccgctgtccattttgaactcgaaccgtgattcttgtgctaagaatgataggtaccgancagctccactttcccatttataagattcagctgacactggtgata

SEQ ID NO: 234055 - DNA, 415 bp, Glycine max
  unsure (1)..(415): unsure at all n locations
cgtatctttctctgttctattcctacgatggagttttggggtgccgaggttaaggttggtgagtctgttaaggtagatccagccgaattcgaggcatgcatacacctttctcaggctgctcttggtgaggcaaagaaagacaaatcaaatgaaccagttgttctctacttgaaagttggtcaacagaaatttgtcttgggaaccctttccagggagaaaattcctcaaatacctctggaattggttttggaaaaggagtttgagctttcncacaactcaaagaatgccagtgttcatttctgtggatacaaggcattttatgatgctggcgatgatagcgaagaagatgaatttactgatagcgaagaggatgttccattgcttanagcagagaatggaaaacctgaaacaaaag

SEQ ID NO: 234056 - DNA, 316 bp, Glycine max
gatccgtttgggctagggaagcccgcggagtacctgcagttcgagctggactcgctggaccagaaccttgcgaagaacgtggctggggacatcattggaaccaggaccgagctcgcggacgtgaagtccaccccgtttcagccctacagcgaggtgtttgggctccaaaggttccgtgagtgcgaactcatccatggaaggtgggccatgctcgccactctcggagctctcactgttgagtggctcactggtgttacatggcaagacgccggaaaggtggagctagtaaaagggtcatcataccttgggcaaccac

SEQ ID NO: 234057 - DNA, 387 bp, Glycine max
  unsure (1)..(387): unsure at all n locations
ccgggactttgatgggggcaaggacttttaaaattcagccaagaatgggttcggccctaaaaaacctttttgatggatgtgtggtaaagcgtgacgacttatggatcacttccaaactcaggtttgttgtcctttantaattgtgatatcgttttgaacattgagaaagaatggatgtgtttggaccagtttgggtgctgaaggaaggatcctttgatttgttcgggaaacttttaagtgttcagatcatgcaccacaagatgtgccaaaagcaatggctagaacattacaggaagtgcaacttgactatcttgacctctatctgatccacaggacagtccgcatgaaaagtgggacatttgggcacaataaggaacatcttgagca

SEQ ID NO: 234058 - DNA, 318 bp, Glycine max
cactcggttgcagaacagaacaaacttctttcactctttcgcttctgaatcttcaacaatggtgctcgaggcgacgatgatctgtatcgacaattctgaatggatgcgtaacggagattactctccttctcgatttcaagctcaagcagacgctgtcaatctcatatgcggtgctaaaacgcagtctaatccggaaaatacagtgggagtttccacaatggctgggaaaggcgttcgtgttttgggtacccctagcaatggtctgggcaagatcttagcctgcatgcatggactagatataggtggtgagatgaacct

SEQ ID NO: 234059 - DNA, 383 bp, Glycine max
gttgatttgccagatcatcatgacagttgctattgcagttacatttggtaccaatggaaacccaggtacactgcctaagtggtatgcaattgttgttgtgggggtcatctgtgtatatgtttcaggttttgcttggtcttggggtcctttagcctggttggtacctagtgaaatctttccccttgagattagacctgctgctcagagcatcacagttggtgtcaacatgatcagcactttcttcatagctcaattcttcacatcaatgctctgtcacatgaagtttggtttgttcatcttctttgggtgctttgtggtgatcatgaccacattcatctacaagttattgcctgagacaaagggtatcccacttgaggaaatga

SEQ ID NO: 234060 - DNA, 319 bp, Glycine max
tcttcgtctccctccaaaaaccctaaaacctcaaaccccaattttcgcgccacccactaatcccaaacccgacaacctcggaccgtggcctcttattccacaaaaaattgctctaccttgaagccctcaaagtgaaccctgacaaggccttccgcgtaaacaccaccctccgttcctctcatctctcaacccttaaatcggtgacgcgctccctttcttcattgggtattcaactcgcttccatgggtcgaatcctcgacatgctccccgtgctccacatgtgcgacgcctatttccaattcgagcccctcctcgaatt

SEQ ID NO: 234061 - DNA, 323 bp, Glycine max
tggactagctgagttagggtgagttgcaggcagtgtcatctctcctttgacgacaagatgagcatcccaattccccatcggcagttattcatagacggagactggaaagtccccgtcctcaagaatcggattcccatcatcaacccttccacccaacacatcatcggggatatcccagcagctactaaggaagacgttgatctcgctgtcgctgccgccaaagctgccctctcccgcaacaagggcgccgattgggcctccgcttccggctccgttcgggctcgctacctccgcgccatcgctgccaagatcaccgagaaaaa

SEQ ID NO: 234062 - DNA, 408 bp, Glycine max
  unsure (1)..(408): unsure at all n locations
attcttttttttatttcttggtggaaaacagattgtgcatctaattccaaattcacccataaaaatacttccttttgctcaccagccatatattatgatggagggagatgagaatattcaagcatcatcaaagggaaaatatgttgaaagcttcaactgctcggaggcaccaaggaagaaaagcaagaagatagaaaacaagaggaggtttagtgatgaacagataagatcactagaatgcatatttgagtcagagtcaaagcttgagccaaggaagaagatgcaactggctagagatcntggnctgcagcctcgccaagtggctatatggtttcaaaacagaagggcaagggtggaatcaaaacgaatagagcaagagtaccgaaaactcaaagatgaatatgacaa

SEQ ID NO: 234063 - DNA, 399 bp, Glycine max
cggcgcacgcccagaaggcgcccatcctccccaccaaggatctccccaaggatttcgattggcgagacaaaggagccgtcactaacgtcaaggaccaaggggcgtgtggttcgtgttggtctttcagtacgacgggagcgttggaaggagctcattatctggccactggtgagctcgtgagccttagcgagcaacagcttgtggattgcgatcacgtgtgtgatccagaagaatatggagcgtgtgactcaggctgtaatggtgggttgatgaacaacgcatttgagtacatacttcagtctgggggagtacagaaagaaaaggactatccatacaccgggagagatggcacctgcaaatttgacaaaaccaaagttgcggctactgtatctaattaca

SEQ ID NO: 234064 - DNA, 376 bp, Glycine max
ctttctcgcagaaacgtattgtttttctctctttccgcggcctagatctgagcagtttggaaaccctaactgctctcaccaacgacatcaccactctctccgatcaactacctctttcgtcgccctaagtcatggaaggaattgcacccgagggatcacagttggaggcccgccattatgatccaagaatgaatgagctgcttacgtccgatggtcaggatttcttcacatcctacgatgaggtttatgacagttttgatgctatgggcttgcaagagaatctcctgagaggcatttatgcatatggttttgagaagccatcagctattcagcaaaggggaatagttccattctgcaagggacttgacgttataca

SEQ ID NO: 234065 - DNA, 381 bp, Glycine max
ttttacttcccctatggctcgtcactccttgctcttagccctcctcctcttcgccgccgtggccaccgccgcgatggcggtggccgcgtccgacgccgacgacatcctgatccgtcaggtggtgccagatgttggcgaagccgaagaggaggacaacctgctgaacgccgagcaccacttcgcgagcttcaaggccaagttcgccaagacctacgccaccaaggaggagcacgatcatcgcttcggcgtcttcaagtccaacctccgcagagccaggctgcacgccaagctcgacccctccgccgtccacggcgtcaccaaattctccgatctaactccggccgagttccgccgccagttcctcggcctcaagccgctccg

SEQ ID NO: 234066 - DNA, 326 bp, Glycine max
cctctttctcctcctcctccttcttcttcttctccttctttctctttttcattctttctttcaacatgggtggcatcagcctcgaagaaataaaaaacgagaacgtcgatctggaacggattccaatagaggaagtgtttgagcagctgaaatgttcaagagcaggtctaacatcagaggaaggggccaatcggctccaagtctttggaccaaacaaattggaagagaaaaaagagagcaagtttttgaagttcttgggctttatgtggaaccccttgtcctgggtcatggaagctgctgccataatggccattgctttggcaaac

SEQ ID NO: 234067 - DNA, 360 bp, Glycine max
tccacttttgccattgcaatggcttcctcggccttgacccaaagcagctccttttcgtatgacgtgtttctcagcttccacgctacagacacacgcagcaacttcacagactttctttttcaagctctcataagaaaaggcatcgttgccttcaaagacgaatccagagcacccgaccaagcgattgaggattctcgccttttcattgtggtcctttccaagaactatgctttctccactcagtgtttgcatgaactatcacagatcttccattgcgttgaattttcgccaagacgtgttctgcctattttttatgatgttgatccatcagatgtgcgaaaacagactggatggtacgag

SEQ ID NO: 234068 - DNA, 379 bp, Glycine max
aggtcaactctaaaggatcccctcggggaattccaattccacattttcaagaaataaggaggcaaaaatgttcatatatgaattggaattatttgttttcttactaggcctatcctgaaaccaaagggaaatgagattcggaattcctccggggaattccaattcacatttttcaagaaataaggaggcaaaaatgttcatatatgaattggaattatttgttttcttattaggcctatcctgaatccaaaggaaatgagatcggaattcctcggggaattccaattccacattttcaagaaataaggaggcaaaaatgttcatatatgaattggaattatttgttttcttattaggcctatcctgaagccaaaggaaa

SEQ ID NO: 234069 - DNA, 278 bp, Glycine max
accttaagctcagcaaaagcctctgggtcatcagcaaggcccaatgggtcaaagctgccaccagggtacattgggtcagtgacctcaccgaggggcccaccagcaatacgataatcctcaacagcacccattacgataacttgggtggcccagatggcgaggatgctctgggcgtggacaatgcttgggttgcccatgtagtccagcccatcctcgctgaacatctgggacccggccttgatccacacagcttctccatacttgacccctttgcggcg

SEQ ID NO: 234070 - DNA, 383 bp, Glycine max
agctcggctgtttctattcagactggtatgcgagggatggctgctcgtactgagctacgcttcaggaagcaaactcgtgctgctattgtcattcagagccactgccggaaatacctggctcaacatcattttacaaacttaaagaaggcagcaattgcaacacaatgtgcatggagaggaaaagttgctcggcgagaattacgacagctcaagatggctgcaagagaaactggagctctccaagctgccaaaaataagcttgaaaaacaagttgaagaccttacattgaggttgcagctggaaaaacgcctgaggattgacattgaagaatcaaaaacacaagaaaatgaataactacaatctgctttgcaagcgatgcaact

SEQ ID NO: 234071 - DNA, 187 bp, Glycine max
cctcgattggcacatggggatggtcccattgtcttagttttagcaccaacaagagagttggctgttcaaattcaagaagaggctctgaaatttgggtcccgggcaaataaaagaagtacgtgcatctatggcggcgcaccaaagggcccccaaattcgggagcttaaaagaggcgttgaaatagtta

SEQ ID NO: 234072 - DNA, 378 bp, Glycine max
gtgatttcagtgagtgatcggtgttcacttgatctcatcataatcgtcagcgtcaattgaagaagatgccgatcagaaacatcgccgtcggaaggcctgaagaggcgactcaccccgacacgttgaaggcggctttggctgagttcatctcaaccttcatcttcgtgttcgccggctcaggctccggcatcgcctacaacaagctcaccgacaacggcgctgccacccctgccggcctcatctccgcctccatcgcccatgcattcgccctcttcgtcgccgtctccgtcggcgccaacatctccggcggccacgtcaaccccgccgtcaccttcggcgccttcgtcggccgcaacatcaacttcctccgcggcatcg

SEQ ID NO: 234073 - DNA, 278 bp, Glycine max
ctcaaatctgaactcggctctaggatcgacggacagaacgcatgagatatgtggcacaagctccaagctgtgaagcacaacagtgtgcaagtcctacaatcagttagcggaggagactggactgaccaacgtctatgttgctcagcttctcacgagacaggctcagctcaatccccacactgcccctctacttcgggcagcgctgcccgacttgccccaagaccttgtttctgagatgatgataccccctttgacgtcttatgaccctaatctcatcc

SEQ ID NO: 234074 - DNA, 361 bp, Glycine max
ccaagccccactcaaccaccacaccactctctctgctcttcttctacctttcaagtttttacagtattaagatggcagagacattcctatttacctaagagtcattgaacgagggacaccctgacaagctctgcgaccaaatctccgatgctgtcctcgacgcttgccttgaacaggacccagacagcaaggttgcctgcgaaacatgcaccaagaccaacttggtcatggtcttcggagagatcaccaccaaggccaacgttgactacgagaagatcgtgcgtgacacctgcaggaacatcggcttcgtctcaaacgatgtgggacttgatgctgacaactgcaaggtccttgttaacat

SEQ ID NO: 234075 - DNA, 251 bp, Glycine max
ggacagacccgtgagcatgcttagaaataccagcttcagaaccaccattggtggagtcaattagatggacagcacagtctgcctgggaagtaccagtactcatgttcttgaccccaccactggtggttatgaagctggtatttctacagatggacagatccgtgagcatgcgcattctcgctttcaccacaggtgtcaaccatatcatgtgttgctgtaacattatcgacgccactactcccaagtatcac

SEQ ID NO: 234076 - DNA, 398 bp, Glycine max
tgcgcatgtttgttggtcttatctgcttcagatcctaacggtccattgttttacatggggtggtaccatgtattttaccaatacaatccggattcagccgtgtggggcaacataacatggggccacgctgtatccagagacttgattcactggctctaccttcccattgccttgtttccagataagtggtttgacgtcaacggtgtatggtcaggttcagcaacccttttgccagatggcaaaatcctaatgctctacacgggtagcaccgatcaaaacgtgcaagtccaaaatcttgcctaccccgccaacctatctgatcccctcctccttgattgggtcaaatatgctgataaccctgtcttggcccctccaccaagcattgggccaaaggattt

SEQ ID NO: 234077 - DNA, 480 bp, Glycine max
  unsure (1)..(480): unsure at all n locations
ttacgnagtcccnatgctnnttagnnnnntaatgacgtcggacgcacgcgtacgtaaactcggaattcggctcgaggatggaaccacgacagcagggaatgctagccaaattagtgatggtgcagcagctgtgctcctcatgaagagaagagtggctgtgcaaaaggggcttcctattcttggaatcttcaggagttttgctgctgttggagtagatcctgcagtcatgggtgttggccctgctgttgctatcccagctgcagtgaaatctgctggtcttgaacttggcaacattgacttatttgaaatcaatgaggcatttgcatcgcagtatgtttattgcctcaagaaattgggacttgatcccagaaaggtcaatgtcaatggtggtgccattgctcttggacatcctttgggcgttacaggtgcacgttgtgttgcaactttgttgaatgagatgaaacgcggtggcaaggaatt

SEQ ID NO: 234078 - DNA, 340 bp, Glycine max
  unsure (1)..(340): unsure at all n locations
gggaggttcacattcacattacaagcaacaacttaacgcttaacaacagcactctccctaatccttctgtgtatgcaaaatgagaccatgcaaatgcaaatgcaatgttctctctgctctcattcttcttgtcacattcctttttattgcttcttccgtccactgtgaagacccatatcggtacctcacttggaaggtcacctatggtgacatctatcctcttggtgtcaagcaacaagggatcttaattaatgggcagtttccagggcctcaaatanatgctgttacaaatgacaacttgattatcaatgtctataactacctcagagaaccgttcctc

SEQ ID NO: 234079 - DNA, 117 bp, Glycine max
ggttcactgattctgcaacgaagttagcccaaacaatactggatttcaacagagaagagctcccgcatttcattcttgcaaactggacaggcttttcacgagggcaaatggaccttt

SEQ ID NO: 234080 - DNA, 283 bp, Glycine max
cttaatagcaattttctagggtttatacaattttcgatggcttcttcagatgttgagtaccgttgctttgtcggtgggctcgcttgggcgactgacgaccaagctctcgagagagccttctctcagtacggcgaaatcgttgaaacgaatattatcagcgatcgtgagactggaacatccaggggttttggatttgtgaccttcgcctcagagcagtcgatgaaagacgccatcgaagggatgaacggccaaaaccttgaccgccgtaacatcactgttaacg

SEQ ID NO: 234081 - DNA, 216 bp, Glycine max
ctgcaatagagaaagaggcagatagaacaaaagagcgacttttgagttcagaagatgactaacttcccattgatcaacttggagaagctcagtggtgaggaaagaaacgataccatggacaaaacgggggatgcttggtgacaactggggattctttgagctggtgaatcagggcattccccatgacatactggacactgtggagaggttgaccaa

SEQ ID NO: 234082 - DNA, 403 bp, Glycine max
aatctctaacaccacatttcaaaatgaagcattgcatctcaaaacattttctaagttgtttcgctttgtttctgttgctagtcgcaacaacctatgccactgttgtccctaccaccacccaaaagccaccaagaagctttgcaaaccaattcctcatcccccagaacgcggcacgtgcggtgctgaggctgcggccattggtgtgggactccaaattagcacactacgcgcaatggtatgccaaccagaggcgcaacgattgtgccctagagcactccaacggaccttacggtgagaacattttctggggcagtggcacggggtggaagccagcacaagctgttagtgcatgggttgaagagcgccaatggtacaattattggcacaattcctgtgcaaatgg

SEQ ID NO: 234083 - DNA, 366 bp, Glycine max
aaagtttttgaaatgttgtcaccccttcttctatttctatgcctaactcttcctttgtttttgttgtccttcttcaaataccgtaaaaccttcaagaatccaccacttccaccaggtcctagaggccttcccataatagggaatcttcatcaactagatagtccttctcttcatgagcagctatggcatctctcaaagaaatatggtcctttattttcccttcaatttggattaaggccagccatagttgtttcctctccaaaattggccaaagaggtaatgaaagacaatgaccttgagtgctgtggacgacctaaattactaggccaacagaaactaacctataatgggttagacatgggattt

SEQ ID NO: 234084 - DNA, 395 bp, Glycine max
acaactacaaaggttgctgtacgagataagatattgaagtagtgctaagtgcctaacacctgcagtgaacaatggcctctgcatcagcatctcttctcaagtcttcacttgttcttgacaagtctgagtgggtgaagggacatacacttcgccaaccttctgctgcatcagttgtgagatgcaaccccaccaccccatcaggcctcaccatcagagctggttcctatgctgatgagctcgttaagaccgcgaaaacagtggcttcaccatggatgggtactttggccatggatgagtccaatgctacctgtgggacgcgtctggcttcaattgggctagagaacactgaagctaagcgccaggcataccgtaccctccctgtgaaagttccagga

SEQ ID NO: 234085 - DNA, 395 bp, Glycine max
tctcattgtctttctccaagaataacaactctcaattccaacctcttcaacttcgatcttccatcttccatcttccatcttccatcttatgcccactaaattctcttctctttcaccttcacttcaattacttcaattaagttgagacttccatcttcgactactagtttcaaactctctctctcacatacactataccattccttttctcgctccctctttctctttcactacaactttcccgattctgtatcatctctgcttcagttcagcatccttacatcctctctatcttccacctatttgatttgttttcatttcttccattttctttctatcttctcacaccttgttccattccacttcttttctcctcgaatctaatccttttggtc

SEQ ID NO: 234086 - DNA, 360 bp, Glycine max
aaagactcaccccttgaggtcgttgttgtcaacaacagtggtggtgtcaagaatgcttcgcacctgcctaaatatgattccatgctgggaacttttaaagcacatgtcacattaatggacaatgcaaccatcactgttgatggtaagcccatcaaggttgtttcaagcagggacccacttaagcttccttgggctgaacttggaattgacattgttattgatggaatcggagtgtttgtggatggccctggggctggtaaacacatccagtcatgtgccaagaaagttattaacactgcccctgcataaggtgctgatattccaacttatcttgttggtgtcaataaagggactacactc

SEQ ID NO: 234087 - DNA, 370 bp, Glycine max
ggcgagaaaattgggtcagaacccacattgccgtatctaagtcgcgagctcgatggagagaggctactcgttggtgccaattttgcttctgcggggataggaattctcaatgacactggaattcagtttataaacataattcgaatcaccagacaattacagtactttgagcagtatcaacaaagggtgagcgcactagttggaccagagcagactcaacgactggtcaaccaagcactagtcctcataaccttaggtggcaatgattttgttaacaactattacctggtgccattctctgcaagatcacgccaatttgcacttccaaactatgttgtataccttatttccgagtatcgcagaattcttg

SEQ ID NO: 234088 - DNA, 386 bp, Glycine max
ggcgcagagtagagcagcacagaagagggaaaacggcaccgccgccgtagaagaaaacaaccatggtgcacgtctccttttacaggaactatgggaagacattcaagaagccgcgtcgtccgtacgagaaggagcgtctcgacgcggagttgaagctggttggtgagtacgggcttcggtgcaagagagagctgtggagggtgcagtacgcgctcagccgcatccgcaacaacgcgcggaacctcctcaccctcgacgagaagaacccgcgccggatcttcgagggagaggcgctgctccgaaggatgttccgttacggtctcctcgatgagacacagaacaagcttgattacgtcctcgccctcaccgtcgagaactttctcgag

SEQ ID NO: 234089 - DNA, 396 bp, Glycine max
cacctttgttcactcttcttctcttgcggctagggttttagcgcagcttcttctagatttaaggaagatgggtaaggaaaaggttcacatcagtattgtggtcattggccatgtcgactctgggaaatccactaccactggtcacctgatttacaagcttggaggcattgacaagcgtgttattgagaggtttgagaaggaagctgctgagatgaacaagaggtctttcaagtatgcctgggtgctggacaaacttaaggctgagcgtgaaagaggaatcaccattgatattgctttgtggaagtttgaaacaacaaagtattattgcacagttattgatgcgcctggacatagggatttcattaagaatatgattactgggacatcccaagctga

SEQ ID NO: 234090 - DNA, 378 bp, Glycine max
gcgtttccctttcactttcactcacgttctcgctcgccaaacgcccctctctctcctccaatggccgaccagctcaccgacgaccagatcgccgagttcaaggaggccttcagcctcttcgacaaggatcgcgatggttgtactactactaaggaactctgggactgtgatgcggtcactatggcaaaaccgatctgaggcagaactgcaggatatgattaatgaggttgatgctgatggcaatggaaccatcgacttcccagagttcctcaacctgatggctcgcatgatgaaagacaccgactccgaggaggagcttaatgaggctttccgtgtgttcgacaacgatcacaatgggatcatctctgcaactgaact

SEQ ID NO: 234091 - DNA, 407 bp, Glycine max
gtttcctttccgcttcaggttcagcttcaacttcaaattctcagtgaaaccaattcagctgagtccaaatcccaaatccgaatcaaaatccgaagtgagatttgcgatggagaggcttcagcgaatgtttgcaggtgcaggtggagcgctagggcaccctcccccagattccccaactctcgattcctccgagcaggtctacatctcctcactcgctctcctcaagatgcttaagcacggaagggctggggttcccatggacgtgatgggtttgatgcttggagaattcgtggacgagtacaccgttcgtgtggttgatgtcatcgcaatgccgcagagtggcactggtgttagtgttgacgctgttgatcacgtttttcagactaatatgcttgacatgctcaaac

SEQ ID NO: 234092 - DNA, 378 bp, Glycine max
agccactatagtaaacaatcttctctatctaaaatggagtttgttctaaattacctaaatgccactgccattggagttctttctataaccctcttctttttgtttttgtataatcccttcaaatttgcattaggtaaaaaagaggctcccaaagttgcaggtgcatggccaatacttggtcacctaccactattgagtggttcagagacacctgatagggttttgggtgccttggctgataagtatggacccatattcaccatcaactatggtgtcaaaaaggctttggtaatcagcaactgggaaattgctaaggaatgcttcaccaaaaacgacatcgtcgtttcgtctcgccccaagcttcttgccattgaactc

SEQ ID NO: 234093 - DNA, 422 bp, Glycine max
acgtcggactcactcatatctgagctcggaactcaggactcgagcaatcggcaccctctccagcaacagctacttttcatctcttccctcaaatttcaaaaggcgtgagatccttcacatccagggtggccaatgcggcaaccagatcggcgccaagttctgggaggtggtttgcgcggagcacgggatcgaccctaccggaaggtaccgtggggactcggagttgcagctcgagaggatcactgtctactacaacgaggccagttgcggtcggttcgtgccgcgcgcggttctcatggagctccaaccgggcaccatggacaacgtccggtccgggccgtactggcagatcttcaagctcgacaactttgtgtttgggcagtccggggcagggaacaacggggccaatgggcattaccccg

SEQ ID NO: 234094 - DNA, 373 bp, Glycine max
gagaaaggaacagagagaagaaaaaggaaaaagatggaaggagagaaagagaatcccgattgtaacgccactttggtgaactccttctgcgaaatcacttcctcttccaaagaagaagcccttttctttttggagagccacaatttcgacctagacgccgccgtttcgactttcctcgacaacgccaacaaccctctcatccctcaaaacgacgacgtcgttgtcgccgcaaacccaaaccccaactccgtttcccctccctccgattctcactccccggacttcaacccttccaggtctccttcgccgtctccgtcgccgactcgcacgccctacgagctccgatcccgcaggtctctcggcaagaaaccct

SEQ ID NO: 234095 - DNA, 364 bp, Glycine max
cgagaacaaaaaaaaaaaaaaaaaaaaatccgcgattcgctcttctcttggaaaagtgaaaaccagaagtacgaacgaaagagaagagcgatttagaagtgagagaagatggggttgtcgttcacgaagctgttcagcaggttgtttgcgaagaaggaaatgaggattctgatggtaggtctcgatgctgctggtaagacaaccatcttgtacaagctcaagcttggagaaatcgtcaccactatccccaccatcggatttaatgttgagactgtggagtacaagaacatcagcttcactgtgtgggatgttggtggtcaggacaagatccgtccactgtggaggcattatttccagaacactc

SEQ ID NO: 234096 - DNA, 374 bp, Glycine max
tctctttccaccaaaccattctcagccgacgctctctccgccttcgcttctctcaattccgatctcggatccctctcccccgcctacctccgactctcactccgtcctcgtcttcccaagagacttcgcatacaggcggctgggagtacctatggaaatcactttcgtgttacaacatatggggaatcacatggaggaggtgttggttgtgttattgatggatgtcctcctcgccttcctctctctgaagctgatatgcaagtggatcttgacagaaggaggccaggtcagagccgaattacaactcctagaaaggagactgatacatgtaaaatattttcaggagtttccgaaggaatcactactggaactcc

SEQ ID NO: 234097 - DNA, 411 bp, Glycine max
cacgaaaccaaattaaaaactgcgccttctctgtctctgtttgttcttctcactttatattctctctctgtgtatatctcttcactcttattattccttctcttctcaacgacgatggaggacccatcagcagcaacaacgttgttgctgaacagcgaatattcgaggctgttcgtcgaggacacggacttgtacaatcgcattgtgttgggaaccctcttgccgcacttcgtgtggggcccactcccgcacttcctccagacgtggcttcgcaattacctcggcggcgtcctcctctacctcctctccggcctcctgtggtgcttctacatttattattggaagcgcaacgtttatgttcccaaagatgctattccctctcgaagagccatgctcttgcaaatatctgtt

SEQ ID NO: 234098 - DNA, 406 bp, Glycine max
  unsure (1)..(406): unsure at all n locations
attaaaagatctgtgtggaaatcatgaatggtttggtcaaggaagtgtattaatcattacaactagagatctacacctactggacctacttaaagttgattatgtttatgaaattgaggaaatggacgaaaatgagtcccttcagctttttagttggcatgcctttggacaaccaaaaccaagagaagacttcaatgaacttgcaagagatgtagttgcttattgtggaggattaccattagctcttgaagtccttggttctcatttaattagtatgacagagacagagtgggaaagtgcattgtcaaggttaaaaatgactcccaatgatcaaattcagcanaaattaagaataagttttgatgatttatatgatcatatgggaaaacatataattcctgacata

SEQ ID NO: 234099 - DNA, 175 bp, Glycine max
tggaaaaaaggattgttgttcggaataaactacccaggaacaaaggcggagctgaaaggatgcataaacgacttgtggaaaatgcatcgctgcctgatcgagcgatacggtttctccgaagacgacatcaccgttttgatcgacacggacgagtcctacacggagcccaccggga

SEQ ID NO: 234100 - DNA, 346 bp, Glycine max
  unsure (1)..(346): unsure at all n locations
cagaaattaagctagagcttcatagtttcttcttcttttctcaccttccttctctcccttcagacaaagggacaaaaaatcagtgtgtgagagagagagagagaaattccaaaaccatgtcgcacagtcatctaagtttcgcctttgggattctaggtaacattgcctccttcgtgtgctttctggcaccactaccaacattttatagagtttgtaagaagacatcaaccgaacggttccaatcaattccatatgtggctgcactcttcagtgcaatgctttggatcntttatgcctatgtgaagaccggagaaacgcttcttatcaccatcaatgcattcggttg

SEQ ID NO: 234101 - DNA, 382 bp, Glycine max
ggagcacgaatgcctgccagttgtacagaacagccggtgggctagccttccgcctgagcttcttcgtgttgttattaaaagattggaagaaagtgagactacatggcctgctcgtaagcacgtggttgcgtgtgctgctgtgtgcaggtcctggagaggaatgtgcaaagaaattgttaccagtcctgagttctgtgggaagattactttccctgtctccctgaagcagcctggttcaagggatggaaccatccagtgtttcatcaagagagacaaatctaatctgacgtaccacctattcctttgtcttagtcctgcattgctagttgaaaatggaaagtttcttctttctgcaaaacggaacaaaagaacaacatgcaca

SEQ ID NO: 234102 - DNA, 401 bp, Glycine max
gccgttcacagcctagcctctgctctagaagatggctcctcccagaggtggtgggttcaggggtggtaggggtgacagaggtagaggaaggggcggtggtggaggaagaggaggagacaggggcacgccgttcaaagctagaggcggtggccgtggaggaggcagaggcggcggtggccgtggaggaggcaggggcggcggccgaggtggaatgaagggaggtagcaaggttgtggtgcagcctcatagacatgatggtattttcattgccaagggtaaagaagacgctcttgttaccaagaatcttgttcctggtgaagctgtttacaatgagaaaaggattaccgttcagaacgaagacggttccaaagatgagtacagagtttggaatcctttccgct

SEQ ID NO: 234103 - DNA, 385 bp, Glycine max
atcaaactcatcaaaatgaatctgtaccactcctctaccaccaccaccatcactaccatcttcaccgtcatattcctcctccttgcaatattattcactctcacaccccacaaggccaacggtgccacgtgtcaccctgaggaagaagcgggcctgttgggcttcaaatccggtatccgatccgactcgtccggcctgctcagtaactggatatcaggtacggactgctgcacatggaccggatgtagaatgccactatgacagcacccgggtcgaaagattattcttaacgggtcatcaactcgaaagcatcttatcgggtaccatctcatccatcctctcaaaactcacactcatcgatggactctacctcataaacctcatc

SEQ ID NO: 234104 - DNA, 417 bp, Glycine max
aacagtgactacgtttcgttcctctccttcgtttcgtcttcgatcttcggtttcattctgcgtttgttcacatcatggccaccgcttcagtggcatttaagtccagggaggaccaccgcaagcagattgagttggaggaggcgcgtaaagcagggcttgcgccggctgaactcgatgaagatggaaaggaaatcaatcctcacattccccagtatatgtcttctgcaccttggtatcttaatgctgagagacctagtttgaaacatcaaaggaaatggaaatccgaccccaattacaccaaatcatggtatgatagaggtgctaaaatctttcaggcagacaagtatcggaaaggtgcatgtgagaattgtggagctatgacacatgattccaagtcatgcatggaaagactccggg

SEQ ID NO: 234105 - DNA, 382 bp, Glycine max
gtaaacggtgatgcccccaagaagtgtgatgactcagccaaccatagactgtgtacctcttctgcagaagttggtagcagaggtggtggggacgtacttcttgatatttgcagggtgtgcttcggtggtggtgaaccttgacaaggacaaagtggtaacacaacctgggatttcaattgtttggggtctcactgttatggttttggtttactcagttggtcacatctctggtgctcatttcaaccctgctgtcaccattgctcatgctaccaccaaaaggtttccactgaagcatgtaccagcttatgtgatagctcaggtcgttggagccacacgtgctagtggaactcttagacttatattcaatggcaagaatgaccat

SEQ ID NO: 234106 - DNA, 367 bp, Glycine max
catttttcttttcactcaaatcatggatttcttgcaagcacaagaaaatcagatacttgtgggtgtggccgtggccgttgtagccattgggcttggtgcagtatatctctattcatccaagaagaccaaaggttgcttggacccagagaactttaaggcattcaaacttgttaagcgtgcacagctgagccataatgttgcaaagttcacatttgcactcccaacacctacatctgttttgggtcttccaattgggcaacacataagttgcaggggtaaagatgctcaaggtgaagaggttatcaaaccatatactcctactactttggattccgatgttggacattttgaactagttattaagatg

SEQ ID NO: 234107 - DNA, 295 bp, Glycine max
tgatgatacacctaaataatacattgttccaccatcagaacagtcgccaactaattccctcagaattgaccgtttccaccgtccaattaccctaaaagcagtgcaagaacttcttgggaagactgggaatgtcaacagcttctggatggaccaaattgagacccattgcgatgttacttactcatctgtggatgaacctattgagacacggcatgctgtaaataatttgcagtggacaccaagtggagggcgtctcttaattgcagagtatgttgatcctgaagaagttaaaatg

SEQ ID NO: 234108 - DNA, 332 bp, Glycine max
tgtacccaaagttagtaagtctgggtggatgactgatgaggaatttgctagagaggtgattgccggtgtaaacccaaatgtgatccgtcctcttcaagaattcccaccacagagcatacttgatcccacactctatggagatcaaaccagtaccatgccagaagaacacttggagattaacatgggaggggtcacagtacaagatgcacttagcacacagagattattcatattatattaccaagatgcattcatcccatatgtgacgaggataaacagcctacctactgcaaaagcttatgccacaaggacaatcctgttcttgaaagatg

SEQ ID NO: 234109 - DNA, 395 bp, Glycine max
gttcttcagacatatctataacgctgtttctgtgagagcatcaatggcgacaaaagctttgtccttcgctctgtctctcaatgacctcaccaataaccacttctcttccaatacgccacacaccgccgccaaagtttccgtctttaccgtcaaatgctcttcttcgggtggtggagagaggccttggaagaattcagatgctagacttgtgcttgaagatggttcaatttggaaagcaaaatcgtttggtgcttcggggactcaagttggcgaagttgttttcaatacatcattgacagggtatcaagaaattttgacagatcctagttatgctggccagtttgtgctcatgacaaatccacatattgggaacactggcataaattttgatgatg

SEQ ID NO: 234110 - DNA, 398 bp, Glycine max
  unsure (1)..(398): unsure at all n locations
cctgagagtaataacggaagcaacccacaaaagcagcacaagaacactcatcagatcccagtgatcaattcaatttgcgttcatcactggtaaggcaaacatgaggggcattctttccgtaaggacagccttggttcaacatcatagtgagaaattgggccttggtttcagagtatttagcactcagggtgcttccactgctagtaccccacagccgccaccaccacctcctccgccggagaaaacccattttggcggccttaaggatgangacaggatatttactaacttatatgggctgcatgatccttttctcaaaggtgccatgaaacgtggggattggcatcgaacgaaagatttggtagttaacggtactgattggattgtgaatgaaatga

SEQ ID NO: 234111 - DNA, 330 bp, Glycine max
cctttttcccactctcactctaacaaatcttcttctcacttcggtccgtcccaccccaaaaaagggtaaggtaccatgaagctgagtaatgtaagtttggctaggcagggaacagataggatggtcatgcaaaaggaaatttgtgtgccaattgaaacgatttggataaatacagatcaagtaatcacaatgtccttcagaggtacgccaacgaagatgtgtcactaggatcgtggattatgggacttgatgtggatcatataaatgatataagactttgttgtagcagtccgcctgattgtcattggaaggctcaagcatggaacattt

SEQ ID NO: 234112 - DNA, 407 bp, Glycine max
tacgtaaactcgaaattcggctcaagcccgcgaaggagaagaaacctaaggctccgaaggaaaagaagccaaaacaggccaaaacagcttcacatcctccatattttcagatgattaaggaggctttgatcgctttgaacgagaaaggaggatcgagtccttatgcgatagcgaagtacatggaggagaagcacaaggcggtgctccctgcgaatttcaagaagattctaggtctgcaactaaagaaccaagctgcgagagggaaactcgtgaagatcaaggcttcgtacaagttaaccgaagccgcgaagaatgagaacaccgccaaagtgacgaaggccaacgctgagaaaaaggaatcgcgtccaaaacgaagcaaaaccgcaaccgccgctgctccgaagaaa

SEQ ID NO: 234113 - DNA, 406 bp, Glycine max
atcagccgccgcagaaaaatcaattttttttctctttaactcttcctgcctcgtcacggaagaaatcctaatttctttctctttaactcagtctgcctcgccggaagttgtataacgcctctgtcaccggaaaacttaaaattcgacgcctcgtcggaaaaccggctgctatagcgcgcgaccaccgaattttcttcgcaagtcagatccagaaacagctatgtctggcaattcgaattgcagtgtttacataggcaatctggatgagagggtgacagacagggtcttgtatgatatattaattcaagcaggacgagtggtagacttgcacattcctaaagataaggaatcagagaaaccaaaaggttttgcctttgcagaatatgaaactgaagagattgcagac

SEQ ID NO: 234114 - DNA, 402 bp, Glycine max
caatgactctgtcaccaagagcaagtttgacaacttgtatgggtgccgtcactctctccctgatggtctcatgagggctaccgatgttatgattgctggaaaggtggctgttgtggctggatatggtgatgttggcaagggttgtgctgctgcaatgaagcaggctggtgctcgtgtcatcgtgaccgatattgatcccatctgtgcccttcaggctctcatggaaggccttcaggttctgaccttggaggatgttgtttctgaggctgatatctttgtcaccaccaccggtaacaaggacatcatcatggttgaccacatgaggaaaatgaagaacaatgccattgtttgcaacattggtcactttgacaatgagatcgacatgcttgggctggagaacta

SEQ ID NO: 234115 - DNA, 407 bp, Glycine max
gcaatcaggcgaacagtcagaaaaggaatgcacaccaacacatagaggaggaaagtattatgatttctggcaaaacactcgatctgtgaaatcaacaatacttcatttccaattgaggaacttggtttgggcaacatcaaagcatgatgcatatcttgtttcgagttactcaattatacactggtcgtctttaaattccaagagatcagaaatcctgaatgtatcagggcatgtagctccatgtgagaaacatcctggaagccttttggaaggatttactcagacacagattagtacactggctgtgcgggataagttgttgattgctggggggtttcaaggagaacttatttgcaagtacgtagatcgacctggtgttagcttttgttctagaactacttatgatg

SEQ ID NO: 234116 - DNA, 368 bp, Glycine max
caacttacggctaaattctcaaagatttaaactttgtctcagagtttccaaattcacccaaccccagagagaaaatgtctctaatcccaaatttcttcggtggcagaaggagcaacgttttcgatcctttttccctcgacgtctgggaccccttcaaggattttcctttcccaaacactctttcttcagcttcctttcctgaattttctcgggaaaattctgcattcgtgagcactcgtgtggattggaaggagaccccagaagcacacgtattcaaggctgatattccagggctgaagaaggaggaagtgaaggttcagattgaagatgataaggttcttcagataagcggagagaggaacgttgag

SEQ ID NO: 234117 - DNA, 387 bp, Glycine max
gtcacacgcagttgtattgtagaactgaacaagggtttctctttctctttctctgtctgcttcttcactttctctcgtttcaatcgaaaaaaatcatgggcagaaaattcttcgtcggtggcaactggaaatgcaatgggaccactgaggaggtgaagaagattgttactactttaaatgaagctaaagtccctggagaagatgttgtagaagttgttgtgagccctccttttgtgttccttccttttgtaaaaagtttgctgcgccctgatttccatgtctcggcccaaaattgttgggttcgcaaaggtggtgcttatactggagaggttagtgctgaaatgcttgttaatttgggaattccttgggttattattggtcactctg

SEQ ID NO: 234118 - DNA, 403 bp, Glycine max
ctgttcttcaagatgagaattgattttactgggaaagctgtatatactgcaatatgggttgctgctgtgtcattgttcatggagttgctgggtttctctacacagaagtggttgactgctggtggtttgggcacagtattgatttcccttgcaggtcgcgagatatttacaaacttcctttcgagtataatgattcatgcaactcggccatttgttgtgaatgagcggattcaaacaaagattaaaggatatgaggttactggtaaagttgagcatgtaggctggtggtcaccaacaatagttagaggttctgattgtgaagcagttcatattcctaatcacaatttgagtgtaaatgttgtgaggaatcttagtaagaaatctcattggcgcatcaagactc

SEQ ID NO: 234119 - DNA, 393 bp, Glycine max
cccatccaatcctcacatgcatgctgtctctgccaaagtgccaagtcacataacatttccattgttaccattctttctttccatcacaaccacttattaagcctctgatcctcactttctctcacacaaaaacacactcaccatggatcatcgcaaaccattgctacccacttcctctgatgctgctccaaatccacacactcgcaaggaccttcttctagttatttgcggcttgctattactctcttcccttgttgcctttggagggtacagggcctccaacgcgccgcatgccgacgtggcatcggcaacatcgaacgatgagcaacgtagtccgacatcggtgccttctccgaaatggtacccggtttcgcgaggtgtttcttccggggg

SEQ ID NO: 234120 - DNA, 383 bp, Glycine max
agagacgttgtttcctggacctccatgattggcggccttgttaatcatgacttacccgttgaggccatcaatttgtttgagagaatgctgcaatgtggtgtagaggtgaatgaggccacggttatttctgttttgagagcctgtgctgattctggagccttgagtatggggaggaaggtccatgctaatttagaggaatggggaattgaaattcactctaagtccaacgtttccactgctcttgttgatatgtatgccaagggtgggtgcatagcgagtgcgaggaaggtgtttgatgatgttgtccacagagatgttttcgtttggactgcaatgatttctggcctcgccagccacgggctttgcaaagatgccattgacat

SEQ ID NO: 234121 - DNA, 354 bp, Glycine max
ggtggttcaggccaacgaggtcatcgaggatcacagccaggtcgagaccggctccgatgccgtcttcgtcggcgtctacgacggacacggcggcgccgaagcctcgcgcttcatcaacgatcatctcttccttaatctcatcagggttgctcaagaaaatggttctatgtctgaagatattatcagaagtgctgtttctgctactgaggacgggtttctgactcttgttcgaaggagttatggaataaagccattgatagcagcaatgggttcctgttgtctggttggtgttgtctggaaagggacgctatatattgcgaatcttggagactctcgcgctgtaattggttctgt

SEQ ID NO: 234122 - DNA, 383 bp, Glycine max
cacagactctctaccattaggaatgcagatatgattgctgttgtgcagggagggaagattgtggaaactggtaaccatgaagagctcatggccaacccaactagtgtttatgcatctcttgttcaactccaggaggctgcttctctgcatcgcctcccatcaattggtcctagcatgggatgccaaccaagcataacctactccagagaattatcccgtacaacaacaagccttggtggaagttttcgatcagataaagaatctattggccgggtttgtgctgaagaaacagaaaatgcaggcaagaaaaggcatgtttcagcagcaaggctgtactctatggttggtcctgactggttttatggagttgctgggaccttatg

SEQ ID NO: 234123 - DNA, 405 bp, Glycine max
  unsure (1)..(405): unsure at all n locations
cgtagagcattgcatcgcatanggtaaggtttgggttggtgtcgttcctttccgatgggttgtatggatttgtgattggtggagatttgacggcacacgcattatcaaaatccttactgtgtttctttcgcggtcattgcctcttttctgttcgtggcttcaggatttttttaattctgcagctccgaaatatagataaaccaatcatcaggctgtagaggagaatggcagaatctatatctagcttctggggtccagtcacgtccaccaaagagtgttgtgaaataaattatgcttattcgtcttacattgctgaattttttaatacaatatccaacattccaacaatacttttggctctgattggtcttataaatgcattaagacaacggtttgagaaaagat

SEQ ID NO: 234124 - DNA, 381 bp, Glycine max
  unsure (1)..(381): unsure at all n locations
tctaattacatcatatgcacaaatctttggtgctccttcggtctcttatcctaattaagttagtgcaaagattatggcttccaaacctggcatactaaccaattggccctggaagcctctcgggagtttcaagtgggtgattttgacaccatggattgcacacagcacttactctttcctagtgagtgagccaaaggagagggaccttacttatttcctcatctttcctcttatgatggtgaggatgctgcatgaccaagtttggatcacactttctcgccatcgaactgccaaaggcaaaaacagaattgttgacaagggcattgagtttgaacaagttgatcgagaaagcaattgggatgnacagattctgttcaatgg

SEQ ID NO: 234125 - DNA, 392 bp, Glycine max
ctccctctctctcttctgcaccggagcccttctcgccggcggcctctactggttcgtctgtgttctgggccccgccgagcagaagggcaaacgcgccaccgatctatccggcggctccatctccgccgagaaagtccaagacaactacaagcagtactggtccttcttccgccgccccaaggagatcgagaccgccgacaaagttcccgacttcgtcgacaccttctacaatctattcaccgacatctacgagtggggctggggccagtccttccacttctccccctccatccccggtaagtcgcaccgcgaggccacgcgcctccacgatgagatggccgtcgatctcatcgaggccaagcccggcaacaaaatcctggacgtgggctgcg

SEQ ID NO: 234126 - DNA, 409 bp, Glycine max
caaagccagtgtacaagcctattccgaagccagtgtataagcctattccaaagccagttccagtgtacaagcctataccaaagccagttccagttccagtgtataagcctattccaaagccagtgtacaagcctattccgaagccagtgtataagcctattccaaagccagttccagtgtataagcctattccaaagccagttccagtgtataagcctattccaaaaccagtgtacaagcctattccaaagccagttcccgtgtataagcctataccaaagccagtttcccatttataagccaattcccatttttaagccaataccgaaaccagttcccatttataagccaattcccatttttaagccagtaccgaaaccagttcccatttataagccaattccaattt

SEQ ID NO: 234127 - DNA, 395 bp, Glycine max
gtttatttgaaattaacaagtagcaaagatgtttggaatcatcggaggaaacaagggtcacaagataaaggggaacttggtgattatgcgaaagaatgtgttggatatcaacagcattaccagtgttaagggtgtcatcggaaccggcattaacatcattggaggagtcgtcgacaccgttactgctttggcgtcccacatctccatccagctcattagtgccaccaaggctgatggacatgggaaaggaaaagttggaaaggctacaaatttaagaggacaagtgtcgttaccaaccttgggagctggcgaagatgcatacgatgttcattttgaatgggacagtgacttcggaattcccggtgcattttacattaagaacttcatgcaagttg

SEQ ID NO: 234128 - DNA, 391 bp, Glycine max
gttttgcagacagagagagagagagagagtgtgtttcagaatttagagagagaattttattttgtttttttggttatcttttttggtttctcttacagcgtttttgtaggtactgaggaagaaagttttggcagaataactttgttggagagaataaaattcaggcaaggcgttgaagttggagagtattagattggaagcttagaagtttctctttggaccaaagaaatggaggtatatggcaattctatggttgcagctccttcaaatgttatttatctgtcaagtattttgggccaagacagcccaattactggtcacagatgcaactggaaatgtgaaaatgaacatgtttgtggaaacatgtatcgctgcaagataacagggctga

SEQ ID NO: 234129 - DNA, 391 bp, Glycine max
  unsure (1)..(391): unsure at all n locations
attctctcttccttccttctccacatcatttcaaaaacacaaaaaaccctaacccccaattcatctctcttgaatcgaatcgatggcacgcatgggtccagggttccgattccaccccaccgacgaagagctggtggtgttctacctcaagcgcaagatgactggaaacctctcccgctacgaccacatcgccgtcgttgacgtctacaagctcgagccctgggaccttccctctctgtcgaagctgaagacgaaggacttggagtggtacttcttcagcgcgctggatcgcaagtacggaaacggctccaggaccaaccgcgccaccgagaggggctactggaagaccaccggaaaagaccgtcncgtcacccacggcgaacgcaccgtc

SEQ ID NO: 234130 - DNA, 391 bp, Glycine max
  unsure (1)..(391): unsure at all n locations
gaacaatgccattgtttgcaacattggtcactttgacaatgagatcgacatgcttgggctggagaactaccccggcgtgaagcgcatcaccatcaagccccaaactgacagatgggtcttccctgagaccaacaccggtatcattgtcttggctgagggtcgattgatgaacttgggatgcgccactggacaccccagttttgtgatgtcctgctccttcaccaaccaggtcattgctcagcttgagttgtggaaggagaagagtaccggcaagtacgagaagaaggtttacgttttgcccaagcaccttgatgagaaggtggctgcacttcacctgngcaaacttggagctaagctgacccagcttagcaagtcccaggctgattacatc

SEQ ID NO: 234131 - DNA, 409 bp, Glycine max
  unsure (1)..(409): unsure at all n locations
cttagagatattccgaaaccatggctcacgccaatccctatgatttttgttgttggaattctaggtaaccttgtctccttctgttgctttctagcaccagtaccaacattctatcgagtttgtaagaagaaaaccacggaaggtttccaatcacttccttacgtggctgcactcttcacttcaatgctttggatattttatgcttacataaagacgggcgaaatacttctcatcaccattaacgcattcggttgtttcatagagacagtttaccttgtcatctatatcacttattgccccaagaaagctaggttctttaccttcaagatgattttcttggtcaacgttggagtgattttcttggtagttcttcttaaccacgttctagcanaagaacgaacagcccgta

SEQ ID NO: 234132 - DNA, 407 bp, Glycine max
gcatccgaaattctgatctgtgagaatgggaaaaggtggatctctgagcgacggcgtggtgaagaagatcgttctctcctacagctacgtggcaatatggatcttcctgagcttcaccgtcatcgtctacaacaagtacatcctggacaagaagatgtacaactggcccttccccatctccctcaccatgatccacatgtccttctgcgccaccctggccctcctcctcgtccgcgtcttccgcctcgtcgagcccgtctccatgtcccgcgacgtctacctctcctccgtcgtccccatcggcgccctctactccctctccctctggctctccaactccgcctacatccacctctccgttctcttcatccagatgctcaaggccctcatgcctgtcgctgtttact

SEQ ID NO: 234133 - DNA, 371 bp, Glycine max
  unsure (1)..(371): unsure at all n locations
gatcattttggtctggagcagcttcaaatgctgtggtggttgagccggatgcttttaaggaaaatgacgtcatatatagagcccttagctccaaaggtcaccatgatgacatgctccaaactgctgaattggtgcatcaatcttccactgatgctgcatcatctctgctagtgacagctttaaatgagggtcgagatgtgatcatggatggtaccttatcatgggaaccatttgtggagcagactattactatggcaagaaatgttcacaaacacaggtaccgaatgggggtaagatataaagtatctgaagatggtacaataattacagaagattactgngagcaagtagatgacgcagaagaacatctt

SEQ ID NO: 234134 - DNA, 353 bp, Glycine max
cagagttcttctcccgatggaactttcctcaaagaaagagttactatctcgaatagtatcaacactaacgcccaacatcacactcatcttcttcatccttgtgctttctccgagcctgtgcacatcactcggaatcaccaacacagttggatcggagttgctgaaggttgctccttctgaatttgaggggacagtgagaatcgtcgttgatgtgttgcaagaagtcacctctattctctccgagttcagttctggcttcggtgattcacgtctttctaacgccgtttctgactgtcgtgatttgcttgacatgtccgctgatgaactcgattggtctgtcaccgacacacaga

SEQ ID NO: 234135 - DNA, 375 bp, Glycine max
  unsure (1)..(375): unsure at all n locations
cacaccaaccccacatccaaagcttcagttcaatatggcaaccttgtcaagttttgctcctttggccattctaagtttagttctagtaattagtgccattgtctttgaggctgaagctaggccaaggacattctttgtatttggagattcacttgttgataatggaaacaacaattacttggctaccacggcacgtgccgatgctcccccttatgggattgattaccctccaagtcatagaccaactggtcgtttctccaatggctacaacattcctgatcttatcagtcaacgacttggtgctgacgctacattgccatacttgagtccagaattaagaggaaataagctccttgttggtgcanattttgcttc

SEQ ID NO: 234136 - DNA, 408 bp, Glycine max
gctctgtgtgctgcaatttccttttgagcttgtgtttgattcatcaaatcatcaaagatgactgtaggggcaggaatatctgttgcagatgggaacttgatggtgttggggaacaaagtgctgagccatgtccatgacaaggttcttgttacccctgcatgtggtggtgctttgctcaatggggcattcattggggttcaatcccatcacaagggtagccgcacagtcttcccaattggcaagcttcaagggttgcgatttatgtgtgttttccggttcaagatgtggtggatgacgcagagaatgggcacttgtggacaagatatccccattgagacgcagttcttgctcgttgaagcacacaatggctctgatattgaaggaggatgagaccaaggtgctgctacc

SEQ ID NO: 234137 - DNA, 406 bp, Glycine max
atggcttcctcgtgtgcttcctctgccattgcagctgttgccatctccacaccaagttcccagaagaatggatcactcttgggaagcacaaaagcttcttttcttagtgggaggaaactgaaggtgaacaactttacagcaccagttggagcacgatccagcactacagtttgcgcagttgctgagcctgataggcctctgtggttcccaggcagcacccctcctccatggctagatggcagtttgccaggagattttggctttgatcctctaggtcttgcatctgatcctgagagcctgagatggaatgtccaagcagagcttgtgcactgcagatgggccatgttgggagctgctggcattttcatcccagaattcctcacaaagattggtatcctgaacaccc

SEQ ID NO: 234138 - DNA, 395 bp, Glycine max
ttcttaataaatacagaaagaaacaaaaaagaaaaaagtttataggtgcctagaagaaaagacaatatagtgtggagcaattacgtttgatcacaagggaaattaaaggtgcaacggttttgcaagatagcatagaagattttgaagaatcttagttgcaatatagttgtgcagttgttgaaatgggggctcctttatcagcatggcctttggagaactttggaacatacaagtatctattgtatgggccgtttgtgggaaaagtcctgtatgaatggttctatggtgaagaacactcctactacaacctcagctggtgccttcatttgttcatacttagtggtctcagaggcctaattcatgtgctttggggttcctacagccacatgtttttt

SEQ ID NO: 234139 - DNA, 398 bp, Glycine max
  unsure (1)..(398): unsure at all n locations
ggaagagtgaaacataggtgtagtagaggtttgttgtgtttggtggagaagaataagcacataagtgctttagggaagagttctgggacaagtgaggataaggatgattcagatgaagtgcttcaagccacaattgagaagagtaagaaggttcttgctttgcaaagggaattgcttcaacagatttctgaaagaaagaaactggtttcttcaataaatagtgaaaccacccctgaaataagagacagtatttcttatgagcacagtgacaaatccctgtcaagtgactcaaatccacagaaaggttctgccagaagangcagtgcttttgagaacgaaaatggtggtgttgtttcaagcaattatgtcgaatctattgagaaaggaaatacagatgt

SEQ ID NO: 234140 - DNA, 391 bp, Glycine max
caaccactcttaatttctctctgccttgctcatttacacacctctccaacctttcactttcagctttatttgaatccctctctctcctttccaaatggccagcgttgaggttgcacatcaaacaccaacaacagttccagaaaatgaaacaaccgaggtaatcaagacccaggaaacaaccccggaaccagtaccagccactgaggctcctgcaacagaacaagcagcagctgaggttcctgctcaagaagaacaacaagcaactgaggttcctgccccagaatcaaccaccgaagcaccaaaggaagaaaccaccgaagcaccaacaacagaaacagtagaaacaacaactacagaagaagccaagccagaggagcctaaagaagttgca

SEQ ID NO: 234141 - DNA, 357 bp, Glycine max
  unsure (1)..(357): unsure at all n locations
aacaagaaaaaaaaagaaaacatttccttccgaattgaggaaggaaaaggtgtcttggatggccaagtcatcttccttagctatcacgttgatctgcgccgccacggtattggtggcgatgagtcggtggccgacagccgtgggcggcggggaacaccacttgggaatgggatgggtttccagcacgtgcaaggggaccattgctgattgcctgngaggggaggagtacgagttggattcggagattaaccggcgcatcttatccaccaacaagtacatcagctacgttgcactgcagaggaacactgctccctgctctcgccgcggcgcctcctactacaattgccgacccggagc

SEQ ID NO: 234142 - DNA, 362 bp, Glycine max
  unsure (1)..(362): unsure at all n locations
gaaaatctgaatcatgtcgtggcaagcgtacgtggatgatcacctgctgtgtgaaatcgnaagtaaccacctcactcacgccgctattatcggccacgacggcagcgtttgggctcagagcgccaacttccctcagttcaaagctgaggaaataactgctatcatgaatgactttaacgagcctggatcacttgctccaactggattgtttctcgctgccaccaaatacatggtcatccagggcgagcctggtgccgtcattcgaggcaagaatggtcctggtggtgttactgtgaagaagaccggtgcggccttgatcattggcatttatgacgaaccaatggctccgggtcagtgcaaca

SEQ ID NO: 234143 - DNA, 424 bp, Glycine max
aacagatgatgcctgtaagctagccacccttgccttgcggtgcctatcaatagaatccaagttcaggccaaacatggatgaagtggttacaacattggagcagctgcaagttcctaatgtaatggaggccatcaaaatgggtctcgtgttcgtagaagaagtgctgatgtgaatagaggctatcaaaatccttctgttaatggatctcgagttcgtagaagaagtgccgatgatattagccctatggagactcccacagcttatccccggccttctgcatcccctctctatacttgatattgcaaacttatcatcatgcatctgttgctggtgatctcatcccacaactcagtcacctcagtagctattagcctattgcactctagtattgtacatatcttatttcacataatgtattcagtat

SEQ ID NO: 234144 - DNA, 381 bp, Glycine max
attaattgcaagaatggcacttcgttgcttggtgatgtcgctttctgttctcttcactcttggacttgcgagagaaagccatgccagagacgaagatttttggcatgctgtttggccaaacactcccattccaagttcattgcgagatcttctaaagcctgtgccctgcaagtgttgaagtcgatgatcaccctatgcaaattgatgaaacacagtacccgaaaatcttcttctataaagaagaccttcatccaggcaaaacaatgaaagtacaattcagcaagcctccctttcatcaaccatggggtgtaggtacatggataaatgacattagatacactactacagaacgatatacttttgaacagctatgcatcaaga

SEQ ID NO: 234145 - DNA, 496 bp, Glycine max
tcgaatggcgtgacatatagaggacaatgaggccggacgcacgcgtacgtaaactcggaattcggctcgagggagcttcaagaggctaagactgcataccccaacgggttcatccgtatcatcggattcgacaacgttcgccaagtgcagtgcatcagcttcatcgcctacaagcccccaggcttctaagtgtgaaaaatttgcaaagcatttgtagccgccaccccactttgtttgtttgtacgtaaactacattcccatttgtttttgctttttgagatttcatcatcctgtatttttggtttctgttttcggacttcactggaaattaatggatgagaactaatgaataagctactgtgttgtgttaaaaaagtgtaggaacaagggcggccgccgactagtgagctcgtcgacccgggaattaattccggaccggtacctgcaggcgttccaccattcccgaaaatggatcctattaaagccctggccttag

SEQ ID NO: 234146 - DNA, 387 bp, Glycine max
cagagagagagagagagagagagagagagagagagaatgggagggtgggctatcgcggtgcatggtggcgctggtgtcgaccctaatctcccactcgagcgccaagaagaagcgaaacaacttctcacgcgctgtctcaatcttggaatctctgctctaaattctaatcttcccgccatagatgtcgtcgaacttgtggtgagggaattggaaacggatccgctgttcaattcgggccgtggatctgccctgacagaaaaaggaacggtggagatggaggctagcatcatggatggtccaaaacgacgatgcggcgccgtttcgggtcttaccaccgttaagaacccgatctcgcttgctcgtttggttatggacaaatccccgcat

SEQ ID NO: 234147 - DNA, 405 bp, Glycine max
ctcgaaactctgaaaaaagtaaaaaccgctgcgaacaatggcaacgatcaaggccgtgaaagctcgccagatcttcgacagccgtggaaatccaaccgttgaagttgacgttattctcagcgatggaaccttccacagagctgctgtccctagcggcgcttcaacaggtgtttatgaggctttggaattgacggatggaggctcagactacctcgggaaaggtgttcttaaggctgtggagaatgttaattcaattatagcacctgctctgcttggcaaggacccaaccaagcagactgaaattgacaattttatggtacagcagcttgatggaactgttaatgaatggggatggtgtaagcagaagcttggagctaatgctattttggcagtgtcacttgctgt

SEQ ID NO: 234148 - DNA, 397 bp, Glycine max
ctcgaaactctgaaaaaagtaaaaaccgctgcgaacaatggcaacgatcaaggccgtgaaagctcgccagatcttcgacagccgtggaaatccaaccgttgaagttgacgttattctgagcgatggaaccttccacagagctgctgtccctagcggcgcttcaacaggtgtttatgaggctttggaattgatggatggaggctcagactacctcgggaaaggtgttcttaatgctgtggagaatgttaattcaattatagcacctgctctgcttggcaagtgatcatccaagcagactgaaattgacaattttatggtacatcagcttgatggaactgttaatgaatggggatggtgtaagcagagacttggagctaatgctactttggcagtgtca

SEQ ID NO: 234149 - DNA, 339 bp, Glycine max
acgcgtacgtaaactcggaattcggctccgagatttgttcaacaaggtgaaaatttaaggcatgggcaacctaagtttggcaaaattgcaactattggattcacatccttgggatgcaccacttactgtgcttcgagcagcaggagttgagctgggccagaattacccatagccaatcattgatatagatttggccagagaaagactcactgaagctatattcaagatgtgggaatctgaagcagcagcaaaagctgctggctctgaaccaagggatgaagttgttgtagacaactctcacactgttgaaaatttggacactcacaaagttgtcgtcct

SEQ ID NO: 234150 - DNA, 350 bp, Glycine max
acttaaacccagaattcggtccaaggcctaaccagaaagggcccctccattgatggaacctgtggccctcaaacctgcccctttcactgttgagaagtcctcatttaaaggccttccctccctctcaaggaactcctcttcattcagagttgtggccattggtggcaagaagatcaagactgacaagccttatggaattaatggtggcatggctttgagggaaggagttgatgcatctggcaggaaaggaaagggaaagggcgtttaccagtttgtagacaaatacggtgctaatgtcgatggttacagtcctatctacgacaccaaggactggtctccaaccggtgatg

SEQ ID NO: 234151 - DNA, 521 bp, Glycine max
  unsure (1)..(521): unsure at all n locations
ggaaccatgcggncgcngtgaatgaatcaggtagcctagcgaagacactgaagtcggatgcacgcgtacgtaaactcggaattcggttcaagcaaacccgtccctcaaactctccaaaccctagcggaactacacactagttctatcgctatctccccaagatgtcgagcgccgatcccgagcacagagaagaggaggaggcacccgccgttggcgacgacgaggacaccggagctcacgtcgctccaatcgtcaagctcgaggaggttgctgtcaccaccggcgaggaggacgaagatgcaatcctggatctcaaatcgaagctttaccggttcgacaaggacggggaacagtggaaggagcgtggcgccggcactgtgaagttcctgaagcataaggcttccggcaaggttaggcttctcatgaggcantccaagacgctcaagatctgcgctaatcatctcattttgcctacgatgagtgtgcaanancacgctgggaacaagaaatccggggtttgg

SEQ ID NO: 234152 - DNA, 398 bp, Glycine max
cgttcacataaaatatcgacagagatcgacgagaaaaagctaagcgaacaatgtggagctccaaaacgacgatgatgctggccattgcagccattgctctgatgatgtttctctcatcggcttcagccgacgacgtcgttgcactcacagaggaaaccttcgaaaacgaggttggcaaggatcgcgccgctctcgttgagttttacgctccctggtgtggacactgtaaaaggcttgccccggagtacgaacagctcggagcgagttttaagaaaacgaagtccgttttgattgccaaggtggactgtgatgaacataaaagcgtttgcggtaaatatggggtatctggttaccctaccattcaatggtttcctaagggatctctagaacctaaaaag

SEQ ID NO: 234153 - DNA, 363 bp, Glycine max
  unsure (1)..(363): unsure at all n locations
atttgaccttatgtatgccaagagagcgtttgtgcactggtatgttggtgagggcatggaagagggtgagttctctgaggctcgtgaagatcttgctgcccttgagaaggattatgaggaggtcggagcagaggctaatgaaggtgatgaaggagaggatggagatgagtattgattagggagttactttttcgtgatggggttcttttatgtactttccttggctttattttgtaagttgttgccatatatgcttgctgttatctgcatgaatggtttgtccatttgatggagcttgttctgtcccagcactaaataatttcaatgacatgattgtggcgctttagttaaaaaanaaaacac

SEQ ID NO: 234154 - DNA, 378 bp, Glycine max
atcgatcaaaaccacggatatacattggatgcatgaaatctgggcctgtcctatcccaaaaaggggtaaggtaccatgaacctgagtactggaagtttggagaggctggaaacagatacttccgtcatgccacaggacagttgtatgccatttcaaacgatttggctacatacatatcaattaaccagaatgttcttcacaagtatgccaacgaggatgtgtcactaggatcctggtttattggacttgatgtggagcatatagatgatcgaagactttgttgtggcactcctcctgattgtgagtggaaggcccaagcagggaacatttgtgttgcatcatttgattggagctgcagtggaatttgcaagtctgctg

SEQ ID NO: 234155 - DNA, 403 bp, Glycine max
cccattctctctctctctctctctctccgacctagcgagaccgagcgatccgaccctaatctcgcgatgctccgccgcgcaacctcctccctcctcaccggcgcctcccgccgccgcctctcctccgacgtgccggcgacccccgccgcggattccgccttcgcggaggcgtggaagaaagtgagccccaacatcgacccgccgaagacgccgctggcgtacatgaagccccgaccacccactccctcggctctcccttccaagctcacagtcaacttcgtcttgccctactcttctcaattggccgcaaaagaggttgatatggtcattgtaccagcaacaactgggcagatgggtgttctcccaggacatgtagcaacaattgcagagttgaaacctggtg

SEQ ID NO: 234156 - DNA, 348 bp, Glycine max
tagaagtggaaagtggttgcagagtagaagtcgagatggccaaccttccaaattcaaagctttatgggaaagagaagatgaaaggagagcaagaattagaagatgaagaaagcttctcgcgtgctatgctgctttgcagctccgttgtggtttccatggcgctgcaatcggcaacggagctgggcgtatttgacgtgttgcaagaagcgggggctaagctctctgcgaaagagatagcatccaagctttcctgcgacaacaaccctgaagcagactcaatgctggatcgccttctagcccttctagcctctcactccattcttaactgttctctcattctcgaccacc

SEQ ID NO: 234157 - DNA, 353 bp, Glycine max
cgaagatagacttcattttggcgaagcaccctgagattgacgtgccgaatctgcaggtgattaagctgatgcaaagtttcaagtctcgcgagtatgtgagggagacttttgcttggatgcactattactggttcctcaccaacgatggaatcgagtttctcagaacttaccttaaccttccttccgaaattgtccctgctactttgaagaaacaggccaagccacctggcaggccctttggcggcccatccggtgatcgccctaggggtccaccacgctttgaaggggagcgtacgtttggtggtgatcgtgatggataccgtggacgtccccgatgaggacctggtggtgac

SEQ ID NO: 234158 - DNA, 293 bp, Glycine max
tggtgaccctgcaatgggtgcctacaattatgtttcaaagctatggcgcaaaaaccattctgatgtcatgcgcttcttgcaacggttgaggtgctgggagtataggcagcaaccttccattgttcgtttgacaaggtcaacccgccctgacaaggctcgtcgcttgggcttcaaggctaagcagggctatgtgattaccgtgttcgtgttaggaggggtggccgaaagagaccatttcccaaaggtattgtttatgggaagcccacaaaccagggagttacccaactgaaatt

SEQ ID NO: 234159 - DNA, 404 bp, Glycine max
  unsure (1)..(404): unsure at all n locations
ataaaaacctagtattttatctggaggcatgtgaatctgggagtatctttgaaggtcttcttcctgaagatatcaatatttatgcaaccactgcttccaatgcagaagaaagtagttggggaacatattgccccggggagtatcctagtcctcccccagaatatacaacctgtttgggtgacttgtacagtgttgcttggatggaagacagtgacagacacaatttgcgaacagaaactctgcaccaacaatataaattggttaaagagaggactatatctggagattcatactatggctctcacgtgatgcagtatggtgatgtanggcttagcagagatgttctcttccattatttgggtacagatcctgctaatgataatttcacttttgtggatgaaaac

SEQ ID NO: 234160 - DNA, 361 bp, Glycine max
aaaagaccaggaatagaagaacccttcatgagctcccagagccgcttaatggatctagtctgaacataactgaagaacgagtaaagaatttgcagaaagaccacctccatggtaataagtcttctatggtagtttcagtccttgttgatcccaaagaggctggcgatggtgatgttgatgttgacggcatgatgagaccaaagtcactctctcggatttttgtggttgtgctaattgatagtgtcaagtatgtcacttactcttgtggtctgcctcgtgcttctccccatttggtgactggttacgtatgacaatccttcggaaaaaagttttgatgcagccgaagcatctaacctgagtt

SEQ ID NO: 234161 - DNA, 380 bp, Glycine max
cacaggagcaacttcacttgtatcaaacatgggagctcagtacttttctgttggtggcatgttcctgtttgtcttaacatttgctctcggagctggcccagttccaggtctccttctaccagaaatctttcctagtcgaataagagccaaagccatggcagtctgtatgtcagtgcattgggtgataaatttctttgttggactactgttcttgcgtttgctggagaaacttggtccacagctgctttactctatgtttgctaccttttgcatcatggcagtaatttttgtaaaaagaaatgtggtggaaaccaaagggaagtcacttcatgaaatcgagatcgcacttctaccccaagactagagcatcttatgaagct

SEQ ID NO: 234162 - DNA, 403 bp, Glycine max
gtgctatctgagctcaagttgacagctgataggaatacactgaggggctttgaacatatcatgggggtgagactaaagccgcatgcatttgacatggaaagagatttggcgactgcaacactgaataataccagaaacaaactgctcaagtattatcaggtggaaatagatgaaatcaaccagtgtttgacagggaagaaagcataacgtccgaggttgctaaattctagacacggatatgcctagttagtactacccagtaaccccgttccacaactctcatctatatatataatcctagaagctcaatgctactattttgtgtgacgtaatatgcaccaactagcaactgctgaaccatgatatttaaccaaatgtcaaactctacatatacgagaacaat

SEQ ID NO: 234163 - DNA, 480 bp, Glycine max
  unsure (1)..(480): unsure at all n locations
ngattgaatgacgtggcatataaaagagatatgacgtcggatgcacgcgtacgtaagctcggaattcgactcgagcccaattcttccccctccacccacccagcatatctctctattcctatttattagcacccctcacattaccttgtgtcaccaactactttgactcctttaccataccattacaataattatcaaacctaaccagtaaaaatggtgaccgtggaggaaatccgcaacgctcagcgttcccatggacccgccaccatcttggccttcggcaccgccacgccgtccaactgcgtctcccaagccgattaccctgactactacttccgcattaccaacagcgaacacatgactgatctcaaagaaaagttcaagcgcatgtgtgaaaagtccatgataaagaagcgatacatgcacctgacggaggagtttctgaaagagaacccgaacatgtgcgagtacatggcgcca

SEQ ID NO: 234164 - DNA, 392 bp, Glycine max
gtttgcgagatagaagcgtaagcagcggctaccctaacctcgtcttcctctctactaatttcagctatggccgacgaagctgtggttgttccagatcccacccagatcgatgtcaagctctttaaccgctggagcttcgaggatattgaggttactgacatttcactggctgattacattggagttgcggcatccaagcacgccacatatgttcctcacaccgccggaaggtactccgtgaagcggttcaggaaggcgcagtgccccattgttgagaggctcaccaactctctcatgatgcacggtagaaacaatggcaagaaactcttggctgttaggatcatcaagcatgctatggagattattcatttgttgactgaccagaatcccat

SEQ ID NO: 234165 - DNA, 350 bp, Glycine max
caaaacactcataacacaaagcacaaagcaaagctcatccttgagttaaaaaatggcagcagcttcttccatggctctctcatccccatccttggctggcaaggccgtgaagctgggcccatcagccccagaagtgggaacggtgagcatgaggaagaccgtcaccaagcatgtctcctcaggaagcccatggtacggcccagaccgagtcaagtacttgggcccattctctggcgagcccccgtcctacctaaccggtgagttcccaagcgactacggctgggacactgctgggctttccgcagacccagaaaccttcgccaagaaccgtgaactcgaagtgatccact

SEQ ID NO: 234166 - DNA, 324 bp, Glycine max
cattaaccaataaccattaggtacattaaccaccatggggaagtactttgctgttgttgctctctttgtctcagctttgtgcttctcctctatcttggctcgtaagatacctgcccttgataaattcttcgttgagggcaagatttactgtgacccttgccacttcgcatttgagtccaggctcagtttccccttggaaggtgttaaggtaagcctgcaatgtctgaggagtgagaatgataccgtgacatatgtgaaggagggcattcctgatgccaatgggcaatacagcatccctgtccatggtgatcacgatgaggagat

SEQ ID NO: 234167 - DNA, 415 bp, Glycine max
tctaaattcaattatggcgtttaagaaaacgctagcccagcggcttctcaacatcacaaaaatctccaattaccgcatttcctcctccgtagtccgttccccgaacccgacaaaacctgacattgctccggatcccggagacagccgcaggttcctccacaagagggcctccgtgctcccgccggagctccgcccgccgctgcccgccggcagcctcctccagaggctccgggaaatggacattgcgcggagccggatccggctagacggtctcgctccgccggagactgaacaaacggtggcgccggaacacgtgaggaaggtgctcagagcggtgcaaatcgaaacggtgaaatcgaagctgagaaaaattccgcagagttgcataagctattcagagttcattcgaatgtgc

SEQ ID NO: 234168 - DNA, 362 bp, Glycine max
aagagatcacatagcagaatggcttctactcaatgtttcttgcaccaccatgctcttaccacccctgccagatccccatcacaacgcatcatggttagcaccaagcctaaccagcttgtttgcaaggcacagaagcaagaggatattgatgtcagcccaatctctcgccggttagctctaaccgtgctcattggtgctgctgctgttggctccaaagtccaacctgctgatgcagcttatggggaagctgccaatgtgtttggaaagccaaagacagacacagatttcctgccatacaatggagatggattcaaactatcgattccctcaaagtggaaaccaagcaaagaggttgagtacac

SEQ ID NO: 234169 - DNA, 361 bp, Glycine max
gtgactgacttttcgagaaaggaaaaaaaaagagtttccgggattattccatcatgaacgctcttcccattcttctcttcttcctcttcgtttcggcattagtttatgcgaagaaaactggcgatgtgacggagttgcaaattggcgtgaagcataaaccagcatcatgtgaagttctggcacacaaaggtgacagagtcaaagtacactatcggggaaaactcactgatggaactgttttcgattctagctttgaaagaaataatccaattgaatttgagcttggtactggtcaagtgatcaaaggttgggaccagggattattgggaatgtgtcttggtgagaagcggaagctgaaaat

SEQ ID NO: 234170 - DNA, 391 bp, Glycine max
gcatatcgaactcttcgtgacaggggtccataccccgctgatcaagtcctcaaagaacttgaaggcagttttggatttgtgatctatgacaacaaggatggaacagtttttgttgcatctggttctaatggccagattgggctctactggggtgttgcagctgatggttccatagttatttctgaaaatctggagcttataaaagcaagctgtgctaaatcatttgcaccatttccgaatgggtgtatgtttcatagtgagcatggtctcatgagcattgaacatccaacaaagaagatgaaagcaatgcctacgattgacagcgagagatttatgtgtggggctaacttcaatgttgactctcagacaaagatccaagtgatgcctcgtg

SEQ ID NO: 234171 - DNA, 404 bp, Glycine max
gaatagccatgtctacttcaaagagcgtcagcagttctagtgaagatgacaatgaacttagaagagggccttggactctggaagaggataacttgctctcccaatatatttttaatcatggggaagggcgatggaatttgctggctaaacgttcaggattaaagagaactgggaaaagttgcagattaaggtggctaaattatctaaagccagatgtaaaacggggaaatttaaccccacaagagcaacttataattcttgaactccactcaaagtggggaaacaggtgcttatcttgtgcatttgattcttgagctccacaggttttatcgtgattcttggtattgtgagaaattgtagacaaatgcggccaatgcagccgcaaaacggtcacaaggactctc

SEQ ID NO: 234172 - DNA, 406 bp, Glycine max
ctcgtattaatattgttccaaactcccaagtcccaaccttctctccctgtctttgcttctgcaattactcccactctggaaatgggttcgctacccgattttgacactctcccccctctgagctcgaggatttcaacggtggttccagcaacccctcgagaagatgaaaacggtgcgtttcaactcaactacatggacctcctcgtgaagctccattacatacgacccgttttcttcttcacttccgaagccgttcaaggcctctcaatctccgacttgaagaaacctatgttcccgcttctcgacccgtattaccacgtttcgggtcgggtcagaagatccgaatccggacgcccctttgttaagtgcaacgacgccggtgttcgcatcgctgagtcgcactgcg

SEQ ID NO: 234173 - DNA, 360 bp, Glycine max
tatactcctctcttgtctgtgcatcaaaacacaacattcattcatactgattacttccttgcctattgcacattcttcatcacttcattcaacatttctctctcccttagctagtttttaccaatggctgctgcggttagtgctgcagtctcttttccatccaccaagtctacctctctcccaagcaggacctccatcattaccccagagagagttgtattcaagaaggcttcattgcaatacagagatgtttgtagcagtggaagggtagtttccatcagagctcaagtcaccactgaggctccagccaaggttgaaaaagagtccaagaaacaggatgaaggtgtggttgtgaacaag

SEQ ID NO: 234174 - DNA, 408 bp, Glycine max
aaaaaatcatcatcagcttcaaaaggtgcagcagccaatgatggagttattaagggaggaagcatagattgggagctaagacctggtggcatgcttgttcagaagagacaaccccttgattcctcttctagttccatgatcaaaatcaaggtctctcatggttcttaccaccatgaggtcactgttcctgcacaatccacttttgggcatctaaaaatggtgcttacatccgagactggtcttgagcctaaagagcaaaggttactatttagagggaaagagaaagacgatgacgaatgcttgcatatggtgggagtgaaagacatgtctaaggttatattgctagatgatccagccagcacagagagaaagcttgaggagatgcataagagtgaagatatctcaaag

SEQ ID NO: 234175 - DNA, 396 bp, Glycine max
gagagtttcatttggaccaagtttatgcttcaaatattctcaacatatggagtggtatcaccaacttcttccctttgattggtgccttcatttctgatgcctatgttggtcgcttctggaccatagcttttgcttccttttcttctctactggggatggtggtggtgactttaacagcatggttaccagagttgcatcctccaccatgcactcctcagcaacaagcattgaaccaatgtgttaaagctagcacacctcacctaggtgctctacttacgggactttgcctattaagcgtaggctctgctggcataaggccatgtagcatcccatttggtgtggaccaatttgacccctccacagatgaagggaaaaaaggtatcaatagcttcttta

SEQ ID NO: 234176 - DNA, 395 bp, Glycine max
gtacgtaaactcggaattcggcccaagcacaaaggaaggatgggtggccttggggaattaaaaggaaaagaaaatttttgaggtgaaccttaaggaaatgaattctccttaaaaagcacagataacaaaggaggctgatacatctgaagtcattgaaacggtaaacctgcaatttaaaaatgctaaattgccggaaattgaggtggtgcggatcttgtgggatgttttaatggatgctgttcagtggtctggaaaaaatcagcaacagaatgcagatgcagcccttcgtcaggtaaaaacttgggcagaattgttgaatacattctgcaccagcgggaaacttgagctggagctgatgtacaaagtacagatgcaatgctatgaagatgctaaac

SEQ ID NO: 234177 - DNA, 407 bp, Glycine max
aggaaatcggtggccacgacggtgccgagaagttcgctgactcctctatcttccaaagtatgaacgttggcgttgttcttgacgaaggtctggcttctcccgacccccattaccggtctttctatgccgaaaggagtccctggtggttggtcatcaaggcctttggtgttcccggccatggcgccaagctttatgataactctgccatggagaatctctttaagagcattgaaagtatccgaaggttccgctcctcgcagttcgacttgatcaaggccggcttcaaggccgaaggcgatgttgtttctgttaatatggtctttctcaaggctggaactccatctccaactggttttgtcatgaatttgcagccttctgaagcagaagctggatttgatattcgggtg

SEQ ID NO: 234178 - DNA, 413 bp, Glycine max
  unsure (1)..(413): unsure at all n locations
gggagcttgatagggaagggaaagttgacaagtgggggattaaactccatcccatatggcccaatcatgtaaccaaggccttcttctctggaatgagagcaggcttcagtgggttggaagtggcaaatctaggaagcatggccaacaaaaaagagaacccagactaaattggaatgcaacttatgaaagtttgcttggaactagacaacctttccccaagcccatacctttatctgaaatggttgaattcctggtggatgtttgggagcgtgaagggatgtatggttgaaacttgataggttaaaatgctgagtgccttcaagtttgtttatactttcaatgatgtatttgactcctganaggttttcatgtatagttgtgcagagaagattaanagatcaaacacaagtttg

SEQ ID NO: 234179 - DNA, 406 bp, Glycine max
agttcattctctttgcgcagttccctacctctcctttcaagatgcagatcttcgtcaagaccctcaccggaaagaccatcacccttgaggtggaaagctctgacaccatcgacaacgtcaaggccaagatccaggacaaggaaggaattcccccggatcagcaacgtctcatcttcgccggaaagcagctcgaggacggccgtaccctcgccgactacaacatccagaaggagtcaacccttcaccttgtccttcgtctccgtggtggcatgcagatcttcgtcaagactctcactggcaaaaccataaccctagaggtcgaaagctctgacaccattgacaacgtcaaggccaagatccaggacaaggagggaatcccccagaccagcaacgtctcatcttcgcc

SEQ ID NO: 234180 - DNA, 400 bp, Glycine max
tttgaagcgtggttatgttgcctcaaactcaaaggatgaccctgcaaaggaggctgctaacttcacagcccaagtcatcatcatgaaccaccctggtcagattggaaatggctatgcccctgtcctcgactgccacacttctcacattgctgtcaagtttgctgaactcatgaccaagattgacaggcgatccggcaaagagcttgagaaggagcccaagtttttgaagaacggtgatgctggttttgttaagatgattccaaccaaacccatggttgttgaaactttctccgagtatcctccacttggtaggtttgctgttagggacatgcgtcaaactgttgctgtgggagtcatcaagaacgttgagaagaaggatcctaccggagccaaggtcacc

SEQ ID NO: 234181 - DNA, 405 bp, Glycine max
aagagacagcagagcagagatctagcgtattctctcgctctttctttcactgtcacagagccacatccatgggcttcccagccaacggcgcctctgcggcccagcccctaaacttcctcatctacggccgcacgggctggattggcggcctcctcggctccctctgccgggcccagggcatctccttccattacggctcgggccgcctcgagaaccgggcctccctcgaaaccgacatagccctcctcaagccctcccacgtcttcaacgccgccggcgtcacgggccgccccaacgtcgactggtgcgagtcccacaaagtcgagaccatccgaaccaacgtcgtcggaaccctcactctcgccgacgtctgccgcgatcacggcctcattctcatcaactacg

SEQ ID NO: 234182 - DNA, 494 bp, Glycine max
  unsure (1)..(494): unsure at all n locations
ggggttnttgaatggatttgattcgcgtgtcatataaaagagaatgacgtcggacgcacgcgtacgtaaactcggaattcggctcgagcgctaaggtccctaagcaatcacttagtggaaaaggaagtgatcgagcgatgacaaccaggaggtgggcttggaagcagccatcctttgaagaaagcgtaatagctcactggtctagctccatggcaccgaaaatgtatcagggctcaagtgattcaccgaagcgacgagaccttgaaagttgctttttcaagtgtcagtagcgggacgttctgtcaatcggggaaggtttttggtgacaacacctggagatatcagaagtgagaatgctgacatgagtaacgataaatcctgtgaaaaacacgatcgcctgccagtggaaggctttctgcgttcagtcaatctacgcagagtgaatcggtccctaaggaagccccgaccccgaaagggctgccgtccgatgggta

SEQ ID NO: 234183 - DNA, 389 bp, Glycine max
aaccaacgaatttgaaatgttgaaggtcctaagaacaatgttcaagccatcaaagctactccaaagaatgttgattgtccaataaacaaagactggaagggttgaaaaactgcttcccttaataataatcccaagcaacactggacctgctaaggctgtatgatcagttcttcagcactgaatggtaaattgactggcatgtccttccgagttcccactgtagatgtttcagttgttgacctcactgttaggctacagaagccagcaacctatgagcaaatcatatctgctatcaaggaagaatcagagggcacattgaagggtattttgggttacacagaagatgatgttgtgtctactgattttgttggtgataacaggtctaacat

SEQ ID NO: 234184 - DNA, 401 bp, Glycine max
  unsure (1)..(401): unsure at all n locations
tcggtccaaggaagaaattgtataaccggaataaccttacaatttgaggaataccaaggttccggaataccgaaatggaaagctagttatatcagccaatagtttgtcccatggattgagtctgttcaaggaaggcaagagtattgggaatctgaagactaatgaatctaacaaggaaaatgctggaaaagatattactggtgcaaagaatgaattgaattgtgacaaccaagcacctgaaaacaagagtgagacagagaaatccataccagtaacgaagaaagatggcgaaaatcctacacctgcaaaagctgaagttcctgacaacgagtttgagaagcgcataagacaagaggttatccctgcaaatgagatangggttacatttgcagatattggtg

SEQ ID NO: 234185 - DNA, 390 bp, Glycine max
gtcgtctcaagggccaactcatgatgagattgattttgaattcttgggaaacgtgagcggtgacccttacattctccacacaaacgtgtttaccaaaggccaagggaacagagagcaacagttctatctctggttcgaccccaccagaaacttccacacttactccatcatctggaagcctcaacacatcatattcttggtcgataacattcccataagggtgttcaagaatgctgagactattggcgttcctttcccgaagaaccaacccatgagaatctattctagcttgtggaacgctgatgactggccaccagaggtggtttggtgaaaactgattggtcaaaagcaccctttacagcatactaccgcaatttcaaagccacagag

SEQ ID NO: 234186 - DNA, 422 bp, Glycine max
gctagattcacttgtgtttatttttttcttcctttttctctttttataatatcagcccccaaactcccttgtgtacagtgatcgatctcaagaagaaagactcaaaaaatggaggggaatctagagaagaagttgctgagcaaagaggaagtgtcagaagaagataatttatcattggtgaagagggtgtgggaagagagcaaagagatgtggatagtggcagcaccagccatattcacaaggtttacgacctttggcatcaatgttataagccaagcttttattggtcatattggttcaagagaactcgctgcctatgctcttgtattcactgtcatcatacgtttcgccaatggtattctgttaggaatgtcaagtgcgttatcaacactttgtggacaagcatacggtgcaaaagaata

SEQ ID NO: 234187 - DNA, 413 bp, Glycine max
caaatagccctcttggccttcaatttcgtccaattccaaatcatggctagctcttcagttttcacgtcttacattgttttgagtctagtgatggcactagcaattagcggtttcaatttcaaaggggcagaggcagcacgtgccttctttgtgtttggtgattctctcgttgacaatggcaacaacaactacttagccaccacagctagagcagacgctccaccttatggcattgattatccaactcgcagacccactggccgtttctctaatggcctcaatattcctgattttatcagtcaagaacttgggtcagagtccacgttgccatatttaagtcctgagctcaacggggaaagattgctcgtgggtgccaactttgcttctgctggcattggaatcctcaatgacac

SEQ ID NO: 234188 - DNA, 403 bp, Glycine max
gagagtttcatttggaccaagtttatgcttcaaatattctcaacatatggagtggtatcaccaacttcttccctttgattggtgccttcatttctgatgcctatgttggtcgcttctggaccatagcttttgcttccttttcttctctactggggatggtggtggtgactttaacagcatggttaccagagttgcatcctccaccatgcactcctcagcaacaagcattgaaccaatgtgttaaagctagcacacctcacctaggtgctctacttacgggactttgcctattaagcgtaggctctgctggcataaggccatgtagcatcccatttggtgtggaccaatttgacccctccacagatgaagggaaaaaaggtatcaatagcttctttaattggta

SEQ ID NO: 234189 - DNA, 480 bp, Glycine max
tgattgaatgacgtgtcatatataagagactgacgtcggacgcacgcgtacgtaaactcggaattcggctcgagtatccataaagaagggggggaaaaaaagttagcactttgcaaaagcattgcaattattttaagttgcaatagctagctgttagaaatgaaccactactgtgaaagatgttgaatcataggtacgtgtgttctatcacagaagctgcttttgatcttgtgttactacggtagatgccaaatgagtggaagttgttcttgtttgagtttgctttactacgaatccctttttcagtttgcagaatctcttgtatttattgtgttactatatattgtactaggtctcgtgggaaataaaatttttataaattttaattttagcaaagtacaacccaaattggtgtggaacaataaagggcggccgccgactaatgagctcgtcgacccgggaattaattccggaccggtg

SEQ ID NO: 234190 - DNA, 372 bp, Glycine max
aaacgacaacgcttcttctttttctcttctctcatttttcagtttctccgtttcttattcgttagatctcatcttacactcgccatcaagttcgtctcgcgccaccgtcgacgcagctccgaccacctcctttggttccctcactttctcgctcttcttcttctcagaaatatgccttctcagaaggttgaaacgggtcatcaagacacggtccatgatgttgcgatggattactatggtaagaggctggccacggcttcatcagatcacacaattaagataattggggtcagcaacacggcctcccagcatctagcaactttgactggttcacaaggacctgtatggcaagtggtgtgggctcaccctaag

SEQ ID NO: 234191 - DNA, 347 bp, Glycine max
caagaatactgggcagaagtgagcaacaagttcaaagaccattgtcaaaaggggggcagatgtctttgtcttggctttttctttagttagtcgcgcaagctatgagaatgtgctgaagaagtggatccctgaactccagcattttgcccctggcatcccaatggtattacttggcacaaaattggatctgcgcgataacaggcacgatttggctgatgagcctgtcgtggtgcccgtgactactgagcagggtgaggaactctgtcaaaatattggagctacctacgataatgagtgcagctcagagactcaacagaatgtggaggcagtttttgatgctgcgatta

SEQ ID NO: 234192 - DNA, 345 bp, Glycine max
aaggaggatccctgtgctagctcgatcaaagatcaaagatggaggagcggactcgcagcattctgattttgatgaccttgctttccatctccattgctggcggcaatgcaggtggcttgcagcatcataagggtaggcatggtaagcatggtcgtcatatgtctgctcgtaatgtgacttacgacggtaagtcactgttcattaacggaaggcgcgagatcctttttttccggctccgtccattacacacgaagcaccccagatatgtggcctgacattcttgacaaagcaaggcgcggaggcttgaacgtcattcaaactttacgttttctggaacgctcacga

SEQ ID NO: 234193 - DNA, 386 bp, Glycine max
  unsure (1)..(386): unsure at all n locations
cttttgagtcccgaccaaaaccctaatcgagttcgattgcaaaacatctcagtttttgaattccaccttctccgaccaatggctgccaaacctcttactaccgaggcgattgcgcttacggaaaagaagatggacatgacactagatgacataatcaaaatgtctaaaaacccgaagaataagaagcaaagaagggttccgaacaaaagtcaaaaattttcaaacaattttactcaggataagtctgcaaaggtccagcgttatatggaatcgagatcttctcttagacagggggctcttgcaaaaagaaggtctaatttccanggaaaacaatttcctgctgcagttgaagttgcgcgaaaagctgttactgctcctctgcacaa

SEQ ID NO: 234194 - DNA, 425 bp, Glycine max
caagaatagtgttctaagagtgagcaacaacttcaaacaccattgtgagaaatggcttccaagggtgcacttctcttgtgtctcaacattctcttcttcactgtggtaagctccacatatgtcccatgcaacccaccccctaaaactcctaaacacacacctgtcccaaagccaccttccccaaagcaaccaagttgccccaaagacaccattaagtttggtgtgtgtgctgatgtgttaggtttgattaacgtgcaacttgggaagccaccaaagaccccatgctgcaacctcattcagggtcttgctgatcttgaagctgcggtgtgcctttgcaccgctctcaaagctaatgtgttgggcatcaaccttaatgtcccagtcaagttgagcttgcttctcaactactgtggaaagggtgttcc

SEQ ID NO: 234195 - DNA, 401 bp, Glycine max
attcaacgtcatagttcaaagaaacgacaagccatgatggattcctctggtgccaccaacgagaagctcttagaaaatggcactccatcttcttctcaaatgagaaaaggtggcttacgaaccatgcccttcatcatagtgaacgagtctctggagaaagtggcgagctacggaatcatgcccaacatgatactgtatctgagggacgaataccgcatgtctattgcgaagggcacaagcgtaatttacacttggactgccgcgtccgacatcttgtccatcttcggggcattcctctcagattcttacttgggtcgattcctcgtcattgctatcggttccttctccagccttcttggtttaaccatgttgtggttaactgccatgatacctgacctaaa

SEQ ID NO: 234196 - DNA, 435 bp, Glycine max
tgacgtcgcacgtacgcatacgtaagctccggattcaggactagattgtattgcagactgatcaaatatccccaagtattgttattatcatcatcattgcatctatctatctatctatcttctattcattttctctcattgtatctgatttgtgttgttttttgctaacacaagcaatggcggttgtagagaaggggaaaaagaagtacatcacctcagaggagctgaagggtcacaacaaggagggagatttatggatctcaattcaaggtaaggtgtacaatgtctcagattgggtgaaggagcaccctggtggtgatgttcctatctcaaaccttgctggccaggatgtcactgatgcattcataggcatacatcctggcacagcatggtcacaccttgacaaattcttcactggctaccacctcagtgact

SEQ ID NO: 234197 - DNA, 410 bp, Glycine max
gatacaatagagatggcaaagctatttttgaaacaggcaaagcaatacgcagatgcaagaccaagctatcctccacaactcttccaattcattgcttccaagactccctctcactacctcgcttgggacgtcggcactgggagcggccaagctgccaaatctttagctgcaatatacaagaatgtgatagccacagatgctagtgacaaacaacttgaatttgcagccaagctcccaaatgtgagataccaacacaccccttcaaccatgtcgacggccgagcttgaacaaatggtggcatctgaaggaaccatagaacttgtgaccatagcacaagccctgcattggtttggacgcccaaccctctacgaacaagttgaattgggttctcaggaaacctcatggaatca

SEQ ID NO: 234198 - DNA, 402 bp, Glycine max
gtcaagaacatgatcaccggcgctgcccagatggacggcgccatcctcgtcgtctccggcgccgacggcccaatgccccaaaccaaagaacacattcttttggccaaacaagtcggcgttcccaacattgtcgtcttcctcaacaaacaggaccaggttgatgacgaggagcttcttcagttagtagaattggaggtccgggagcttctttccaagtacgagttccccggagacgatgttccgattatctccggttccgctttgctgtctttggaagctttgatggccaaccctgccatcaagcgcggcgaaaaccaatgggttgataaaatttacgagctcatggaagctgtggatgactacattcccatccctcagcgccaaactgaaactccctttttg

SEQ ID NO: 234199 - DNA, 390 bp, Glycine max
gaagaaagagaatggtgacggaccaggatatagcgaaaggggtggagtctctactgcgtcactctgacccaaactccataactacggttaacggtgtcgttcagcagctggaggccaaactagggttagacctctctcacaaggccagtttcatcagagaccagatcgaccatcttctccggtcacagccacaggcatttgttcctcaccctcctccacttcacaaagactattttgcccctcacccccaaccgcactttccgaccacccactttccttcccattttgccctccatgacgagatcaacttccagcagcacccccgcgctcctccaccgtgcaaagttgagacctttcctcctcaaaatgctcacactgttgcccctcctc

SEQ ID NO: 234200 - DNA, 370 bp, Glycine max
gagagagagaacttcaactgagggtgagagtgacacaaatctagggagcactactctaaaagttctattagattcttcaaaacatgaccatgcatcgcgagtcttgggcttttgtcttcggcgttatgggcaacatcatctcctttggagtgttccttgctccattgccaaccttttaccaaatctacaagaagaaatccactgaagggttccagtcacttccttatgttgttgcactgttcagtgcaatgctttggatttactatgctttcgtcaaaagggaagctgccctccttctcattaccattaacacatttggaattgttgtggagtcaatttaccttgcaatcttcctactttatgccccaag

SEQ ID NO: 234201 - DNA, 386 bp, Glycine max
aatggaatttcgatgctcagtcatctcttttaccattctcttctctcttgctcttgcaggagagagccatgtccatgcatcgctacctgaggaagattattgggaagctgtttggccaaacactcccattcccactgcactgcgagagcttctaaagcctctccctgcaggtgttgaaatcgatgaactccctaagcaaattgatgatacacagtacccaaaaacattcttctataaagaagaccttcatccaggcaaaacaatgaaagtacaattcaccaagcgtccctatgcacaaccttatggtgtatatacatggttaacggatattaaagacacctctaaagaaagatatagttttgaagagatatgcatcaagaaagaaa

SEQ ID NO: 234202 - DNA, 422 bp, Glycine max
  unsure (1)..(422): unsure at all n locations
tgacatcggacgcacgcgtacgtaaactcggaattcngctcgagacaaattcgtgatttaccatttaccacaccaaaaccaatcggatcgtttcctctgcggagtcagaaatccatggatccctacaagaatcggccatcaagcgccttcaattctcccttctggactactaattccggtgctcccatctggaacaacaactcatcgctgactgttggatctagaggtccaattctgctggaagattaccatctggtggagaagcttgcaaactttgacagggaacggatccccgaacgtgttgtccatgctcgtggagctagcgcaaagggtttctttgaagtcacgcatgacatttctcacctcacatgtgccgatttcctccgagcccctggagttcagacccctctcatcgtccgttt

SEQ ID NO: 234203 - DNA, 387 bp, Glycine max
caacttacggctaaattctcaaagatttaaactttgtctcagagtttccaaattcacccaaccccagagagaaaatgtctctaatcccaaatttcttcggtggcagaaggagcaacgttttcgatcctttttccctcgacgtctgggaccccttcaaggattttcctttcccaaacactctttcttcagcttcctttcctgaattttctcgggaaaattctgcattcgtgagcactcgtgtggattggaaggagaccccagaagcacacgtattcaaggctgatattccagggctgaagaaggaggaagtgaaggttcagattgaagatgataaggttcttcagataagcggagagaggaacgttgagaaggaagataggaataaca

SEQ ID NO: 234204 - DNA, 344 bp, Glycine max
gtcgctaatcctagttccttcaactcctcgctggcaacaacagcagtactaccattagccgcgtttttcaaaagtgattttcgagaattagcgatgggaattgaaagaggaggcttcaagggattcaggagcgcctggagcgtgccgcccaagccgtgcgattcctgcaagctggcctcggcggcgcttttctgccgccccgattccgcgtttctctgcatcgcctgcgattccaacattcactgctcgaacaaactcgcgtcgcgccacgagcgcgtgtggatgtgtgaggtgtgcgagcaggcacccgctgctgtcacgtgcaaagccgacgccggcgccct

SEQ ID NO: 234205 - DNA, 490 bp, Glycine max
  unsure (1)..(490): unsure at all n locations
cgtatgatttccgtgccactatagaagatatatgacgtcgcactgcacgcgtacgtaagctcggaattcggctcgagtgttgacgcaatgtgatttctgcccagtgctctgaatgtcaaagtgaagaaattcaaccaagcgcgggtaaacggcgggagtaactatgactctcttaaggtagccaaatgcctcgtcatctaattagtgacgcgcatgaatggattaacgagattcccactgtccctgtctactatccagcgaaaccacagccaagggaacgggcttggcggaatcagcggggaaagaagaccctgttgagcttgactctagtccgactttgtgaaatgacttgagaggtgtangataagtgggagctggaaacagcgaaagtgaaatacaactacttttaacgttattttacttattccgtgaatcggaagcggggcactgcccctctttttggacccaaggtcggctttggccggtccat

SEQ ID NO: 234206 - DNA, 411 bp, Glycine max
ccttgttcttctttctctattgtctatagtcatctccattgttctcttcattacccacacacacaaaagaaacaacactccaagaggaccaccaggtcctccacctcttcctctcatcggcaaccttcaccaactccacaactcatccccacatctctgcctatggcaactcgccaaactccacggtcctctcatgtcgtttcgcctcggcgccgtgcaaaccgtcgtggtttcatcggccagaatcgccgaacaaatcttgaaaacccacgacctcaacttcgcttccaggcctctcttcgtgggcccgagaaagctctcttacgacgggttggacatgggcttcgcaccgtacggcccgtactggagagaaatgaagaaactctgcatcgttcacctcttcagcgcgca

SEQ ID NO: 234207 - DNA, 370 bp, Glycine max
cttaactctcttcttcttcttcttcttcgcagttctctttcaatattggcatcctctctgtctttggtcacttggaagacaattatagagaccagcttaaggaaaactactgcatagtggagaaagggtacaattctttccctaacaggattcccggaactgtatactccaaagcactcttggcaaggaggagaatcagggagattataagtgagatcatttgtaaaagaaaggagcagagattgatggagatggatctattaggccacttgctgaactacaaggatgaaaaagaacaaacgctaagtgatgaccaaattgctgataatgtaattggggtactatttgcagctcaagatactacagcaag

SEQ ID NO: 234208 - DNA, 354 bp, Glycine max
  unsure (1)..(354): unsure at all n locations
atctcaatgggttcttcttctattacaacatcgcccgcaaccatgaccatggctgcgatcgtgctcctgttcacggtctttgccgtttcctccgccctagacatgtcgataatctcgtacgacagcgcccacgcggacaaggccgccacgttgcgcaccgaggaggagctgatgtccatgtacgagcagtggctcgtgaagcacgggaaggtgtacaacgcgctcggcgagaaggagaagcgcttccagatcttcaaggacaacctgcgattcatcgacgaccacaactccgcggaggaccgaacctacaagctcggactgaaccggttcgctgatctcnacaacgaggaatac

SEQ ID NO: 234209 - DNA, 231 bp, Glycine max
atcaatcctaagctcagactttcaaagtttcttcgatcgtcactgtgccatggatcgctccaaaactgcctcagaatccgacgtctctgtccacgcaatattcggttctcgctatgtcagaacttcgctgcccaagttcaagatggcggaggaatcgattgcgaccgaggcagcataccagatcataaatcacgagttgatgttgggttggaactcaaagttgagtttggt

SEQ ID NO: 234210 - DNA, 363 bp, Glycine max
  unsure (1)..(363): unsure at all n locations
gaaccaggtcagactcaacgaggcgcttcgcacgccggacgatttgcagcggctttactcagaggttcatctcctcagtaccctcaagcatcagtccatcataagattctacacttcttggattgatattgataacagggccttcaactttatcacagaattgttcacatctgggtcactgagagaatacaggaagaattataaacgtgtcaacatacaagctataaagaattgggcttgccaaatcttgcaaggtcttgtttatctacattgccatgatccaccagtgatccatanggacctcaaatgtgataacatatttgtcaatggtcatcttggacaagtaaaaattggtgatctggg

SEQ ID NO: 234211 - DNA, 368 bp, Glycine max
aggtggtagacattgttttagaattattgaaagtttatcaaatagagtttgtttcatcttcagatattggtttcttgaagagtatcaatgggaaatcaaacaaggcaactaaaggcctccttaaacttcctaacaataataaggttgaaccctcaaccaagaagccatatggaagtattgtgaaggatcttgtcacaatcaagtcgtttgcatcaagaataatggtcccaaaagaatacatatggccagttaaaccagacaaatatctaggacttcccacaacacttgtggctgatgcccataaatcaggactagaagtttatgcctctggttttgctaatgacttctttacaagttatagttatgac

SEQ ID NO: 234212 - DNA, 395 bp, Glycine max
caaagtttctgtcttcacactccaaatgagaagcatatctcatcaccaatcaccaccgctaccagtgtcttcacttgcactcttttatttaatttagtgaatgatgaacaagctggtggtagaagttgtggaggcgagcgacctcatgcccaaagatggggaagggtcagctagcccctttgtagaggtcaagttcgatgagcagcagcacagcactgaaacgaggcacaaagacctgaatccttgttggaatgaaaagcttgtgttcaacatcaataaccccagagatcttgcccacaagacaattgaggtggttgtatacaataacaatcacaatgatcggaaccacaataacttccttggaagggtgagactttcaggctcctcaatccctc

SEQ ID NO: 234213 - DNA, 336 bp, Glycine max
gtatccgatcctctgtcctctcgaagctttcatcgttcaacatattctcaccatctcagtcatgggcctgctatcttgttttaggtctaccgtcctgagaaaatgttccaaaggaagctctggcatgtcaagattcctgtatacgaacaattttcaacgaaacttgatttcgtctggtggcaatgaatcgtattatgggtattttaacaggagatcatacacttcactttatatgggaactggaactgtgggtgggattacaagtgctagaatcagggtgccaaatgtatgatgtgaaggattcatgtgctcaagtcatctgtcaatcactcaaag

SEQ ID NO: 234214 - DNA, 393 bp, Glycine max
tgggaattcactttactccaatccttatgcttggaacaacttggcaaatatactcttccttgattctcctgctggtgttggcttttcatattctaacacaacatctgatctgtatacagcaggtgaccaaaggacagctgaagatgcatatacattccttgttaattggtttgaaagatttcctcagtataagcatagagatttctacattgctggagaaagttatgcaggtcactatgttcctcagttgtctcaacttgtttaccggagaaataaaggaatcgagaatccagttataaatttcaagggttttatggttggaaatgcagtcattgatgatttccatgattatattggaacatttgagtactggtgggtcaatggtttgatttc

SEQ ID NO: 234215 - DNA, 369 bp, Glycine max
gtttctttttcttctatagagacacacggaaagagtctcagagcaataaacacccttcaatggctaccactaaagtttacattgtttactattctacgtacggacatgttgagaagttagctgaagagattaaaaagggagctggttccgttgaaggtgtggaagcaaagctatggcaggtacctgaaacactttctgaagaggtccttgggaagatgggtgcacctccaaagagtgatgtaccgattattacacccaacgagctacctgaggctgatggcttattgcttggtttccccacaagatttggactgatggctgctcaattcaaagctttcatggatgcaactggaggcctgtggcgcacac

SEQ ID NO: 234216 - DNA, 429 bp, Glycine max
  unsure (1)..(429): unsure at all n locations
tatgcaagagtaatgacatcggacgcacgcgtacgtaaactcggaattcngctcgagcattcgttcactgtcacttttaccaatcctaacactttcttctctctgttttccttcttcctcgcatcaatggagttggacggcgttctcctcggcatgtgcaaccctctcctcgacatctctgccgtcgtcgacgacgctttcttgcaaaaatacggtatcaagttgaacgatgcgattctcgccgaggataaacacaaacctatgtatgaagaattggctaacaatcctaatgtggagtacattgctggaggtgctactcagaattcaatcagggttgctcagtggatgcttcaagcaccaggtgccacaagttatataggttgcatangaaaggacaaatttggagaagagatgaagaagaaatgttca

SEQ ID NO: 234217 - DNA, 377 bp, Glycine max
caacttacggctaaattctcaaagatttaaactttgtctcagagtttccaaattcacccaaccccagagagaaaatgtctctaatcccaaatttcttcggtggcagaaggagcaacgttttcgatcctttttccctcgacgtctgggaccccttcaaggattttcctttcccaaacactctttcttcagcttcctttcctgaattttctcgggaaaattctgcattcgtgagcactcgtgtggattggaaggagaccccagaagcacacgtattcaaggctgatattccagggctgaagaaggaggaagtgaaggttcagattgaagatgataaggttcttcagataagcggagagaggaacgttgagaaggaagat

SEQ ID NO: 234218 - DNA, 374 bp, Glycine max
ctcacataaagcatcttcctatggatccccctttaaatgatggtcgtccaaaagggatcatacatggatgtccaaactgcagtaattgtgtgaaggtatgtacctttcactttacctttccacattggaacagtcatgactatgtctcctttttgtttgtttgtttacccaaaaagactataagagaggttataaaaaaggatctcgaaattaatggtttgaatagaagtatggtacttgatagaacattatggcggaagttgatccatgtagccgaccccacctagtgggataaggcgttgttgttgttgttgttgttgttgtttgtttatcaaagtcttgaaccaggtaacagcaaggtggcatcctgaaga

SEQ ID NO: 234219 - DNA, 392 bp, Glycine max
ctctgtagtatcaaacatacatacagcaaagtggagagtctttacagataaagcgagagaattttttctacagggaaaactagatgaagctgaaagactcttcctttctgctatagaagaagctaaagaaggtttcggcgagaaagatccgcatgttgcttctgcatgcaacaatctggcagaattgtagagggtcaaaaaggcatttgacaaagcagaaccattgtatttggaagctatcaacatattagaggaatcttttggtcctgatgatgtacgggttggggtcgctgttcagaaccttgggcagttttaccttggacagcggaagttggaagaagctcgtgttagctatgagcgtgctttgaagatagaaaggcgtgttctggggt

SEQ ID NO: 234220 - DNA, 390 bp, Glycine max
  unsure (1)..(390): unsure at all n locations
caaaacaaaaaagagcagagagagagaggaaccatcaccaaccctaatttcttagctaaaccctattcgtttagcatttcctctcttttctcccacgcgtaaatcctctcccaaacttttcagatccaaatgaatcatggttttctgggtttttggctacggttcactggtgtggaaccctggattcgattacaatgagaagattataggtttcattaaggactacagacgcgtgtttgatttagcgtgcattgatcaccggggaacacctgaaaacccagcaggaacttgcacgttggacgagaacgaaggtgctatttgctgcggagctgcttattgtgttcgaggaggccctgaaaagganaaactggctatgcagtatttggagcg

SEQ ID NO: 234221 - DNA, 380 bp, Glycine max
agtgaaacgaagaagccctaactacgcacgcactcattcttgagaaagctcaatattcattcgtccatggcactctcttctcgtctcttttccaaatccaaattgatctatggctgtcaaatacttctgcaaaaggagcatgctattccagttcgtcactttgctaaagagtctgcccctcctgcccttaagggagatcagatgctgaagaacatttttgtggaggtgaagaacaaatttgagactgccataggaatattaaagaaggagaagataccattgacccagaagatccagctgctgtttctcattatgcaaaggtcatgaaaacagttagagagaaggcaagcttgttgtcggagtctcaagacatactatcc

SEQ ID NO: 234222 - DNA, 347 bp, Glycine max
aaagaaagaagttctaaggaagagggaatatgcagaatacaaggtgctagttgtctatttgcaataacaacatcagcgatccaaccttagtattcttcaacccagagagatttgtaataataaattacaacaacttaaacgatggcaggaggagcttatgtagattcgggaaatgcaaagcaatttgatgggaaggtcacggcattcgtattggttacatgctttgtggcagccatgggaggcttactcttcggttatgatcttggaataaccggaggagtgacttctatggaaccatttctcatcaaattctttcccggtgtttataaacaaatgcaagatgatgt

SEQ ID NO: 234223 - DNA, 359 bp, Glycine max
cctttctcctaaaacatcgcaatgggttcttcttctattacaacatcgcccgcaaccatgaccatggctgcgatcgtgctcctgttcacggtccttgccgtttcctccgccctagacatgtcgataatctcgtacgacagcgcccacgcggacaatgccgccacgttgcgcaccgaggaggagctgatgtccatgtacgagcagtggctcgtgaagcacgggaaggtgtacaacgcgctcggcgagaaggagaatcgcttccagatcttcaaggacagcctgcgattcatcgacgaccataactccgcggaggatcgaacctacaagctcggactgaaccggttcgctgatcccaccaa

SEQ ID NO: 234224 - DNA, 395 bp, Glycine max
  unsure (1)..(395): unsure at all n locations
cttagtctcactatcaagcaatgcaataacatcagtacataacataacataacatccttaaccctttgaacatcgttttgcagccatggaaacaggcatagcatgctacactcgcgggcctttcttgcctagtgtttcttccaagcactctccaccttccatttctccatcttttggcttgaggagtctgaaatcaagctctttatttggagaatcgctaagagtggcctccaaatcaacaataaacgtttcaaagacaaagaatacttcactcgtgaccagatgtganattggtgacagtctcgaagaattcctcacanaagcaacaccagataaggggttgatcaggttgttggtgtccatgggagaagcattgagaacaatttccttcaaag

SEQ ID NO: 234225 - DNA, 377 bp, Glycine max
tgagaatgctaatgtgatcatggctacatatgaagatccacttctcggtgatgttcaggtctatccagagaaaggaacagttgctttttctgctggtttgcacggctgggcttttaccctgactaactttgccaagatgtatgcatctaagtttggagttgatgaaggaaaaatgatggaaaggctctggggtgaaaacttctttgatccagccacaaagaaatggtccagcaagaatactggttctgctacctgcaagcgtgggtttgttcagttctgttacgagcccatcaagcagattattaacacttgtatgaatgatcagaaggataagctgtggcctatgctgcaaaagcttggggtcaccatgaaatctg

SEQ ID NO: 234226 - DNA, 377 bp, Glycine max
gcttttcagaatttttaattttctcgggaaaaatgtggttccacctaagaaaacgacactagcattgcatagcaatagttgatttttctccagaaaattaagaagctcaacttagtagtggtaagaagtaataacgcgcgcacacacacatacacaaagacagtgacagtggtgttgaattttcctcaaagaggatgtggaaactcgtgcgatatgccgccgcctccaacctcgcccgatcgcggcggttctccgccgcgattcctggtccgtgcattgttcacaagcgcggtgccgacatactccatgacccctggttcaacaaggatacagggtttcctttgactgaaagggataggttggggcttcggggcctc

SEQ ID NO: 234227 - DNA, 333 bp, Glycine max
  unsure (1)..(333): unsure at all n locations
aaaagtttatttcctctgatcgtgtggtttctgagttctaagcactcacctctttcatacacgtttgttcgcttgttgagaagccatgggcgaggatttcgagttcccaagtgctggcaacatggaaatgcctgaggaggaagagtttgagagtccgatcctgaaggttggggaagagaaggagattgggaaaatggggctgaagaagaaattgctcaaggaaggtgaaggttgggacacccctgacagtggagaccaagttgaagtgcattatactggaaccttgcttgatggaaccaaatttgattctagccgcgatangggcaccccctt

SEQ ID NO: 234228 - DNA, 378 bp, Glycine max
gtcagcatctatttcaaggtttcgtcttttttgtgccttttttcccccagaaattcataaattcgtggaagttcgaggctcgatttgtccaagcatggattctgcaagggatgcgagtggtgtggcagggaccgtgctaattcccatgcggtttgtgtggccgtacgggggaagaagtgtgtatctaagtggttctttcacgcggtggtctgaacttctacaaatgtcgcctgtggaaggctgcccaactgtgtttcaagttattcatagcttggtacctggtcatcatcagtacaagttttttgttgatggagaatggcggcatgatgaccttcaaccttgtgaatctggagaatatgggattgttaacactgtttc

SEQ ID NO: 234229 - DNA, 292 bp, Glycine max
caccttttcaaccgttcactccttcttctgcgtcaccgtcaccatcataatcaccatccctttccttattcttcttctgtttcatccctctccccattttctcgctctcgtttcttgtcctctactcctttctccatggcttctgattcccctttccctgtcaccgctcaaaacatcaaccccaaggttctgaaatgtgagtatgctgttagaggagaggttgtcacacttgcccagaatttgcaaaaggatttacaggccaatccaggttctcacccatttgatgagatac

SEQ ID NO: 234230 - DNA, 379 bp, Glycine max
agaattcggctcaagtggcatcttgtgttgtgtccctcttttaagctatttccttctcttaacacaattggttgtgccaattgccatagtcaccaaccaattaacaaaggtatatatatcatcatatcatcaccaaatgaaaaatattgggttgttttttcctgtggtggtggctacttttgtggtggcagccacagctggtagcttttaccaagactttgaaataacgtggggtggtgagcgtgccaaaatctatgagaatggaaaccttctcacactctcccttgacagagcctctggctctggctttcgttccaaaaaagagtacttgttcggaaaaattgacatgcagctcaagcttgtgcctggtaactctgct

SEQ ID NO: 234231 - DNA, 408 bp, Glycine max
gtttctccctttctctctgtctctctctcgctcttcttctcatccagcaccgagtcacagactcaccgatcttccgattccctttcgtcttggtttatgagctcgaaggagagacccactcttggtggcacgcggattaagacccgcaaacggaatattgctgcgccgctggaccctgcagcattctcggatgcagtggtccagatttatttggataatgctggtgatctggaacttattgctaagagcattgaatcttcagaccttaacttttcaagatacggcgataccttttttgaggttgttttcactgggggtcgtacacaacctggaactaccaagcctgatgagggggaccgccatccatactctataatagagtgtgagcctaagcgggaagttatttta

SEQ ID NO: 234232 - DNA, 350 bp, Glycine max
acaaaagtggcagtattaggtggcatcaccgaagtgcagggagctgccaacagcgtcgagatcaacaatctcgctcgctttgctgtagaggaacaaaacaaaagagagaattcagttctggagtttgtgagggtgattagtgcaaagcagcaagtggttgctggagtgaattactacataacattggaagcaaaagatggtgagattaaaaatgagtataaagcgaaggtttgggagagggaatcccaagagttgctagaattcaagccaacattaggtgcaggaggcatcatcgatgtgcctggagctgccaacagcatcgagatcgaccatctcgctcgctttgctgt

SEQ ID NO: 234233 - DNA, 376 bp, Glycine max
ggcgggatcagcacaagattgcaaaatgaagttcaacattgcaaatcccaccactgggtgccagaagaagctggaaatcgatgacgacctgaagcttcgagcattttgggacaagaggatctcccaggaggttcttggtgatgctctgggtgaggagtttaaaggatatgttttcaaaatcaccggtgggtgtgacaaacaaggattccctatgaagcagggagtgctgacccctggtcgtgttcgacttttgctccatagaggaactccttgtttccgtggatatggaaggcgcaatggagagcgtagaaggaagtctgttcgtggttgcattgtcagtccagatctctctgttttgaacctggtaattgtgaag

SEQ ID NO: 234234 - DNA, 388 bp, Glycine max
atccggtccaagccccctaaaaaccaatttccaagggttaaaacaatttccgatggcttctccaaatgttgattaccgttgctttgtcggtgggctcgcttgggccactgacgaccaagctctcgagagagccttctctcagtacggcgaaatcgttgaaacgaagattatcaacgatcgtgagactggaagatccaggggttttggatttgtgaccttcgcctcggagcagtccatgaaagacgccatcgaagggatgaacgggcaaaaccttgacggccgtaacatcactgttaacgaagctcagtcccgtggtggcggtggccgcggaggccgtggaggtggtggatatggttgtggtcgcggtggtggatatggtggtggtggt

SEQ ID NO: 234235 - DNA, 356 bp, Glycine max
ctctctgaaatgggtttcgctttggcatacacagcatctggttgttgctcaaacctacaatttcagtctctgttattcgctgctgcttcattgagatcaaaaccgtgtctctctctctgcaactctacttatcgacccaaacgcattctccagcgttctccaattgttggcgctcagtctgaaaatggagctctggttacttcggagaagcccgacactaattacggaagacaatacttccccctcgctgctgttgtaggccaagattctataaaaactgctcttttacttggtgcaattgaccccggggttggaggaattgccatatcaggaaagcgaggaactgccaaaactgt

SEQ ID NO: 234236 - DNA, 357 bp, Glycine max
taacaacagcacaaagcgggttactgtctgttcaagctaccatctctctctctctttcttagtgcctccttgccagaagttaaaatggcccaagaaactttcctattcacatctgaatcagtgaacgaggggcaccctgacaagctctgtgaccagatctccgatgctgtgctcgatgcatgcttggagcaggaccctgacagcaaggttgcctgtgaaacctgcaccaagaccaacatggtgatggttttcggagagatcacaaccaaggccaacgtggactatgagaagattgtgcgtgacacatgcaggaacattggttttgtctctgatgatgttggtcttgatgctgacaac

SEQ ID NO: 234237 - DNA, 403 bp, Glycine max
gagagaaagaaaatgccaaagtctcaatttcgaaccccatttcttgtttctttttctcttttgttattcatcttcaacctcaccccttcatacgcactctatggagcatccacacccgtgcttcaactcactccctctaacttcaagtccaaggttctgaattcaaatggagttgttcttgttgaattctttgctccatggtgtggacactgtcaggctctgactcctatatgggagaaggcagctactgtgttgaagggtgttgttactgtggcagcaattgatgctgatgctcacccgtctttggctcaggaatatggaattagaggatttccaactataaaagtgtttgcacctggaaagccgcctgttgattacaaaggagcaagagatgtcaaaccaa

SEQ ID NO: 234238 - DNA, 406 bp, Glycine max
cactaccactggccacctgatctacaagcttggaggcattgacaagcgtgttattgagagatttgagaaggaagctgctgagatgaacaagaggtctttcaagtatgcctgggtgcttgataagcttaaggctgagcgtgaaagaggaatcacaattgatattgccttgtggaagtttgaaaccaccaagtactattgcacagtcattgatgcccctggacacagggatttcatcaagaacatgatcactgggacatcccaagctgactgtgctgttcttatcattgattccactactggtggttttgaagctggaatttcaaaggatggacagactcgtgaacatgctctgctttcattcacccttggtgtgaaacagatgatttgttgctgtaacaagatggat

SEQ ID NO: 234239 - DNA, 370 bp, Glycine max
tctactctctgcagcctttaaatttgttgcaggcacacaaccatggctgctctctccaacggccacgacgcttccttcttcaagatgccctccatcaagttcaccaagctcttcatcaatggagaatttgttgattccctttcagggaaggagtttgaaacaatagatcccaggacaggagaagtgattacaagaatcgcagaaggagcaaaagaagacattgatgttgctgtcaaagcggcacgtgacgctttcgactatggtccatggccccgtatgcccggtgctgaaagagcaaaaatcatgatgaaatgggcagacttaattgatcagaacatcgaggaaatagcagcattggatgccattgatg

SEQ ID NO: 234240 - DNA, 363 bp, Glycine max
gctagagcttcatagtttcttcttcttttctcaccttccttctctcccttcagacaaagggacaaaaaatcagtgtgtgagagagagagagagaaattccaaaaccatgtcccacagtcatctaagtttcgcctttgggattctaggtaacattgcctccttcgtgtgctttctggcaccactaccaacattttatagagtttgtaagaagaaatcaaccgaagggttccaatcaattccatatgtggctgcactcttcagtgcaatgctttggatcttttatgcctatgtgaagaccggagaaacgcttcttatcaccatcaatgcattcggttgcgtgattgagacaatttaccttgccgt

SEQ ID NO: 234241 - DNA, 380 bp, Glycine max
  unsure (1)..(380): unsure at all n locations
ggagagtggaacattgtcagcttcataataaagatgacaatgaagctggttttggtagttgttgttgaagttgcatgcttagtttctgggatcttgtcctttggatctgagacactctctgagctttctttcttagaaaatgatgtcgtctcaacaacaagaccttcctcttcatctcaacttcaacctcaacctcaacctcaacctcttatggtggacctcactctcattcatgaagctgattctaaaggagctgtctgtttggatggaacggtgcctggataccatttggatcgtggatttggatctggtgcagatagttggcttattcatttggagggaggangatggtgtaataccatcagaaactgtgtctatag

SEQ ID NO: 234242 - DNA, 371 bp, Glycine max
cgctctgtttctgtctctgtgtttgcggctgaggattccgaacgagcgaccttcttcgtttctcgcaaagtttaagtcatcatgggtaaggaaaagactcacatcaacattgtcgtcattggacatgtcgactctgggaagtcaactaccactggtcatttgatctacaagcttggaggtattgacaagcgtgtgattgagaggttcgagaaggaggctgctgagatgaacaagaggtcattcaagtatgcctgggtgcttgacaagctcaaggctgagcgcgaaagatgaattaccattgatattgctttgtggaagtttgaaacgacaagtactacggcacagtcatcgatgcccccggacatcgtgac

SEQ ID NO: 234243 - DNA, 359 bp, Glycine max
agaatatattagtcgttttgggaatgaagtgtgtgttttgtgtgactcaggtggatcctagtaagagaccgttgccggattatgttcagaaagttcaaagggatgttaatgccaacatgcgtggtgttcttgtggattggttggtggaagttgcagaagaatataaacttgtttcggacacgctttatttttgtgttgcttaaatagataggtttttgtccttgaatgctttgtcgaggcagaagttgcaattgctcggggtcgcttcaatgctcattgcttcgaaatacgaagagattaagccgcctgatgtggaagatttttgttacattaccgataacacatactccaaaggaaaa

SEQ ID NO: 234244 - DNA, 385 bp, Glycine max
cgattgggttacaacagtttgggtgcttttgcaaccattaaccatcttcacttccaggcttattatttggctctgcccttcccaattgagaaggcccccactaagaaaattgcaagtttaaatggtggggtgaagatatctgaactgttgaagtatccagttagaggtctcgtctttgagggtggcgatacgctggaagatttatcaaatgttgtttcagatgcctgtatatgtcttcagaacaacaacatacctttcaatgttcttatctctgactgtggaaagcaagtctatctgttaccacagtgttatgcagagaaacaagctcttggagaagtggatgctgagcttcttgacacccaagtgaatcctgctgtgtgggaaa

SEQ ID NO: 234245 - DNA, 338 bp, Glycine max
tatcgattcaattctatcagcttcaaatggaaggaatggtggattgtcggaaaaccttcgattctgttgtacacttccgatgccggagacagttgggagaggatacctctcagtgctgaacttccaggggatatggtgtacataaaggcgaccggtgagaagagtgcggagatggtgaccgacgaaggtgcaatatatgttactgcaaacagaggttacaactggagggctgctgtccaggaaactgtgtcagctactcttaacagaacagtttctagtggtattagtggtgcaagctactacactggaactttcaatactgtcaatcgctctccaaa

SEQ ID NO: 234246 - DNA, 401 bp, Glycine max
cttgaccatgatgatactgaaaagcagatgctgagaaagttaagtaaacaacttagtggtgaggaccagatatagatcctattgcccagcacagtgtgttcaaattgttccaaaacatttccctgctacttcatcttcttcttcttcttcttcatcaccggtggttctgttcattcttccttgcaccttcttctttgaagatcgaaattgtgtttttgaaaaaatgggagttccagagaaagaccctctttcccaattgagtttgcctcctggttttcggttttaccccaccgacgaggagctcctcgttcagtatctatgccgcaaggtcgctggccaccatttcgctcttccaatcattgctgaaattgatttgtacaagttcgacccatgggtttctc

SEQ ID NO: 234247 - DNA, 354 bp, Glycine max
ctcaaaactgaactatgccgattcagtggtgccaagatctaccccggaaagggcatcagatttgttcgtggtgattctcaggttttcctgtttgccaactcaaaatgtaagcggtatttccacaaccgcctgaagccctcaaagctcacctggactgctatgtacagaaagcaacacaaaaaggacattgctcaagaagctgtgaagaataggagacgcgctgccaaaaagccttactctaggtccattgttggtgccactctggaagttatccagaaaaagagagctgagaagccagaagttcgagatgcagctagggaagctgctcttcgtgaaattaaggagaggatcaag

SEQ ID NO: 234248 - DNA, 382 bp, Glycine max
caggtttgggaatatggatgggtttcgttagcctgtgtcttctgtctgtatcagtatcaggtctgctccaacgcctagagcaccctgtcaaagctgatggctcacttagccttatggtcattggagactggggaaggaaaggaacatacaaccaatctcaagttgccactcagatgggaagggttgctgcaaagttaaatatcgactttgtgatatccactggagacaatttctacgatgatggattgactggtatagatgaccctgcatttgaaatttccttctcaaaaatctacactgccaagagcctccaaaagcaatggtatagtgtgttgggcaaccatgactacaggggtgatgttgaagctcaattgaatccaat

SEQ ID NO: 234249 - DNA, 368 bp, Glycine max
ctgctttcttttttcttcatttgcggttttgatttggatttggatttggatttggactttggtcgtcaacacagcttttggtccttcgcttcgtttacgaatcctcttcttgttgttcctgcaacgcactgcattcgatcaatccatccatcttcacttgcttggtttcgatcggagggaaatggccgatcagttatccaaaggagaggaattcgagaagaaagctgagaagaagctcagcggttggggcttgtttggctccaagtacgaagatgccgccgatctctttgataaagccgccaattgcttcaagctcgccaaatcatgggacaaagctggagcgacatacctgaagttggcaagttgtc

SEQ ID NO: 234250 - DNA, 378 bp, Glycine max
ccagaacgaacaaaaatggagaattcgacccaagaatcccacttccgatccgaaaactccgtgagctacgaatccccctacccaatctacggcatgtcgttctccccttcccacccccaccgcctggccctcggcagcttcattgaagaatacaccaaccgcgttgacatcctctccttccaccccgacaccctctccctcacccccaacccttctcgctcctttgaccacccttaccctcccaccaaactcatgttccacccccgcaaacccccctcctcctcctccgacctcctcgccacctccggcgactacctccgcctctgggaggtccgcgacaactccgtggaggccgtctcccttttcaacaacagcaag

SEQ ID NO: 234251 - DNA, 384 bp, Glycine max
atagtaacactaagagtagttactactatccctaaatataatagccatgcaattagtactattgtgtctactgatactgaagctcactccagcctttgcaaccaccccgaatgatgcctatggtggtgatagtagtggctgtccattagggactgacatataccaatacacttgccctgaagctgaggccatcatattctcttgggtggagcaggcagtgtctcaagactcaagaatggcagcctcacttcttaggctacatttccatgattgctttgttaatggttgtgatgcttcagtcttgctagatgacacacaggactttgttggtgagaaaactgcgggtccaaatttgaattccctgagaggattcgaagtaatcga

SEQ ID NO: 234252 - DNA, 385 bp, Glycine max
ttcgtcctccctctgcttctttctttcttagttgcagcgcgattgctgcatcgtcctccaataagagctcgctgctagtgaaccctaacacggcggcaacgagaggtgttcggttgaagctcagatcagcgatggcagcagcaacccgcacttctctgcggttcctcctctcagtctccgtaaccctaactctcgctcacctcgccgcctcaaattccgaaggcgacgctctctacacgctgaaacggagcctctcggaccctgacaacgttctccagagctgggatcccactctcgttagcccctgtacttggttccacgtcacctgcaaccagtatagacgagtcactcgagtggatcttggtaactctaacctatctggaca

SEQ ID NO: 234253 - DNA, 357 bp, Glycine max
aaagcattgaattcaaaaacttaagttcattccttgtgttttgctttcttcctcaaaaccaaacatgtcgaacacatgcggcaactgcgactgcgctgacaagactagctgcaccaagggaaacagctatggtgttattgtagagactgagaagagttacatcgagactgttgtcatggatgttccagcagctgagcatgatgggaagtgcaagtgtggcactaactgcacttgcacggactgcacctgtggccattaaggaatatgtatgaaaatgtaattgccatgtgtttggcaatacaaatatccaaataatgtaatcttcgtatgaataaatgtgtgtgctgttatcctact

SEQ ID NO: 234254 - DNA, 380 bp, Glycine max
cttcgggttttccctgtcaatacccgggaggagatagaaggtcccgtgtctgaggtggggtttgaggcgatttctcgaggttgtaggaaactgcagtcgattctgtttttctgccaaaggatgacgaatgctgccgtggtagccatgtcgaacaactgcccggatcttgtggtgtttcggttgtgtataattgggcggtataggccagacccagagacgctagaacccatggatgagggttttggtgccattgttatgaactgcaagaagctcactcggcttgctgtgtctggtttgctgactgatcgggcttttaactacattgggacgtatgggaggttgattacgacgctgtcagttgcctttgctggagacactga

SEQ ID NO: 234255 - DNA, 399 bp, Glycine max
  unsure (1)..(399): unsure at all n locations
tagtaagcactatagtaaaaaaaggacattcattcatctatggctacccttattgctcccagcaaccactctccccaagaagatgctgaagctctcagaaaggcttttgaaggatggggaactgatgagaacactgtcatagtaattttgggtcatagaactgtgtatcagaggcagcaaatcagaagagtttatgaggaaatttaccaggaggatcttgtgaagcgcctagagtctgagatcaaaggagactttgagaaagccgtgtaccgatggatactggaacctgcagatcgtgatgctgttttggccaatgttgccatcaagagtggcaaaaactacaatgtcattgtggaaattgccactatcctctcnccggaagagcttttggcggttaga

SEQ ID NO: 234256 - DNA, 369 bp, Glycine max
aaactgctgagtcatatcttggaaagtcagtttcaaaagctgtaattactgtaccagcttacttcaatgatgctcagagacaggcaacaaaagatgccggtagaattgctggtcttgatgttcaaagaatcatcaatgagcccactgctgctgcactttcatatgggatgaacaacaaggagggtctcattgcagtttttgatcttggaggtggaacatttgatgtgtccatcttagagatttctaatggtgtttttgaggtgaaagccacaaatggtgacacgttcttgggaggagaggattttgataatgctttattggattttctagtgaatgaattcaaaagaactgagaatattgatctttcaa

SEQ ID NO: 234257 - DNA, 366 bp, Glycine max
gaaatgttgtcaccccttcttctatttctatgcctaactcttcctttgtttttgttgtccttcttcaaataccgtaaaaccttcaagaatccaccacttccaccaggtcctagaggccttcccataatagggaatcttcatcaactagatagtccttctcttcatgagcagctatggcatctctcaaagaaatatggtcctttattttcccttcaatttggattaaggccagccatagttgtttcctctccaaaattggccaaagaggtaatgaaagacaatgaccttgagtgctgtggacgacctaaattactaggccaacagaaactaacctataatgggttagacatgggattttcctcatac

SEQ ID NO: 234258 - DNA, 443 bp, Glycine max
tgacaacgcactgcagcctacttaaccccgaaatccggtccaaaaacccccgaagggtcccccaaggaaaatggcaccccaaaaacaattttgggaagcaatgtctcataaaatgcatgtagacaacagtgtaaaacttattgggaagcttttatttggtattgaaaagggtccagaagtactcaacgctgttagaccggcaggatcggcacttgttgatgattggcactgccttaaaaccatggtatcatttttgttctgaagccatatgatagatagacttttcgtataaaaatgagcttaagatctatctctgaacagtgtaaaattttttacactgtcaattgataaaaagttatctcaaagatgacttaaaaataattattataaaaacttttacactgtgaattgataaaaaaaattatgtcaaagatgactttaac

SEQ ID NO: 234259 - DNA, 392 bp, Glycine max
  unsure (1)..(392): unsure at all n locations
aaaattcccacttcctttttctttttttctttaataagaaacctcgagaagaaagtaaaaggttcgtttttacccttctttcttcccagaagcgatctctaaagccgacccatttcggaattcggaaaacccagtgctgatcgctctctgggtgttcccaaaatgaagcttcggagatcttcgctgtgcgtctttctagggtttctggcgctgttcctttcgccgccgccgtcaatggcgaaattcgtggtggagaagaacagcttgacggtgacgtcgccggacaacatcaagggcacgcacgatagcgcgattgggaacttcgggataccccaatacggaggcagcatggctgggaacgtgttgtacccaaaggacaacanaaagggttg

SEQ ID NO: 234260 - DNA, 387 bp, Glycine max
ctctttcaaaagggagaagaataggaaaggaaacaaaacgcacaaaggattattatagcaatggcagaacaaaaccaaaaccagacaactgaagctggaaggcaccaagaggttggccacaagagccttctccagagtgatgctctttaccagtatattctggagaccagtgtctacccaagagaacctgaatccatgaaagaactgagagagttgacagcaaaacacccatggaacatcatgacaacctctgcagacgaagggcaattcttgaacatgctccttaagctcatcaatgccaagaacaccatggaaattggtgtctacactggatattcacttcttgccaccgctctcgctcttcctgaagatggaaagatcttggca

SEQ ID NO: 234261 - DNA, 399 bp, Glycine max
  unsure (1)..(399): unsure at all n locations
gttggcccgaagagtcctcaaaacacttgaaatggatgaggagtatgaaggaaatgttgaggctactggagaggattattcagtggaacctgccgagagcaggaggccattccgtgcactccttgatgttggtcttgttaggactacaacaggaaatcgcgtctttggtgcccttaagggagctctggatgggggtttggatattcctcacagcgacaagaggtttgctgggtttgataaggagaagaaggagcttgatgctgaggttcatcgcaaatatgtttttggtggacatgttgctgcctatatgaagatcttggcagaagatgaaccagagaaataccagtcacacttcagcgaatacatcanacgtgggatagaggctgatggtattgaggc

SEQ ID NO: 234262 - DNA, 372 bp, Glycine max
acgtgattctgggacctatgctgtctcttttcatatgcctcttcgtgaagctcgacgcgccacccacaagccagaaaatgcttggtgtgattgcgtgggtcttcgcttggtgggtcacgcaggccgtgccacttcccgtgacttccatgtgtcctctgtttttgttcccaattttcgggatagcttcagctgatagtgtggcgcactcttacatggatgacgtcatcaccctcgttttgggaagcttcattctcgccctcgccgtcgaacgctacaacgttcaccggagattggccttgaatgtaacactgctgttttgtggcgacccggttaatccagcgctgttactgctggggctgtgcgcgacgatat

SEQ ID NO: 234263 - DNA, 347 bp, Glycine max
acgcttcccatcttggtgagtaacacgaatctgaggaaaaaaatgtcgattatgcaactttacgggcgcagcaagagcgtggtgaagcggtcgaagaagtacttggaagaagcgctttacatgaagctcttcaaagatggaagctcccagctcatcgttcgccagagcctcaacaacttcgtcaagagccgaaagcgcgtttacaaatgggaggtaggcgacacgctcaagaagcttcgcgatcgcaagctctatcaacccgctcttaagctatcagaaaccatggctaagaggaacatgatcaagaccgtcagtgaccatgcgatacatcttgaccttcttgcaaa

SEQ ID NO: 234264 - DNA, 395 bp, Glycine max
cacagcaccaaactagttggctcaattctctttgaatggctttggaggctttgaattcaccaacagcagccaccactcccttccgtggttaccaagaagaggaggaggaggttgaccttcacctacgcgagccttgggccaagagaaaacgctccaaacgacctcgttttgagtcggaggaagagtacttggctctttgcctcatcatgcttgcacaaagcggtaacaacaacaacacccaattaccgtcttcgtcacagtcacacacagaagcgtcaccgccgctgaaactatcacacaggtgcaccgtttgcaacaaggcttttccttcttaccaagcactcggtggacacaatgccagccaccgcaatgcctcgtcggaatccaaacacacc

SEQ ID NO: 234265 - DNA, 350 bp, Glycine max
ttcaccttgttcaatcggtgacaaccatcatggcctcaagagcattgttattgttggcaatgtgtgtgcttccggcgatggttgtggccattcgcccagcaaagaaccctttttgcctgaaaggtcgtgtctactgtgacccttgccgtgctggttttgagacctcagctaccacctacattgctggtgctgagattatgttgcaatgcaagagcagggttagcaacgaggttgtgtacacgaagaatgggtacaccgactcaaccggagcatacacaatgtacgtggatgaggatcacgcagattagatctgcagtgccaagcttgtaagcaagcctcagcctcaatgc

SEQ ID NO: 234266 - DNA, 391 bp, Glycine max
  unsure (1)..(391): unsure at all n locations
ttctcctccttccttgttgagagaagaattgatttggtctatggaggtggtagcgtgggtttgatgggtctagtttctcaggcggttcatgatggtgggcgccatgttctgggcgttatcccaaaaagcctcatgccaagagagataactggtgatcctattggggaagtgagagcagtatctgatatgcatcaaaggaaagctgagatggctcgtcaagctgatgcattcattgcccttcctgngggatatggaacactcgaagaattgctggaaatcattacatgggctcagcttgggatccacagcaaaccggtgggcctattgaatgtggatggattttacaattccttgttgtctttcattgacaaggccgttgatgaaggcttta

SEQ ID NO: 234267 - DNA, 332 bp, Glycine max
agttaaccaacaagcttacttttatgccagagacctcgaagtccatcccaaggacacatttgtgttcagtatagatggcaccgtactctctaatattccatactacaaaaaacatggatatggggtggagaaatttaactcgaccttgtatgatgaatgggttaacaagggcaatgcaccggcactgcccgagactcttaagaattacaacaagctggtgtctcttggcttcaagattatattcttgtcaggaagaacactggacaaacaggccgtaacaagaagcaaacttaaggaagggctggctacacacatgggaaaaaattaattct

SEQ ID NO: 234268 - DNA, 376 bp, Glycine max
  unsure (1)..(376): unsure at all n locations
ggcgcggttgatcacagtggtgtggtgcgcggtggcggtgctattatgcgccgcggccggtgcgtcatgggtggaggaggcggcgaacccgatacgaatggtgtctggcgtggaggcggaggtggttcgggtgatcggggagtgccggcgtgcgttgaagtttgctaggttcgtgagcaggttcgggaagagttaccaaagcgaggaagagatgaaggagaggtacgagatattctcgcagaatctcaggttcatccgctcgcacaacaagaagcgtttgccctatactctctctgttaatcattttgctgattggacttgggaggagttcanaagacacagactaagagctgcccaaaattgctctgccactctt

SEQ ID NO: 234269 - DNA, 390 bp, Glycine max
cttccgttggctttgtcacagtccactgtgcccccaagaaagttccttaacctcaaaccccttatggcaagttgctaacttctcttacttttatctttgaagccaccctcttctaacttctccatttcacaaggaagaagatcagagaacatttagaacaaaaaagagagtttgagaaatggggaggggtaagattgagatcaagaggatagagaactcaagcaacaggcaagttacatactcaaagagaaagaatgggatcctaaagaaggccaaggaaatcactgttctatgtgatgctcaagtttcgcttatcatctttgctgcatctggaaagatgcatgactacatcagccctttctacacgttgattgacatattggagaggta

SEQ ID NO: 234270 - DNA, 334 bp, Glycine max
tgctttgccacatgaagttcggcttgttcatcttctttgcctttttcgtgttgatcatgacattcttcatctacttcttcttgcctgaaaccaagggcattcccattgaagaaatgaaccaggtttggaaggcacaccccttctggtccagattcgtggagaatgatgattatggcaatggtgttgagatggggaggggaactgctatcaaagaagtgtagttacttgtttatttttctcaatgactagcgttttagcttttgttggtaaatcatactattggtggtgtcaatgtattgaattgttcctataaattaaaaagggttattttctc

SEQ ID NO: 234271 - DNA, 357 bp, Glycine max
caaggagttctctggtctttgctccttggctccttcactatctgagagcattttgtgcactactgggttgaaaatgtatatgctggagagcaaaggaggtgccatagcatgcatgttcttgtctcttttcttcttggggacatggcctgctcttttgactatgttagagaggcgtggtcgtcttcctcagcatacctaccttgattactcaatcaccaatttcttggctgctttactcattgcttttacacttggtgggataggcaagggcacacatgatcagccaaatttcttagttcaacttgctcaggataactggccctccgttcttttcgcaatggggggtggtttgttcct

SEQ ID NO: 234272 - DNA, 299 bp, Glycine max
aattcggttcaaggtcggcaaaaagcagatttctattgataagatggttaaacttggacgtttgtgggacgtcccttcttccatttggatttcgcttggtcattaggtcaggtttcatcatagtaactggtgcccttgcctggagcacagagggtcatgtcatgagatgccaatttgaacacgcacttttagagcctgaggcatcataagccgtgtacgatttgttacctgactatgtgaaaggtgacttatcatccctatgcatatggcctgacgaaattagacactggtacaaatat

SEQ ID NO: 234273 - DNA, 391 bp, Glycine max
aaaaacatttccctgctacttcatcttcttcttcttcttcttcttcatcaccggtggttctgttcattcttccttgcaccttcttctttgaagatcgaaattgtgtttttgaaaaaatgggagttccagagaaagaccctctttcccaattgagtttgcctcctggttttcggttttaccccaccgacgaggagctcctcgttcagtatctatgcggcaaggtcgctggccaccatttctctcttccaatcattgctgaaattgatttgtacaagttcgacccatgggttcttccaagtaaggcgattttcggtgagaaagagtggtactttttcagccctaagaaaaggaaataccttaacgggtcccgacccaacagagtagccgggtc

SEQ ID NO: 234274 - DNA, 401 bp, Glycine max
  unsure (1)..(401): unsure at all n locations
cgcttctcttctcttcaaagtgaactttgcaactttgagcagaaaatctcacagtcgaaggaagaaataatcgccaatggcaattgagcacgaagacgatctcaaagacgagaagaacccacgacccctcgacgaggatgacatcgccctcctcaaaacctacggtttgggaccttattccacaagcataaaaaaggcggagaaggaaatcagagatatggccaagaaagtgaatgacttatgtggtatcaaggagtctgatactggattagcagcaccaagccagtgggatcttgtttctgataagcaaatgatgcaggaagagcagcctcttcaggtggcacgatgcacanagatcataaatccanactctgaagatgccaaatatgttagcaggggga

SEQ ID NO: 234275 - DNA, 249 bp, Glycine max
attatcgccaagattctctgctggtgttctcaactggaaggtcacctacactctacaaacaactgaggaaggaaaagcctctgataactcctgatatagccattatgtctgtggggactgagattacttatgggaaatcaatggtgcctgatgatggatgggttcggtgtttgaaccagaaatgggataaggacatagtcatcgaggaaacaagcaagtttcccgaacttaagcgtcaggctgaaacag

SEQ ID NO: 234276 - DNA, 378 bp, Glycine max
aaatgagtggtttttgagcagaagcagttaaaagagaaagggattcagcgaagatgacatcggttggtgtggcaccaacttcgggtttgagagaagccagtgggcatggagcagcaggtgttgatagattgccagaggagatgaacgatatgaaaattagggatgatagagaaatggaagccacagttgttgatggcaatggaacggagacaggacatatcattgtgactaccattgggggtagaaatggtcagctcaagcagactataagctacatggcagagcgtgttgtagggcatggatcatttggagttgtcttccaagctaagtgcttggaaacgggtgaaactgtggctatcaaaaaggttcttcaagaca

SEQ ID NO: 234277 - DNA, 380 bp, Glycine max
cttccaacgctcctcctccttctcatagccttcgccacctctgtctccggccgccgtgacctcgtcggagactttctccggctgccctccgaaactgataacgacgacaacttcaagggcacccggtgggccgtcctcctcgccggttccaatggttactggaattacagacatcaggctgatgtttgtcacgcctatcaaatattgaggaaaggtggtctgaaagaagaaaatattattgtttttatgtatgatgacattgcattcaatggggaaaacccaaggcctggagtcatcattaacaaaccagatggaggtgatgtttataaaggagttccaaatgattacaccggggaagatgttactgttgaaaacctttt

SEQ ID NO: 234278 - DNA, 375 bp, Glycine max
ctcaaatctctcatacttcttacgccacatacacccttctcttcatttctcactctccggaacatttttttttttaaaaaagaaaaggggaaaatagaaagaaaagaaaaagggagaaggagtgagaataacatgaacaaacaactcacgctgctctgtctctttatcctcttctcatttctcagtgtgggtttcgccggcgccggagacgcggcggagaaaaaccctttcaccccaaaagccttcgccattcgttattgggacaaagagatccgcagcgggttggcgaagccacagtttcttctgtctaaggcgtcgccgctaaacgcggcggaggcggcggcgtttgtgaagcttgcctccgggaacgcgctc

SEQ ID NO: 234279 - DNA, 403 bp, Glycine max
ttcacataccacgtagaaacagttcaatcattcttagccctaagcagacttcacatactcatccacttagtggcagtgttgtctctctgttactaccgcatcacccacttcttcctccaacctccaacagcgccatggcttctcatgactgctgcggagcttcttctctcgctgctctggttcttcaaccaagccttccggtggcgaccggtgtcgcggagcgtcatgactgagaagcttccgagtgaggagaagctgccggggcttgacatcttcgtgtgcacgctcgatcccgagaaggagcccaccgtggaggtcattgacaccatcatctccgccgtgtccatggattacccctccgacaagctttccgtctatctctccgacgacggcgggtgcgacg

SEQ ID NO: 234280 - DNA, 397 bp, Glycine max
cgaaaacccccaactccaacctctgttcatcgtcgaccgcgctttcttttcaaccagaactatgattaagctttttaaagtaaaggaaaagcagagagaacttgcagaaaatgcaagtggcggaccacctgttaagaagcaaagtgctggagagttgcgtcttcacaaagatataagtgagctgaatctaccaaaatcatgtaccatgcaattccccaatggcaaagatgatctgatgaactttgaagtttcaattcgacctgatgatggatattacttaggtggcacatttttgttttcctttcaagtgtctcccatctatccacacgaagcaccaaaggttaagtgtaagacaaaggtctatcatccaaatattgacttggaaggaaatgtttgt

SEQ ID NO: 234281 - DNA, 386 bp, Glycine max
cgacgccatctccggccacctcagagagtgaagaaggtcgttgacgatgagcaacgtgttcgagggatacgaacgccaatactgtgagctctcggcgaatctagcgaaaaagtgcactgctgctggtgttcttaatggagagcaaaagaaacagaaagtttctgaagtaaaggctggaattgatgaagcagaagctttgattagaaaaatggaccttgaggcaagaagtttacagccaaacatcaagggtgtgcttcttgctaagttgcgagagtataaatcggatctcaacaatcttaaaagtgaagttaagaaaattgtatctggtaacttaaacccttctgcacgggatgaattgttggaatcaggcatggcagatgctatga

SEQ ID NO: 234282 - DNA, 374 bp, Glycine max
ccgcaacagagagtagaaaagatggcgcggttgatcacagtggtgtggtgcgcggtggcggtgctactgtgcgccgcggcgggcgcgtcgtgggtggaggaggcggcgaacccgatacgaatggtggcgggggtggaggcggaggtggttcgggtgatagggcagtgccggcgcgcgctgaagtttgctaggttcatgagcaggttcgggaagagttaccgaagcgaggaagagatgagggagaggtacgagatattctcgcaaaacctcaggttcatccgctcccacaacaagaaccgcttgccctacactctctctgttaatcattttgctgattggacttgggaggagttcaaaagacacagactaagcgc

SEQ ID NO: 234283 - DNA, 394 bp, Glycine max
aaattttccaccttctactgcactccgagtaacagctcgcactatttatgttgcggtgacaatgttaattggcatatgtgttccgttctttggctctcttcttggatttcttggaggctttgcgtttgccccgacatcatattttttgccctgtatcatatggcttaagcttaaaaagcccaagaaatttggcttgtcttggacaattaactggatctgcattattcttggggtagtgttgatgatattatctccaattggtgctctaaggaatatcatactatcggccaagaactacaagttcttctcgtagactattgatgcaatcattgatttcccaactgtgttaaaagttagatgggtgaaactaaataacaagaaagcatttacatac

SEQ ID NO: 234284 - DNA, 380 bp, Glycine max
gatgaggctcagggaagaggggtggttgagcctcactgcccggtgccatttgttaaactcaatactgatattctcgagactgagtctttgaacttgctcgcagaagccacatttgtagatactctcttgactgcattgcctgttttgtccgaggaggagcagcacgccctatctgctactccggctcacccggctggtttacacgctttttatgctagttgcttaactgcaaatgtagtggagcagctttggaattttgcttggccttctgccattgccttgattcatccaagccttttgccagttgctgtaatgagtttcttcaccaaagtggctatagttgttggcggtcccttggttggcaaacttatgggacattt

SEQ ID NO: 234285 - DNA, 385 bp, Glycine max
gtcttgttggtgttatttgtaatggaaccctttacatagcaaaccttggggattcccgggctgttttgggaagagcagtcaaggcaactggcgaggttttagccatgcaattatcagcagagcacaatgcatcgatagagtctgtaagacaggagctgcatgcttcgcatcctgatgacccaaatattgtggttttaaagcataatgtatggcgtgtgaagggtcttattcaagtttctagatctattggtgatgtatatttgaaaaaggccgagttcaatagagaaccactatatgctaagtttcgacttcgtgaaccatacaagatgccaatactaagctcagaagcatcaatatcagtgcatcatttgcagccacatgatca

SEQ ID NO: 234286 - DNA, 344 bp, Glycine max
ctcgagccgattcggctcgagagtacattgattctgaccactttgctgtgcccgagggaaaaagagctattgaacttgttgcagggaaagagagtgcacttgcacaggtagtgattactacaatcggcaagacttatgacctcactttcgccgtgggtgatgccaacaatgaatgcgaagcttccatgatggtagaagcatttgctggcgcaaacactgtccaagttccatatcaatctaagggtaaaggaggttttgtcagaggcaagcttcggttcaaggccgtctcaacacgtactcgtcttaggttcctaagcacattttacaccatgaagagtgataac

SEQ ID NO: 234287 - DNA, 378 bp, Glycine max
ctcaagactataataatgggttcttcttctcctccggacactagcaagagcataaagctagagcgatacaacagctacatcatgagactcaacagcaccaaactcctcaacgcctcctccaaactcgtcttccgtgccactatcttagtcggactcatcctcgtcatcctcttcaccttcacctaccgtcgcctcgcaccagacttcagctcgcagcgccacctccactcgcactcgcacttcctctcctcctcctcctccttcgcctcctgggagaagcacgtccgccactcctccacccctcgccgccccaatggcctcaccgtcctcgtcaccggcgccgctggcttcgtcggcagccactgctcccttgccctc

SEQ ID NO: 234288 - DNA, 397 bp, Glycine max
gttctaaatacgttgccaattgtagtgctggcgattcatccactgaaccctatatcgttggacactacttattacttgctcatgaatctgctgccacattatacaagacaaaatatcaggctcgtcaaaaaggacaaattgggatcactaatccaacacactactttttgccaaaatctcaaagtgctgcagattacaaggcagcaagtagagctctggacttcttctttggttggtattctgatccggttttctatggtgactatccggagagtatgaaatcttcagtaggttctaggctcccaaaattcacaaaagctgaatctgaaggtctaaaaaattcgatagattttcttggtgtgaattactacaccacttattatgcggaacatgctga

SEQ ID NO: 234289 - DNA, 375 bp, Glycine max
  unsure (1)..(375): unsure at all n locations
agcgcagtggcagtgaagcggaggtggcggagaagggaggcagagaggttttggcaatttctctgttctactggtaagcgaaaatgaattattcagtgcgacgagtgttgccaatgtcaagggttgttcttcggtcctacgccactgtcactgcgaaacccaacgatattccatttcagcccaaacttgctaactccgttaacctcatcggtcatgtccagtccccgattcagttccatgtctctcccaacgatggctacgtctgggcctccaccgttatcacgcgtcaagactcctctgacctctctttctcgattccggttatatttgagggtgatctcgctcatactgccaaatttcatcncaatccaaatg

SEQ ID NO: 234290 - DNA, 470 bp, Glycine max
  unsure (1)..(470): unsure at all n locations
gttatgattcangtgtcctatagaagagatatgacgtcggacgcacgcgtacgtaagctcggaattcggctcgagtaaggataaggctgccgcacatttgaagggtggtgcaaagaaggttattatttctgcccccagtaaggatgcccccatgtttgttgttggtgttaacgagcacgagtacaagccagagcttgacattatttccaatgctagctgcacaaccaactgccttgccccgctcgccaaggttatcaatgacaggtttggcattgttgagggtttgatgaccactgttcattccatcactgctacccagaagactgttgatgggccatcagccaaagactggagaggtggaagagctgcttcatttaacatcattcctagcagcactggagctgccaaggctgttggaaaagtcctccctgctttgaatggaaaattgactggtaatgcaatccgtgttc

SEQ ID NO: 234291 - DNA, 348 bp, Glycine max
attaattgcaagaatggcacttcgttgcttggtgatgtccctttctgttctcttcactcttggtcttgcgagagaaagccatgccagagacgaagatttttggcatgctgtttggccaaacactcccattccaagttcattgcgagatcttctaaagcctggccctgcaagtgttgaaatcgatgatcaccctatgcaaattgaagaaacacagtacccgaaaaccttcttctataaagaagaccttcatccaggcaaaacaatgaaagtacaattcagcaagcctccctttcaacaaccatggggtgttggtacatggttaaaggaaattaaagacactactaaaga

SEQ ID NO: 234292 - DNA, 353 bp, Glycine max
gagaataatgagaaaccaattgatcaaaagagcaaggttaagtttaatattatgagcttaaaagtgcaaggtgaaatggactaagtaccggaactgtttgatgagcaaagagatcaagtggcaatagagcaaattctgcgggttatttttctggaccctgaaaagcctaatcctgtcctggataagcttaaacgaatgttggctgaggccgacgctgcacttgaagcgcgaaagaaaccactggaggagaaacgtccttgtgttgctggggatggccttgttatagatgaatgggagagacagaagagaaagatacttggctcaacagcatgtccaaggtgttgattcagtgt

SEQ ID NO: 234293 - DNA, 318 bp, Glycine max
aagaaagtagcaaagatgacaggtgggatgtttggaaggaaggggcaaaagataaaggggacagtggtgttgatgccaaagaatgtgttggacttcaacgccataacctccgtcggaaaaggcagtgctaaggacaccgccaccgatttcttgggcaaaggcttggacgcattaggtcatgcagttgatgctctcactgccttcgctggccatagcatctccttgcagcttatcagtgctactcagactgatggtagtggaaaaagaaaaattggaaacgaagcctatttggaaaaacatcttccgaccttgccaacg

SEQ ID NO: 234294 - DNA, 391 bp, Glycine max
gtagaagtagaagcttcacttcactctgttcagttcttattgttgcatagataatttgtctctatttttgttattttctttctctctcctctttgtgcattttaatagcaactcttagtttccaatgtccaagatgttgggagtgtttgtgggacttttgctgttggtggggttggctgcctctgccaagtttgatgaactcttccagcccagttgggctatggaccatttcatccatgaaggagaacttctcaaactcaaacttgataactattctggtgctggatttggatctaagagcaaatatatgtttgggaaagtgaccatccagctcaagcttgtggagggtgactctgctggaactgtcactgctttctatatgtcatcagac

SEQ ID NO: 234295 - DNA, 351 bp, Glycine max
caaaaatcagattcaaattcaatggattgattattgtttcatgatctgatcactttgtcatatccataaagaagggagaaaaagaaagtttggaatttgcagaagctttgcaagtattttaagttgcaatagctgtgagaaatgaaccactgtgcaagatgttcaatataatacatacgtgtgttctatcagagagctgcttttgatcctgttctactacggtagatgccaaatgagtggaagttgttcttgtttgagtttgctttagtaagaaatccctttttcagtttgcagaatctcttgtatttattgtgtgagaaataaaaattctattaatgcttgtttcttctt

SEQ ID NO: 234296 - DNA, 364 bp, Glycine max
atacatagctatctagctagcaagtgggacaagagatatatatacgtggtaccctagagtgccattctgtagtttatttctgctcaccaaggcttatcacatcacaatttgtgcattgcctcgtgtcctttttcttctttgcttgccaaaaatcttacacacacaggtatctagcaaatgggttctcaccagcaagaaccatggctattggagaatgggaaaccgagggtgttgaccaaggagaataggcatggccgttctgcacacagcatgtcctccacgtctttgcgcaagaagtctagccgaactcttgtctccaagcttccatgtgccacactcagaagcatccttttaaatttgcaag

SEQ ID NO: 234297 - DNA, 317 bp, Glycine max
cttttcccctcagttcttggcgggacttgtgccatacctggagcttttggttgtggtaaaactgtcattagtcaggctctttctaagtattccaattctgatgccgttgtttatgtcggctgtggggaacgtggaaatgaaatggcagaggttctaatggactttccccaacttacaatgacattacctgatggtcgtgaagaatctgtcatgaagcgtacaacactagtggctaacacttcaaacatgccagtggctgctcgtgaagcttcaatttatacaggaatcacattagctgagtatttcagagatatggg

SEQ ID NO: 234298 - DNA, 400 bp, Glycine max
gattatgtcttgatttgaaaacagacgaacacagtccgaggaacaaccacgcgtatgggagggagtttcagtccatgctggaaggactcgacgaagaacggtgcgtggaagaaccagggcaccactctgagaagaaacgacgactaagcgtggatcacgtgaaggctttggagaagaacttcgaagtagagaacaaactcgaacctgaccgaaagttgaagctggcacaagaacttggcttgcaaccaagacaagttgcggtttggttccaaaaccgtcgtgccagatggaagacaaagcaattggaaagagattacggcgtcctcaaagccaattatgaatcacttaaacttaactacgacaccctccaacaagaccacgaagccttactcaaagagat

SEQ ID NO: 234299 - DNA, 374 bp, Glycine max
tcaacatgctgagagtgggcgcaaagagggttttggaaacgacgttgtttggggttagggttccggcgaggctgtaccacgagagggttgtggatcactacgacaacccccggaacgttggatcgtttgacaagaacgacccgagcgtggggacgggtttggtgggggccccggcgtgcggcgatgtgatgaagctccagattaaggtcgacgacaaaaccggaaaaatcgtcgatgctcgattcaaaactttcggctgtggctccgccattgcttcttcctccgtcgctactgagtgggtgaagggaaggcaaatggaggaagttctgactataaaaaatactgaaattgcaaagcatctttcacttccacca

SEQ ID NO: 234300 - DNA, 378 bp, Glycine max
attataaccaaacactcttcttcatattcttcttcttcttcttgttcttgttctatctgtgacgagcatcatggcctcgagagcagtgctattgttggctatgtgtgtgcttccggccatggttgtggccattcgcccagcaaagaaccctttttgcgtgaagggtcgcgtctactgtgacccttgccgtgctggttttgagacctcagcaaccacctacattgccggtgctgagattatgttgcaatgcaagagcagggttagcaacgaggttgtgtacaccaagaaggggtacactgactcaactggagcatacacaatgtacgtggacgaggatcacgcagatcaaatatgcagtgccaagcttgtaagcagccc

SEQ ID NO: 234301 - DNA, 380 bp, Glycine max
cttcctccgatggctaatctctcactcttgttcttcggtctcctcctattctccgctgccgtagccaccgtcgaacgaatcgacgatgaagacaaccttctgatccgtcaagtggtgccggacgcggaggaccaccacctgctcaacgcggagcaccacttctccgccttcaagacaaagttcgccaagacctacgccacgcaggaggagcacgaccaccgcttccgtatcttcaagaacaacttgctccgcgccaagtcgcaccagaaattggacccctccgccgtccacggcgtcaccaggttctccgatctcactccgtctgagtttcgcggccagttcctcggcctgaagccgctccgccttccctccgacgctca

SEQ ID NO: 234302 - DNA, 388 bp, Glycine max
gcgttgagaacttgcgctcggattaaaataaccgacccgaaagcgaattgggtgatggaaaccatgccgggtgcgagagttatgagtgacatggttttactccccaacggcgacgttttgattgttaatggagcagctgtggggactgcgggctgggaattgggccgtaacccggtgttaaacccgtttctttataaacccaacaagcgggtcgggatgagatttgaggtccagaacccgtctcatattccgaggatgtaccactccggtgccgttttgcttcgcgatgggcgagttcttctcgctgggagcaaccctcacacgtattacaatttcaccaaagtgttgtttccaacggaactgcggttagaagcgttttctccttggt

SEQ ID NO: 234303 - DNA, 376 bp, Glycine max
  unsure (1)..(376): unsure at all n locations
aaaggagaaatggtgagctgtgaagaccaatatggagaaaagcttccacttgtccaaccagacccggtggtgttggagattaatcgtttgcaaaaccaactaaaagaaaaagaaaaggaactagcgacttgtcagggtgaaatcaaagctttaaggtcaactgaagctctaaaggataaggccatagaagagttgagaaatggagtcagtaaactggacgaaagacttagaattacagaggatcatcttaaacaaaagaatctagaaatcaaganactgacagatgaaaagaaaaatgcattggcttcgcaatatgctgcagaagcaacacttagaagggtacatgcaaatcaaaaggatgaagattttgttcaat

SEQ ID NO: 234304 - DNA, 391 bp, Glycine max
gcatgatgcataatataagcagtgagtccattgcttttccccacagaagaggaaacctgtttacaattcagtacctgatctattggaaagaagctgacaatgacaaaagcagcgattatgttgattggataagagggttctatgctgctatgactccctttgtttcatggggtccaagggctgcatatattaattacatggactttgaccttggagtgatggaggggattggtaatggtgctaatatgaaagatgctgtggaacatgcaagggtttggggtgaaaagtacttcttgagtaactatgacagattggtgagggccaaaactctgattgatcctaacaatgttttcaccaatgatcagggcattcctcccatatctttgaccag

SEQ ID NO: 234305 - DNA, 372 bp, Glycine max
cagatagtgtgggagagagaagagcggaagagaaaatgacgaccaggttcaagaagaacaggaagaagagaggtcacgtcagcgccggacacggccgtatcggaaagcaccgcaagcatcccggaggtcgcggtaacgccggtggcatgcatcaccaccgtatcctcttcgacaagtaccatcctggtttcttcgggaaggtaggcatgcgctacttccacaaacttcgcaacaaattctacaatccgatcatcaacatcgacaagctgtggtccctcctcccccaggaggccaaagacaaggccaccgccgacaaggcacccttgctcgatgtcacccagttccgttactttaagggtttgggtaaagggg

SEQ ID NO: 234306 - DNA, 366 bp, Glycine max
gtgaggtctgattcgggtccattgtccctgcaaaagcacaaccattggtgtgtgaagttaggagtctcaatcttcttggtgggtcttgtcgttcgccttctcttgtgggattcattcagtttctcatcagtggtggtggagacacctcctcctctggaagaggcaaaagcagagtccccggttttcgcttcctctgttcttcaggattctgatgacttcccagaaaatgatcagaaccagacacaaatctccaagaatgaaaaatgtgatctttttgtgggaaattgggtgcaagacctatctgggccagtgtacactaatgagagctgccgtgtgattgagcctcatcaaaattgtatgaaaaat

SEQ ID NO: 234307 - DNA, 361 bp, Glycine max
  unsure (1)..(361): unsure at all n locations
ggtataccatttgaaaatggcttcttgtgtgtcatccatgtcttctaccatcctcatcctaattgccatctgcacactgtcctcacttctgtcagctgcatctgcagcaacagaggagggacgaacaaggcccttcaaaagggtctatgcctttggagactctttcacagacactggcaacaccaaaaatgccgaaggtccaagtggctttggtcatgtttcaaactctccctacggcaccactttcttcaaccactccacaaacaggtactcagatggtaggcttgtgattgattttgtagctgaagcactttcactgccttacttgcccccctaccgtcacagcanaggcaatgacact

SEQ ID NO: 234308 - DNA, 376 bp, Glycine max
gtggccatgaaggtggtgggaaaagaaaaggtgataaaggtcggaatgatggagcaggtgaagagggagatctcggtgatgaagatggtgaagcaccaaaacatcgtcgaactccacgaagtcatggccagcaagtccaagatctatattgccatggaactcgtccgcggcggagagctcttcaacaaggtctctaaaggccgcttaaaggaggacgtggcaagactctaattccagcagttaatctccgccgtcgacttctgccacagccgcggcgtctaccaccgcgacctcaagccggaaaacctcctcctggacgaacacggcaacctcaaagtctccgacttcggactcaccgctttctccgaacacctca

SEQ ID NO: 234309 - DNA, 382 bp, Glycine max
ctctcttcaggtcaccatctagactgcaatcatggctgatggaccacagcatccatcagttgttcagaagctagctggacagtcttacctggtgtccaggcttagccccaactttaactctaggaattattctgcaactggttcttacgtcaatggcggaatgcactcgcctgggttggctgttgtgtcacctgtatcgccagttactgtgcatgctccagcagagaaaggagtgagtggatttctagtggattttctgatgggtggagtatccgctgctgtatcgaagacagctgctgctccaattgaacgagtcaaattgcttatccaaaatcaggatgaaatgataaaaagtggtcggctatctgagccatacaaggga

SEQ ID NO: 234310 - DNA, 376 bp, Glycine max
gagggaaaaaccgattaccgtgccaggattcggttgattaatcaggacaagaacaaatataacactccgaaataccgatttgtggttcgctttagcaacaaggacattgttgcacaaataatatctgctagcattgccggcgatttagttcttgctacagcatattcacatgagctgccacgatatggtcttgaagtaggacttacaaattatgcagcagcttattgcactggtctcctgttggcccgaagagtcctcaaaacacttgaaatggatgaggagtatgaaggaaatgttgaggctactggagaggattattcagtggaacctgccgagagcaggaggccattccgtgcactccttgatgttggtcctg

SEQ ID NO: 234311 - DNA, 366 bp, Glycine max
ttccattctctctgtgtatttccctacctctcccttcaagatgcagatcttcgtcaagaccctcaccggcaagaccatcacccttgaggtggaaagctctgacaccatcgacaacgtcaaggccaagatccaggacaaggaaggaatccccccggaccagcaacgtctcattttcgccggaaagcaacttgaggacggccgtacccttgctgactacaacattcagaaggagagtactcttcacctcgtcctccgtctccgtggtggcatgcagatcttcgttaagacactcaccggcaagaccataaccctagaggttgaaagctccgacaccatcgataacgtcaaggccaagatccaggacaa

SEQ ID NO: 234312 - DNA, 389 bp, Glycine max
gaaaagattaacaataaaagtgtggagtactgttgatagcaaagatgtttgggatcttcgacaaggggcaaaagataaaggggacagtggtgttgatgccaaagaatgtgttggacttcaacgccataacctccatcggtaaaggtggtgttattgacacagccaccggcatcttaggccaaggcgtcagcttagttggtggagtaattgatactgccacttccttcttaggccgtaatatctccatgcaattgatcagtgctactcagactgatggcagtggaaatgggaaagttggaaaagaagtctatttggaaaaacatcttccgaccttgccaacgttgggagcaaggcaagatgcgttcagtattttctttgaatgggatgct

SEQ ID NO: 234313 - DNA, 393 bp, Glycine max
ggaagaaccaccactaccttatccatttccactcctcaccaagccacaccatggcctcaaccaacgccctctcttcagcttccattctacgctctcccaaccgccagtctctgaccagaagagcgaaccacaacggaagagtaaattaccgtcaaccgaatagccgtttctccgtcaaagcctccgccaaagagattgcctttgaccagcattcccgctctgctatgcaggccggcattgacaagctcgccgacgccgtcgggctcactcttgggcccagggggaggaatgttgtgttggatgagtttggaagtcctaaagtggttaacgatggtgtcaccattgctcgcgccatcgagcttccagatcctatggaaaatgccggtgcagctc

SEQ ID NO: 234314 - DNA, 383 bp, Glycine max
tcaagattcaggtactgcgtttcggaagcagacacagatggctcgtacgaagcaaaccgctcgtaagtccacaggaggaaaggctcctaagaagcagcttgcaaccaaggctgcacgtaagtctgcaccaactactggtggtgtgaagaagccccaccgttatcctcctggtaccgttgctcttcgtgagattaggaaataccagaagagtaccgagcttttgatccggaagctccccttccagaggctggttcgtgaaattgctcaggacttcaagactgatctgcgtttccagagccacgccgtgcttgcattgcaagaagctgctgaggcataccttgttgggctctttgaggacactaacctgtgtgccattcacgcca

SEQ ID NO: 234315 - DNA, 367 bp, Glycine max
  unsure (1)..(367): unsure at all n locations
cttctgcgaagataactagaatgaggaaccaggatgatgttgtgaacagtattagggcgatgctggagaaggcagaggcacccgtaactgatgagtgttgcatctacagagtcccctttgatatccgcaagctcaacgaagatgcctacacccccaaggtcgtttccataggcccttttcaccacaaaggcaatcctcgccttcaaaacatggagaaacacaaactcatctattgcaacgcatttcttaaacgttccaacacaggcttggagacctggatccgctacatacaggacgtagagccccgattccgtagctgttactcagacgcccttgagttcaccaatgangagctgctgaaaatcat

SEQ ID NO: 234316 - DNA, 394 bp, Glycine max
catcgttctccctctccctccctctctctctctctctctctctctctctctctctaagctctttcttgttgaaactgtgagtctatgttatttgtggcggagcatgaactccaccaccaacacttcgaattctcagtcaatggctgcagcagcaccgagtgatggttctgggaagaaggtaagaaagccttacaccataaccaagtccagagagagttggactgaggaagaacatgataagtttctcgaagctctccaactatttgacagggactggaagaaaattgaagattttgtaggttcaaaaacagttattcagattcgaagccatgcccagaaatacttcttgaaagttcaaaagaatgggactgtggcacatgtgcctcctccccgt

SEQ ID NO: 234317 - DNA, 392 bp, Glycine max
ttcttctcttcgatccactacgtgcctgatcctctgcttcaggcacatactcccgcaggttaaatggcgaggatcaaacctcaggctctgctacagcaaagcaaaaggaagaagggtccttctcggataagtgccgtgactgttatattttactttttgattcttgccttggttgggtttttcctgtttgcttcgtacagacattggtccagcagatcaagattacaatccgaagatcacttgtcagtctccgagggtgaaaatacttttgtggactccaagaaatctgagctgcctggatatgctgttttaaatacctctaaaggttctataataatagaactgtacaaggaaagtgctcctgaagttgttgatgaattcattgacttatg

SEQ ID NO: 234318 - DNA, 389 bp, Glycine max
  unsure (1)..(389): unsure at all n locations
ggaagaatcactcccttatccatttccacaccacaccatggcctcaaccaacgctctctcttcagcctccattctacgctctcccaaccgccagtctctgacccgaagagcgaaccataatggaagagtaaattaccggaaaccgaataaccgtttctccgtgaaagcctccgccaaagagattgcctttgaccagcattcccgctctgctatgcaggccggcattgacaagctcgccgacgctgttgggctcactcttgggcccagagggaggaatgttgtgttggatgagtttggaagtcctaaagtggtcaacgatggtgtcaccattgctcgcgcaatcgagcttcncgatcctatggagaatgctggtgcagctcttatcagag

SEQ ID NO: 234319 - DNA, 492 bp, Glycine max
ggctcttcagaatgaattaggtgtgcactatgcaagataatgacatcgcatgcacgcgtacgtaagctcggaattcggctcgagcccggaaagagttatcttttctgtttaacagcctgcccaccctggaaacggctcagccggaggtagggtccagcggctggaagagcaccgcacgtcgcgtggtgtccggtgcgcccccggcggcccttgaaaatccggaggaccgagtgcctcccacgcccggtcgtactcataaccgcatcaggtctccaaggtgaacagcctctggtcgatggaacaatgtaggcaagggaagtcggcaaaatggatccgtaacctcgggaaaaggattggctctgagggctgggcacgggggtcccagtcccgaacccgtcggctgtcggtggactgctcgagctgcttccgcggcgagagcggggggtcgcgtgccggtccggggaccgattgggaaacgggcccttcggggcg

SEQ ID NO: 234320 - DNA, 393 bp, Glycine max
gttgacctgtaattttcttggtctactgaacagtttctcaagtttgctcttctgggttctcttattagcttctctctttgcactgctaatacttgtgagttgtgatatcttgattagaggaatgttttccattaagtggagttattcacattaaactcttgggctgttagtgcattgtagcaaatgtccttccgcagtattgttcgtgatgtaagggatgggtttggaagcttatcaaggaggagttttgatgtaaggatttctggtgggggcaagttgaatagtttggtccatgaggcgcatgaacgccagctagttatacagaacagcaggtgggctagccttccgcctgagcttctttgtgatgttattaaaagattggaagaaagtgag

SEQ ID NO: 234321 - DNA, 385 bp, Glycine max
tgatttcattagtaatcttcccaaggaaattattgtcacttatcctcaaatcaattttctggccacattccaacagagattgggaagttgaccaatttagaaaaactcgttctgtcatccaatggattcacaggagcattgccacccgtgctttccaagttaaccaagttgattgatttgaggataagtgacaataatttccttgggaagattcctgatttcattagtaattggacattgattgaaaagctgcatatgcacggttgctctcttgagggtcccataccttctagcatttctgccttgacaagattaagtgatttgaggataactgacctaaaaggtagtaaaagctcagctttcccaccactaaataacttgaaat

SEQ ID NO: 234322 - DNA, 399 bp, Glycine max
gccgttcctaagtgctgatgatccatctagagaattcaatgactttcgtacaaagctagctggattgactagtgtgactagaaactactttgagaatttagtaagggcattagagaatggtctatctgatgtgggaagtaatggagctgccttcagcaaagcaacgagctcaaaaaatgctgctggtagcagtaagggtagagctggaagaggaaagggaacttttcgaactagcttgtccagcaaattgaatgatgatagtcattggtattgtgagcattgtacctatgcaaatgtcaaatctgcctccacatgccagatgtgctatcaacaacgtcgatgaaaacttggttctccatttgaagcacttgtctcctgcccaaggcctctgcaccaaaa

SEQ ID NO: 234323 - DNA, 378 bp, Glycine max
ggcgtgccaaggtcttgttaattttgagcgttaagtgctgcaactaatcagatcccaagaccttggcctaccttgccatacagaaaaaaaaaaagcaaaaaaaaagccaaggtttggagccaacaaaaataaacacaaagcacaagtcatggaaagaataatggttggaagtgcaacaaaggttgctttcaccctcttggccactttcgccattgtcattccatgccttgaggctggcattgctgagtttgacgattttctcaaagcccaagctgatgaagcccataaaattgctcttgattcctatgtcccagagccccacgatgtcgcccatgaactcaatttccatgttcatatggcactggaaaactccacaag

SEQ ID NO: 234324 - DNA, 394 bp, Glycine max
ctccggtgaaacagaaacagagagagagagtgagaaaaaacgaaacgatggagggaggagtctcctacgcgcgcatgcctcgtgtcaaaatccgcgagctgaaggacgactacgccaagttcgagctccgcgacaccgacgcgagtatagccaacgcgctgcggcgcgtgatgatcgcggaggtgccgacggtcgccatcgacctcgtggagatcgaggtcaactcgtcggtgctcaacgacgagttcatcgcgcacaggctcggcctcattcccctcacgagcgagcgcgccatgtccatgcgcttctcacgtgactgcgatgcctgcgacggtgacggacagtgcgagttttgctccgtcgagtttcatcttagggtaaagtgcatgaccga

SEQ ID NO: 234325 - DNA, 388 bp, Glycine max
  unsure (1)..(388): unsure at all n locations
tcccaatcgattaaattaactatgaagcctaccctactattatcnctttccttcctgcctctctttgctttcctggctctttcagaagatgttgaacaagttgtggacataagtggcaaccccattttcccaggtggcacatattacattatgccatcaacttggggcgctgccggtggtggattgaaactaggccggacaggaaactcaaactgcccagttactgttttgcaagattactcagaaatcttccgtggcacaccagtcaaattcagcatacctgggataagccctggaatcatctttacaggtactccacttgaaatcgagttcgcagagaaaccttattgtgctgaatcctccanatgggtggcgtttgtggacaatg

SEQ ID NO: 234326 - DNA, 391 bp, Glycine max
ctcggacccggcaccggcatgggtcaagcttttcgaaagctctttgacaccttcttcggcaacaccgagatgagggttgtgatgcttggtcttgatgctgctggcaaaacaactatactttacaagtttcacattggagaagttttatccaccgttcctacaattggtttcaatgtggagaaagttcagtataagaatgttattttcacagtctgggatgttggaggacaagagaaactaaggccactttggaggcactactttgacaacacagatggcctgatttatgttgttgatagcctggaccgtgagagaattggtaaagcaaagcaggaatttcagacaatcataaatgacccatttatgctcaatagtgtcatcttggtgtttg

SEQ ID NO: 234327 - DNA, 470 bp, Glycine max
  unsure (1)..(470): unsure at all n locations
cgaatgaatcangtggcatatagaagatatatgacctcgcatgcacgagtacgtaagctcggaattcggctcaagctcaacccgctaaaagctgttaaaaaagtggcaaagacagagaaagatgctcaaataagacttcaactctatgacccatcggaatttcatgtggtgaacccattgaagaagacaaggatatggaaccctgttgggtacaaattggttccaggtgccacagcagctagcctgctggatccagaagatcctccacagaaaagagcagcttttacaaacaatcaaatatgggttactccttacaacagaagtgagcaatgggctggtggtttatttgcttaccagagcanaggggatgatactcttcaagtctggtccaacaaggatcgtccaattgagaataaagacattgttttgtggtacacaataaggttccatcatataccctgtcaagagga

SEQ ID NO: 234328 - DNA, 373 bp, Glycine max
ttcttgtcctagacaaaaagcaatgttggtatcaagggaacaagcactggctaaatctgtgccagcagccacaatccaattgttgtctgaatcacgtaacaatatttggaggatagactttgtattcaattccaacttttatgttgtaggtgtcaaagaagctcccagtgccccatgtgttggcagcctatcagtctcaaagatccaacaagccaagaattacttgaggcagtggaaagagagcgaaactttaggttcaatccatctagaaatgccacaatatttcatcatccaacactgggggattttgagttacaacatttgccagttggagctagtgacgctgatcttgaagagcgtataatccaacact

SEQ ID NO: 234329 - DNA, 391 bp, Glycine max
aaaaaaaattcataaatttcataattagggatgatgcataattgaaagaaattaaattatttttaaattttataattagggttatgcataattgaaagaaattaaatcatttttggagaattataaatttcataacacacgctctgatatcacatgtaaaacttgaagggttttctagattatcaattatagaaaaccaatagaatcttgaaacttattattctcacaaacaatagataaacaaataatatagataaacaaataatgcgtacctctccggtgtaatttgatttccttggaagaggagagaaataagatttcacttccttagacttttttttgtctgcctctctctgttcgtgatgattataagtgagagagaacacttttc

SEQ ID NO: 234330 - DNA, 349 bp, Glycine max
ccccctcttgcaaaacctaattttcatttcttccctcaaatttcaaaatgcgtgagatccttcacatccagagtggccaatgcggcaaccagatcggcgccaagttctgggaagtggtttgcgcggagcacgggatcgaccctaccggaaggtacggtggggactcggagttgcagctcgagaggatcaatgtctactacaacgaggccagttgcggtcggttcgtgccgcgcgcggttctcatggacctcgaaccgggcaccatggacagcgtccggtccgggccgtacgggcagatcttcaggcccgacaactttgtgtttgggcagtccggggcaaggaacaactg

SEQ ID NO: 234331 - DNA, 378 bp, Glycine max
atcgagacacagatcatagtgatcattttttaatttctcagatttatccgacgtcgctgcagatccaccaaccgttatggctgccttcagcggtgatgaaacggcaccgtttttcggcttccttggcgccgcagctgccctcgtcttctcctgtatgggagctgcctatggcacagcgaagagtggcgtgggcgtggcttccatgggtgtaatgagacctgagctggtgatgaagtcgattgttcctgttgtcatggctggagttttgggcatttatggccttattattgctgttattatcagtaccggtattaatccaaaggccaaatcctattacctctttgatggttatgcacatctctcttctggtcttgcctg

SEQ ID NO: 234332 - DNA, 392 bp, Glycine max
gacattctgttggtgattgtgagtgagtgtatcaatcggccacacagaaatgggcagtgcttctctgattccagtttcctggttgccttggcggccactttctcctttcaagggaacggtgaaaaccttggtcgcaaaaccatggctgaagaagattcagcaagcatgacccctcatttccgtggttaacaaggctgcctctctatcttcccccgtgacagcacccagcgtctgcgttcggtttcggctggacaatttggggccgcaaccgggttcgaagaacagggctaagagaaatggtataggaatatccgcatggcaatgggcaagttgtggttttgggatgagaggtcagaaatctcgatctggacctggcgttaagaatggtttca

SEQ ID NO: 234333 - DNA, 389 bp, Glycine max
tgacatcgctgttaggcttttggagccactcaaggcggagttccctattttgagctacgccgatttctaccagttggctggcgttgttgccgttgaggtcacgggtggacctgaagttccattccaccctggaagagaggacaagcctgagccaccaccagagggtcgcttgcccgatgccactaagggttctgaccatttgagagatgtgtttggcaaagctatggggcttactgaccaagatatcgttgctctatctgggggtcacactattggagctgcacacaaggagcgttctggatttgagggtccctggacctctaatcctcttattttcgacaactcatacttcacggagttgttgagtggtgagaaggaaggtctccttc

SEQ ID NO: 234334 - DNA, 390 bp, Glycine max
agagagataggtcaattaatcaagaaataaagagcaaattaaagcatacccagtatggtgcactgtgtggtcttagcatatccagctcaaggccacattaaccctatgcataatttctgcaagctcttgcaacatcaatgtgtgaaagtaacactagtcaccaccctttcctacagcaagaacttgcataacatacctgcttctattgcacttgagaccatttctgatggttttgacaatcgtggatttgctgagtcaggaaactggaacgcctacttggaacgtttttggcaagtaaggccaaatactcttgctgagcttcttgagaaacttggtagattaagtgaccctgttgattgtgttgtttataattcattcttcgcttgggct

SEQ ID NO: 234335 - DNA, 398 bp, Glycine max
  unsure (1)..(398): unsure at all n locations
ggcacagctggagaaactgaagaagtatgctactgtggttcgtgttttggctcacacccagatcaggaaaatgaaagggttgaagcagaagaaagcccatatcaaggaaattcaaggtaatggtggtactattgcacagaaggtggactttgcatacagtttctttgagaaacaggttcctattgatgccgtgttccagaaggatgagatgattgacatcattggtgtgaccaagggtaagggttatganggtgttgtcactcgttggggtgttacccgccttccccgtaagactcacagaggcttgaggaaggttgcttgtattggtgcctggcatcctgcaagagtttcattcactgttgccaaagctggtcagaatggataccaccaccgaactg

SEQ ID NO: 234336 - DNA, 386 bp, Glycine max
aaagaaaagaaaaagggagaaggagtgagaataacatgaacaaacaactcacgctgctctgtctctttatcctcttctcatttctcagtgtaagcacagcttttcctcactgtcactgttccaagtctcgatttttccaattgttttattcctcccattgccagttctgaaatgggtgtgtgttcattcaatgcaggtgggtttcgccggcgccggagacgcggcggagaaaaaccctttcaccccaaaagccttcgccattcgttattgggacaaagagatccgcagcgggttggcgaagccacagtttcttctgtctaaggcgtcgccgctaaacgcggcggaggcggcggcgtttgtgaagcttgcctccggcaacgcgctct

SEQ ID NO: 234337 - DNA, 393 bp, Glycine max
gcagaatacaaagaaaaatgcgaaagcacgctcgaagaagccctaaagaaggaccccaaattggctcaacccaaggatcttatcatggtgtcaatgattcttgcggagaaggaggttaccaatgccttcgatggaactgcaaagatgatgggcaatgcgtccgaggaagagaagggtgcgtacgaggattgcaagggtttgttcaaggacgccaaggaagagcttgagctgtcgatcaccgaggttggcgacaacgacgcggacaagctctccacaaagggtgctgaactgaacaactggctcagtgcggttatgtcttaccaacaaacctgcattgatggtttccccgaagggaagatcaaggatgatttcaccagcatgtttactaactct

SEQ ID NO: 234338 - DNA, 395 bp, Glycine max
atgataatcatctctactgaccaaatctgaagaaaattgctttctctttggttcctagctcgcactctctctacgcacgcctcaacatcccttctctgctccattcattatgtctccgtcgttggatcttccccccaagggtggcttcagttttgatctatgccgaagaaacgcaatgcttcaaaacaagggcctcaaagccccaacctttctcaaaactggcaccactattgtcggtttagttttccaggatggtgtcattcttggggctgatactagggcaactgaaggacctatagtggctgataaaaactgtgagaaaattcattatatggcacccaacatatattgctgtggagcaggcacagctgctgatacagaggctgttacagaca

SEQ ID NO: 234339 - DNA, 417 bp, Glycine max
acttaagctcggaattcggctcaagccttaagaaggcaggcaaaatcatcaaataagcaaccagaaaaagatctgtatgctatcatatcacaacgcaaacatgagaggaaagaccgctttgattctatgttctcatctctaatttcaaagtatggtgggggtcaaatgccagaaccctctgaagaggaatttgaagctgcacagagaaaggtggaaagcggaaggtcctcaaaaaagtcgaagcaaaaatagcaaaggctgtgtacaattcgtttgagtgcgaatgatacttcatcctttgttagtggaaattcttcttttctgagtatgggaagttagctattttcatgtgtatgttaatagtaccggttactgtcaatggtgaaatagccgcaactttcctgaaagttttaggga

SEQ ID NO: 234340 - DNA, 395 bp, Glycine max
  unsure (1)..(395): unsure at all n locations
ccaactatcacataatttaattaatccgttaaatgccaactgatatataaggataataaccaattaaggaaggaaaataatttaagttaaatcaaccaagggaaacaaggattaacgttgttccaacaattcaaccattatcaaaacaacaaagaaaagaacgggtagaagaagtccaacatcggataagctcaagaatcaacaccgcgagaagcagtcgatgaaaccttaccgtggaataaggatgcgggagttgggggaagtgggtggcggagatcagagaaccnaacaaaaggtcnangatatggttgggttcttacacgacacccgtggccgccgcacgtgcctacgacaccgctgtcttttacctccggggttccaccgcgcgccttaac

SEQ ID NO: 234341 - DNA, 401 bp, Glycine max
ttcaagacaggccagctttggataaggagaaagtctaccctgataataaggtgccatcctttggacaaaatggcaaggtgttgggagaaagtccgtgatttgatcaaatatgtagattgcacacttttgaacggacacctttgtttcccagtgatcctgccatgagagatttcggtgagcaattgatatcccatgttgatacattcagcaaagacctgttcgtttcattgaaaggggatgctgtacagcaagccattcccgcttttgaatacttggagaatgctcttgtaaaatttgatgatgggcaattctggcttggccaattcagtttggtggatattgcttatattccatttgttgaaagattccaaattgtctttgctgaggtgttcaaacatgac

SEQ ID NO: 234342 - DNA, 367 bp, Glycine max
caagaatagtgtaacgcagagaatcagaaaaaaaatatgaagttcgctataatcacaatattgttctctttatttcttcttgactttggttttgcacaacagggggatcttgacatatcaagatttggaggaaaaccaaatacaaatataggccaggctttcttaagtgcctggactcaagcatgtgcatcaccaactgctgtcaaaattgtgattccagctggcacataccaaatgggtgcagttgatgtcaaaggtccttgcaaggctcctattgaggttcaagttgatggaacaattcaagcacctgcaaacccaactgaccttaaggcggctcatcaatggtttgttgttcaatatgttaact

SEQ ID NO: 234343 - DNA, 380 bp, Glycine max
cgttctttctctcgcaatcttcactacattcaccgagcatttgcattcacattgaatatggctgagactacacaatctaatgctgagttgttggagtggcctaagaaagataagcgccgcttcctgcatgttgtgtatcgtgttggtgatcttgatcgcaccattaagttttatactgaatgttttgggatgaagcttttgaggaaaagagatattccagaggagaaatatgccaatgcttttcttggatttggccctgaacaatcccattttgttgtggaattaacatacaattatggggtgacctcatatgatattggaactggatttggacattttgctatcgcaactccagatgtttacaaattggttgaagacat

SEQ ID NO: 234344 - DNA, 372 bp, Glycine max
gttcgatccatcgatcatggcggacgaggtcccttctccttcagcagcatctactgctactacctctcttggttcgagtgtgatctccctggtgaaccgccttcaggacatcttcgcccgcgtcggaagccaatccaccatcgacctcccccaagtcgccgtcgtcggcagccagagcagcggcaagtccagcgtcctcgaagccctcgtcggccgagacttcctcccacgcggcaacgacatctgcacacgccgccccctcgttctccagctcgtccagaccaagcgcaagcccgacaacgacgagtacggcgagttcctccacctccctggccggaaattccacgatttctccgagattcgcagggaaat

SEQ ID NO: 234345 - DNA, 422 bp, Glycine max
gctagagtgatacaacaggtacatcaggtagactcagacggcacgatggctcctgcaagcgcctacctcatatgactcgatcttctagtgcacactatgctgaggtcgcactgcatcactgcgtcttcagtcttcgaggttcaacgtattcggctgcatcgccagtagacttcaccatcgtaggccatctcgagtcgcagtccgagttccacacctcttactgctcattcgcctcctgggagaagcaggtccgccactcctccacccctcgccgccccaacggcctcaccgtcctcgtcaccggcgccgctggcttcgtcggcagccactgctcccttgccctcaaaaaacgcggcgacggcgttctcgggctcgacaacttcaacagctactacgatccctccctgaaacgctcccgtcag

SEQ ID NO: 234346 - DNA, 404 bp, Glycine max
gaggcctgtgagtggcaggcctctcaacgatgacaaggtattggaacgctgccctgacttgaaccttgagctaaccattagtcctccccgtcaacctcaatctgatcagcatcacttgaagcccgttgggagaaactcaaacctttgctttgcctgcagtttgggtttgcaaaatagcaaagatcattgtagctgtgcgctcaacactgccaacgctgcttctggccatgatttcttggccttgaaaaccagcgttttggaaatgaaatgagtcaaattcatttggaatctttcttccctaattaattagttgttaatggatgcaaatgattgcctgcccaatttcctcgtggagccctttctattattcctatgttcatgtacatgtgcgtaagactacaaac

SEQ ID NO: 234347 - DNA, 346 bp, Glycine max
ggagttataagatattcacagaagcagcaaaaatgcttatgcaacaagttcatgtatcaaatccaagttcatcttgtctcatccttcaaaagccatgcctccgtgacattactcacccttcttttcagctttggtcaaggccatcatcgttcccaaaccaaaggaagcaaaaaagggtttcttatggatgcaggagtaatggcaacaaaatcaaagctgtggctgtgactgaagctgaaaacaaatcagtgaaagttaaagccacaatcactgttcagccaaccgttggtgggattttctcagaaatggctatagagagagggttggatgatataaaggatttgct

SEQ ID NO: 234348 - DNA, 414 bp, Glycine max
caggcgtacgtaaactcgagattcggctcgagcagagaaagtgaaagtgtctgagagtgtgtgtgtgacttatggagtccaattcagagttcgacgtgattatcatcggagctggcgtcatgggcagctccaccgcctaccacgccaccaaacgcggccttaaaacccttctcctggaacagttcgacttcctccaccactgtggctcctcccacggcgaatcccgcaccatccgcctcacctatccccaccactactactaccctttagtcatggactcttaccgcctctggcaagaggcgcatgcccaagtcggctaccagatctacttcaaggcccatcacatggacatggcccatcacaacgagcccgccatgcgcgccctcatcgactactgccgcaatcctccaaatc

SEQ ID NO: 234349 - DNA, 381 bp, Glycine max
  unsure (1)..(381): unsure at all n locations
aagagttgctgcttcttcagccactccgcacctcgcagcctctgtgccctcaacaaccatggctgaaatcgaaactaccgttccagatccacccaaatcgacgtcaaactcttcaatcgctggagcttcgaggatgttgaggttaatgatatgtctctggctgattacattggagtgtccccatcaaagcatgctacatatgttcctcacactgctggtaggtactcagtgaagaggttcaggaaagcgcagtgccccattgttgagaggctcaccaactctctgatgatgcacgggaggaacaatggaaagaagctcatggctgtcaggattatcaagcatgccatggagatcatccacttgctcactganctgaaccca

SEQ ID NO: 234350 - DNA, 363 bp, Glycine max
  unsure (1)..(363): unsure at all n locations
gtcaagttccccaaaatccaatggttaacctgcaaaaggaggcgccaaacttaaaacccaaattcaccaccataaacaaccctgtccaaattggaaatggctatccccctgtctccaatggccacacttcccacaattgcgtcaagtttgctgaactcataaccaagattgacaggcgatccggcaaagagcttgagaaggagcccaagtttttgaagaacggtgatgctggttttgttaagatgattccaaccaaacccatggttgttgaaactttctccgagtatcctccacttggtangtttgctgttanggacatgcgtcaaactgttgctgtgggagtcatcaagaacgttgagaaga

SEQ ID NO: 234351 - DNA, 365 bp, Glycine max
ggcgaaggactttaggttgggatttgggaattagggttattcgcgtggcgaagatgattgaggtggttttgaacgatcgattggggaagaaggtgcgcgtgaagtgcaacgacgatgataccatcggcgacctgaagaagcttgtggcggctcagactggcacaagagccgacaagatccgcatccagaagtggtacaccatctacaaggatcacatcactctcaaggattacgagatccatgacggcatgggtctcgaactctactacaactaaacacaacaaggtgtgttttatgcgtaatatactatgtgctgggaatgggataagcgctaaatgtaattctgacttgcgaaagttcccatg

SEQ ID NO: 234352 - DNA, 389 bp, Glycine max
gcattgtggtgacccactttcttgttgctgacgaagagtttcttcctatcaaagaaagctctgtggatttggttgttagttgcttgggactacactggactaatgatctgcctggagcaatgatacagtctagattggcattgaagcctgatggcttatttttagcagctattcttggtggagaaacattaaagtgacaatgtttatttttatttcttgaaatttctttggaacagaaatggatgggggcattctaattaatgatatttgtgctgctaccagggagctcagaatagcttgtacgttggcacaaatggagcgtgaaggagggatcagtccccgagtatcacctttggcacaggttcgagatgctgggaatcttttgacta

SEQ ID NO: 234353 - DNA, 391 bp, Glycine max
gctgagttgagttccgtgttctcgctcagcatggctttggttaacctttcttacatcggcattgtgacccttataacccttctggcttccaccgaggccagggtcccgggcgtgtacagcggcggcgcgtgggagaccgcgcacgccacgttctacggcggcagcgacgcgtcggggacaatgggcggcgcgtgcgggtacgggaacctgtacagccaggggtacggcgtgaacacggcggcgctgagcacggcgctgttcaacaacgggctgagctgcggtgcctgcttcgagataaagtgcgcgaacgaccccagctggtgccacgctggcagcccctccatattcgtaaccgccacaaacttctgccccccaaactacgcccttccga

SEQ ID NO: 234354 - DNA, 360 bp, Glycine max
  unsure (1)..(360): unsure at all n locations
ttcttaaccagctctttaacagaggcgttttcggcactcgatgcaaaacatgcctgaacctggcaatttcacgcattaagctgctgcaaaacaagagagatatgcaactgaaacaaatgtgcaaggagattagccaattcttgcacgctggccaagacgcaattgctanaatcagggtggagcatatcatacgggaacaaaatacatgggctgcatatgaaattttggagttgttctgtgaatttgttcctgcacgtgtacctataattgagaatcagagggagtgccccacggaattgcgagaagccattgcaagtataatttttgctgctcctagatgttcagatgtaccagacttat

SEQ ID NO: 234355 - DNA, 395 bp, Glycine max
gtttgagagtgcgcctcctggttgatcctcatatgccaaaggatggaagtagttcacccaatcttgtcatggacaacccactttcacaaaatccagacagttcatggagtcgcttttttcgcaatgcagagatggagaggatggttgatcaggatttagcacgtttataccccgaacatggcaactatttccagacgccaggatgccaaggcatattgagaagaattttattactatggtgtctcagacacccagagtgtggttatagacaaggaatgcatgaattacttgctccggtgctttatgttctccaatttgatgttgagtgtcttttggaagttcgaaagctttatgaagatcacttcacagacagatttgatggcctcttttgtcaa

SEQ ID NO: 234356 - DNA, 460 bp, Glycine max
  unsure (1)..(460): unsure at all n locations
ntcagatgcanagcccnantaaanaagatgacgtcgcctgcacgcgtacgtaagctcggaattccggtccgaggccacacatggcttctgctgcttcaattgtgaagaacctaccgggttacaagggtgatcttccattcaaacttgaaactgggtacataggagtgggagaagaagaaaaggtgcaattatttcacttattggtggattcccagaaaattcaatccattgttcaacggtaaattgggttggttgaaggcctggtttctccggcccaaccggcttcctttttggaaattggcccttaataatggatggaaatttacattggaacccttcaaaaccttgatttaaccacatatacagggacacacattttgaatgtgatacacatacatatgccattgcgcacaggatttcaaactcagaaacgcaagaacgctattacagttgtgacata

SEQ ID NO: 234357 - DNA, 382 bp, Glycine max
cgagaacaataatggcacttatcagtgggttgtcaagcccaaaactgtcaaatatgaatttaaaaccaacacccatgtccctaaactaggggtaatgcttgtggggtgggggggaaacaatggctcaaccctcactggtggtgttattgctaaccgagagggtatttcatgggcaacaaaggacaagattcaacaagccaattactttgggtcgctgacccaggcatcagctatcagagtggggtctttccaaggggaagaaatatatgctccattcaagagcctgcttccaatggtgaaccctgatgatgttgtgtttgggggatgggatatcagtaacttgaacctgactgatgccatggccagggccaaagtgtttgat

SEQ ID NO: 234358 - DNA, 386 bp, Glycine max
ggaaggggcggtggaggaagaggaggagacagaggtacacccttcaaagctagaggcggtggtagaggtggtggaggccgtggaggaggcaggggtggtggccgtggcggtggcagaggtggaatgaagggtggtagcaaggttgttgttcagccccatagacatgacggtattttcattgccaagggtaaagaagatgctctcgttaccaagaatcttgttcccggtgaagctgtttacaatgagaaaaggattactgttcagaatgaagatggtaccaaagaggagtacagagtttggaatcctttccgattcaagttggctgctgccatccttggtggagttgacaacatatggattaaacccggagccagagtcctttacct

SEQ ID NO: 234359 - DNA, 378 bp, Glycine max
attggctaactgtgtcagtcagaataatgtgaagaaagcagaggaagtttttagtaaaatgaaggacttggattttcctattacagtatttacttgcaatcagttgctatttctgtataagaggaatgacaggaagaaaatagctgatgtgttattgttgatggaaaatgagaatatcaacccttcttctcatacttactcgatcttaatagacacaaaaggccagtccaaagatattgatggaatggatcaaattgttgataggatgaaggctcaaggcattgaaccagacatcaacacgcaggctgttttgattaggcattacatctcttctgggcttcaagataaagctgaaactttattaaaggagatggaagg

SEQ ID NO: 234360 - DNA, 268 bp, Glycine max
atggcagggtacaagggcgatgacgagtacgattacctcttcaagctggttctgatcggcgattctggtgtggggaagtccaacctgctttcgcgcttcaccaggaacgagttcaatttggagtccaagtccaccataggggttgagttcgccaccaagagcttgaacatcgatgctaaggtcatcaaggctcagatttgggacaccgctggccaggaaaggtaccgtgccattactagtgcttactaccgaggagctgttggtgcct

SEQ ID NO: 234361 - DNA, 380 bp, Glycine max
cgtcaaggttcctcaaaatgtctctgtcttttgtgttgctcttcctcatctcaattccaccttctttctcctctccaattcaccccacaagcaacgaccttcgtttttcttcaacagcagaaaaactcataagagggcttaacctgttcccgaaagaccccattaacacactcgagaatgaccctctttttgtgtcaggaagcattgtggagaagagcttcactttccctagtcttgctgcttcttcagaatcttctgttgaagaacttggtcaccatgcaggctattatcgccttcctcgttccaaagctgcaaggatgttctacttcttcgttgaatctcgaagcagtaagaatgatcctgttgtcatatggctgact

SEQ ID NO: 234362 - DNA, 362 bp, Glycine max
atttaaagaaatcaacacacacaaacacaacaacatatggaggtgctaagggtgcaaaccatagcttccaaatccaaagatgctgccatcccagccatgtttgttagggcagagacagagcaaccaggcatcacaaccgttcaaggggtgaaccttgaggtgccaattattgattttagtgacccagatgaagggaaagtggtgcatgagattttggaggcaagtagggactggggcatgttccaaattgtgaaccatgacatacctagtgatgttataagaaagttgcaaagtgttgggaaaatgttctttgagttgccacaagaggaaaaagagttgattgctaagcctgctgggtctga

SEQ ID NO: 234363 - DNA, 375 bp, Glycine max
gctagggttttggctcagtctgttaatgtccctggtctagtggctgagcataggcatggtcagcaaaagggatcaggaaaattaaaaagatcgaccaaaatgatgagtgctttacggacaaatggattaagaatgtcaggtttctcagggcttcgtactttcaatcctttggatactatgttgagacctggcatagattttcattctaaggtatccattgcaacgtcttcgcggcaagcaagagctaccagatgcgtgcccaaagccatgtttgagcgtttcactgagaaagcaatcaaagtgattatgctagcccaggaggaagcaagacgtcttggtcacaattttgttggcacagagcaaattctattgggt

SEQ ID NO: 234364 - DNA, 394 bp, Glycine max
gtccttttcctcaaagggactaccataatttttctctcccaaacaaacccaagagaggaagaaagaaagaaaagagtataaacacacaatatctctttaaactcttgacccttctcttggaggcatggctttcccaattctcttccttctcttcatttcccttcccttctcctccgcaaagctcaacgtcgattactacaaaaacacatgcccagacttcgaaaaaatcgttagggaaaacgtcttcaccaaacaaagcgctagcgtggccacagcaccgggtctccttcgcctcttcttccacgattgcatcaccgatggctgcgacgcttccctcctcataacttccaatgcatacaaccctcatgcagaacgtgatgcggacctcaacctt

SEQ ID NO: 234365 - DNA, 363 bp, Glycine max
  unsure (1)..(363): unsure at all n locations
tgacatgctcaatcagttagagcttcaagttgatggtggtttcaatcagaatctgaattcaaggactttgtctgctcccaatctcagtgcaatggactaccctgcacttacttcaccagatggtcagactgcttcagtagaatatgtggttgataatgtgcaacaaagtggcaatccttaccgatcatatgacagtgatgtgctgctttgcaaatctgtcgcttcagtttcatctacgggtggtgctattgactttgcgtcaactgttaagaagttggcgtctcgggattctggtggtatttggcactatgataaaagtggctctggtgatgctgctatctgctcaagtangaattcgaatgt

SEQ ID NO: 234366 - DNA, 383 bp, Glycine max
cgccgacctcgctatcggattgatgctggcgctgctcaggaggatctgcgagtgcgatcgttatgtcaggagcggcaagtggaagaaaggggactacaaactgaccactaagttctctgggaaaactgttggcattattgggctagggaggattggtcaagcaattgctaagagagctgaaggattcaactgccccatatgctactactctagaactcaaaaaagagactcaaactacaagtactatcctagtgttgtagaactggcatctaactgcgacatactggtagttgcttgcccactgacggaggaaactcatcacatcatcaacagggaggtgatcaatgcactgggtcccaagggttatcttattaacattggac

SEQ ID NO: 234367 - DNA, 377 bp, Glycine max
ggaaaaactagaaaagatcccaacagtgagaagcccagtgattttgtttaccttccgagagatgaagcatttggtcacttgaagtcatcagattttctcgtttatggaatcaaatcagtggctcaagacgtcttgcccgtgttgactgatgcgtttgatggcaatcttttgagccttgagtttgataactttgctgaagtgcgcaaactctatgaaggtggagttacactacctacaaactttcttagcaagatcgcccctataccagtggtcaaggaaatttttcgaactgatggcgaacagttcctcaagtatccaccacctaaagtgatgcaggtggataagtctgcatggatgactgatgaagaatttgctag

SEQ ID NO: 234368 - DNA, 373 bp, Glycine max
ctgcttctccgccatagcctctgagcccaacgtcactcacaaagtcaccaaccaccgcgacgtcatccaactctccctaagcatcaccttccgcgcggtggagcgcaactacttcaccgtgaagaaactcctaaccaaacacgacctaacgaaacgcgagacaaccgcgctccacgattgcctcgaaaccatagacgaaaccctcgacgagctcagagaagcacaacacgacctcgagctctaccctaacaagaaaactctgtaccagcacgccgacgatctcaaaaccctcatcagcgccgccataacgaaccaggtcacgtgcctcgacggtttctctcacgatgacgcagacaaacacgtgaggaaagag

SEQ ID NO: 234369 - DNA, 384 bp, Glycine max
ttgattttatgtttgtttttgcgagcgtaaggttgaggagaagagatggtgggagcacggccacgggacatagatgacttgcccaagaacgccgccaactacacagcgcttacgccgttgtggtttctagagagagctgctacggtccaccccaccagaaactccctcatccacggatctcgtcgctacacgtggcagcagacttaccaccgttgccgtcgattcgcctccgctctttctaatcattccatcggtcttggaaacactgtagctgttattgcacccaacattccagctctttatgaagctcactttgggattccaatgtcaggggctgtgttgaaccctgttaatattaggctaaatgcatccacggtagctttt

SEQ ID NO: 234370 - DNA, 381 bp, Glycine max
ggaaaagcctccaaaaccaacccaccgttggcgcgatggctttcccctccaaaggcgatgacgagcaggttctggtgcagcgtaaatcgaatgcgagagttttgacactaaacaggactaaacagttgaatgccctctctttttatatggtttctcggctacttgaaattttttctgaagatgagaaagattctgatattaaattggttgtcgtgaagggaaatggaagggctttttgtgctggtggtgatgttgcagctgttgctcgtgatggaagtaaaggtgactggaggtttggtgcaaatttttttcaaagtgaatttaaattgaattacttgatggcaacatatagtaagccccaggtttcaattcttaatggaa

SEQ ID NO: 234371 - DNA, 380 bp, Glycine max
ggggaatcttgagaagaagctgttgagcagagagcaaaaatcagaagaagagaatttatcattggtgaagagggtgtgggaagagagcaaggtgatgtggatagtggcagcaccagccatattcacaaggttcacaacctttggcatcagtgttataagccaagcatttattggtcatattggttcaagggaactcgctgcttatgcccttgtgttcactgtcatcatacgcttcgccaatggaattctgttaggaatggcaagtgcattgtcaacactttgtggacaagcatacggcgcaaaagaatatgacatgatgggagtgtatcttcaaagatcatggatagttttattcttaagtgcaatctgtcttcttccgt

SEQ ID NO: 234372 - DNA, 386 bp, Glycine max
ttcttcctccgctcaacaactataagattatcttcttcttcttcttctcttcaattcttctccaatcccaaccgcaccctcttccgtccctttcttcacacttccttcaaaccacttccttcgtctttctctttccgaacagatcacactatggccacctcaaacgccaaatcagtccatgatttcaccgttaaagatgccaagggaaatgatattaaccttggtgactacaaaggaaaggtccttatcattgtcaatgttgcctcacaatgtggcttgactaattcaaattacactgagctcagtcagttgtatgagaaatacaaacagaaaggtctggaaattctggcgttcccatgcaatcagtttggggcacaggagcctgg

SEQ ID NO: 234373 - DNA, 372 bp, Glycine max
cactaatagtcggtgtgactgggttgactgggctgagcctagccgaaacattgaagaaacccaattgtctcggaggcccatggaaagtttacggcgcagcccgcaggcccccgcctagttggttctctccttccatggtcgaccacttcatcacctttgacgctgaggactcttccgacacacgcgccaagctttcccccatcgcccacgaggtcacgcacctcttctgggtcacctttcagattcacgcagacgaagaatacaatgcaactgtcaacaaaaccatgctactcaaccttctaactgccctgaaatcttccacgacatcccggttggcccatgtaacggtccaaaccgggaacaaacactaca

SEQ ID NO: 234374 - DNA, 396 bp, Glycine max
gtgcaagcaattcatgaacctctccatcggggagttcacgaggtcactcgacaagttcgccaagtttgacctgaacaaccttgacaacatcctcacaagtttgaaggtttggctcagcggtgcaatcacgtaccaagaaacatgtttagatgctttcgagaacacaaccaccgatgctggtcaaaaaatgcagaagctcttgcaaactgccatgcacatgagtagcaatggcctctctatcatcaacgaactgtcaaaaactctctcggaaatgcacgttaacagacctggccgtcgacgccttttgaacaacgttgatgatttaccagttcttggccacgactttgaccttcccgaatgggttgatgatcgcgttggtgttcgcaaactcctacg

SEQ ID NO: 234375 - DNA, 387 bp, Glycine max
atttgtgtaagtacatttcacaggttgacgttgttataagtttgctgcccccaagttgtcatattattgtagcaaatgcttgcattgagctgaaaaaacatcttgtcactgctagctatgttgatagctccatgtcaatgctaaatgataaggctaaagatgctggcataacaattcttggagagatgggcttagacccaggaattgatcatatgatggcaatgaagatgatcaaccaagcacatgtgaggaaggggaaaataaagtctttcacttcttattgtggtggacttccatctcctgaagctgctaacaatccattagcatataaattcagttggaatcctgcaggagccatccgagctgggcgcaatcctgccacctaca

SEQ ID NO: 234376 - DNA, 391 bp, Glycine max
caatcttctctccacgcccttcttgggtaaccgtctgaagtgcagcaatggcagatggattgcattcgcagcatccatcggtagttcagaagttatctggacagtcttatcttgtgtccaggcttgctcctaatcactccagaaactgttctaccactggtagttacttcaatggaggtttgcagtcttcaggtttggttccagtcacggcacacgcgccggctgagaaaggggtgtctggatttttgttggatttcctgatgggcggagtgtcggcggctgtgtccaagacagctgcggctccaatcgaacgagttaagttgctcatccaaaaccaggatgaaatgatcaagagtggtcggttgtctgaaccatacaaaggaattggcga

SEQ ID NO: 234377 - DNA, 377 bp, Glycine max
tttgatagcctcaactcaagtaagggttttctctttgagaaaatcgtatcttacaccttttggtgaccactttgagtgagagaagagaaattaagagagatactcaaattagattcaagagagatggccatcaaccatgaaacttgggctttcattttcggtcttctaggcaacgtgatctcctttatggtgttcctcgctccattaccaactttttaccaaatctacaagaaaaaatctacggatgggtttcaatcactaccttatattgttgcactattcagttcaatgctctggatttattacgcactcgtcaaaaaggatgctagcctccttctcattactattaactcctttggatgtgtgatagagacgat

SEQ ID NO: 234378 - DNA, 380 bp, Glycine max
ggagcttttagggaaggaataagaaaagctggaccaaggatgcttgagcctataatgaaggttgaagttgttactcctgaagaacatctaggtgatgtaattggtgatctcaactcaagaagaggacagatcaacagttttggtgacaaacctggtggccttaaggtggttgatgccctggtacctcttgctgagatgttccagtatgtcagcacactcagagggatgacaaagggccgtgcatcctacacaatgcaattagccatgtttgatgtggtgcctcagcacattcagaaccaacttgccacaaaagagcaagaagttgccgcttaatgtatttgcttggtctcctaacaaggaacttcttattgcatagttgt

SEQ ID NO: 234379 - DNA, 409 bp, Glycine max
acccttacttaaccccggaattcggtccaagcttagctcaaacttaacctcaataacctttcgtgcaacctaccttaatcatattccaattccaacagaaccaaattctgctagctagctagtacgtcaaaagaaataaaataatatggcattcagcgggactcaacagaaatgcaaggcttgcgacaaaactgttcacttggtcgaaggtttatctgtcgatggggctgcttatcacaagaattgcttcagatgcagccattgcaatggccttcttgcgataagcaactactcatccaccgaacgggttttgtactgcaatgtgcactttgagcagcttttcaaggaaactggcgcctaccccaagaaatcccagtcgtctggaaagcctccactcgagctgaataga

SEQ ID NO: 234380 - DNA, 395 bp, Glycine max
gacttgcagccactggaggggatatcagaggaagacatgaagttggtcaatgagatgaaagctgaagccttgaagactctagttggtcaaggaggtgagcctacagacaataacagtgtattgttgaccatgagcactttgagagaagaaggggtaattgctgtaaaaaaatgcagcatgtgagaggttattggatcagagggtggagataaagatgaagtcaaagaaaattaacgactgcttgaataggtttcatgttgcagtaccaaagcctcgtgaccagaaggaaaggcctccatgtattcctcaagcagttttagaagctaaagctaagcaagctgctgacaaggaaaagagaaaaactgaaaaggatctggacgatgagaatggtgggg

SEQ ID NO: 234381 - DNA, 381 bp, Glycine max
gtcgtgatgggatttttcaaaaggatagccggatatctagggtttggaaaccacgaacacgattccaaggatgaggcccgcgatggtcaacctcgtaccacacaacctcgtaaaggcttcagtgtccctgcccaggtcgtcgtcgatcgcccccacctcgctcccgttctcactccttctacttccggcgacggtggaattcagggtctggattggtatgtaaagcgtcttaagatggatgaagatggtgatttagcagatgaattccttgatgaggtttcatcagacaagccataaggacatgcagtagatcatcataaaacacaggcaaggtttaaaccaaacaatgcgaccaagtcagtcagagtgaagaaacagatc

SEQ ID NO: 234382 - DNA, 378 bp, Glycine max
atcctagcgtcgtgttttttacacaaacaaaaacacagggaagagaacaacaacaaagcacaacgtatagcttgctgaatcgttgtttgaggaaccaccgaatctcaatggcttcttcggtgttcttcactcactcccattgctactcttcaaagccctcttctcttgttttccgccaagttggtgtgggtcccacctctctccgattctcttcttctcatgttgcctccgttgctgctatggctatggattcttctgctaaggtgattgatggaaaatccgttgccaagcaaatcagagatgagataacggctgaggtttccaggatgagagaatccattggtgtgattcctgggttggctgtaattcttgttgggg

SEQ ID NO: 234383 - DNA, 382 bp, Glycine max
ctcttcttctcttgcggctagggttttagcgcagcttcttctagatttaaggaagatgggtaaggaaaaggttcacatcagtattgtggtcattggccatgtcgactctgggaaatccactaccactggtcacctgatttacaagcttggaggcattgacaagcgtgttattgagaggtttgagaaggaagctgctgagatgaacaagaggtctttcaagtatgcctgggtgctggacaaacttaaggctgagcgtgaaagaggaatcaccattgatattgctttgtggaagtttgaaacaacaaagtattattgcacagttattgatgcgcctggacatagggatttcattaagaatatgattactgggacatcccaagct

SEQ ID NO: 234384 - DNA, 399 bp, Glycine max
  unsure (1)..(399): unsure at all n locations
ccctaacttaacccaggaatccggtccaagcaatttaaaggaaccttgaaacgaataaaataaggggcttcaaaaaaggacccccaaaaccaaaaccctaatcgattccccttccaataagggcgtccgaaaaccgcttctcgattgaatttccccggccgattcgtacattgggagcttgataagcttgacctctaagagtgagatcagataccaaggtattctctacaacatcaacaccgaagagtccagtattggcctcagaaacgtgccgtccttttggacagaaggaangaaaaaggatggcccacaaatccctcccagtgacaaggtttatgagtatatacttttccgtgggactgacatcaaggatttacaggttaaatcttctccacctgt

SEQ ID NO: 234385 - DNA, 394 bp, Glycine max
cacaaaactcagtttccaattcaccaaactcacaatggttgatctagattggcaaacaaagatggttcactccaacatcatgcctccaatgtcccccaaactctctctcccggatcataacattccaatcccaactttgcaactcccccttcgccaaaacgacatcaccgcagcgtcgtctcctatctgcgctgcatacgacaactaccttcgtctccctgagctcagagccctctgggcctccaaggacttccccaattgggccaacgagcccatcttaaagcccgccttacacgccctcgaaatcaccttccgcttactcgcaaccgttttctccgacccgagaccgtacatcaacaaacgcgagtggacccgacgcgtcgagtctctcgcc

SEQ ID NO: 234386 - DNA, 427 bp, Glycine max
acccttagttaactccggaatccggtccaaggaataacaagggaggccaaacctccgttacaataataatccgtgttactgggtttaccggggcgaacccaacccaaacaattaagaaaaccaattttccccgaaggccaaggaaagtttacggcgcagcccgcaggcccccgcctagttggttctctccttccatggtcgaccacttcatcacctttgacgctgaggactcttccgacacacgcgccaagctttcccccatcgcccacgaggtcacgcacctcttctgggtcacctttcagattcacgcagacgaagaatacaatgcaactgtcaacaaaaccatgctactcaaccttctaactgccctgaaatcttccacgacatcccggttggcccatgtaacggtccaaaccggaaccaaaca

SEQ ID NO: 234387 - DNA, 360 bp, Glycine max
cttatacattacgcagtgagacaagatttactaattttagaagaaataatgcaaccgctggtctctcatttactttacttggtgatgccttatcatctggattgaagattgaagacaaattggttgctagtaagcgattcaagctggttgtcagtggtggcgcaatgacagggcgtggcgacattgcttatggtggcagtttggaggcccaactgagagataaggattaccctcttggtcgtttcttaaccacacttggcctttctgttatggattggcatggagatcttgctgttgggtacaatgtgcaatctcagattccagtaggacgttatacaaaccttgttgcccgggccaatt

SEQ ID NO: 234388 - DNA, 385 bp, Glycine max
ggggtttcgctgaagaagaagctgaagaagttaagatctccgttgggaacctgcctttcgacttcgacagcgagaaattggcctcgcttttcgaacaggctggcaccgttgaggttgctgaggttatatataataagggccactgaccggagtcgcgggttcggatttgttaccatgagtacaatcgaagagcttgagaaggctgtcaagatgttcagtggttatgaactaaatggaagagtgttgactgttaataaggctgctccaaaaggagcacagcctgaacgcccaccgcgcccaccacaatcctttagagtctatgttggcaacttgccatgggatgttgacaattctcggctggagcaaattttcagtgaacatggta

SEQ ID NO: 234389 - DNA, 379 bp, Glycine max
gtaacggtggaagagagaaaggattcgctctcctcaatccttatataagctccagcgacccaatttcttctcttatcgatttgattgtttctgagtaatggcttcgtcgcgagtagatctggatgggaaccccataaagcccatcaccatttgcatgattggcgccggtggcttcattgggtcccacctctgcgagaagctcatgtcggagacccctcacagtgtcctcgccttggatgtctacaatgacaagatcaaacacctcttggaaccccacacgctcccttgggcctctcgcatccagttccatcgcctcaacatcaagcacgattcccgtctcgaaggcctcatcaaaatgtcagatctgactattaatctg

SEQ ID NO: 234390 - DNA, 396 bp, Glycine max
aattcggcccaagccttttgagtgaaaaaccttgtcttcccacctttctttcgaaaaatcttaaagacattgactaacaacactaaagtggatcaatcaaaagacttacttcttcgtctaacaacattaagatcacatctgtcccactcatgaagagacttagcagctcagattcttccagtgccctcatgacaatttgtccatcaacagaggaacatagtccgaggaacagccaacacatgtatggtagggagttccaatcgatgttggacggactcgacgaggaagggtgtgttgaagaaccggggtatcaatctgagaagaagcgtcgtctaagtgtggatcaagtgaaggctttggagaagaactttgaggttgaaaacaagcttgaacctg

SEQ ID NO: 234391 - DNA, 384 bp, Glycine max
gccagcagcagcaccatctgaatgacttgagctgttacatacagcctcgccccggtgccagttctgtgagtagatctggtcggtccaagaccctaactccatcaaatctggaagagctcttttctgctgagatttctttgtctccccggtattctgatccagcagccggttctgtgttttcccctactcacaaatcagctgttctcaatcagtttcaacagctccaaagtatgttatcacctataaatactaatttgctgtctcctaagaatgttgagcatcctctttttcaggcttcatttggtgtctctccttctggaaggatgtcaccaagaagtgttgaaccaatctctccaatgagtgctcgtttatctgcatttgctc

SEQ ID NO: 234392 - DNA, 383 bp, Glycine max
  unsure (1)..(383): unsure at all n locations
cgaagccttcgaatctctctgaaacttttctcttctctttgattcttctctatcagttaaacattagaatgagccgttcacaggatccacacccttcccgatctttcttcccttttggaaatccttttcggatgatatcacctaaaggctctcgcatgtctccacaacttcttgcagtgttgcaagcttttgaggcaacattggcagagaggctgaaaaatcttatgcctaaaagcaaggatgaaatcctcaccttgtcttggatgactttagctatgaagtcactttgtgaaagtcacaatgacatacggacccttatgactgcccttgagcttcctgtgagtgattgggaggacanatggattgatgtgtacttggacata

SEQ ID NO: 234393 - DNA, 393 bp, Glycine max
tctctgtctttcgcactttcattctctcttaaaaatctaaatcccttttggtcttcatctttgcctctgacccaggtatggcttcgaaacgcatcctgaaggagctcaaggatttgcagaaggatcctcctacgtcatgcagcgcaggtcctgtggctgaagacatgtttcactggcaagccacaatcatgggacctgctgatagcccatatgcaggtggtgttttcttagtttcaattcattttcctcctgactatcccttcaagccaccaaaggttgcttttcggactaaggtgttccacccaaacatcaacagcaatggcagtatatgtcttgacattctcaaggaacaatggagcccagctctaaccatttccaaggtccttttgtcaa

SEQ ID NO: 234394 - DNA, 370 bp, Glycine max
aggtgatgctgtcatttatcctcatgctcttatggagctgtgtagaatgcaagaaccatcctcacccacaagaccctctaaccccgtctgagttcaacgatgtacgaaccattgtccaaaacgcatacccaacctcccataatctcaccttccactacgtagccttggacgaacccaacaagtccgaactcctctcatggctatcctcaaaccctaaaaccaaacctacaccatcttctccgccagcagctcgccgggccttcgccatagtccggtcccaaaaacagttccacgagatcacagtggacctttcaactccgtccatcgtatcaaccagagtctaccaaggaaatggataccctatgctgac

SEQ ID NO: 234395 - DNA, 380 bp, Glycine max
ctcacccttctttgactgttctcccacaccacacccatgacactcctcctgctccttattctcctctttcacgcggcggaagccaagggacagtggcagctcctccacaaaaacatcggcattgtcgccatgcacatgcagcttctccacaacgaccgcgtcatcatcttcgaccgcaccgacttcggactctccaacctaaccctccccgacggaagatgccgcaacaacccaaacgagttggtcgtcaaacgcgactgcaccgcgcactccatcgaatacgacgtcgcagccaacacattccgcgctctctttgtccaaaccaatgtctggtgctcctccggttcggtctctcccgacggaacattagtccaaaccgg

SEQ ID NO: 234396 - DNA, 392 bp, Glycine max
  unsure (1)..(392): unsure at all n locations
caaaaatctcccttctaaccttattcttcttctcgtccttcaccatcattgcgcatgcaattgttcctcaaaacgaaaccttcaaatttgagaactcaagtgaacttggaccctacatccttgagtacggtgcaaattacagaatgataagcatcttcaactccccaatccaagttgggttctacaacaccaacccaaatggcttcactccagctttgcgtgtangggctccaaggctccgagcagctatttcgttgggtttgggaggccaatagggccaacccagttggagaaaatgccactttttcacttggcactgatgggaaacttgtgttggcagatgctgatggcagaattgcatggcaaactaacactgccaacaagggtgttgg

SEQ ID NO: 234397 - DNA, 379 bp, Glycine max
ctctagtgtggtctgcaactatgagcaaggattatctaatcatactttctctccttctttccacggtgcttgcaactgcaagttcttcttcttcttcttcctccctctatcttgggaagggcttctcccatcgcaaattgtctcccagttatcacattcacaaaaccattgacgaatcctatgcagttatcttcgatgctggtagcacgggaagccgtgtacatgtctatcgttttaaccaacaattagatctccttcgcattggccaagaccttgagttgtttgtcaagactatgccaggtttaagtgcttacgctgagaatccacaagatgctgcagaatctcttattccacttttggaggaagcagaagctgctgt

SEQ ID NO: 234398 - DNA, 391 bp, Glycine max
gtttgggaatatggatgggtttcgttagcctgtgtcttctgtctgtatcagtatcaggtctgctccaacgcctagagcaccctgtcaaagctgatggctcacttagccttatggtcattggagactggggaaggaaaggaacatacaaccaatctcaagttgccactcagatgggaagggttgctgcaaagttaaatatcgactttgtgatatccactggagacaatttctacgatgatggattgactggtatagatgaccctgcatttgaaatttccttctcaaaaatctacactgccaagagcctccaaaagcaatggtatagtgtgttgggcaaccatgactacaggggtgatgttgaagctcaattgaatccaatccttcagaaaat

SEQ ID NO: 234399 - DNA, 400 bp, Glycine max
aacctcggaattcggttcgggccatcacctcgaatccccacaacgtggagcacattctcaagacgaatttccaaaactaccccaagggaaaacccttctccaccatcctcggcgatcttttgggaagaggaatcttcaacgtcgacggcgaatcgtggaagttccagcgcaagatggcgagtctcgaactcggcagcgtggcgattcggacgtacgcgatggaattagtcaacgaggagatccacgcgcgactgatcccgatcatggaatcaaccgcgcgtggcgaattaaactccgtctgcgttttggatttgcaagatatactacgaagattctcgttcgacaacatatgcaaattctcgttcgggctcgacccgggttgtctcctaccgaatctccc

SEQ ID NO: 234400 - DNA, 395 bp, Glycine max
  unsure (1)..(395): unsure at all n locations
gcagcatcgtagagaaataagggaaaaatggtgtcgctgaaactgcagaagcgcctctccgcaagcgtgctcaagtgcggcagaggaaaggtttggcttgaccccaatgaagtcaacgaaatctccatggccaattctcggcaaaacatcaggaagttggttaaggatgggtttatcatcaggaagccaaccaagattcactcccgctcacgtgctcgtaggatgaaggaggcaaagaggaagggccgccactccggttatggtaaacgtaagggtacaagggaggcaaggcttcccaccaagatactctggatgagaaggatgcgtgtgctcagacggttgcttcgtaagtacanggaatcanagaaaattgacaagcacatgtaccatgatat

SEQ ID NO: 234401 - DNA, 390 bp, Glycine max
aacggcaccggaggcgagtcgatctacggcgccaagttcgccgacgagaacttcgtgaagaagcacactggtcccggcatcctctccatggcgaacgccggtcccggaaccaacggatctcagttcttcatctgcacgacgaagacggagtggctcgacggaaagcacgtcgtgttcggacaggtcgtcgaggggatggacgtcgtcaaggagatagagaaggtcggatccagctccggcaggaccgccaagcctgtcgtcgtcgccgactgtggtcaactctcttagatagacgacgttgaccctaggcttttatctctgtgtcggtggctctgaatgtgtcgtttctttcggtgtcgtttttgcctttttttctctttcccatgtcgt

SEQ ID NO: 234402 - DNA, 385 bp, Glycine max
gtaaattattcatagcatatttcaaaccacactcaaaaggcttccctccctgacttggatttgattgatttcattacattgctacactatattctttttattggtgaattgctatttgctacactatattttaaggacaattatacatagactatatggggttgatggctgcgaaccaaactcaattgttgtctaagatggccatcggagatggacatggtgaagcatccccatattttgatggatggaaggcttatgatgaaaacccctttcatcccaaagagaatcctaaccgggttattcaaatgggtcatgctgagaatcagcttacttccgatttggttgaagattggatactgaataacccagaggcctccattttcac

SEQ ID NO: 234403 - DNA, 391 bp, Glycine max
cttgtagagtcatctatgcttgttctccggttggttgcgcgagtttcatggtcctgggtttctagaagtagtagctcctcagttggtatcaaagaaagtttgggtggttgttttaccagttggctcccgtactcttgccaaaccttacaagttggagcttgccatatattctaggttgcaggatgcacaaccacatactgttattggactgtggaacgccgatttacaagaaccaaagcttcaccagtctgattcgtcagtgacagttgttaatcacactactaaaacacgcattaaacttgggcctgcaagtgagaatgacaagcaacaacttacatggttttctaatgcttgcaaaggaattccacaggcaagtcctgcattcttgcaa

SEQ ID NO: 234404 - DNA, 379 bp, Glycine max
gtaagaaaggaaaatcatccactgagccatacattgttgctcataacattctcttgtcacatgctgctgcctatagaagctaccaactacatttcaaggaacaacaaggaggtcaaataggaatagcactagatgtcatttggtatgaacctataacagaacttgatgaagacaaagacgcagcagcaagagctatggacttttcacttggatggttccttgacccacttttctttggaaaatatcctctctcaatggagaaacttgtagctaagagattgccggagatttctgatacagcctcaaaatttcttgtgggatctttggattttattggcataaatcactacacctcagtctatactcgtaacgacaggac

SEQ ID NO: 234405 - DNA, 216 bp, Glycine max
cccattctcaccaccatcttcttcctcttcacagtgctcaaggtttcagcatcatcgtcagtgatattctacaacaagtgcccccacccagtgtggcccgggatccagcccagcgcaggaaagcccgttctggcccgcggaggcttcaagctcgccccaaaccgggcctactccctccagctacccgccctctggtccgggcgcttctggggccgc

SEQ ID NO: 234406 - DNA, 340 bp, Glycine max
  unsure (1)..(340): unsure at all n locations
gaagaagtaatacatgacaaagaagctcaatttagcagcccaaatctgaacgttgcttacaaaatgaatgtccgagaataccaaagtctaactccctatgccacagcattagaagaaaactggggaaaacctcctgggaatctgaattcagatggagagaatctattggtatatgggaaacaatatggtaatgtattcataggtgttcaacccacatttggctatgaaggcgatcctatgcggttgcttttctccaaatctgcaagtcctcatcatggatttgcagcatnatactcttttgtttgagaaattttcaaagctgaagcggttcttcattttg

SEQ ID NO: 234407 - DNA, 530 bp, Glycine max
  unsure (1)..(530): unsure at all n locations
gggagttctgaatgaaatctgtttagccatgccagagctaaaacgtagcatgcacgcgtacgtaagctcagaattcggctcgaaggctgacaagtacttgaacgaggctgcacttggaaatgctaacaaggatgctattaaaaggggaactttcttcaaaccttaaattggaggcaaagcaaacttggcaagtaaatatttctgtccctgaaagttgtgctgatccaagtgctaaaagttgtgatgggacttgcgtgtaacattcctagaattctcaatgtcntaagtgcaaagagaagatgccaagtttgagatgatttactatatttttcatattggactgtcttcctctataattttgagtttaaagtgtccacttaaattgaaaaaaaaaaaaaaagggcggccgccgactagtgagctcgtcgacccgggaattaattccggaccggtacctgcaggcgttacagctttccctatagtgagtcgtattaaagcttggcgtaatcatggtcatagctgtttcctgt

SEQ ID NO: 234408 - DNA, 427 bp, Glycine max
gcgaggactattttaaaatccggaccgtcgaatcggaccaccatcgttccaccggcgccgtcgacctcaaaggctcgaaccaccttccttctactcaactgcactcgcactcgtcggcgcaagctcccaccgtcgcacgcctcagccgcttccagttaacaagggaaatagcatttggtcataagaaaggaaggaaggaaaatggtgtttgggcaaatagtggttggtcctcctggctctggcaaaacaacttactgcaatggcatgtctcagtttcttagtcttattggaaggaaggttgctgttatcaatttggatcctgctaatgattcgttaccatatgattgtgctgtgaacattgaggatcttgtgaaactaagtgatgtaatggtggaacattcgcttggaccaaatgggggtcttgtgt

SEQ ID NO: 234409 - DNA, 426 bp, Glycine max
gagaaaggcaacatggacggcgctcgaatctacgcggagaacgcgatccgtaagcgcacggagcagatgaactacctccgcctggcctcgcgcctcgacgccgtggtcgcccgcctcgacacgcaggcgaagatgacgacgatcagcaagtcgatgggcaacatcgtgaaatcgctggagtcatcgctggccacggggaacctccagaagatgtcggagaccatggactcgttcgagaagcagttcgtgaacatggaggtccaggccgagttcatggagagcgccatggccggatccacctccctctccactcccgaaggagaggtcaacagcctcatgcagcaggttgccgacgactacggcctcgaggtctccgtcggcctcccgcagcccgccgctcacgccgtccctgccaaggaggccgac

SEQ ID NO: 234410 - DNA, 404 bp, Glycine max
ctctgctcgtgcctctagggttatcatatctccatttccatttcctctctctcagtttccaagaatcttaagctatgggaaagtcttacccaaccgtgagcgctgattaccagaaggccgttgagaaggcgaagaagaagctcagaggcttcatcgctgagaagagatgcgctcctctaatgctccgtttggcatggcactctgctggaacttacgacgtgagctcgaagaccggtggtcccttcggaaccataaagcacccctccgaactcgctcacggcgctaacaacggtcttgacatcgctgttaggcttttggagccactcaaagcggagtttcctattttgagctacgccgatttctaccagttggctggcgttgttgccgttgaggtcaccggtgga

SEQ ID NO: 234411 - DNA, 414 bp, Glycine max
ctaagctaggaattaggctcgagacaaagcaaagctcatccttgagttaaaaaatggcagcagcttcttccatggctctctcatccccatccttggctggcaaggccgtgaagctgggcccatcagccccagaagtgggaagggtgagcatgaggaagaccgtcaccaagcaggtctcctcaggaagcccatggtacggcccagaccgagtcaagtacttgggcccattctctggcgagcccccgtcctacctaaccggtgagttcccaggcgactacggctgggacactgctgggctttccgcagacccagaaaccttcgccaagaaccgtgaactcgaagtgatccactccaggtgggccatgctcggagccttgggctgcgtcttcccggagttgctgtcccgcaacgggg

SEQ ID NO: 234412 - DNA, 400 bp, Glycine max
aagctaggaatacggctcgagtatgtctgttgcaaagacaagagtcctgtttgtagagaattattctttgcatgagctgcttagcctcattgaagattttcttattgagggaaaagtaatagtaaacaatagagtatatgctgaaactttgtcttgtgatttgagagttaatgattttctggattgtgttaatcaagtatcatccgatgtagcttcaagtgaacaattggcggaagcaagtattatattagcatcagtatgtgctgcaactgattatgttggatttatttgtgatgcttcatatcatattcttcagtcatgcaagtgggattctctgatggtgctgactattctccatatttttgcttaattgggcggagagaagttttttaacatggat

SEQ ID NO: 234413 - DNA, 427 bp, Glycine max
ggcatttctgtccgtaacctctgtaactgtggagaacgtgacattccctcccaccgtgaagcctccctgctcccccaacaccttcttcctcgccggcgccggcgtcaggggcctccaaattcatcacgctttcgttaaattcactgccatctgcatttacctccaatacgacgccctttccttcctctccgttaagtggaaaaccaagtctgctcaccacttaacggaatctgaccaattcttctcagatatcgttacaggtccattcgagaaatttatgcacgtgacaatgatcaaacccttgactgggcagcaatactcatagaaagtggcagaaaattgtgtggccatctggaggtctctcgggatttatacagattcagaagccgaagcaatagacaagtttctttctgttttcaaagaccta

SEQ ID NO: 234414 - DNA, 437 bp, Glycine max
aagcaaaaacaatatggaagtaaagaaagttttttttgttgctctatcctttgctttggttctgaaagttgctgaaagctttgagttcaatgaaaaggacctggaatccgaggaagggttgtgggatttgtacgagagatggaggagccaccacacggtttctcgaagcctcgatgagaagcacaaccgcttcaacgtgttcaaaggcaacgtgatgcatgtccacagttccaataaaatggacaagccttacaagctgaagttgaacaggttcgctgacatgaccaaccatgaattcacgagcatctatgctggctccaaggttaatcatcacagaatgttcataggcacgccacgtgggaatggtactttcatgtatcagaacgttgacagggttccttcttccgtagaatggaggaaaaaaggtgctgtcactg

SEQ ID NO: 234415 - DNA, 388 bp, Glycine max
gccattttagcccaggacaaggataggttgatggatatgctaacatatccgaaagttgaagaggaaaacatgataagagtagaggaaaaggccaaaaaatttggcctagtagtggatttaaatgcaaagaagcctcgagctgagccactgtacataataaatccaagtgtggtttctgatctgtatggccattgggtcatgccattgacaaaggaagtgcaagttgcatatttattgaggaggctggactaaacatatagtaagagttcttggttatgttggtggtagagaaccaataattcatgtatataaataaagcttagactgagtaataatgtctttgaatggacttgaatttgatagaaattaacaaacaccgttttctttc

SEQ ID NO: 234416 - DNA, 441 bp, Glycine max
gtgatttcagtgagtgatcggtgttcacttgatctcatcataatcgtcagcgtcaattgaagaagatgccgatcagaaacatcgccgtcggaaggcctgaagaggcgactcaccccgacacgttgaaggcggctttggctgagttcatctcaaccttcatcttcgtgttcgccggctcaggctccggcatcgcctacaacaagctcaccgacaacggcgctgccacccctgccggcctcatctccgcctccatcgcccatgcattcgccctcttcgtcgccgtctccgtcggcgccaacatctccggcggccacgtcaaccccgccgtcaccttcggcgccttcgtcggcggcaacatcaccttcctccgcggcatcgtctacgtcatcgcccagctcctcggctccatcgtcgcctccctcctcctggccttcgtcaccg

SEQ ID NO: 234417 - DNA, 437 bp, Glycine max
aaaccacacacctcacctattagaagtaacaaaagaccctccctctcaaaagaataaacaagtataaaaaagaaggcacttccctcaaacagaaactaccctctatctctctcttttcaagccttaaatgagtaaaaaagagtgaagaaaggaaagaaaggagcaccatttttggtttgagaaacataattagcaagagagttcaaaatggggaagagagagtttaatggggtggtgttgatgatgctgtgtttgtgggtttgtggtgtcacagcctctgtgacttatgaccacaaagccattgtggttgatggcaagagaagaattttgatctctggctccattcattatcctagaagcacacctcaaatgtggccagaccttattcaaaaggccaaagatggaggccttgatgtcattcagacctatgtgttttg

SEQ ID NO: 234418 - DNA, 397 bp, Glycine max
cgtcacatgcccgcgtccgtaagctaggaatacggctcgagctcgagccggctcgagaatacaatgaataaaaatcaacccttagtcaacacaatcatcatggccacctctgctattcagcaatcagcattcactggtcaaactgctctgaagcagctcaatgagttcgtccgcaagaccggtggcgccggcaaatgtcgcactaacatgcgccgcaccgtcaagagtgctcctcagatcatttggtatggccctgaccgtcccaagtacttgggtccattctcggagcatattccatcatacctgaccggcgaattccctggtgactaccgatgggacactgctggattatcagctgacccggaaaccttcgccaggaacccggagctggacgtga

SEQ ID NO: 234419 - DNA, 434 bp, Glycine max
ctggtgaccagggtcacatgtttgggtatgccaccgatgaaacccccgagtacatgcccctcagccatgtccttgcaaccaaacttggtgctcgcctcacagaggttaggaagaatggcacctgtgcttggttgaggccagatggtaagacacaagtaaccgtcgagtactacaatgacaatggtgccatggttccagttcgtgtccacactgtcctaatttccacccaacatgatgagactgtgagcaatgatcaaattgctgcggaccttaaagagcatgttatcaagcctgtcattcctgagaagtaccttgatgagaagaccatcttccaccttaacccttctggccgttttgtcattggtggccctcatggtgatgctggtctcactggaagaaagatcatcattgatacctatggtggctggggtgct

SEQ ID NO: 234420 - DNA, 418 bp, Glycine max
cccttatctctctctctctctatctctcccgaattattgttcgttcgacccttttacttagtattccctgtttccggtattcgctcccttttttctgcattctggttttacttagatctctgtcccgcaccagatctggtgcatggtgagagggttgggttcattaattttgtatcaatcttccttctgagcggtatgcgtggggataccagagtcttttcgggaagcaagagagggttctctccgttttcaatagatctctcactgtcttcttttgagggggaagccggggcctcggcctcagcggctttcaaagcccccaccttcacagccctatcaacaaaaagacctaaccctatttttttcttcattttctaattcttttttgatcgtcgccgccgccactagagatgcctgc

SEQ ID NO: 234421 - DNA, 430 bp, Glycine max
gtaagctaggaaatcggctcgagtgtttgtgaacaagcacctaggagatgatgcagtgcccaaagacattttgatgccaattattgatgcattgttggcgggtggtaaagcaggagcatctgatgttgaagactgtccattgatgtatagatggcatggaactaggtacttgggtgcagcaaatggacttgctggtatccttcatgtgctgctacattttccacttcctagagaggatgctgaggatgtcaacggaactttgaggtacctcatgagtaagcgtttccctcacagtggaaactacccctccagtgaacggaatccgagggataagttagtgcaatggggtcatggtgcaactggcatggccatcacattgtctaaagcagcacaggtatttccaaatgacagagaactacgagatgctgca

SEQ ID NO: 234422 - DNA, 440 bp, Glycine max
cacaaaagaaaaaaaatgggttcttctctgtggacctgtctgattttgttatcacttgcttctgcttccttcgccgccaacccaagagcaccaattgatgtgccatttggcagaaactatgtgcctacctgggcctttgatcacatcaaatacctcaatggtggttctgagattcagcttcatcttgataaatacacaggtactggcttccaatcaaaagggtcctacttgtttggtcacttcagcatgtacataaaattggttgctggtgattcagctggcacagtcactgctttctatttatcatccacaaactcagaacatgatgaaatagactttgagttcttgggaaacagaaccgggcaaccttatattttgcaaacaaatgtgttcaccggtggcaagggtgacagagaacaaagaatctacctctggtttga

SEQ ID NO: 234423 - DNA, 432 bp, Glycine max
gcgatacatttatacaaaacttctaccccaagcacacgcaatggagccgtagacagtcaagtaaaatccaatccacgaaatcatttgatctatggacagcatcgttgtggtaaaggccgtaatgccagaggaatcattaccgcagggcatagagggggaggtcataagcgtctataccgtaaaattgattttcgacggaatgaaaaaaacatatatggtagaatcgtaaccatagaatatgaccctaatcgaaatgcatacatttgtctcatacactatggggatggtgagaaaaaatatattttacaccccagaggggctataattggagataccattgtttctggtacagaagttcctataaaaatgggaaatgccctacctttgaccgatatgcccttaggcacggcaatacataacatagaaatcaca

SEQ ID NO: 234424 - DNA, 441 bp, Glycine max
gttctgggctttggctttggtaagcctctgtggccagctaccttccaatgcccaagcacctgcaactgcgccggcaaactcaccacctacaaccccagctgcaacatcaccatcttccggcacgccactggcggtaacactaccaccaacagtggtggcatcccctcccaccacaagtacaccaccaactacatcccagccacctgcaattgtagctcccaaacccgcacctgtgacaccaccagctccaaaagttgcacctgcttcaagcccaaaagccccaccaccccaaactccacaaccacaaccaccaaaagtatcaccagttgtaactcccacatcgccacccccgatacctccaccacccgtttctacgccaccgccattgccaccaccaaagatagctccaacaccagccaaaacatcccctgcacctgcacc

SEQ ID NO: 234425 - DNA, 418 bp, Glycine max
cgtcacatgcacgcgtacctaagctcagaattcagctcgaggttcaggacggtaaagatggcgaggatggttcagaagaacaagctgtgattggattatggagtggcattgcttggttggttggaatgactgtattcattgctgtgttgtctgaatatgtggtggatacaattgaggatgcatcagattcatggggtttgtctgtgagcttcctaagcataatcttgctgccgatagttggcaatgcagctgaacatgcaggagcaattatatttgccttcaagaacaagctggacatctcattgggtgttgcattaggttcagcaactcagattgccatgtttgtggtcccattatgtgtaatcgttgcttggataatgggtatcaatatggacatgaacttcaacctcttagagac

SEQ ID NO: 234426 - DNA, 399 bp, Glycine max
cgtcacatgcccgcgtacgtaagctaggaatacggctcgagggtttcaggacacgttctgttagtctggatcactctatgtggtttcatcgatccgtaaaagctgatgactgggtgctattcgcgatctttactccaagtgcctatagtgcacgtgtctttgtcaccggccaaatgttcaatcagaagggagagcttcttgtatcattggttcaagaaggactagccaggaaaattaatcccggaaattcagccattaaatctaagttatgaactgctgaaaaatgcacagattagcatgtatccattttatagttattttagaaaattccacgtatccataacatcttaatatctaaattatatatgtaaatttttgtattgctctaaaaaaaacaag

SEQ ID NO: 234427 - DNA, 412 bp, Glycine max
cgtaacatgcacgcgtacgtaagctcggaatacggctcgaggctttttctgtattcagaatgtggaagctcaagttcgccgaacgacggaatccatggcttcggacattgaccaatcacgttggaagacaggtgtgggagttcgatcctaagcttggatcgccgcaagatctcctcgagattgagaaagcccgccagaattttcacgataaccgctttacccagaaacacagcgctgatctacttatgcggatgcagttcgcaggagagaacccaacacgtgaagtcttgcccaaagtcggagttaaagatattgacgatgtgacccaagagattgtgacaaatacattaagaagggccgtaagtttcgattcaactctccagtgccatgacggacactggcccggagatta

SEQ ID NO: 234428 - DNA, 366 bp, Glycine max
  unsure (1)..(366): unsure at all n locations
acagttggctcctgtatttttcacattttctcttggaacaaaaacacactattatggaaggacattgcttcatggaggtgcagagtacaaaggcactggtcgtggttttgtggtgtttcatgccaaatttgctgataactataggctctattctcgcagccattttgttaaagggattgaattgatgattctgcttgtggtctaccatatatttggccatggatacagaggagtggttgcctatattttaattaccgtaaccatgtggttcatggtanggacatggctttttgctccattccttttcaatccatcaggttttgagtggcagaagatagttgatgactacacagaattggcaaaaat

SEQ ID NO: 234429 - DNA, 459 bp, Glycine max
gtaagctaagaaatcggctccaaggaaacaaaaaagggcccctgtgggaaatgggcaaattgcttaacttaaaattgccaaccttttggcaataatccacgtcggattcttggactttacagatcatgtttggacagagtgcttctctcaatacttgggaagatggatgcatcttgacccatgtgaaggaatctatgacaagccattattatatgaaaaagggtgggggaaaaaactaaattatgtaatagccatagcacaagatggagtttatgatgtcaccaaacgatacacaaggaagtggcatgaggtcctatctcgacgtactatccttacagagccttctttgtcaactttactccccaatataacaaaagaaagtcgaagaggctttgcatcccaactactttcaattattgaatcccatgatatggaggaaaacacagaacttgagaggag

SEQ ID NO: 234430 - DNA, 435 bp, Glycine max
atgggttcaacaggtgagactcagattactccaacccatgtatctgaataagaggcaaaccttttcgccatgcaactagccagtgcctcagtactccctatggttctcaaatcagctcttgagcttgatctgttggaaatcatagccaatgctggccctggtgttcacctttccccctccgacattgcttctcggctcccaacacacaaccctgatgcacccgttatgttggaccgtatattgcgcctcttggcttgctacaatatcctctctttttctcttcgcactctccctcatggcaatgttgagaggctctatggtctcgcccctgttgctaagtacttggtcaggaacgaagatggtgtctccattgctgctctcaacctcatgaaccaggacaaaatcctcatggaaagctggtactattttaaagat

SEQ ID NO: 234431 - DNA, 423 bp, Glycine max
acaaggcagaaagcaagctcatcctagagttttaaaaatggcagcagcctcctccatggctctctcttccccatccttggctggcaaggccgtgaagctgggcccatcagcccccgaagtcgggagggtcagcatgaggaagaccgtcaccaagcaggcctcctccggaagcccatggtacggcccagaccgcgtcaagtacttgggcccattctctggcgagcccccgtcctacctcactggcgagttcccaggtgactacggctgggacactgctgggctttcggccgacccagaaaccttcgccagaaaccgtgagctcgaagtgatccactccaggtgggccatgctcggggccttgggctgcgtcttccccgaactgttgtcccgcaacggggtcaagtttggagaagctgtgtggtt

SEQ ID NO: 234432 - DNA, 434 bp, Glycine max
gatggccaccgttccagggcagctcgtgtgggagatcgtcaagaaaaacaattccttcttggtcaagcagtttggaaggggcacccagagcgtcgaattcagcagagagagcaacaatctctacaaggtcaattcgttcaagtactctggtttggcaaacaagaaaactgttactgttcagcctgagggcaaagatcaggctgtgttgttggctacaaccaagacaaagaagcaaaacaagcccgctgcattgctccacaaatctgtgatgaagaaggagttcaggaggatggcaaaagctgttgaaaaccaggtggccaaaaattactacaggcctgatctcaagaacgctgcccttgcaaggttgagtgctgttcacagaagcctcaaagttgccaagtctggtgtcaagaacaggaattgacaaggcctta

SEQ ID NO: 234433 - DNA, 434 bp, Glycine max
aaacactcttcttcatattcttcttcttcttcttgttcttgttctatctgtgacgagcatcatggcctcgagagcagtgctattgttggctatgtgtgtgcttccggccatggttgtggccattcgcccagcaaagaaccctttttgcgtgaagggtcgcgtctactgtgacccttgccgtgctggttttgagacctcagcaaccacctacattgccggtaactgctaaccctttttctctctttactctttttattcttaaaaaaaaaaaatactagtatttatgttatacggttccaagtttcagatctgcttcttaaagtgaatatctgttgcttcaatgcaatctttgagcttttcgttcatatgcttttgttttcttacttaaatttcattcctttacgcttaagaaccttcagtttcgaaaaaatgca

SEQ ID NO: 234434 - DNA, 444 bp, Glycine max
  unsure (1)..(444): unsure at all n locations
cactgctctaatgggtgtcactggtgcaggcaaaacaactctgatggatgtacttgctggtagaaaaactggaggatatgttggaggtaacatcaaaatctctgggtatcggaagaagcaagaaacatttgcaaggatttctggatactgtgagcaaaatgacattcactctcctcatgttactgtgtatgaatccttgctttattcttcttggctccgattgtctctagatatcaatgttgaaaccaggaagatgttcattgaggaagtcatggaacttgtggaattgaaaccactaaggcatgtattagtcggatttcctggtgttactggtctctcaacagagcaaagaaaaaggttgactattgcagttgaacttgtancaaatccttccataatattcatggatgagccaacttctgggttagatgcaagagctgctgc

SEQ ID NO: 234435 - DNA, 394 bp, Glycine max
ccggaatctccgattccggcaaccacattccctcctccaagaaaaaccacaagaagctccttctctctctattggccaccctcctcgtggcggcctccgtggtggccattgttgccggagtaaaaaacaaaaccaaaaactccgacaactccgacaccaccagcacctccctctccctctcccaccactcgcacgtgatcgttaagagcgcctgtagctccacattctatcccgaactctgcttctccgccatagcctctgagcccaacgtcactcacaaagtcaccaaccaccgcgacgtcatccaactctccctaagcatcaccttccgcgcggtggagcgcaactacttcaccgtgaagaaactcctaaccaaacacgacctaacgaaacg

SEQ ID NO: 234436 - DNA, 461 bp, Glycine max
atgcacgcgtacgtaagctcagaatacggctcgaggtgatttcagtgagtgatcggtgttcacttgatctcatcataatcgtcagcgtcaattgaagaagatgccgatcagaaacatcgccgtcggaaggcctgaagaggcgactcaccccgacacgttgaaggcggctttggctgagttcatctcaaccttcatcttcgtgttcgccggctcaggctccggcatcgcctacaacaagctcaccgacaacggcgctgccacccctgccggcctcatctccgcctccatcgcccatgcattcgccctcttcgtcgccgtctccgtcggcgccaacatctccggcggccacgtcaaccccgccgtcaccttcggcgccttcgtcggcggcaacatcaacttcctccgcggcatcgtctacgtcatcgcccagctcctcggctccatcgtcgcctccctcctcc

SEQ ID NO: 234437 - DNA, 300 bp, Glycine max
  unsure (1)..(300): unsure at all n locations
gtaagctaggaatacggctcgagggatgcttcagattgggcaaccaatggaggcaaatatagagtanattacaagtatgcaccctatgttgctgagttctctgacctggtcctgcatggttgtgcagttgattccattgagcatgtggccaagtgtgacagtgccctaagttctgaagaagttccctctggtggtcaccaagtacanataaccanaatgagaaacttcaggttgaggcacatgacatattcctactgctatgacactgttagatacaaagtccctccaccggagtgtgtc

SEQ ID NO: 234438 - DNA, 443 bp, Glycine max
gagagaagaagaaacttaatcgatcatcacttcacttcactaatacatcatggcagacgagacccagaacaagtatgagagctctgaggttgaggtccaggatcgtggtgtttttgactttctcggtaagaaaaaggatgaagaagacaagcctcatcctcaggaggaggtcatcgccaccgagtttcaaaaagtcactgtctcagaccaaggagagaacaagcacagcctcttagaaaagcttcaccgatctgacagcagctctagctcttcaagtgaggaggaaggagaagatggagagaaaaggaagaagaagaagaaggaaaagaaagggctgaaagagaagatcgaggagaaaatagagggtgatcatcatcatcacaaggatgaggacacaagtgtccctgttgagaaagttgaagttgttgaaacagcacatgctg

SEQ ID NO: 234439 - DNA, 406 bp, Glycine max
  unsure (1)..(406): unsure at all n locations
tttgagttccaacacctttgctttggaaattgattccaactgatcaagtgaaagagattcttcaggcttcatctttgtttctttcacagaatttgtccaatttagagcagagaaaatgaatggccacaaaaagttgaattctccaaggggagaggttggagagatagacactagggcaccattccaatctgtcaaagctgctgttagtttagttggcgaagtagccatcactagagacagattttctgtcaagagaagatcatcagagaatgtatttgagaaggagacgcagcttatcttggcccaaaaggaattaancaagataaagaaacacgtggataatgctgaggcgatcaaatgcaaggcactttctgagcttgagaatgccaaggagatctttcacagt

SEQ ID NO: 234440 - DNA, 404 bp, Glycine max
gggctttgcagttagttaggcccaataatatattcaaggcccttgatcttgttaaccaaaacggaacttttttttccttccccaataattggtgtaaccgtcgtcccggtgcttaagtgtgggtttggagatgcaatgttatatgtgaataatgtgatactaatcctcatggagaaacaaggaaacaaagagatttgatttatttcaaaaaaaaaaaaaaaaaaaaaaaaaaaaaaaaaataaaaaaaaagaataaaaataaaaaaaataaaaaaaaaaaaaaaaaaaaataaaaaaattataaaaaaaaaaaaaaggggcggcccccaataattgacccctccaacccggaaataatttcgggccggttacttgaggggttacaatttttcccaaaagggggc

SEQ ID NO: 234441 - DNA, 415 bp, Glycine max
ctcaaacctgatatggagtttgtggataccagaaaactacaattacaacatcaacaacaactgcaacaacagccgcaacattttcatgtgttggcagtggacgacagtgtcatagataggaagctattggagaggctccttagaggttcttcatgcaaagttacctgtgtggactctggagacaaggctttgaaatatcttgggctaatagatgagcttgatgatacttcttcaacctctttagaatcagaatcttctcatcctccacctcaaccattacaacgagagggaatcaaagtgaatttgatcatgacagactattgcatgcctgggatgagtggctatgatttactcaaacgagtcaagggatcttcttggaaagatgttccagtcgtgattatgtcatcagaaaatg

SEQ ID NO: 234442 - DNA, 512 bp, Glycine max
gacaccgaatgaactagtgatgcataggcgagcaatgacgtcacatgcacgcgtacgtaagctcggaatacggctcgagtgaatgtatacatcctaagtgaagccttgttcgagggcgtattctcatgattggacagagtgcccctttgttcatccaggggaaaatgcaaggcggcgtgatccaaggaagtatcattacagctgcgtcccttgtctcgagtttaggaagggatcttgcagcaagggcgatgcctgtgagtatgcacatggcatttttgagtgctggcttcaccctgcccagtaccggactcggctttgcaaagatgacggtcgatgcacaaggagggtatgcttctttgctcacaagcttgacgagcttcgctccttgtatgcttctactggttctgctattccttccccgaggtcctattcagctaatgcctctgcattgcagatgggttcagttaacccaattgcactttgttctccacctgtcctgacgccaactaacc

SEQ ID NO: 234443 - DNA, 431 bp, Glycine max
aagctcggaatacggctcgagtctctctctaacacggagtgatggctgtgcagctgtgggaaaccctgaaggaagccatcgtagcctacactggcttctctccttccaccttcttcacggtgctggcgcttctttttgccgtttactacgtcgtcacgggtctctttggctcctccgacgatcaccatcaccgccaccgccacgtcgaggaggaggaggagatgccgcctctgcgccccccggttcagctcggcgagatcacagcggaggagctcaaggcctacgacggcaccgatcccgagaagcccttgctcatggccatcaaggcccagatctatgatgtctcccagagcaggatgttttatggacctggtggacctttatgcctattttctggcaaggatgctagcaaagccttagcaaagatgtct

SEQ ID NO: 234444 - DNA, 363 bp, Glycine max
cattaagtaagcattctacaaatatcttggttcaagcgccaagaagtaaagctgaaattcagagggaacttttgggtttaaagagaaaggcccttgctttcaagcgtgaagggaaagctgaagatgctgaggaagttcttaaaatggccaaagcattagaagcccagatggcagagatggatgctgcaaagagtaaagcacaagttgaggccactgtcatgaaagacagacttttcaatcctccagttgatgaagaaagggacatggttgtttcagaacaggatatgcatgaccctacattgaattcaatgcttactaatctaagttggaaggatgatgaatctgaacctatgactataaaag

SEQ ID NO: 234445 - DNA, 372 bp, Glycine max
  unsure (1)..(372): unsure at all n locations
gtttatgtggatgatggcaagaccaagtatttggatcggtgttatgggaaggttggtangaggaagctgaaggagagattggttcaaggctgtgtcccaaatggggttaggtttcacaaggcaaaggtgtggcaagttcagcaccaagagtttgagtcaaaagttttgtgtaatgatggggtggaattgaaggggagtttggttgttgatgctagtggattcgcaagtaattttgtagcatatgacaaggtgagacaccatggttttcagattgctcatggtgttttggctgaggtggatgatcacccttttgatttggacaagatggttttaatggactggagggattctcatttggggaatgaaccctac

SEQ ID NO: 234446 - DNA, 427 bp, Glycine max
atgcacgcgtccgtaagctaggaatacggctcgagaatatttgtgactcggtcgcggggttggtcttatgttgaacgtcctggtattttgctagtgacagcttttgtgattgctcagctgattgccactttgattgcagtatatgccaattggagctttgctgcaattgaaggcataggttggggttgggctggtgtaaaatggttatataacataatattctacattccacttgaccccatcaagtttttaattcgatatgctttgatcgggagggcttgggagcttgtcatcgagcacaggattgcattcacaaggcaaaaggactttggaaaggaacaaagggaacttcaatgggcccatgcacaaagaacattgcatggacttcatccacctgacaccaagatgttcaccgagcgcacacatt

SEQ ID NO: 234447 - DNA, 438 bp, Glycine max
gggccttccatggcttccgcttgtgcttcctctgcaattacagctgttgccatctctacgccgagttccgggcagaagaatggatcaggaggttgttttcttagtggaaggaaattgagggtgaaaaaggagagagcagcaattggaggacgatcgatgggcactacagtgtgcgcagttgctgagcctgacagacctctatggttcccaggcagcacccctcctccatggcttgatggcactctacctggagacttcggctttgaccctcttggtcttggatctgacccggagagtctgagatggaatgttcaagcagagctagtgcactgcagatgggcaatgttgggtgctgctggcattttcattccagaattcctaacaaagattggtgtcttgaacactccttcatggtactcagctggagagctggaatac

SEQ ID NO: 234448 - DNA, 440 bp, Glycine max
tgcaagaatggcacttcgttgcttggtgatgtccctttctgttctcttcactcttggtcttgcgagagaaagccatgccagagacgaagatttttggcatgctgtttggccaaacactcccattccaagttcattgcgagatcttctaaagcctggccctgcaagtgttgaaatcgatgatcaccctatgcaaattgaagaaacacagtacccgaaaaccttcttctataaagaagaccttcatccaggcaaaacaatgaaagtacaattcagcaagcctccctttcaacaaccatggggtgttggtacatggttaaaggaaattaaagacactactaaagaaggatatagttttgaagagctatgcatcaagaaagaagccattgagggagaagagaagttttgtgcaaaatccttgggaacagtaattggttttgcca

SEQ ID NO: 234449 - DNA, 376 bp, Glycine max
ctccaaacctacctttctatcttttctttttcatcggagcattatttgataccctcttgagtcctctctgcagcaacgcatttttcctcattctcttaaacaatttaacttctcctcgtttgatctgcataaaattgcattaatataaaaaatgaagaagtttgtactaaagttagatttgcatgatgacaaggataagcagaaggccttgaaaacagtttcaactctttcaggaattgatgccatagccatggatatgaaagagaagaaattaacagtgataggaacagttgatccggtaactgtggtgagcaaattgcgcaaatactggaaggcagacatagtagcagttggaccagtgaagggaactgagaag

SEQ ID NO: 234450 - DNA, 411 bp, Glycine max
gaactaacaaatgggtgcttctacggtgatgaaggcaaacctgagattattctccccactccaagatctgaaggggacatactttcttccccgcatttaaaacccttcacattgcatgatcttaagaaggccactagaaatttccagcttgatagtcttattggagaagggggatttggttatgtgtataaggggttgattaatgatggtaaatcctttgggcctacaatgcctaaatctggaactgttgtagctgtgaagaagcttaagcctgaaggttttcaagggcataaggagtggctgtctgaagtcaactatcttggacaacttcgccatccaaatcttgtcaaacttattggatactgtctagaaggagataaccgacttctagtatatgagtacatgcccaac

SEQ ID NO: 234451 - DNA, 445 bp, Glycine max
cagaatcagaataggtcgttggagcaagctggaccctccggctccggtggacaggtgggagtgagagtagtgaattggagtggttccgataggctttgcataagccctaagcgagatcacaagcccgaaaactatgacgaccttcaattcgagttcaatcctaatatcttcgcctctctcgagcactatttgcctcctcatatgctcaacctctcacgtgatgttaagcttcactacatcaggaacattcttcttcgctatttgcctgagaatgaccgcatttggattcaaaagctgagggaatacaggctaaagatcatattgaattatccaccgctgcataaggagatatttactatggatgctgagagctttttcgtaccatcatttctcagagcaataaaagaaaacacagaagcgagttttagaagtataatggctgaac

SEQ ID NO: 234452 - DNA, 443 bp, Glycine max
gcagaagaacaagtagttgagaactaagaaggagaagcaaatggcttcctcaatgatctcttccccagctgttaccactgtcaaccgtgccggtgccggcatggttgctccattcactggcctcaagtccatggctggcttccccaccaggaagaccaacaatgacattacctccattgctagcaacggtggaagagtgcaatgcatgcaggtgtggccaccagttggcaagaagaagtttgagactctttcctacctgccagaccttgatgatgcacaattggcaaatgaagtagaataccttcttaggaaagggatgattccttgcttggaattcgagttggagcacggtttcgtgtaccgtgagcacaacatgtcaccaggatactacgatggacgctactggaccatgtggaagctgcctatgtttggttgcactgatg

SEQ ID NO: 234453 - DNA, 437 bp, Glycine max
  unsure (1)..(437): unsure at all n locations
gtaagctaggaatacggctcgagattganatggcttctacttcaaatgccatcgtcaattgcacctcttcttcttcgtttgagtatgacgtgtttgtgagcttccgcggtgaagacacacgcatcagcttcaccgcttttctttttggagctctgaatggacacggcatcaaggccttcaacgatgatattgacacacgaaaggcgaatccatagcaccacagctaatacgagccattgaagggtctcatgttttcgttgttgtcatttcaaaggactatgcatcctcagcttggtgcctgcgtgaactagcacatatctgggattgcatgcaagcatcacatagacctcttctgcctattttttatgatgttgatccatcacaagtgcgaaatcagagtggagactatgagaaagcctttgcccaacaccaataaa

SEQ ID NO: 234454 - DNA, 476 bp, Glycine max
  unsure (1)..(476): unsure at all n locations
atgcacgcgtccgtaagctaggaatacggctcgagatcacctaatcacttcccaacttcccctgtaaatcactttaatttcccacaaggttttaaaaaatggctgatcctaaggaaatccaacccctggtggttaaaaatggaactggaatggccaaggcggtttttgcaggtaataaccccccaagggccttttccccaattataattgggcaacaacccaaaaccggtgtaatggttggaatgggtcaaaaggatgcttacttgggtgatgaacctcaataaaaaaggggtatactcaccttgaagtatccctatagagcatggcatagtcagcaactgggatgatatggagaagatttggcatcacacattttacaatgagcttcgtgttgcccctgaagaacaccctgtacttcttaacgaggcacccctcaatcccaaggccaacanagagaagatgacccaaattatgtt

SEQ ID NO: 234455 - DNA, 434 bp, Glycine max
ccagtccagaagaaactatccctctaaaggcccacccacctctttttctctctctctctctctctctctaaacacccacaacacaacaaccgaatccttttttttttgttttgttaaacaaaacagagaaaaaaaaagttgtgaattttccagttgcgtttctgttccatacaatttcgatttcaatggcgaggcctaatcaggaggcagttgagacgttcgtcagcatcactggtttgccagaagcagtagcgctacaaaaacttgaggagcatggtggtaatctcaatgaagcagtcaatgcacattttactgaaggagacagaaatctaacgaccggttctcacaacagctctgctgtatttcctcaagatgatttcatggatatagatgacgaacatgatgcagaaattcccagaagaattccaccacta

SEQ ID NO: 234456 - DNA, 408 bp, Glycine max
caaatggctggagtgacaaaggaggaagagaggggtagtcctagttggggtgcttcattttttacgcagacaacagaggatgtggctagagctgttgccactgctatgaattctcagaggccatctgtggtatattcattgaaaaatgatcatggtggcagccaacttcaaaggctgcagtatcaagttacgaaaatgataaaaggattttctagccctccagaagttaaatatacaaattacaatccggaaatcttgacaactcagaagcgtcaatgggctgcaaactttcagttgcagtacacggaccataagtcttggaaggagccaacaaagctgtttgaaagcatggtggttgctggacttcatcctaattgtgatattcaggcactgcaaaggcaatgtttt

SEQ ID NO: 234457 - DNA, 429 bp, Glycine max
gcgattggaggttctgaaagcttctacagtgtatttgaagctgagttagcagatgttatccctgtggtcaagacatccattggtggtactcgtatcattggtcgtctttgtgctggaaacaagaatgggcttctcttgccccataccaccacagaccaagagcttcatcaattgagaaacagtctacctgattaagttgttgttcagcgaatagatgacagattatctgctctgggaaattgtatcgcatgtaatgaccatgtggccctcatacacactgatcttgacagggatactgatgagatgattgcagatgttcttggagtagaagttttcaggcagaccattgctggtaatattcatgttggtagttactgtgccttctcgaacagaggtggcttggttcaccctcatactttcatagaagac

SEQ ID NO: 234458 - DNA, 419 bp, Glycine max
cgtcatatgcccgcgtacctaagctcggaattcagctcgaggtgtattcggatgaacaagcagagagtgtgtagtgcgtagggtttaagatcgcgttctttagatgaacgagttatctcagaagcagactcttgttgtccatgggattgctggtgctggttcggtggctttagccaccgccttcacttaccctcttgacaccatgaaagtcctcattcaggttggttccagcaccggtaaagaattggaccatgcccatgttttgaccagactactctctgtatccggcaatgcaggtttgttcaatggttttggctggttgttggttggaaggatttttggtctgggagcacgatttggggtttatgaaatcctgtctgccttttataaagatggtcgggaaaataattatttgtttg

SEQ ID NO: 234459 - DNA, 447 bp, Glycine max
gcggacgtaagctaggaattaggctcgagctgctgcataggaagaaaccctagcctctcaccctccctgcgacacgatgcagatcttcgtgaaaaccctaacgggtaagacgatcacccttgaggtggagtcttctgacaccatcgacaacgtgaaggccaagatccaggacaaggaaggcatccctccggaccagcagcgcctcatcttcgccggaaagcagctggaggacggccgcaccctcgccgactacaacatccagaaggagtccaccctccacctcgtcctccgtctccgcggtggcgccaagaagcgcaagaagaagacctacaccaagcccaagaagatcaaacacaagcacaagaaggtcaagctcggcattctccagttctacaaggtcgacgattctggaaaagtgcagacgctccgcaaggagtgccccaacgc

SEQ ID NO: 234460 - DNA, 406 bp, Glycine max
aagctaggaattaggctcgagctgctggtggacgtcatacgctagcgttatcagatacaggactggtgtgggcttggggctatggaggtgaagggcagcttggtttgggttccagaatacgcatggtttccactcctcatcttgttccttgtattgattcctcttattatagtaaagatagatctgctacactggctcgaggaaacatgggttcagagggacaaacttttagagttcctggaagttatataaagagaattgcttgcggaggtcgacatagtgcagtaattacagatgctggagccttgcttacttttggttggggactctatggacagtgtgggcaaggaattaccgatgatgaactaagcccaacttgtgtatcttccatattgggtatccacat

SEQ ID NO: 234461 - DNA, 397 bp, Glycine max
tgcacgcggacgtaagctcggaatacggctcgagctcattaattgcaagaatggcacttcgttgcttggtgatgtcgctttctgttctcttcactcttggtcttgcgagagaaagccatgccagagacgaagatttttggcatgctgtttggccaaacactcccattccaagttcattgcgagatcttctaaagcctggccctgcaagtgttgaaatcgatgatcaccctatgcaaattgaagaaacacagtacccgaaaaccttcttctataaagaagaccttcatccaggcaaaacaatgaaagtacaattcagcaagcctccctttcaacaaccatggggtgttggtacatggttaaaggaaatttaagacactactaaagaacgatatagttt

SEQ ID NO: 234462 - DNA, 364 bp, Glycine max
tccgagtccgagtttcaactcggtgtagcaatggcgatgatgcaaggtgtgcagaagaacacactgtacgtgggagggttagcggaggaagtgaacgagtcgatcctccacgcggcgttcattcccttcggcgacatcaaggacgtgaagacgccgctggaccaggccacgcagaagcaccgctccttcggcttcgtcaccttcctcgaacgcgaagacgcctccgccgccatggacaacatggacggcgccgagctctacggtcgcgtcctcaccgttaattacgccctccccgaacgcatcaagggaggggagcagggctgggcggcccagcccgtttgggcggatgcggatacctggtttg

SEQ ID NO: 234463 - DNA, 440 bp, Glycine max
tgaatcgtaagcagcggctaccctaatcctctcctcttcctctctactaatttcagctatggccgacgaagctgtggttgttccagatcccacccagatcgatgtcaagctctttaaccgctggagcttcgacgatattgagattactgacatttctctggctgattatatcggagtggcgacatccaagcacgccacgtatgtgcctcacaccgccggcaggtactcggtgaagcggttcaggaaggcgcaatgccccattgttgagaggctgaccaactctctcatgatgcacggtagaaacaatggcaagaaactcttggctgttaggattatcaaacatgctatggagattattcatttgttgactgaccagaaccccattcaggttattgttgaagctgttgtcaacagtggtccacgtgaagatgcaacaagaa

SEQ ID NO: 234464 - DNA, 424 bp, Glycine max
cgtcgaatgcacgcgtgcctaagctcagaattcagctcgaggggtggagcatacttagaaacagcaactatgtctctcatgcagcttactagctcccctgttggctcactggtccgtttcattgtaatatttgctttatggtacagaaccatggctttggccaagttgccaccaaacgcttcatcagttccagcagttttagcgtttggagattccatcgtggacccaggcaacaacaacaacataaaaacattgatcaagtgcaacttcccaccttatggaaaggattttcagggaggaaacccaacgggtcgattttgcaatggaaaaattccttctgacttaatagttgaacaattgggtattaaggagtatttgcctgcatatttggatccgaatctcaaatctagtgatcttgttaccg

SEQ ID NO: 234465 - DNA, 369 bp, Glycine max
atgactcaaccctttggaacattttaggccgacaattggagaaaaattattctggacaagcatgaggatacaatgagcaagatgggagcaattttggcatcaggaatccttgatgctggtggcagaaatgtgaccataaggttactttctaagacaaaacatgataaaattactgcagtggttggtcttgcagttttcagccagttttggtattggtaccctcttatctattttataagcctgtccttttcgcctacggcttttattgggttgaactatgatctgaaatctccaaagtttgagttcttgtcacatgcaaagccttcactttttgaataccccaagcctactactgttcccaccactact

SEQ ID NO: 234466 - DNA, 335 bp, Glycine max
  unsure (1)..(335): unsure at all n locations
ctcggatctaggttcacctctgctcgcctaatttaaattccgtccaatttcaaaaaccaaaacaagccacacaagttcatggcaactcccaataacagactctctcttgccatggagagaactgggcaatgggttttctctcaagacataccaactgatgttatagtggaagttggagaaacaactttctctctgcacaagttcatgctagtggcaaaaagcaactacataagaaaactgatattggaatcagatgagagcgaactcaccagaatcgacctctctgacatnacaggaggcccttcaatcttcgagaaaaccgcgaaattctgtta

SEQ ID NO: 234467 - DNA, 409 bp, Glycine max
ccttgttcttctttctctattgtctatagtcatctccattgttctcttcattacccacacacacaaaagaaacaacactccaagaggaccaccaggtcctccacctcttcctctcatcggcaaccttcaccaactccacaactcatccccacatctctgcctatggcaactcgccaaactccacggtcctctcatgtcgtttcgcctcggcgccgtgcaaaccgtcgtggtttcatcggccagaatcgccgaacaaatcttgaaaacccacgacctcaacttcgcttccaggcctctcttcgtgggcccgaaaaagctctctttacacggggtggacatgggcttcgcaccgtacggcccgtactggagagaaatgaagaaactctgcatcgttcacctcttcagcgcg

SEQ ID NO: 234468 - DNA, 440 bp, Glycine max
gacgtcgcacgtacgcatactcaaactctcggtcaagtggatgggtttcgttagcctgtgtcttctgtctgtatcagtatcaggtctgctccaacgcctagagcaccctgtcaaagctgatggctcacttagccttatggtaattggagactggggaaggaaaggaacatacaaccaatctcaagttgccactcagatgggaagggttgctgcaaagttaaatatcgactttgtgatatccactggagacaatttctacgatgatggattgactggtatagatgaccctgcatttgaaatttccttctcaaaaatctacactgccaagagcctccaaaagcaatggtataatgtgttgggcaaccatgactacaggggtgatgttgaagctcaattgaatccaatccttcagaaaattgatcctagatggatctgccaaa

SEQ ID NO: 234469 - DNA, 403 bp, Glycine max
gtgcagcatggagctctgccgcctccaacaaaacagagttcagaacacaaaccctcgaaccgaacgtttttgagggtcagtctctccttcttcattcacataatcgcttcttattttctctcagctttcaattgggatctcaaattatgtagctccacggaatttatcttgttttactcttatagtccctttttcttaattttctgtggcaacaaggttgataaagcacgatggttcagtacaattttaagaagattaccgtggtgccaaatgggaaggatgtggtcgacattatcctctctcgcacccagcgtcagacaccaaccgttgtgcacaaaggatatgcgatttcacggctgcgccaattctacatgcgcaaagtgaagtatactcatcagaattt

SEQ ID NO: 234470 - DNA, 270 bp, Glycine max
gggaagaaagtttaagccttagctagaaaaaggagagtgagtagtgagttttttgagaagcagaagaaaggaagaaaggtggagtgagtgaattcaaaaagatcacccaccatggggaggcctccttgctgtgacaaagttggcatcaagaaaggtccatggacacctgaggaggatatcatccttgtctcttacatccaagaacatggtccaggaaattggagatcagtgcctactaatactgggttatcaaggtgcagcaaaagttgc

SEQ ID NO: 234471 - DNA, 327 bp, Glycine max
cgcagcaaacggtcaagatggctaacactgacgctctcagctttttcaaggatttcatggccggtggcatctctgccgctgtgtcaaaaaccgccgtcgctcccatcgagcgtgtgaagctgctcctgcaggttcaggcagcatccacccagattgccgccgacaagcagtacaaaggcattgtcgactgctttgtccgtatccccaaggaacagggattcgctagcttctggcgtggtaaccttgccaacgtcatcagatacttccccacccaggctcttaactttgccttcaaagatatctacaagcagattttcctccgtggtg

SEQ ID NO: 234472 - DNA, 325 bp, Glycine max
  unsure (1)..(325): unsure at all n locations
tagcaatctcatctcattcatttcaatggcaactcaaggtcaagtcattacctgcaaagctgcggtggcctgggaacccaacaagcccttaactgtccaagacgttcaggtggctccgcctcaggccggcgaggtccgtgtccaaatcctcttcaccgctctctgccacaccgatgcttacacttggggcggcaaggatcccgaaggtctcttcccctgtattcttggccatgaagctgcagggattgtggagagtgttggagaaggtgttactaatgttcagcctgnggatcatgtcattccctgttatcaggctgagtgtggg

SEQ ID NO: 234473 - DNA, 407 bp, Glycine max
gaagtatctgaagtcaaagggcaagatgttgtttgtattataaagaacacagctacattggctgggtcattgttcactttgcatgcctctcagattcatattgatttgcccactctcactgagaaagaccaggaggttataagctcctggggtgttaaaaacaatattgattttctgtcattgtcatatactcgacaagccgaagatgttcgccaggcctcgtgaatttctttcaaagttaagtgatctcagccaaactcaaatttatgcacagattgaaaatgttgagggattgacccattttgatgagaatctacaagaagctgatggtattatcctttcccgtgggaatttgggtattgatcttccaccagagaaggtttttttatttcaaaaatctgcccttt

SEQ ID NO: 234474 - DNA, 508 bp, Glycine max
  unsure (1)..(508): unsure at all n locations
cggggttctgaatgaatcaggtgcatagccaagacaatgaagtcgcacgcacgcgtacgtaagctcagaatccggctccaagaaatcctaataagaacgaaaaaagaaaagaaaagaaaaaagagcgatttttcccccaccaaagaagaaccaaaacaatggcggttaaactcaccgatgaacagatctccgagttcaaggaagccttcaccttgtccgataaggacggcgatggttgcatcacaaccaaggagcttggaactgttatgcgttcattggggcaaaacccaactgaggcagaactccaagaacatgatcaatggaattggatgccgatgggaaatggtaccattgaccttccctgaagttcctaaaacctcaatggctaggaagatggaaggaaactgaattctgaaggagggagctggaaagaaggcatcccgggtttttcaacaaggattanaaatgggttcatctctgccgctgagctccgtcatgtgatgaacaa

SEQ ID NO: 234475 - DNA, 398 bp, Glycine max
caaaaagaaagaatcccaggcgaggagaaagatggaggggaaggagcaggatgtgtcgttgggagcgaacaagttccccgagagacagccgattgggacggcggcgcagagccaagacgacggcaaggactaccaggagccggcgccggcgccgctggttgacccgacggagtttacgtcatggtcgttttacagagcagggatagcagagtttgtggccacttttctgtttctctacatcaccgtcttaaccgttatgggagtcgccggggctaagtctaagtgtagtaccgttgggattcaaggaatccccttggcccttcggtggcatgatcttcgccctcgtttactgcaccgctggcatctcagggggacacataaacccggcggtgacattt

SEQ ID NO: 234476 - DNA, 405 bp, Glycine max
aagaaaagaacatcctcaattttctgagcagccagacactctctctctgtctctcgagaattctcagtttgcagagaaaatctgaatcatgtcgtggcaagcgtatgtcgaggatcaccttctgtgtgacatcgaaggtaaccacctcactcacgctgctatcatcggccaagacgggagcgtttgggctcagagtaccgagttccctcagttcaaacctgaggagataactgcgatcatgaatgactttaatgagcctggatcacttgctccaactggattgtaactcggtggcaccagatatatggtcatcgagggtgaacccggtgctgtcattcgagggaagaagggtcctggtggtgttactgtgaagaagaccggtgcggccttgatcattggcattta

SEQ ID NO: 234477 - DNA, 457 bp, Glycine max
  unsure (1)..(457): unsure at all n locations
cgtaacatgcacgcgtacgtaagctcagaattaggctcgaggccaaacaaaccaagcagtattataatagaaagaggacacaaagtgaaagagaagggagctatagccataaggagaaaaactttcaaagaggtgaaagcaaaagagttcttcttttccttttttatatatacttgggtgctaagctgtgtgagttcattgacaagcctgaaatggcaactatgctgacaaaggagcatggtctgaacctcaaggagaccgagctttgcctcggtttgcctggtgggggaagcggcggcggcggcggtggtgaggtggaaactccaagggccactgggaagagagggttctctgagactgttgatctgaaacttaatcttcattccaaggaagatctgaatgagaatctgaagaatgtctcaaangagaagaacctccttaaagattctgccaagcc

SEQ ID NO: 234478 - DNA, 412 bp, Glycine max
tgcacgcggacctaagctaggaattaggctcgagcatcaattggatccattgaccacattgaaggcacgtgtgaacaactttggcaggacaagtgctctgatccagcatgagtggcgtcccaaatcgttctttaccatatctggtgaggtagacaccaaggccattgaaaagagtgctaaggttggattgggtttggttctcaaaccctaagaattttgatccatcctggcaagagcattgagtaggtgttaggaagcgtatagtctgtgagactaaattatttccttgaagttggttctcttcttgggtaagaagtgttcatggagttttcgttgcatttgagcaattcaaccttgtaaaaataaataggctttctataaaacacatgtgactttttaaatgcccaaagct

SEQ ID NO: 234479 - DNA, 411 bp, Glycine max
cggaaacttctggtgatgattgagagtgatcaaggagcattaactgcagaagagcgtgaagctgcaaggaaagagtgttttgagtctgctcaagctggggaaaatggcactgaaagtgcagaccaaatggagaatggtggtgaggatgaagataaagatgatccactttcagatgagcattatggttatccaaaagctgaatcagataaatgggcttcctgcatcagagttcttgatccaaggacaggaaatactacttgtcttttggagcttcaggaaaatgaagctgctttcagcatttgcaccataaatttccatgataaggaatacggaactcttttagctgttggcactgcgaagggactgcaatttttgcccaaaaggaccataactgctggattcattcatatt

SEQ ID NO: 234480 - DNA, 401 bp, Glycine max
gtcactgacctatcttggtagagatttgaagtttaaaccttcaaattaatcaaaccattttaatttgcctatagattctgagtcactgctgctatggcgctacgcgtacttcttgtgttggggatgttgctgatgttgtgccttgttaaggtttcatctgatccaaagatagaagaagaaatactggaagcagaagaagaactgcagtttcccgataacgagccacttatcgtgagagacgcgaacagaaggctaatgcaagatatggattgtggtgggttgtgcaagacgaggtgcagtgcacattcgaaggccaactttgttcaccagggcttgtggcacgtgctgtgtgaggtgcaagtgtgtcccacctggtacatctggaaatagggaactatgtg

SEQ ID NO: 234481 - DNA, 399 bp, Glycine max
tcctgatatcagaaaaagaaaaaagaaaaaaatgtctctagtgactgcagagatcaaagccaaagcagaggtgtatcatggagatgaactctgccaagagaagtcaaagttgctgctaaaggaggtagggctacctaatgggcttttgccattgaaggacattgaggaatgtgggtatgacagggatagtgggtttgtgtggctgaagcagaagaagagcacaaaccacaagtttgagaagattgggaagctggtttcctatgctcctgagatcactgcctatgttgaggttggtaagatcaaaaagctcactggtggtaaaaacaaaggacttccttggtttggatcacactcagtgagatctttgttgatgatcctcccactggcaagatcactttc

SEQ ID NO: 234482 - DNA, 399 bp, Glycine max
cttcctcaccgattgctagaatggaatttcgatgctcagtcatctcttttaccattctcttctctcttgctcttgcaggagagagccatgtccatgcatcgctacctgaggaagattattgggaagctgtttggccaaacactcccattcccactgcactgcgagagcttctaaagcctctccctgcaggtgttgaaatcgatgaactccctaagcaaattgatgatacacagtacccaaaaacattcttctataaagaagaccttcatccaggcaaaacaatgaaagtacaattcaccaagcgtccctatgcacaaccttaagggggaatataaatggttaacggatattaaagacacctctaaagaaggatatagttttgaagagatatgcatcaag

SEQ ID NO: 234483 - DNA, 409 bp, Glycine max
  unsure (1)..(409): unsure at all n locations
tagcaatctcatctcattcatttcaatggcaactcaaggtcaagtcattacctgcaaagctgcggtggcctgggaacccaacaagcccttaactgtccaagacgttcaggtggctccgcctcaggccggcgaggtccgtgtccaaatcctcttcaccgctctctgccacaccgatgcttacacttggggcggcaaggatcccgaaggtctcttcccctgtattcttggccatgaagctgcagggattgtggagagtgttggagaaggtgttactaatgttcagcctgnggattatgtcattcccctgtaacaaggctaattgtggggagtgcaagacttgcaaatcagggaagacaaacctatgcggcaaggttcgttccgccactggagttggggtcatgctcaatga

SEQ ID NO: 234484 - DNA, 393 bp, Glycine max
ccccactccatcatttattatactttcttcttcttctttattattgttgattaatataacatacacccacatatttcatatgggtacttgttaatttgggtgtggattgttggtttgttacttgttttgttccgttcaggtgattgtttgattgagccttgaagaaatggaccacagcgctgatgcacatcgcacggacttgatgaccataacgcggttcgtgctgaacgagcaatccaagcaccccgagtcacgcggcgatttcaccatcttgctcagtcacattgttctcggttgcaagttcgtttgttccgctgttaacaaaggctggccttgctaaacttattggactcgctggagaaaccaatgttcaaggtgaagaacagaataaac

SEQ ID NO: 234485 - DNA, 407 bp, Glycine max
  unsure (1)..(407): unsure at all n locations
cgcgccggtggacattccggcaatgcacgtcgtgatgaacggcggcgactctgcttacgtggcgcttcttccgtcggggttcgccatcgtgcccgacgggtccgtcgaggagaacggtggcgcgtcgcagcagagggcggcgagtggcgggtgcctcctgacggtggcgtttcagattctggtgaacagcctccccacggcgaagctcacggtggagtcggtggagacggtgaacaacctcatctcctgcaccgtgcagaagatcaaatcagcgcttcactgcgaaagctgaaagtcacttgaatcgggctttgtcnattattattattattatttttgttttggagaatttacgttacattttgtagttaaaggtggcgcgtgtgaaggacgcnaggggtgggggt

SEQ ID NO: 234486 - DNA, 361 bp, Glycine max
  unsure (1)..(361): unsure at all n locations
gaagatcatggcttctctagcaaccttggctgctgttcaaccagctacgatcaatggccttgctggaagttccctctctggaactaagctctctttcaagccctctcgccacagtgtcaaatccaagaacttcaggttccattccatgcatttccataaattgctatatatatatatatatacacacacacatacatacaagaattttgcataaaagaaatatccttgtatattatgattcgcatgtgttgtaattgtatgctaaaacagtgtaactaagcattacaggagtggtgccgtggtagcanagtatggtgacaagagtgtgtactttgattttggaggatctgggcaacactac

SEQ ID NO: 234487 - DNA, 432 bp, Glycine max
gcccattgggaagagtcacggaagttttcgcaatcctacacaattgagaggggttcttctactaataagggtaccacttcctccagtcattctgcatcagtggatcaagtggagtaccatgaattgcctagtgatgaggggcaggtacaagtgacttcagatgacaaattgccccgtgaagaagaaaagaatctcttgcaagctatgtgcacggttgatttttggatgctgtttgtgatcatgatatcagggttgggttctgggcttgcaactataaataatatgagccaaataggacaatcccttggatatagcgccattgagattaataatttggtgtcactgtggagtatgtggaacttccttggtcgttttggaggtggccatgtatcagattatatcatgcacagaaaaggtttgcctaggcccctg

SEQ ID NO: 234488 - DNA, 373 bp, Glycine max
tgttgtcaacggaagacccttctcagagaccctcgttgaagtcctctacaacatcaacgagcagctcctaactgaggacgtagacatccctctcacaaaggttaggcctgtcaagaaagttgcacttgttgtggtcaccggcgaccgtggtctctgcggcggtttcaacaacgcaatcataaagaaagctgaggctagaatcagggaattgaaggagcttggcttggaattcactgtcataagtgttggcaagaagggtaactcttatttcatcagaaggccttatattccggttgacaggtttctagaaggtggcacacttccaactgctaaggaagctcaaggcattgctgatgatgtttctcactctttg

SEQ ID NO: 234489 - DNA, 479 bp, Glycine max
cgtaacatgcacgcggacgtaagctaggaattaggctcgagagccaatcttcctgataatttaccttcaaatattgaagctatggctcattcattcattttgacactaattgtcttacgcatgaagaacctgaaagacagagataacctggttatccgcttcttccagcttcctctgtctctctggactatgttgttggaccaaagtaatgcaggaataatgccccctgcttgccagaggtctgtctatgtattgtctgctggcatgttggcgtttgcctgcaaaatatatcagattcatgatctgaatgatgtgtttgcgtcattgccaatgtctgatgttgatccattcttgagtgtcagtgatgattatcatgtatatgctaagatccatgtggatgtgagagaatatggtactgctgctgataatcagttagcatgttcaatgttgtcagagttacagaacaaaatacgggaatg

SEQ ID NO: 234490 - DNA, 326 bp, Glycine max
ctgatgttatgtcttctgtgaagcatgatgactcacgttcttactttcttcagttaccaatgcaaactgtaaagcataatgtccttctaaagatgagtgtgcaaatgaatcgtgaaaacatgttagtcctttactggagattcatcatgcagtcgagtgtgtactccccaataaaattcatcatgcggtcagaagtttaatccccaaccaaaattgatttgtgtaatcaagtaacttgaagcatagcaatgattgattcatgatggggcaatggggggttttgtggctaactatatcctccaactaattcattggttaaaggtagg

SEQ ID NO: 234491 - DNA, 382 bp, Glycine max
  unsure (1)..(382): unsure at all n locations
ccctctctgtagcagcagcagcagtgatggaacgtgctcgcaggctagcaaaccgcgccattctgaggcgtctggtttcagaggcaaagcagcatcagaagaatgaatccgtgctgcactcttccaccacccccatgctgctctattcttcctccaggtgcatgtcctctgttctgcgaagcaggggatccaaaacagagacccttctgggaaggaacatcaacatgtcacgcggcgttgttgttgctgctgctggtggttttctcggcgttggctcggcccggtccatctcggtcgaagcgcctctcacgaacgaaaaccttcccccggcggcacacctctgccaccccggaggagcagagcangatggcagagtcgtgtg

SEQ ID NO: 234492 - DNA, 406 bp, Glycine max
gtgccgttgaacgttaccgtattgctggtggccccctcggtgaggtcactgacacagtctacccaggtggcagcttcgacccattgggccttgctgatgacccagaggcttttgctgagcttaaggtgaaggaactcaaggacggacgattggccatgttctctatgtttggcttctttgttcaggccattgtcaccggaaatggtccattggagaacctcgccgatcaccttgctgaccctgtcaacaacaacgcctgtgcctatgccactaacttcgtccccggaaagtgagcctccaagcatcgaactgacttttgaaagtttttaaatttgtgtttggtgaagtacttcacataatgtgaattaaccctatgtatccaaatccaacttaatgttacctgctt

SEQ ID NO: 234493 - DNA, 392 bp, Glycine max
caacctctaacctacctctttttcttctctctcaacaacttcaccttcttcctcctcgatcatgtctcacttcaagggcaagtaccatgatgagcttatcgccaatgctgcgtacattggcactcctggaaagggtattcttgctgctgatgagtcaacagggacaattggcaagcgtttggccagcatcagtgtagagaacattgaatccaacaggcgagctcttagggagctgcttttcactgctcctggtgttcttcaatatctcagtggtgtcatcctctttgaggaaaccctctaccagagcacagctgcaaggaaaccccttggtgaaggtcttgaaggaagctggtgtgcttcctgccatcaaggttgacaagggcacagtcgag

SEQ ID NO: 234494 - DNA, 387 bp, Glycine max
taagctaggaatacggctcgaggggtcatcatcatcatcattaaacatgggtggcagtgttagcaagagtaggaggatgagttctgagaaatatgtgatgaatttgaaggagaaagtgaggctcttgcaagaggagataaaggagatgatgtatgagagggagaaggagacaaggagatatgagagggacataatggtgttcactttcaaggaggcagattcgaagcaagaggggaagaggctgagagaggaagtgaagcaattgaggagtttggtggaagagaaagatgagaagataagagagattgaggttggaatgatggagaagaacagtgagaaagattgggaattgatgggaactaacctcttggttgaccagatgaagga

SEQ ID NO: 234495 - DNA, 390 bp, Glycine max
ggttataatgcacctcaacaagtgcacatcacgcaaggtgactatgatggaaaagcagtaatcatctcatgggtgaccacagaagagccagggcacagccatatacagtatggcacatcagagaataaatttcaaactagtgaagaaggcacagttacaaactatactttccacaaatacaagtctggctacattcatcactgtcttattgaaggccttgagtatgagactaaatactactatagaattggaagtggtgattcttctcgagaattttggttcaaaacacctcccaaagttgatccagattccccccaaaaaatttggaataattggtgatttggggcaaacgtttaattctctttccacccttgagcattatatacaaag

SEQ ID NO: 234496 - DNA, 387 bp, Glycine max
catgtggcctaactcaaaacgttctgtttcgctttctgttgcaatggagatatcaaaagttgcaagagattatggagcatagcctgtgggtgtatttgtggatgatgattctgaaacaattctaagagcttctgatgcagcaaaccttgaatttgttcagcttcatggacatggttctcggttagcttttccgtccttaattcaggaaaatcgtgtaatatatgttctccatgtaaatgaggatggaagccttttaaacacaatttctgatgaagagtgctctctagttgattgggttcctgtagataatgcaaagggtggagttgtaatgcattcagttgggaccagttgaaactgccaaacattaacagcaagtatggttggctc

SEQ ID NO: 234497 - DNA, 470 bp, Glycine max
gcttagacgtaacatgcacgcggacgtaagctaggaatacggctcgaggcttggacttcattcactccgtcaacgccactggtatatccagagcacttgtgcaacttctggagagggtctctatgagggtttggactggctttctaacaacattgccagcaaagcatgagacatttgaaaaattttggtcttgtctggtgatttcatgcgagtctggcggttcttggagaaagatgcttatcttttctagcgaatgttgtaatagcagaatgcttgctagaagtattctcttttgtgtaacttgggtttgtatgattgcttaaattagctaatacttttagctataattggaactcttgcaccctcttgtgcgtgcgtgctgtgttgcttacatcttgtttgtttgatttttgattgaatatatttccatgcgtttttgttctaaaaaaaaaaaaaaaaaaaaggccggc

SEQ ID NO: 234498 - DNA, 362 bp, Glycine max
aagctaggaattaggctcgagaaaaaactttggagtcactgagtttataaatccaaatgaacatgataaaccaatccagcaggtcataattgatcgcacagatggtggagttgattatagctttgagtgtattggaaatgtctccgtgatgagagctgcgttggaatgctgccacaagggctgggggacgtcagttattgtaggtgttgcagcatcagggcaggaaatatcaacccgtcctttccagttggtgagtggacgagtctggaaaggaacagcttttggtggcttcaagagcacgtcacaagtgccttggcttgtatacaagtacttgaagaacgaaatcaaggttgatgagtaca

SEQ ID NO: 234499 - DNA, 402 bp, Glycine max
aattgagtccatggaattcaatggatcatcaaatgctgatgggcagcctcctaatattgagttagggggctctggttttgaaactcccaatccaggtgattcccatgcatcgtcaatttatgctagtactgatgttgatatgggtggtactgatgccgaaggaaatcaatcagagcaaccaactgtttttgaagacgggaggggtgagatgttatcaactcagaacactgaggttgctccagatgctactcaggctgaccaagttagtgcaaataatgaagcttctggtgctaataccattgaccctaacttttttgaaggccctgccctgaaaatctacgggcagaagttctggcatcccaacaagctcattctgttcaacctccagcttatgcaccacct

SEQ ID NO: 234500 - DNA, 291 bp, Glycine max
gcacgcaggaggaggagattgatcgagagaagagaagatgactacacgcttcaagaagaacaggaagaagagaggccacgtgagtgccggccatggccgcatcgggaagcaccggaagcaccctggaggacgcggtaatgccggaggcatgcaccaccaccggatcctctttgacaagtaccaccctgggttcttcggcaaggtcggaatgcgctattttcacaagctccgcaacaaattctactctccgatcctcaacatcgacaagctctggtccctggttccgcaaga

SEQ ID NO: 234501 - DNA, 296 bp, Glycine max
accttgactggtacaagggaccaactctccttgaggctcttgaccaaatcaatgagcccaagaggccctccgacaagcctctaatgcttccattgcaggatgtctacaagattggtggtattggtactgtgccagtgggacgtgtagagactggggttgtgaatcctggtatggtggtgacttttggtcccactgggctgacaactgaggttaagtctgttgagatgcaccatgaggctctcacagaggctcttccaagtgacaatgttggatttaatgttaagaatgttgcaatc

SEQ ID NO: 234502 - DNA, 401 bp, Glycine max
cttccttccctgaccaacacccccgtgtaaggtgggcagctattaatgcaattgggcagctgtctactgatttgggtcctgatttgcaagttaaatatcatcaaggagtgttgccagcactagctggtgccatggatgattttcagaaccctcgtgtgcaggcacatgctgcttcagcagttctcaacttcagcgagaactgcacacctgatatcttaacgccatacttggatggaatagttagcaaactacttgtacttcttcagaatggtaagcagatggtgcaagaaggtgccttaactgctttggcaacagttgccgaatccttccaaggaacaactcaaaaaatattatgatgctgtaatgccatatctgaaagctatattggttaatgcaaccga

SEQ ID NO: 234503 - DNA, 270 bp, Glycine max
gtggactatgagaagattgtgcgtgacacatgcaggaacattggttttgtctctgatgatgttggtcttgatgctgacaactgcaaggtcctcgtcaacattgagcaacagagtcctgatattgctcaaggtgtgcacggccacctcacaaagaggcctgaggagattggtgctggtgaccaaggtcatatgttcggctatgccactgacgagactcccgagctcatgcccttgagccatgtccttgccacgaagctcggtgccaagctc

SEQ ID NO: 234504 - DNA, 256 bp, Glycine max
  unsure (1)..(256): unsure at all n locations
tcgagaaaaaacgttgttgatagcaggaagatgcacttcgcaattgcacaaggaaaacaacggaagccaagtttccgcgcattttgtcacataagaaaaacgaagtgtcaatcnctttcttcttcgtttgtattgtttatgaattattaattactttggttttagacagttgtatggcactgcttttgtctctgtccttgaatgatatcacatgaatgcattttggtttgcaacctgctgcgcttgcaacgggttg

SEQ ID NO: 234505 - DNA, 401 bp, Glycine max
ctgaaggctatggcttgtcctggagtaagttcaagcagggccacttgcttagcggttctgatgatgctcagatttgcttgtgggatattaatggcactcccaagaataagagcctagaggcaatgcagatttttaaggttcatgaaggtgtcgtggaagatgtggcttggcatttgaggcatgagtacttgtttggttctgttggtgatgatcaatacttacttatatgggaccttcgaacgccggctgccagcaagcctgtccaatctgttgttgctcatcaaagtgaggttaactgcttggctttaaattcctttaatgaatgggttgttgctactggttctacggataaaactgtgaaattgtttgatctgcggaagatcaatactccgctgcacatc

SEQ ID NO: 234506 - DNA, 293 bp, Glycine max
gaaaagtcaaaaattatgatggtgatatctcatcacttggctctgcaaaaagatttcttaaagcagtgattgagatcgctttcgccttcaaagagttgaagctatgggaggtagaggcaaatttgatgcataagttaagtaccttagacagtcttggcaaacgatggaggctgaacgtgaggaattatggatcagccggttactcggcatactcattgacactgttctaacgagaggaaacatgatgaatgttggaactaccagacgggatgctaacgcgttcaaattggtga

SEQ ID NO: 234507 - DNA, 364 bp, Glycine max
taagctaggaattaggctcgagctcactttgttttttttctctgcagtaatagaaaaaaaagaaagaaagaagaagaagaagaagaagaagaagaagatgttgagggttgcagctagaaggctctcttctctctcctcctcctctccgtggcggcccaaccacgccgcttccgcttatgtctctcgaaacgcagtcgttgatgaccgcagatccgatccttcctcccatcccctttttcccttcagaggttttgctactgaatccctgatccacccaatagaaaacagcattattcctgagattcctgcaactgttactgctgttaagaaacctacttctaagattgtctatgatgagcacaac

SEQ ID NO: 234508 - DNA, 408 bp, Glycine max
gctgaaccctcacctcaatcttgcgtgctagctagctttattccaattcctacagaaccaaattattctgctagctagctagtacgtcaaataaaataaaataatcaaatatggcattcagcgggacccaacagaaatgcaaggcttgcgacaaaactgttcactttgtcgaaggtttatctgccgatggagctgcttatcacaagaactgcttcagatgcagccattgcaatggccttcttgcgataagcaattactcatccaccgaaggagttttgtactgcaaggtgcactttgagcagcttttcaaggaaactggaaactaacccaaagaaatcccagtcgtctggaaagcctccactcgagctgaatagagcaccaagcaagctttctgccttcttctctggg

SEQ ID NO: 234509 - DNA, 296 bp, Glycine max
tgataaataccgtggcacatggaattcgcagttttgtcagccgagagttgtgctgcgaaaacagcgtatatagattagccaaaatcgcagtggattgtccgagtcactataaccttgcacatgggtccccactcccacaaaaaagttgagtggctcaaaacagtggatcagtactacgtcggagccaacaacgccattccgggtgcatgtgtgcacaatgtgctggattctgtgacatcagctctcttgaaggacaacaatcccaagtttatctaggttgagatggcatttttcca

SEQ ID NO: 234510 - DNA, 405 bp, Glycine max
gcgaagacgacaccaccttcgtcgtttggagaccccccgagttcgctagggaccttctccccaactatttcaaacacaacaacttctccagcttcgttcgccaactcaacacctatggttttagaaagattgtgcctgatagatgggagttcgcgaatgagttcttcaagaaaggagagaagaacttgttgtgcgagattcacagaagaaaaacccatcaccagcatcatcaacaagtacaagccatgaacaaccatcaccaccatcataagtttggactcaacgtttcctcgatctttcccttccacaattagcagaattcattgtttccccttctcatgattcggacgaggtaataatacccaattggtgtgactcgcccccaagaggagttgccggtgtaaa

SEQ ID NO: 234511 - DNA, 404 bp, Glycine max
attccaaaaacacacacacacacaaattctcaaacccaaatcccaagtctcctaaaaccctaattcgcagtgaaaatgagagaaatcttgcacatccagggagggcaatgcggtaaccagatcggagcgaagttctgggaggtgatatgcgacgagcacggcatcgaccacaccggaaagtacagcggcgactccgagctccaattggagcgcatcaatgtttattacaatgaagccagcggcggaaggtacgttccacgcgccgtcctcatggatctggagcccggcaccatggactccgtcagattcggccccaacggccagatcttccgccccgacaacttcgtctttggccagtccggcgccggcaacaactgggccaaaggtcactacaccgaaggcgc

SEQ ID NO: 234512 - DNA, 400 bp, Glycine max
  unsure (1)..(400): unsure at all n locations
tgcacgcgtacgtaagctcggaatacggctcgagctgagcttgaggatcggaagctccgaatagaggatgccaagaatgcaacttttgctgccattgaggaaggtattgtacctgggggtggcactgcactggttcatctctccactcatgtcccagcaatcaaggacaagcttgaggatgcagatgagaggctaggagctgacattgtgcaaaaggcactgatagctcctgcagcattgattgctcaaaatgctggaatagaaggtgaagttgttgtggagaaaataaagagtggtgaatgggaggtcggttacaatgccatggcagacaggtatgagaatttagtggaggctggagttatcgaccctgccaaggtaacaangtgtgctttgcaaaatg

SEQ ID NO: 234513 - DNA, 411 bp, Glycine max
tcgagcttcttcttctctcgaatcttccaccgcaatgaccaccgccaccgagaagctctccgctctcaaatccgccgtcgccggattgaacgaaatcagtgagagtgagaagaacggattcatcagcctcgtcagccgctatctcagtggcgaagcgcagcatgtggaatggagcaagatccagacgcctacggacgaagtggttgtgccttacgacactttggcgccaactcctgatggttcttcggacgtgaagaatctattggacaagcttgtggtgttgaagctaaatggaggcttgggcacaactatgggttgcactggtcctaaatctgtaattgaagttcgtgatgggttgacatttctagatttaattgtgatccagattgagaatctcaattccaaatatgg

SEQ ID NO: 234514 - DNA, 365 bp, Glycine max
ctctcgcctcgagcagcttttctatctgcaattgcgatgctttcctacttctacaagcacgaaagttgtgggcagtgcacaccatgcagggagggaactggttgtggttggacaatcatggcaagaatgaacgttgggagtgccaagctagaagaaattgatatgcttcatgaattgactaaacatattgaagggcatacaatttgtgccttgggtgatgctgctgcatggccactgcatggtcttatcaaccatttcaggcttgagcttgagagaaggattagagatcatgcacacttggagctgctgctcgccactggctaggctttcactaaggggtgtcattgtactgctggatagcaaga

SEQ ID NO: 234515 - DNA, 434 bp, Glycine max
ctcgagccgaatcggctcgagggttgcatgcaactctttgctctctttctctctctctccattcgctctcatttttcatttttctttttctattctttgcttcagtggccttaccagtgtgttgctcactgagaaaccaccaattttcagcatgacaagataagtcctgaagttgaaatcaggatgccaatggaggcatttccaccagtttcagctgatgtgagctttatttctaatagttttccgaaatacaaactggatgttgataatcaagttctggaagagccagttgaggataacctgggtccttctttgaaggatgttattgaacaagaagctttcaatttgtcagaccaacacaagcgtatctcagttcgtgaccttgccagtaaatttgacaagaacttggctgcagctgctaagttgtctaatga

SEQ ID NO: 234516 - DNA, 143 bp, Glycine max
aacaaaagcattctttaaaggggttgaaacatggaaaaaggaaaccataatgagaaatgatgctgctaaacgacaagaagcaaacggttctggggctgtagtggaatacaaagctcgtcccagtggaccagaaaaggacacca

SEQ ID NO: 234517 - DNA, 409 bp, Glycine max
cacaaaagtaaaaaaaaaaaaaaaaaaacagagaaagagtgaagtagaaataaaaccaaggaaattaaggataatggaagtagcaaaggtactgcacatgaacggtggcgttggagacgcaggctatgcaaacaactcctttgttcagcaaaagttgatttgtttgacaaagcccttaagataagaagccataaaaagcctctattgcggcacactccccataaggttggcaatggcagatttgggttgctcttctgggcaacatgctttaattgtcgtgtcagacttcatcaaaactgtggagaagctttgcctacaattgaaccataaatctccggaatacaaggtttttttaaacgatcttcctgagaatgacttcaacaacataattaagtcccttgacagcttc

SEQ ID NO: 234518 - DNA, 145 bp, Glycine max
aaagaaagaaaaccctagcttaccttttcaactttcaagatgcaaatcgttgtgaagacacgcactggtaagacaatcacgcttgaggtggagagttcagataccatagataatgtggagtccaagattcaagacgtggaaggga

SEQ ID NO: 234519 - DNA, 329 bp, Glycine max
ctcccccaccaccttcaccatcaccaccatcaccttattattatcattcaccacctacatctaaagagcatgtataccctccctactaatacaggtcacgtctagtaccaacgtcgcatcctccagcggacaactatgtgagtcctctatgacgttctctaactcctcctctaacataccattctacagcaacacctccgcattctgcagctcccgcgcccaagtatatttacaaatcatctcgacctccagtttacatctatgctcacccacctgcatttatctccagttgagttgtttctacgacgtcaccattctcgatctgtcat

SEQ ID NO: 234520 - DNA, 437 bp, Glycine max
ccactattggagctgtcaacagagctccactgagcttgaacagctctgaagctggagattcggttcccagttcagccttctttggcacaagcttgaagaaggttactgcctcaagggtccctaacgtcaagatttcttctggaagtttcaaaatcgttgcggcggagaaagagattgatgagcaacaacagacaaacaaggacagatggaaaggtcttgcctatgatatttcagatgaccagcaagacatcacaagaggaaagggtatggttgattccctcttccaagctccacaggagactggaactcactatgcagtcatgagctcttttgagtaccttagcactggacttaaacagtataacttggataacaacatggacggtttttacattgctcctgcttttatggacaagcttgttgttcacatcaccaag

SEQ ID NO: 234521 - DNA, 149 bp, Glycine max
aaaccagtatctgaggtcaaccctagtttacggtctcaagtaaaatctgattctatttctactgagtctctgtcaattaatcgggagagtggactaaaggatactaggattactgagaaggtcaaattagaacacgatattgttaagcc

SEQ ID NO: 234522 - DNA, 427 bp, Glycine max
ctctgcgtcttcttcctctatcaatcgttttccatggctcgtaccaagcaaaccgctcgcaaatccaccggtggaaaggctcctaggaagcaactcgccaccaaggctgcaaggaaatctgcaccgacaaccggtggagtcaagaagcctcatcgctatcgccctggaactgttgctcttcgtgagatccgaaaataccaaaagagcacagagcttctgatccgcaagctccccttccagcgtcttgttcgtgaaattgcgcaagacttcaagaccgatttgaggttccagagtcacgctgttcttgcgcttcaggaagctgcggaggcttacttggtgggtttgtttgaggacaccaacttgtgtgcgattcacgccaagagggtgaccatcatgccaaaggacattcaactcgcacgccgcatcc

SEQ ID NO: 234523 - DNA, 408 bp, Glycine max
attggatgctttagttgggcttgtttcgtgatcctacaagctattacgcttaaaacctaccctgctgaactctctctttctgcgtggatatgcttaatgggcacaattgaaggtgccgcagtggctttgattatggaaaggggcaacccttcagtttggtctctaaaattggacatgaaactgctatgtgcagtctacactggcatagtgtgctcgggaatgggctattacttgcaaggagtagtgatgaaaactagaggcccagtcttcgtaacagcttttagtcccctctgcatggtaatcctggctgtcatgagctactttattctggccgaacaagtgtttcttggaagaatgatcggtgccgttattatttgtttgggcctatacgttgtggtgtgggggaaa

SEQ ID NO: 234524 - DNA, 404 bp, Glycine max
ggcttgcttgcaggtggtgattttgaagcgcagcgtggaacatataagatacttaaggttgtgcctttcaattcagtccggaagaagatgtctgtgctagtaggtcttcctgatggaggtgtccaagctttctgcaaaggtgcatcagaaatagtattaaaattgtgtaacaaagttattgatccaaatggaacagctgttgatctttctgatgagcaggcaaagaaagtctctgacattataaatggatttgccaatgaagctttgagaactctttgtttagctctcaaagatgtaaatggaacccaaggagaaagcagcatccctgaagatagctatactctgatagccattgtgggaatcaaggatcctgtgcgcccctgggttagggaagctgttaaaac

SEQ ID NO: 234525 - DNA, 96 bp, Glycine max
gcacaaagcaagctcatcctagagttttaaaaatggcagcatcctccgccatggctctctcgtccccatccttggctgcgaaggccgtgaagctgg

SEQ ID NO: 234526 - DNA, 384 bp, Glycine max
ttagattttatcccactgatgaggagcttttggttcagtacctttgccgcaaggttgctggccatcatttctcgcttccaatcattgctgaagttgatttgtacaactttgatccatgggttcttccaggtaaggcagcgtttggagagaaggagtggtacttcttcagtccaagagacaggaagtaccctaatggttcacgaccaaacatagttgcgggttctgggtattggtaagccactgtaactgacaaaatcatcaccactgaaggtagaaaagttggcataaaaaaagcacttgttttctacgttggcaaagcacccaaaggctccaaaaccaattggatcatgcacgagtatcggcttctctactcttcccggaaac

SEQ ID NO: 234527 - DNA, 391 bp, Glycine max
aaattcgatttgtaccaaattttcttcacaaaatgtctggtcgtgggaaaggtggcaagggtttgggaaagggaggtgccaagaggcacagaaaagttcttcgtgataacattcaaggtatcacgaaacctgcgattcgtaggttagcgagaagaggtggcgttaagaggatcagtggtttgatctatgaggaaaccagaggagttctgaagattttcttggagaacgtgattcgagatgctgtgacctacaccgagcacgctaggaggaagacggtgactgccatggatgtggtttatgcgctcaagaggcacggaaggaccctctatggtttcggaggctgaatgattgattcttagtattattaaattatgttgcaggatataataat

SEQ ID NO: 234528 - DNA, 376 bp, Glycine max
ctcctttgaagaaacaaattagaagagtgtgttgtgttgtgttgaagtagcaagctagcaaagatgtttggcatcttaggaggcaataaggggcacaagatcaagggtactgtggtgttgatgagcaagaatgtgttggacttcaacgaaatagtgtccactactcagggtggtttggttggtgctgccaccggcatcttcggtgctgccaccggtattgttggtggagttgtcgatggtgctactgccatcttcagtcgcaacattgccatccagttgatcagtgccaccaagactgatggacttggaaatgggaaagttggaaagcaaacctatttggagaaacatcttccttcgttaccaaccttgggagaca

SEQ ID NO: 234529 - DNA, 148 bp, Glycine max
caagcagaagcctatttggatgatgaaacctgaacagattacgaaggaagaatatgctgctttctaggagagtcttaccaatgacggggaacagcatttggctgtgaagcactttgctgttgagggtcagctcgagtttaaggctgtc

SEQ ID NO: 234530 - DNA, 266 bp, Glycine max
ctcgagccgattcggctcgaggctcaaacttggtgcctgtgtggatcttcttggagggttcgttcacattggtttgggtgaccctgttgcgaaccagtgctgccccgtgcttcaagggcttgttgaggttgaagctgcggtgtgtctgtgcaccagtcttaagcggaagcgtctcaacctcaacatgtatgtcgcaggtgcactgcagctccttgtgacttgtggcaagtctgctggtcctggttacacgtgctccctctaaacca

SEQ ID NO: 234531 - DNA, 386 bp, Glycine max
ggagaagagaaattactcgctgtggcgcggcacatagccaaaacgctgggccacaacaacaccatgtctgatgacatattccaaatactatcgaacttcgatggaagattctcgagagagaatctttctgagaagggcgcagatgtggatcccagaggctgcgccgcactggatcattccctcaaatccctagaccgccggatctctccctacgtctcctccgaccgcacaatctgggccgacgccgccgattctgctgccttcctcgacgccgtggacgagctcgtcgccgtcgtcgccgagtggaaccacctcgcctccgacaagtccgtcgccgcctgcctcgtccgcgccgaggacatgctccagcacgccatgttccgcct

SEQ ID NO: 234532 - DNA, 180 bp, Glycine max
atccgtataataggtgatcgattcccatggcaagtgaagagtgccatcttgtctactctaactacaatgataaaaaagggtggaatctccctgaagccttttcttcctcagctgcaaacaacatttgtcaagtgtctacaggatattacaagaactgttcgttctaatgctgccctggcg

SEQ ID NO: 234533 - DNA, 282 bp, Glycine max
gattgacaagtaattaaaataggctgcacttgggagtgctaaggaagatgctagtaacaagggaactttcttccagtcttgaattgattgcaaagcaaagttgggaagtaaataattcagtacctgaaagttgagctgatccaagtgctacaagttgtgatgggacttgcgtgtaacattcttataattcacaatgtcttaggtgcagagagaacatgccaagtttgagatgagtttaccatatttttcagattggactggcttccggtaaaaatttaagtt

SEQ ID NO: 234534 - DNA, 438 bp, Glycine max
taagctaggaatacggctcgagcagcaactccactcaattgtatgcattgatccatggctagatacattaatattgtacttttgggaatagtgttggtagtggtgagattgaaaggtgcagaggcacagcgggcgttccttgtgtttggggattctcttgtggataatgggaacaacaactttttggcaactacagctcgagcagatgctcctccttatggcattgattacccaaccggaagacccactggccggttctctaatggctacaacattcctgacttcattagtcaatcacttggggccgaatccacattgccttatttagatcccgagctcgacggggaaagattgcttgttggtgccaactttgcttctgctggtattggaattctcaatgacactggaatccactttgtaaacataatcagaatatac

SEQ ID NO: 234535 - DNA, 409 bp, Glycine max
gctcgagaataaaaatgggttcttcacagtggacctgtctgattttgttatcacttgcttctgcttccttcaccgccaacccaagagcaccaattgatgtgccatttggcagaaactatgtgcctacctgggcctttgatcacatcaaatacctcaatggtggttctgagattcagcttcatcttgataaatacacaggtactggcttccaatcaaaagggtcctacatgtttggtcacttcagcatgtacataaaattggttgctggtgattcagctggcacagtcactgctttctatttatcatccatatactcagaacatcatgaaatagactttgagttcttgggaaacagaaccgggcaaccttatattttgcaaacaaatgtgtttaccggctggaagggtga

SEQ ID NO: 234536 - DNA, 378 bp, Glycine max
accaacaatggcaatggcaacccaagcctctctcttcaccccacccctctccggtctcaaacccagcgaccgagccaccgcgccatggaaacaatcctccaccctctccttctccacctcgaagcccctcaagttctcgcgaacaatcagagcagcagccaccgaccagaccacagaggcaccggttgggttcaccccaccggaactggacccaaacaccccttccccgatcttcggaggcagcaccggcgggctcctgcgcaaggcccaagtggaggagttttatgtcatcacatgggactctccgaaagaacagatctttgaaatgcccactggcgggcgctgccatcatgagggaggggcccaaccttctcaagt

SEQ ID NO: 234537 - DNA, 289 bp, Glycine max
aagctaggaatacggctcgaggcaagcaaaaagaaagaatcccaggcgaggagaaagatggaggggaaggagcacgatgtgtcgttgggagcgaacaagttccccgagagacagccgattgggacggcggcgcagagccaatacgacggcaaggactaccatgagccggcgccggcgccgctggttgacccgacggagtttacgtcatggtcgttttacagagcagggatagcatagtttgtggccacatttctgtttctctacatcaccgtcttaaccgttatgggag

SEQ ID NO: 234538 - DNA, 383 bp, Glycine max
tccaaggcaaaaattgcggtcggttcatccaaaaccggaagcagcaatgggaatcgatctcaaggccggaggtaaaatcaaaacaaccaacttaacagcacccatgtcgagtgatatctatctcaagctcttggtcaagcgttatcgcttccttgttcggagaactggcagcatattcaatgcctttatactcacgagattgttcatgaacaaggttaacaatcccccattgtctttctcaacgttgattaagtatactaaagggaaggaagattagattgctgtggtggtgggcaatataacctatgattttcgtgtatatcaagttccaccctttaaggtcacagtacctcacgtttacacacactcctctcgcactaatt

SEQ ID NO: 234539 - DNA, 387 bp, Glycine max
gaaatatcagatcatcgaaccaaccaaacgaaggcagaaacaggcaaagagctcatagaaattctcgtcctcttcctacataagtcttctcttatcataaacgcgtgttgctcggataaggttgtgctgcggtgattcactcgtactttgcttaatatggcggttgagaagttgagcattgcaaaagatgtgactgaattaattggcaaaactccattggtatatctcaaccgcatcgtggatggctgtgttgccaaagttgctgcgaagctagaaatgatggaaccttgctccagtgtcaaagacaggatagggtatagcatgattgtagatgctgaggagaaaggactcatcacaccgggtgaaagtgtcctcattgagcctact

SEQ ID NO: 234540 - DNA, 185 bp, Glycine max
ctcctgtcaatgaccatggatgctgtgcgatctgttgggcattctcagctatcggttcagtctaccgcatccatcacatactcacacgcgacctgactgcgttatcacagcatcaactggttgattgtgggacgccatattaccagcgatgcagtcgacgacttatggactatgcatctgcgtcc

SEQ ID NO: 234541 - DNA, 259 bp, Glycine max
caataactatcttcttccaaataaaaaacaaaaaagaaaaaggaatgagatatgaaagggttaattgaatccaaacaaaagaagagatcatcagaatgggcacggtttggacttcgatgatagtattgttgcgttgcctgaacagatcatcggttctgggcgaggacccatacatctactacatatccaacgttacctacggcaccattgccccattgggtgataaccaacagggtatcgtcatcaacggtcattttcc

SEQ ID NO: 234542 - DNA, 375 bp, Glycine max
gttcaaagggctatggtttcgtcaggtttggagatgacaatgagagaacccaggccatgactcagatgaatggtgtttactgttctagcaggccaatgcgtattggtgctgcaactcctaggaaatcatctggccatcaacagggtgggctgtcaaatggcacagccaaccaatctgaagcagattctactaacacaactatatttgttggaggactggaccctaatgtttcagatgaagatctcaggcagccattctcccagtatggtgagatagtctctgttaagatacctgttgttaagggctgtggctttgtccaatttgcacacacacataatgctgaagaggcattgcacaagctaaatgggacaccca

SEQ ID NO: 234543 - DNA, 400 bp, Glycine max
gtgagaaagagagagagagagagagaaactgagagaaattcgcaaaccctaatttcggaaagatcggcgatggctgcctccaaggatcgcgagaacttcgtctacatcgccaagctcgccgaacaggccgagcgatacgaagagatggtggaatcaatgaagaacgttgcgaatctcgacgttgaactgactgtggaggagcggaatttactttctgttgggtacaagaatgtgattggtgctcggagagcatcgtggaggatcctgtcttccattgagcaaaaggaagaaacaaaagggaacgagttgaatgcgaagcggattaaggagtacaggcagaaggttgaattggagctttcaaacatctgtaatgatgttatgacagtgattgatgagcaac

SEQ ID NO: 234544 - DNA, 412 bp, Glycine max
gagaaaagacatgtcggtgaaggagtgcgagcaccacaaggggaagaagaggaagatcttccggcaagtgttctggtgcttagtggtgttccttttcatcgtgctggtcacaattcttttgatatgggcaatccttagacccaccaaacccaccttcacgctccaagacgtcaccgtctacgccttcaacgccaccgtggcgaacttcctcacttcgaattttcaggtcacgctcatctcgcgtaacccgaacgaccgcatcggtgtttactatgatcgcctcgaaaccttcgtgacctatcttagccagcacgtcacgtaccgaaccgccatccctccgacatattaatgccataaagagatcaatgttttggccccctttgtttaagggaccacatcccctctcgccctt

SEQ ID NO: 234545 - DNA, 395 bp, Glycine max
ggacgagaagacccttctcttcggtgacaagccagtcactatttttggacacagaaaccctgaagagatcccatgggggtcaactggagctgacatcattgctgagtccaccggagttttcaccgcggaggacaaggccgccgcacatttgaagggtgctgcaaagcaggttcctatttctgcccccagtaaggatgcccccatgtctgttgttcgcgtcaaccagcacgagtacaagccagagcttgacattatttccaatgctagctgcacaaccaactgccttgccccacttgccacggttagcaatgacaggtttggcagtgttgacggtttgattaccactgttcattccatcagcgctacccacacgactgtttatggaccatccgccc

SEQ ID NO: 234546 - DNA, 405 bp, Glycine max
ctctttcacctcttgttttccccaatccttttcgcctttgtctgcgaatggcgtcgttcgatcaggcacctcccggcgatgtcaaatccggtgacaaaatcttcaggaccaagtgcgctcagtgccacaccgtcgaaaaaggtgccggtcacaagcaaggacccaatctgaatggtttgtttggaaggcaatctggcacaactcccggatattcctactcttcagctaacaagaacatggctgtgacttgggaagaaaagacactatacgattacttgcttaaccccaaaaagtatattccacggacaaagatggtatttcctggtcttaagaagcctcaggaacctcctgatcttattgcatacctgaaagaatccactgcacagtgattatgcactttcaccc

SEQ ID NO: 234547 - DNA, 319 bp, Glycine max
gtagttgcgaagtaagaaggacatccaaatggcttcctcaatgatctcttctccagctgttaccactgtcattcgtgccggtgccggcatggttgctcgattcactggcctcaagtccatggctggcttccgctccagcaagaccatcaatgacattacctctattgctaccaacggtggaagagtgcattgtatgcaggtgtggtcaccagttggcaacaagctgtttgagactctttcctagctgccattccttgatgatgtccaattggcacatgaattataataccttcttatgaatggatggattccttgcttg

SEQ ID NO: 234548 - DNA, 373 bp, Glycine max
gagaaaataaaaaaataaaaaattcaggttctcaaaaactgtacgcaactagaaacaatggctgagatgaagaagaaagcagaactgatcttctttcccataccggagattggccacttagcttcattcctcgaattagcacaactcctaatcaaccatcataaccatctttccatcacattcctctgcatgaaactcccttacgctccctctttagatgcatacatcagatcagttatagcctcacaacctcaaattcaagtcattgatctccctcaagtagaaccacctccacaggaactattgagaccactatcacactacatctggtcctacttgcagaccctcaaaccccatgtcaaaggtatagtgc

SEQ ID NO: 234549 - DNA, 416 bp, Glycine max
gagtactctgtggaaactttggaaagagatcttaagaacacgaggaaatactacgggagtggaaaaacaaaggaagcaccatggagagaatcacagcttaaagggttgcacaattttctcgtggaaaaagaggaagaaattgtgacggccctcaagcatgatttggggaagcattacgtggaggcttttagagacgagcttggaacattaatgaagaccttaaacttggcaaccaagtctttgaaaaattggatggcggggaaagaggcaaagctgccacgaatagcactgctctcaagtgcagaaatagttcctgagccacttggtcttgttctcataatctcatcatggaactttctctttggactttccttggagccactgatcggagcagttactgcggggaacagtgtggt

SEQ ID NO: 234550 - DNA, 389 bp, Glycine max
attttgctaatcaatggactcccatttggtgtggtgataacatgggcctgagatatgaggtccacatgtgggggaataaggttgaggtcaatttaggtgaatggacatgcacttgtggagtatggcaactaacagggatgccatgccgacatgccattgcaacaataactcacaaaggacggaagcctgaggacatgtgtcatgagtggctgtcaatagaagcttataataagacataccagcattttattgaaccagtccaaggaccacaatattgggcccagacacagtatacacaccctgttccaccacatacaaaggtccaaagaggaaggccacacaacaatagaaggagatccgtacatgaggacaatgtcacaggacataac

SEQ ID NO: 234551 - DNA, 415 bp, Glycine max
ctcgaggtttctgtctctgtgtttgaagctgatgattccgaacgagcgaccttcttcgtttctcgcaaagtttaagtcatcatgggtaaggaaaagactcacatcaacattgtcgtcattggacatgtcgactctgggaagtcaactaccactggtcatttgatctacaagcttggaggtattgacaagcgtgtgattgagaggttcgagaaagaggctgctgagatgaacaagaggtcattcaagtatgcctgggtgcttgacaagctcaatggtgagcgcgaaagacgaattaccactgatattgctttgtggaagtttgaaaccaccaagtactactgcacagtcatcgatgcccccggacatcatgactttatcaagaacatgattactggtacctcccaggatgattgtg

SEQ ID NO: 234552 - DNA, 225 bp, Glycine max
tgcacgggcttccgggattagtgggaggggtattatgccccgtctctctttattggtggtgcaactgcgatggcttatggaaaattaattagtttggctgttgctgagtctaatcccacaattaacctctctgtgttggaactggcatcaccacaagcttatggcctggttggaattgcagcgactcttgcatgagtttgtcaagtaccaactactgtagttttg

SEQ ID NO: 234553 - DNA, 394 bp, Glycine max
caccaatcatgtaccgctttgcaacctccctcgcctccaaagctagaattgctaggagcagcactcaacagattggaagtagggtcagttggaacaggaattatgctgccaaagacattaagtttggtgtggaggcccgggctttgatgcttaagggtgttgaagagctcgccgatgccgtcaaagtaaccatgggccctaaggggcgtaatgtggttattgagcaaagttttggagcacccaaagtgacaaaagatggagtaaccgttgctaagagcattgaattcaaggataatgtcatgaacatcggtgccagtctcgtaaagcaggttgccaatgctaccaatgatgtggctggtgacggaaccacttgtgctacaatttccactaaagc

SEQ ID NO: 234554 - DNA, 353 bp, Glycine max
aaacccttgagtttgttcgtcatgcatggatcaatgtttgttctggaggaattatagggcttggataagcagaggaggatcgtgtacgtttgttacagacattctctacacttctcacccatccagagagtgttcctattaacgcacttgttgctctaaatggaacccctcttaacgatcaaaatcctgttgaagtatgggagatgactcgcatcatatcagctgaacgtatcgtaatctcaaactcattggtcaggttatcagctgacacatttcgattctccatgccagagcaagtattgttctcacttccaggagcatattcaattttcaccggtcaaacctgtctcact

SEQ ID NO: 234555 - DNA, 465 bp, Glycine max
cgtccgtaagctaggaatacggctcgagtttgagcacaatggcatccacacaatgcttcttgcaccaccatgccctcaccactccaaccagagcttcatcacagcgcttagttgtgagcaccaaaccaaaccacattgtttgcaaggcacaaaagcaggttgtccaagagggtgaggacactactaacattgtctctcgcaggttggccctcactgttctcattggtgctgctgctgttggctctaaggttgcacctgctgatgctgcctatggagaagctgccaatgtgtttggaaagccaaagacaaacactgacttccttccatacaatggggatggattcaaactctcaattccctcaaagtggaacccaagcaaagaggttgagtacccaggtcaggttcttagatatgaggacaattttgactcaaccagcaatgttgctgtcatggtcactgcaactg

SEQ ID NO: 234556 - DNA, 377 bp, Glycine max
cgattccaatcctaggaggcgggatatggctgagcagccggggtaacaataccgactgcctcaagtgcctgcaatggcggcgcatcatcagctgcgtcagcatcatggtcgtgtacctggaggggttcacccgcgcgtgttactgcaacaccttcctcaggctgctctgcctcgtcgtcatgttcctggtcattgccgttctgatcgggttcatcatattcgcctacgttgtcaccgacaatgggtccggtccgagggtgatgaaccacgcttacttggcgtattatcttgaggactattccgggtggttgtgagatcaccttgttactgataactactgggggaacattgttacctgtgttacggactctatcaca

SEQ ID NO: 234557 - DNA, 355 bp, Glycine max
aagctcaggatacggctcgagcggctcgagcggctcgagaaagggttggcattgacccctttgcacaaaggaaaagacggtggtgctgtgttaaaaaaatattgaacttggttggttcaaagttgaaacaagattttcattttcccatttccacattttttgggtttgggagggaagcagaatcctagaattaagaaatgggttgctccataagagagtgttgtgtcttaattttggttttgttcgtgtcatgtgccagaggggaagacccttatatattctacacttggaatgttacatatggagacatttatccacttggtgttaaacaacaggggattttgataaactggca

SEQ ID NO: 234558 - DNA, 435 bp, Glycine max
cgaacacaatgtccaactccaccaccggcaccaccgcggccttaccaccgaagcccacctgggtcctcccataccgaaccgagaatctccgcgaggtctacaccctaagccgaaagctcggccagggccaattcggcacaaccttcctctgcacgcacaacgccacgggacgcaccttcgcctgcaagtcaatcccgaagcggaagctgctctgcaaggaggactacgacgacgtatggagggagattcagataatgcaccacctctccgagcaccccaacgtcgttcgcatccacggcacctacgaggacgccgcctccgtccacctcgtcatggagctctgcgagggaggggagttgttcgacaggattgtgcagaaggggcactacagcgagcgccaggctgcgaagctcatcaagaccattgttgacgttg

SEQ ID NO: 234559 - DNA, 416 bp, Glycine max
ttcagcttttccctcgttgaaatgaaaatgggttcttctttgtggactttgtgtctaattttggcttcactagcctcttctgcattctgtgcctttccacggaggccagtggatgttccattcggcagaaactacgttcccacttgggcttttgatcacatcaaatacttcaatggaggttctgagattcaacttcatcttgacaagtacactggtactggcttccagtccaaagggtcatacttgtttggtcacttcagcatgaacataaagatggttcctggcgattcagctggcacagtcactgctttttatttatcttctcaaaatgcggagcacgatgagatagattttgagttcttggggaacagaacacgacaaccttacattttgcaaacaaatgtgttccccggagg

SEQ ID NO: 234560 - DNA, 402 bp, Glycine max
aaaaaccgggaactttatatcactggagagagctatgcaggccattatgttcctcaattagccaaggaaatcttgacctacaacgcaaaaaccaagcaccccatcaatctcaaaggaatcatggtaggaaatgcagtgacagacaactactatgataacttgggcacagtgacgtattggtggagccatgctatgatctccgaccagacttaccggcaactaatgagtacatgtgattttcacaggcagaaggaatctgatgagtgtgagtctgtgtatagctatgccatggatcaagagtttggtaatattgatcagtacaacatctatgctcctccatgcaacaactctgatggtagtagtagctctgccacccgccgcaccatgcgtttacctcaccga

SEQ ID NO: 234561 - DNA, 377 bp, Glycine max
cgagtttttgaggatggggagcaatctcttggtctttgtttcaatggaaccctagagataaattgctccaaggaaatcaaaattcagggaattattggaccttgcacttcgttggaaaagaaagggccttctgtttctgatactgttataggagagggaaacacaacagcatggaagatgtgtggccttgacaagagtacatgcttgactgtgatgtttgatctttcatcaagtgatcgttcaaacacccctggtgctatcaacccacaattgtacctacagttccttacaagttaccaggacccaagtggtcaatcagtgcttcgtgtcacaacagtaactagaagatgggtagataattctgttagctctgaaga

SEQ ID NO: 234562 - DNA, 443 bp, Glycine max
ctcgaggagatgtgcacacgagaattatgaagagaaactatgaacaagtacctgaatggtggtttgttagcattttgcttctaatgattgttgtatctttgataacttgtgaaggctttggcaagcaactccaattgccatggtggggagtcctaatgtctcttgtaattgcgttagttttcactttgccaattggggtcattcaagcaacaacaaacacgcaagtcggactcaacgtgattacagagttaataattgggtacatttacccaggaaggccacttgctaatgtagccttcaagacttatgggtacatcagcatgtcacaagcactcgggttccttcaagacttcaaattaggccactatatgaaaattcctccaaaatctatgttcgttgtgcagttggtaggtaccatagtggcttcaggtgtgtactttggc

SEQ ID NO: 234563 - DNA, 442 bp, Glycine max
cgtacaaaagctagggattcagtggttctcccccttctggaaaagaccctcataggtctcttcctcgctgcggtggtcgccatcgccgtctccaccctccgcggccggaaattcaagctcccaccgggcccactccccgtcccaatcttcggcaactggctccaagtcggcgacgacctcaaccaccgcaacctcaccgatttggccaaaaaattcggtgacatcttcctcctccgcatggggcagcgcaacctcgtcgtggtttcttcccctgagctcgccaaagaggttctccacacgcacggcgtggagttcggctcccgcacgcgcaacgtcgtcttcgacatcttcaccggaaagggccaagacatggtcttcaccgtccacggcgagcactggcgcaaaatgcgccgcatcatgaccgtccccttcttcaccaaca

SEQ ID NO: 234564 - DNA, 394 bp, Glycine max
cacgtctgatcttggactttacagatcatgtttggacagagtgcttctctcaatacttgggaagatggatgcatcttgacccatgtgaaggaatctatgacaagccattattatatgaaaaagggtgggggaaaaaactaaattatgtaatagccatatcaaaagatggagtttatgatgtcaccaaacgatacacaaggaagtggcatgaggtcctatctcgacgtactatccttacagagccttctttgtcaactttactctctaatataacaaaagaaagtcgaataggctttgcatctcaactagtttcaattatctgaatcccatgatatggacgaaaacaatgaacttgagaggagtttacatgctgaagatgacaagttactctcat

SEQ ID NO: 234565 - DNA, 430 bp, Glycine max
ggacatttgaagaaataatgaatctcaagattgaggctatagcagatacgccttctttcatcttcctttgggtgggtgatggtgtaggccttgaacaaggtcgtcaatgtctaaaaaagtggggttttcggaggtgtgaagatatatgttgggtaaagacaaacaaaagtaatgcaactccaggactgcggcatgattcacatactttatttcaacattcaaaggaacactgcttgatgggcataaaaggaacagttcgtcgaagtactgatggacatataattcatgccaatattgacacggatgtcattatcgctgaagaacctccttatggttcaactcaaaagcctgaagatatgtacaggatcattgagcactttgcccttggaaggaggagactagaactatttggtgaagaacacaatatccg

SEQ ID NO: 234566 - DNA, 403 bp, Glycine max
gtggtatggcgaaggacgttgaggttgctgagcgtggctccttctctgggaaggactaccaggaccctccaccagcaccactcattgatgctgaggagctcacaaagtggtccttttacagggctctcattgctgaattcattgccactttgctcttcctctacattactgtgctcacagtcatagggtacaagcaccagactgacctcaaggaaaatggtgaaatctgtggtggggttggcattcttggcattgcatgggcctttggtggcatgatcttcatccttgtctactgcactgctgggatctcagggggtcacattaacccagcggtgacatttgggctgtttttggctctcaaggtgtccttgatccgagccatcatgtacatggtggcccagtg

SEQ ID NO: 234567 - DNA, 411 bp, Glycine max
taaaaaatcaactaccttagaaaaggagtgaaaggaagaaaagagaaacaagaatggaagtgacacaagtactgcacatgaatggaggctcgggagaaacaagctatgcaaacaattccttagttcagcaaaaggtgatttttttgacaaagggtatgagagaggaagccataagcagcctctaccgcagcatgctcccaagaagccttgcagttgcggacttgggttgctcttctggaccaaacactttcttcgtgatatctgaagctataaaatcggtggagaagctttgtcgagaactgaatcatcagtcaccagaataccagatctacatgaacgatcttcccgggaatgatttcagcaacatcttcaagttccttgacagcttcaaagagaaactgtgtaatgaaa

SEQ ID NO: 234568 - DNA, 424 bp, Glycine max
gttcatcccttctcaagccaccgaagcctcactttttgaaattacttgcatagatagataatcatggctatgatgaaacgtgctgcttcctctgcgcttcgctctcttattgcctcatcctccaccttcaccagaaaccttcatgcctcaggtgaaaagaagaagattgtgggggtgttctacaaagggaatgaatatgctaaattgaatccaaattttgttggatgtgttgaaggtgcattgggaatacgtgagtggctggaatcacagggtcatcagtacattgtcactgatgacaaagaaggacctgattctgaacttgagaaacacattccagatgcacatgtcatcatatctactccattccaccccgcctatgtcaccgcagaaagaattaagaaagccaaaaatttggagctgcttt

SEQ ID NO: 234569 - DNA, 267 bp, Glycine max
ggctctgatcactcttttaccattattgacaatggtggtcgagtctctgccatgagacatgggaggaaagtgcccaaactcaacagaccccctgatcagcgccgcgcactcatccgaggccttacaactcagctccttaaatatggtcgcataaagaccaccagagcaagggccagtgcaattaggaagtttgttgataaaatgatcactttggcaaaggatggttctcttcataaaagaagacaagcccttgggttcatctatgag

SEQ ID NO: 234570 - DNA, 356 bp, Glycine max
ggcacaagtgagtttgttgatcgagataactagaaacagtgtgatgaaaatgaaggtccttgttttcttcgttgctacaattttggtagcatggcaatgccatgcgtacgatatgttccctctccgaatgaacactggctatggtgcccgtactccggaggtgaaatgcgcaagttggaggcttgctgtggaagcacacaacatctttggctttgagaccattcctgaagagtgcgttgaagcaacaaaggaatacatccatggcgaacaatatagatcagactccaaaacagttaaccaacaagcttacttttatgccagagacctcgaagtcgatcccaaggacaaatttgtgt

SEQ ID NO: 234571 - DNA, 405 bp, Glycine max
ggcacaagtgagtttgttgatcgagataactagaaacagtgtgatgaaaatgaaggtccttgttttcttcgttgctacaattttggtagcatggcaatgccatgcgtacgatatgttccctctccgaatgaacactggctatggtgcccgtactccggaggtgaaatgcgcaagttggaggcttgctgtggaagcacacaacatctttggctttgagaccattcctgaagagtgcgttgaagcaacaaaggaatacatccatggcgaacaatatagatcagactccaaaacagttaaccaacaagcttacttttatgccagagacctcgaagtccatcccaaagacacatttgtgttcagtataaatggcaccgtactctctaatattccatactacaaaaaaca

SEQ ID NO: 234572 - DNA, 417 bp, Glycine max
gctagtggcagtgaccaaactccatttctcactcgccgtcgtctcttccgtctagggtttctcctcttcacaaaaatggttgccgcaaaaaaaactaagaagacccatgagagcatcaacaacaggctcgctctcgtcatgaagagtggcaaattcaccctcggttacaagaccgttctcaaatctcttaggagctccaaagggaaattgattatcattgctaacaactgtccccctttgaggaagtcagagattgaatactatgctatgttggcaaaggttggggttcatcattacaatgggaacaatgtggatttgggcactgcatgtggcaaatattacagagtgtgctgccttagcattattgatcctggtgattcggatatcatcaagacactgcctggcgaacagtaaagt

SEQ ID NO: 234573 - DNA, 362 bp, Glycine max
  unsure (1)..(362): unsure at all n locations
gacacaaactttattacagttgttgtattgtaattaagcaagaatattaggcaatggagtcttctagaacttcaactactcttgctctttttttaaccatcaatttgcttttctttgtcatggcaagtggctgctacacttgcacacagcctaagccaaaccctatcccattcccttaccctaaccctagtcctgccgcgaagagctgccccagggacgcacttaagctcggagtgtgcgcaaacgtgcttaatggaccaattggtgctattgtanggtcaccaccggaccacccatgttgctcagtgctagaagggcttcttgatcttgaagttgcggtttgcctctgcactgccatcaaa

SEQ ID NO: 234574 - DNA, 405 bp, Glycine max
ggcacaagtgagtttgttgatcgagataactagaaacagtgtgatgaaaatgaaggtccttgttttcttcgttgctacaattttggtagcatggcaatgccatgcgtacgatatgttccctctccgaatgaacactggctatggtgcccgtactccggaggtgaaatgcgcaagttggaggcttgctgtggaagcacacaacatctttggctttgagaccattcctgaagagtgcgttgaagcaacaaaggaatacatccatggcgaacaatatagattagactccaaaacagttaaccaacaagcttacttttatgccagagacctcgaagtccatcccaaggacacatttgtgttcagtatagatggcaccgtactctctaatattccatactacaaaaaaca

SEQ ID NO: 234575 - DNA, 421 bp, Glycine max
  unsure (1)..(421): unsure at all n locations
ggtgcaagagtttgttgtgagctataagctagtttatcgtgaggagaatatgaagttgtttgttttctttgttgctgcagtagttttggtagcatggccatgccatggcgcaggctaccaaaggttccctctccgaatgaaaactggctatggtgagcgttcttcggaggtaaaatgcgcaagttttaagcttgctgtggaatcacacaacatccgagcctttaaaaccattcctgaatagtgcgttgaaccaacaaaggactacattaatggcgaacaatttagatcagactctaaaacagttaaccaacaagctttcttttatgctagtgaacgcgaagtccatcacaacgacatatttatattcggcatagataacaccgtactctctaatatcncataccatgaaaaacatggatat

SEQ ID NO: 234576 - DNA, 261 bp, Glycine max
ggcacaagtgagtttgttgatcgagataactagaatcagtgtgatgaatatgaacgtccttgatttcttcgttgctacaattttggtagcatggcaatgccatgcgtacgatatgttccctctccgaatgaacactggctatggtgcccgtactccggaggtgaaatgcgcaagttggatgcttgctgtggaggcacacaacatctttggctttgacaccattcctgaagagtgcgttgaatcaacaaaggaatacatcca

SEQ ID NO: 234577 - DNA, 266 bp, Glycine max
gttgagagaacaaattgctgagggacaacctaggacacataggccttggaagaagataatggttattgtggaggggatatacagcatggaaggagagctttgcaaacttccagaggtcatagctgtatgtaaaaaatacaaggcttatacatatttggacgaagcacacagcattggagctgtgggcaagacaggaagaggtgtttgtgagctcttgggtgtggatactgctgatgttgacattatgatgggaacattcaccaaat

SEQ ID NO: 234578 - DNA, 280 bp, Glycine max
agggagctgaaagaagaaaaaatgtctggcgtgaagagagcactgaggcagttcaccttcggaaccggcaagaccgccggtcgcaactcggcggggcgcataacgtccttccaccgcggcggcggagccaagcgcttgcaacgaaccgtcgatcacaaacggaataccgcttcttctctcggcgtcgtcgaaaggatcgagtacgaccctaaccgctcctccaaaatccgcctcgttcgctggatcgaaagcgtccatcaccgtcgccgccgcgctgcct

SEQ ID NO: 234579 - DNA, 434 bp, Glycine max
gatcgtagcgccagactgagaggaagagagagggagattctttgtttgctaccttctctcggaaaaatggttacgttcaggtttcaccagtaccaggtggttgggagggctcttcccacggaagcagatcagcaccccaagatctaccgaatgaagctctgggccaccaacgaggttcgcgccaagtccaagttctggtattttctgaggaaactgaaaaaggtggagaagagcaatggccaagtgcttgccatcaacgagatttttgagaagaacccaaccaaaattaagaactatggtatatggttgcggtatcagagtaggactggttaccacaacatgtacaaggagtaccttgacaccactctaaacggtgcagttgagcgatgttccaatgaaatggcttctcgtcacagggtcaggagcccttgcat

SEQ ID NO: 234580 - DNA, 266 bp, Glycine max
ggacgggaagaaacgcatcgagcgtggagaaagagaaggatgatgaggttaaggtggagtgtactcgtaatggtcacgttcgctgtttctctgttttggcttggacccctgcaagtcaaagcctctaattctgtttccgccttcgttcaaaacgccatctactccaacagaatcgccgttttctccaaatcctattgcccctactgtttgcgcgccaaacgcttgcttgctgaactcaatgaaaaaccttttgtggtggagctcga

SEQ ID NO: 234581 - DNA, 361 bp, Glycine max
  unsure (1)..(361): unsure at all n locations
gaccacattccaaaacacanacacatacattgtagtatcacttttgtctcggaatttgttcttttgagttatggcaagcttaaaggttgcatgtgtggttttgatgtgcatggctgtgatgagtgcaccaatgatggtgcaagccgtgtcatgcaatgatgtttctgtgaacctagcaccgtgcctatcttacctgatgcaaggtggagatgttccagaatcgtgctgtagcggagtgaggaacattctgggttctgccagcaccacctttgacaaacaaaccgtgtgcaaatgtcttcagcaagctgctaataactatggcatcaacgacgaatacgctcaagcactccccgcccgctgc

SEQ ID NO: 234582 - DNA, 415 bp, Glycine max
  unsure (1)..(415): unsure at all n locations
ggcacaagtgagtttgttgatcgagataactagaaacagtgtgatgaaaatgaaggtccttgttttcttcgttgctacaattttggtagcatggcaatgccatgcgtacgatatgttccctctccgaatgaacactggctatggtgcccgtactccggaggtgaaatgcgcaagttggaggcttgctgtggaagcacacaacatctttggctttgagaccattcctgaagagtgcgttgaagcaacaaaggaatacatccatggcgaacaatatagatcagactccanaacagttaaccaacaagcttacttttatgcccagagactcgaagtccatcccagggacacatttgtgttcagtatagatggcaacgtactctctaatattccatactacaaaaaacatggatattgg

SEQ ID NO: 234583 - DNA, 406 bp, Glycine max
ggcacaagtgagtttgctgatcgagataactagaaacagtgtgatgaaaatgaaggtccttgttttcttcgttgctacaattttggtagcatggcaatgccatgcgtacgatatgttccctctccgaatgaacactggctatggtgcccgtactccggaggtgaaatgcgcaagttggaggcttgctgtggaagcacacaacatctttggctttgagaccattcctgaagagtgcgttgaagcaacaaaggaatacatccatggcgaacaatatagatcagactccaaaacagttaaccaacaagcttacttttatgccagagacctcgaagtccatcccaaggacacatttgtgttcagtatagatggcaccgtactctctaatattccatactacaaaaaacat

SEQ ID NO: 234584 - DNA, 404 bp, Glycine max
  unsure (1)..(404): unsure at all n locations
ggcacaagtgagtttgttgatcgagataactagaaacagtgtgatgaaaatgaaggtccttgttttcttcgttgctacaattttggtagcatggcaatgccatgcgtacgatatgttccctctccgaatgaacactggctatggtgcccgtactccggaggtgaaatgcgcaagttggaggcttgctgtggaagcacacaacatctttggctttgagaacattcctgaagagtgcgttgaagcaacanaggaatacatccatggcgaacaatatagatcagactccaaaacagttaaccaacaagcttacttttatgccagagacctcgaagtccatcccaaggacacatttgtgttcagtatagatggcaccgtactctctaatattcatactacaaaaaaca

SEQ ID NO: 234585 - DNA, 397 bp, Glycine max
ggaacttctcacgttcatttctacacatccctagctctgtcgttccgtcgttgacgatggcgtttcgggtgcgaagccctgacctccgctctctctttcttctctctctcttgtccatcgcttccgccaatgtcttcttcgaagagcgtttcgatgacgggtgggaaaatcgatgggttaaatcagattggaaaaaagatgagaacgtggctggggagtggaaccacacctctggtcaatggaatggagacgctaatgacaaaggtattcaaaccagtgaggattacagattctatgctatttcagctgagtaccctgaattcagcaacaagggtaagacactagtctttcaattttctgttaagcacgaacagaagcttgactgtggtggtggcta

SEQ ID NO: 234586 - DNA, 365 bp, Glycine max
gaccacattccaaaacacaaacacatacattgtagtatcacttttgtctcggaatttgttcttttgagttatggcaagcttaaaggttgcatgtgtggttttgatgtgcatggctgtgatgagtgcaccaatgatggtgcaagccgtgtcatgcaatgatgtttctgtgaacctagcaccgtgcctatcttacctgatgcagggtggagatgttccagaatcgtgctgtagcggagtgaggaacattctgggttctgccagcaccacctttgacaaacaaaccgtgtgcaaatgtcttcagcaagctgctaataactatggcatcaacgacgaatacgctcaagcactccccgcccgctgcaatg

SEQ ID NO: 234587 - DNA, 395 bp, Glycine max
gagcctcagcagaagcataacgaggagaagcagaacgagcaaaagcaatggcgccgaagaagccgagaaccacgacaaggaaccctgatttggttagggggattggcaagtattcgaggtcgcagatgtaccacaagaggggcatctgggccatcaacgccaaaagctgtggcgttttgctccgccacgatcccaagcccaagcccgaagccccggcccagaagccgcccatgttctaccccgcggacgatgttaagaagcccctcgtcagacaagcacaagcccaaacccgcgaaactcatggctagcattactctacggactgtgttgatcctgctgctgggaagttcaagggaaatacggttgttttcctgaagcagctcccatctggattg

SEQ ID NO: 234588 - DNA, 410 bp, Glycine max
ggcacaagtgagtttgttgatcgagataactagaaacagtgtgatgaaaatgaaggtccttgttttcttcgttgctacaattttggtagcatggcaatgccatgcgtacgatatgttccctctccgaatgaacactggctatggtgcccgtactccggaggtgaaatgcgcaagttggaggcttgctgtggaagcacacaacatctttggctttgagaccattcctgaagagtgcgttgaagcaacaaaggaatacatccatggcgaacaatatagatcagactccaaaacagttaaccaacaagcttacttttatgccagagacctcgaagtccatcccaaggacacatttgtgttcagtatagatggcaccgtactctctaatattccatactacaaaaaacatggat

SEQ ID NO: 234589 - DNA, 405 bp, Glycine max
ggggaaaccctaattctgcgtggtgggtgaaaatggcggtacccttgctctccaagaggatcgtgaagaagcgcgtcaagaagtttatacgcccccagagtgatcgcaagatctccgtcaggccaagctggcgcagacccaagggtattgattctcgtgtcaggagaaagttcaaaggatgcactttgatgcccaacattggttatggctcagacaagaaaacccgccattatctaccaaatggtttcaagaaatttgtcgtgcacaatgtgaaagacctggaacttctcatgatgcataacaggacatactgtgctgagattgctcacaatgtatccacaaggaagaggaaagacatagttgagagagctgctcaccttgatgttgccttgacgaacaagacgg

SEQ ID NO: 234590 - DNA, 406 bp, Glycine max
  unsure (1)..(406): unsure at all n locations
ggcacaagtgagtttgttgatcgagataactagaaacagtgtgatgaaaatgaaggtccttgttttcttcgttgctacaattttggtagcatggcaatgccatgcgtacgatatgttccctctccgaatgaacactggctatggtgcccgtactccggaggtgaaatgcgcaagttggaggcttgctgtggaagcacacaacatctttggctttgagaccattcctgaagagtgcgttgaagcaacaaaggaatacatccatggcgaacaatatagatcagactccaaaacagttaaccaacaagcttacttttatgccagagacctcgaagtccatcncaaggacacatttgtgttcagtatagatggcaccgtactctctaatattccatactacaaaaaacat

SEQ ID NO: 234591 - DNA, 360 bp, Glycine max
gatagcgaaacagagagtggtttcagtgagtgatcggtgttcacttgatccttcataagtcgtcatcatcatcatcatcatcaccgttgattgaagaagatgccgatcagaaacatcgccatcggaaggcctgaagaggctactcaccccgacacgttgaaggcggggttggctgagttcatctccaccttgatcttcgtgttcgccggttcaggttccggcatcgcctacaacaagctcaccgacaacggcgccgccactcccgccggcctcatctccgcttccatcgcccatgctttcgccctcttcgtcgccgtctccgtcggcgccaacatctccggcggccacgtcaaccccgcc

SEQ ID NO: 234592 - DNA, 395 bp, Glycine max
  unsure (1)..(395): unsure at all n locations
gataataagcttttttctctttctgtttgttcttcttccttattttcttccctagtcaaggagattcatctctgcaggttgttttagaaaagaaaaaatggtgaagatttgctgcattggtgctggatatgtggggggtccaacaatggcagtcattgctctgaagtgcccctccattgaagtggctgttgttgacatctccaaatcccggattgcagcatggaacagtgaccagcttcctatctatgagccaggccttgatggtgtggtgaagcaatgtcgtggcaaganacttttcttcagcactgatgttgagaaacatgtctatgaggcagacatagtgtttgtctctgtcaacaccccgaaaaaaaactcgcggtcttggagccggtaag

SEQ ID NO: 234593 - DNA, 435 bp, Glycine max
gatcgtagcgccagactgagaggaagagagagggagattctttgtttgctaccttctctcggaaaaatggttacgttcaggtttcaccagtaccaggtggttgggagggctcttcccacggaagcagatcagcaccccaagatctaccgaatgaagctctgggccaccaacgaggttcgcgccaagtccaagttctggtattttctgaggaaactgaaaaaggtgaagaagagcaatggccaagtgcttgccatcaacgagatttttgagaagaacccaaccaaaattaagaactatggtatatggttgcggtatcagagtaggactggttaccacaacatgtacaaggagtaccgtgacaccactctaaacggtgcagttgacgcaatgtacaatgaaatggcttctcgtcacagggtcaggagcccttgcatc

SEQ ID NO: 234594 - DNA, 405 bp, Glycine max
ggcacaagtgagtttgttgatcgagataactagaaacagtgtgatgaaaatgaaggtccttgttttcttcgttgctacaattttggtagcatggcaatgccatgcgtacgatatgttccctctccgaatgaacactggctatggtgcccgtactccggaggtgaaatgcgcaagttggaggcttgctgtggaagcacacaacatctttggctttgagaccattcctgaagagtgcgttgaagcaacaaaggaatacatccatggcgaacaatatagatcagactccaaaacagttaaccaacaagcttacttttatgccagagacctcgaagtccatcccaaggacacatttgtgttcagtatagatggcaccgtactctctaatattccatactacaaaaaaca

SEQ ID NO: 234595 - DNA, 433 bp, Glycine max
gactaccaacaacactgccaccactaaagcactgacaactctccttcactccaccactcctcactcttctcattcagatctacccaacacacacacaccaaaaaataaaataaaaatgcaactccaacccactctctccactctctacctctcccttttgttaacaataacgttaacatctccaaccttggcagcacaaagcaagccgcaggatctggtccggtcctcgtgcgtgcacgcgcggtacccgcgtctgtgcctgcgcaccctctcgaactacccgggtcccgccaacacgccgttagacgtggccagggcagctttgagggtaagcctggcccacacgcgccgggcctccaaattcctccatgcactttctcatggaggcgctgccgccatgagcaagcgccagcgctccgcgctgcgcgactgt

SEQ ID NO: 234596 - DNA, 433 bp, Glycine max
gaaattcacacacacatattctttgttgcaatatcacaaacacctcgtccgtcacaatgcaactagctgtggcggccaacgctgtcgtttcaccgtcgccgttccgacctcatccccttctccggtcatccttctccggcgtctccgttaagctcactccccaatccataacgttttcacgcttgaagcccctcaccgtcttcgccgccaccaagaaggccgtcgctgtcctcaaggggacctccgccgtcgaaggcgtcgccactctcatccaagaagacgatggcccgacgacagtttctgttagcatcactggccttactccggggcttcatggttttcacctacatgagtatggtgataccacaaatgggtgtatatcaacaggagcacattttaatcctaataacttgacacatggtgctcctgagga

SEQ ID NO: 234597 - DNA, 246 bp, Glycine max
tccaggtctcccacacgtccgacaggagcaaaaagaggagcacaagtggcatagttgattttgatgatcaagataactgtagataatgttatgagtccttgtgtccttcgttgctacaattctagaatcatggtaacatgatacttacaagagtttcacacgttcactcacacacagtgatactgtgctacgtaccccgtacgtcagatgctgcaattgcaagcttgctgtttgatcacacaacat

SEQ ID NO: 234598 - DNA, 419 bp, Glycine max
  unsure (1)..(419): unsure at all n locations
gaaggtgcaagagtttgttgtgagctataagctagtttatcgtgaggagaatatgaagttgtttgttttctttgttgctgcagtagttttggtagcatggccatgccatggcgcaggctaccaaaggttccctctccgaatgaaaactggctatggtgagcgttcttcggaggtaaaatgcgcaagttttaagcttgctgtggaagcacacaacatccgagcctttaaaaccattcctgaagagtgcgttgaaccaacaaaggactacattaatggcgaacaatttagattagactctaaaacagttaaccaacaagctttcttttatgctagtgaacgccaagttcatcacancgacatatttatattcggcatagataacaccgtactctctaatatcccatactatgaaaaacatg

SEQ ID NO: 234599 - DNA, 429 bp, Glycine max
  unsure (1)..(429): unsure at all n locations
ggcacaagtgagtttgttgatcgagataactagaaacagtgtgatgaaaatgaaggtccttgttttcttcgttgctacaattttggtagcatggcaatgccatgcgtacgatatgttccctctccgaatgaacactggctatggtgcccgtactccggaggtgaaatgcgcaagttggaggcttgctgtggaagcacacaacatctttggctttgagaccattcctgaagagtgcgttgaagcaacaaaggaatacatccatggcgaacaatatagatcagactccaaaacagttaaccaacangcttacttttatgccagagacctcgaagtcatcccaaggacacatttgtgttcagtatagatggcaccgtactctctaatattccatactacaaaaaacatgggtatggggtggagaaatttaac

SEQ ID NO: 234600 - DNA, 345 bp, Glycine max
  unsure (1)..(345): unsure at all n locations
gatatccaaaggaacaaaaatattattaagatgatcaacattattggagcacttgttctactctttgcatttctcttcctcagttgtgtgtatgcacaagacacaacaacccttgtgcctgcaatcataacttttggtgattctgctgtggatgtagggaacaatgactatcttcccacccttttcaaggctgattaccctccttatgggagggactttgttaaccaccaacctactgggaggttttgcaatggcaaattagctactgatttcactgctgacacattgggtttcaagacctatgctccagcatatcttagcccacatgcatcanggaaaaacctc

SEQ ID NO: 234601 - DNA, 297 bp, Glycine max
  unsure (1)..(297): unsure at all n locations
gctagctagggtttctgagtttatgtggttgcgcctctgcctgtaagagtgaaaaaaccttctcttttccttctctcaagtttcaagagatttcatcatggctccaaagaaggacaaggctccaccaccttcctccaagcccgccaaatctggcggtggcaagcagaagaagaagaagtggagcaagggaaagcaaaaggagaaggtgaacaatatggtgctgtttgatcagggcacctatggcaagctcctttctgaagctcncaaatacaagctcaacaatcccttcaatccccc

SEQ ID NO: 234602 - DNA, 396 bp, Glycine max
  unsure (1)..(396): unsure at all n locations
gagtctctacctcaagccactctaaagaaaatggcggtgcctctactctcgaagaagatcgtgaagaagagggtgaagaagttcaagaggcctcagagtgacaggaaaatttctgtcaagacaaactggcgcagaccaaagggtatcgattcccgtgttaggagaaagttcaagggatgcactttgatgccaaacattggttatggttcagacaagaagacccgccactatctccctaatggttttaagaaatttgttgttcacaatgtgaaggacttggaactgctcatgatgcacaacaggacttactgtgctgagattgcccacaatatatccacaagaaagaggaaagatatagttgagagagccgcgcagcttgatgtttgtgtgacanac

SEQ ID NO: 234603 - DNA, 421 bp, Glycine max
ggcacaagtgagtttgttgatcgagataactagaaacagtgtgatgaaaatgaaggtccttgttttcttcgttgctacaattttggtagcatggcaatgccatgcgtacgatatgttccctctccgaatgaacactggctatggtgcccgtactccggaggtgaaatgcgcaagttggaggcttgctgtggaagcacacaacatctttggctttgagaccattcctgaagagtgcgttgaagcaacaaaggaatacatccatggcgaacaatatagatcagactccaaaacagttaaccaacaagcttacttttatgccagagacctcgaagtccatcccaaggacacatttgtgttcagtatagatggcaccgtactctctaatattccatactacaaaaaacatggatatggggtggag

SEQ ID NO: 234604 - DNA, 414 bp, Glycine max
gatcccaatcagaaaaagttagggtttgtaactttgtcttttgcttgcgaatctgaatcgaataataatcaatcaatcatcatgtcgtcggcgaagaagatcacactgaagagttcggacggcgaggctttcgaggtggacgaggcggtggcgctggagtctcagacgataaagcacatgatcgaggacgactgcgccgacagcggcatccctctgccgaacgtgacgagcaagatcctggcgaaggtgatcgagtactgcaagaagcacgtcgaggccgcgaatcccgaagacaaaccctccgaggacgatctcaaagcctgggacgccgatttcgtcaaggtcgaccaggccacgctcttcgatcttatcctggctgcgaactacttgaacatcaagagcctgctggacctt

SEQ ID NO: 234605 - DNA, 431 bp, Glycine max
  unsure (1)..(431): unsure at all n locations
ggttctttgcgagatagaagagaaagccgtcgctatcctagtctcttcttcccctctacccatttcagtttcaggatggaatctcaggtgaagcacgcccttgttgtcaaagttatgggtcgtactgggtctagggggcaggtgactcaggttagagtgaagtttttggatgatcaaaaccgacacatcatgaggaacgtgaagggacccgtgagagaaggagacattctcaccctacttgagtctgaaagagaagcaagaaggttgcgctagaggatctcttcatggtttggctcaggacttaaacanaacatcgttgtttttgttgtatttaaaggatgtcaaatgttaattgtcaatgaactgaattatgcanctactatgtttgacattaagccattatgtttgtggctgagttatgactaaattta

SEQ ID NO: 234606 - DNA, 431 bp, Glycine max
gacctatcaagttaatttgcgtctatattcattttggcatcgaggttgaatctcatcggagagagaaaaaccataaccatgtctggaagaggaaagggaggcaagggtctcggaaagggaggagcgaaacgacaccgtaaggttctgagggataacattcagggcataacgaagcccgcaattcgccgtctcgcgagacgtggcggcgtgaagcgtatcagtggtctcatctacgaagaaacccgcggtgttctcaagatcttcctcgagaacgtcattcgcgacgctgtcacctacgctgagcacgctcgccgcaagaccgtcactgccatggacgttgtttacgccctcaagaggcagggcaggaccctctacggtttcggcggttagagaattaccgatttctgcattgcgtcgtggattaaggtttc

SEQ ID NO: 234607 - DNA, 336 bp, Glycine max
ggactgaagccagcgagtgatcgaacgagcgacgtaaggttttcgtgggacccccgtctctgcactcagttcgcgacaatcgggtccatcccggtataaggcgagttgagcgagttgactcagccgggcttcgactaattccaacgccaaacttccctcatgatcagctgcaccctcctctggaaggagctctccgaccacttcacctcgctcgagcatgacctcaaccacaaacgcgaaggcctcaaacgcaagattcgcaacctcgacaacactacttccgactccctccggctcctcgatcggcgcgaaaactccctcgacgccacgctccaa

SEQ ID NO: 234608 - DNA, 425 bp, Glycine max
ggacaagccaatcctttgtgtaggtgctcaaccctagtaagccgcaatggtgaagtactcaagggagcctgacaatccaactaagtcttgcaaggctagaggcgccgaccttagggttcattttaagaacacaagggaaactgcctttgcaatcaggaagttgcccttggtcaaggctaaaaggtacttggaagatgttcttgcccacaagcaggcaattccattcagacgtttttgtcgaggtgttggaaggacagcccaggctaagaatagacactctaatggccaaggacggtggcctgtcaagtcagcaaaattcattcttgatttgctcaaaaatgctgagagcaatgctgaagtgaaaggtttggatgttgatgcactgtacatttcgcatatccaagtcaatcaagcacagaagcaaa

SEQ ID NO: 234609 - DNA, 393 bp, Glycine max
ggcacaagtttgttgagatagctagaagcactaagatgaaaatgaaagtgcttgttttgtttgttgctacagttttggtagcatatgaatgccatggctcagactagcagaagttccctctccaaatgaaaactgggtttggtgggcaatacagcaatgaggtggcatgtgccagttggaggcttggcgtggaagcaaacaacgtactcaagtggcaaactgttcctgcagcttgcggagagtacatagctgactacgttctaggagaccaatatagatcagattccaaaacagttaaccaacaagcttatttctatgctaaatccctcaaactcaccaacagagatgtctttgtcttggacgttgacgacactactctctctaatctccagt

SEQ ID NO: 234610 - DNA, 419 bp, Glycine max
ggcagtttcaaattttcttttccttcactttcccgagaaaaaaataacacttttcacgttcgtcactacgttctcacttcgatatggctcgtacgaagcaaaccgctcgcaagtccaccggtggcaaggcgccacgtaagcagctcgccaccaaggccgctcggaagtccgctccggcgaccggaggagtgaagaagccccaccgcttcaggccgggaaccgtggcgctgagggaaatcagaaagtaccagaagagcaccgagcttctcatcaggaagcttccatttcagaggctcgtgagagaaatcgcgcaggatttcaagaccgatttgcgtttccagagcagcgctgtttccgcgcttcaggaggctgctgaggcttacctcgttgggttgttcgaggacactaacctctgcgcg

SEQ ID NO: 234611 - DNA, 425 bp, Glycine max
gacccccaaactctgcatcggaagaaaccctagccactctcccggcgtcacgatgcagatcttcgtgaaaaccctaacgggtaaaacgatcacgttggaggtggagtcttcggacaccatcgacaacgtgaaggccaagatccaggacaaggaaggcatccctccggaccagcagcgcctcatcttcgccgggaagcagctggaggacggccgcaccctcgccgactacaacatccagaaggagtccacgcttcacctcgtcctccgcctccgtggcggcgccaagaagcgcaagaagaagacctacacaaagcccaagaagatcaagcacaagcacaagaaggtcaagctcggcattcttcagttctacaaggtcgacgattctggaaaagtccagaggctccgcaaggagtgccccaacgccg

SEQ ID NO: 234612 - DNA, 375 bp, Glycine max
gacaacacaacgcaacacaacgcgcactctctcttttctctcttaacacaaaaaccctatcgttcttcgcggtttcgccgattctcgccatgccgaaagccaaatccgacgccaaagccgccgatagccggttgaagcgcaagggcgctggtgctggaaggaagcaatcgaagaaagctgctaaggatcctaacaagccaaagagacctccaagcgctttcttcgttttcatgtccgagttcagagagcagtttaagaaggagcatcctaacaacaaatccgtcgctgttgtcggtaaagctggtggtgacaaatggaaatccctgtctgatgctgaaaaggcccccttcgttgccacggccgaaaagaagaaac

SEQ ID NO: 234613 - DNA, 405 bp, Glycine max; identical to SEQ ID NO: 234574

SEQ ID NO: 234614 - DNA, 432 bp, Glycine max
ggcacaagtgagtttgttgatcgagataactagaaacagtgtgatgaaaatgaaggtccttgttttcttcgttgctacaattttggtagcatggcaatgccatgcgtacgatatgttccctctccgaatgaacactggctatggtgcccgtactccggaggtgaaatgcgcaagttggaggcttgctgtggaagcacacaacatctttggctttgagaccattcctgaagagtgcgttgaagcaacaaaggaatacatccatggcgaacaatatagatcagactccaaaacagttaaccaacaagcttacttttatgccagagacctcgaagtccatcccaaggacacatttgtgttcagtatagatggcaccgtactctctaatattccatactacaaaaaacatggataatggggtggagaaatttaact

SEQ ID NO: 234615 - DNA, 326 bp, Glycine max
ggcacaagtgagtttgttgatcgagataactagaaacagtgtgatgaaaatgaaggtccttgttttcttcgttgctacaattttggtagcatggcaatgccatgcgtacgatatgttccctctccgaatgaacactggctatggtgcccgtactccggaggtgaaatgcgcaagttggaggcttgctgtggaagcacacaacatctttggctttgagaccattcctgaagagtgcgttgaagcaacaaaggaatacatccatggcgaacaatatagatcagactccaaaacagttaaccaacaagcttacttttatgccagagacc

SEQ ID NO: 234616 - DNA, 409 bp, Glycine max
  unsure (1)..(409): unsure at all n locations
ggcgtgttttcatcattgtcgttctgaacggaaaagcactggcgcagctaccctgaggcttctcttctcttctcttctctgtcgtgagtcaccatggtgagggttagtgtgctgaacgatgctctgaagagcatgtacaatgctgagaaaaggggaaagcgccaagtcatgattaggccatcctccaaagtcattatcaaattccttttggtgatgcaaaagcacggatacatcggagagtttgagtatgttgatgaccacagggctggtaaaatcgtggttgaattgaacggtagactgaacaagtgtggggttattagtccccgttttgatgtgggcgtcaaagagattgaaggttggactgctaggcctctcccctcaagacagtttgggtatantgtattgacta

SEQ ID NO: 234617 - DNA, 331 bp, Glycine max
aagggacgacagaaggggataaatcttttgaattgattgttgtaagactttgtaattgaggtgctgcaatggcttcaagtcaggaagaggtgactcttttgggagtaattggaagcccatttgcttgcagggtgaagattgcccttaagttgaagggagttgaatacaaatatgtggaagaaaatttggccaacaagagtgatttgcttctcaaatccaacccagttcacaagaaagttccagtttttattcacaatgagaagcccatagcagagtctcttgtgattgttgagtacattgatgagacatggaagaacaaccccatcttgcc

SEQ ID NO: 234618 - DNA, 376 bp, Glycine max
gactctgcagcagcacctttaaacgccgaaggttcatccaatctccgaaggccttcaccggattgcaaccatgtcgaggagaaaggttagagagccaaaggaggaaaacgtgactctgggcccagctgttagagatggtgaacatgtttttggagtcgctcgcatctttgcctccttcaatgacaccttcattcatgtcactgatctgtctgggagggaaacacttgtccgcatcactggcgggatgaaggttaaagctgacagagatgaatcatctccatatgctgctatgcttgctgcgcaggatgttgctgctagatgcaaggaactgggcataactgctcttcatatcaagctccgtgccacaggtggaaac

SEQ ID NO: 234619 - DNA, 289 bp, Glycine max
gatatttgagttcaaacaaatcaaagccatggccacctccaacttctctattgttctctccgtctccctagccttctttttggtgctacttaccaaggcacactcgaccgataccgtttctttcagcttcaacaagttcaacccagtccaaccaaacattatgctccaaaatgatgctagtatttcatcctctggggtgttacaactcaccaatgttggcagcaacggcgtgcccacctcgggatctctcggtcgtgccctttacgctgcaccaatccatatttgggac

SEQ ID NO: 234620 - DNA, 418 bp, Glycine max
gatcattcataatccatcaatcaagaaagaaacagaaacttttttctttgataaatttgttctttgttccgacaatgcgtccaccgcggaagagggtggatttctcgcgcggcgacaaggtggagatctgcagcaacgaggagggcttcctcggctcctactacccggccacggtcgtgtcgcgcctcgacaacggcctctacgtcgtacgctacgacacgctcctcgaggacgacgcctcgttccagcccctcaccgaaaccctatttccgaaagagctccgtccccatccgccacgtgtccccaggacccacttcgcgctccaccagtgcgtcgacgccttcgacaacgacggctggtggctcggccagatcaccggcaagaacgacggcgagcattactatgtttacttttccac

SEQ ID NO: 234621 - DNA, 367 bp, Glycine max
gacggcactcgttttcgttctcgttctggtttatagatctttgcgaaggaggtttacagcgctcaaccaaagatgcagaacgaggaaggacagatcactgagctttacattcctaggaagtgctccgccacaaacagattgattaccgctaaggaccatgcttcggttcagatcaacattgggcatgtggatgagaatggcgtctacaatggccatttctccacttttgccctctgcggattcatccgtgctcaaggtgatgctgacagtgctctagaccgcttgtggcagaagaagaaagttgaagttaagcaacagtagacaccaatgatagtttgtaacttcgtaaggtataaattccaaccct

SEQ ID NO: 234622 - DNA, 416 bp, Glycine max
  unsure (1)..(416): unsure at all n locations
gagtgtctgctgccttccattcgttcacctcctcaacctctgcagcgccttcgatccagaaaacatgactaagagaacaaagaaggctggcattgttggaaaatacggtacccgttatggcgccagtctgcgtaagcagattaagaagatggaagttagtcaacacagcaagtttttctgtgaattttgtggaaagtatgctgtgaagaggaaagctgtgggaatatggggatgcaaggactgtggtaaagtgaaagctggcggtgcttacactttgaataccgcaagtgccgtgactgtacggagcaccatcangaagttgagggagcaaactgagagttaagcttttttgtttatgctatcaattactattagactttgcatgaagtgcctaatttgtantcactgaactgcac

SEQ ID NO: 234623 - DNA, 283 bp, Glycine max
ggcacaagtgagtttgttgatcgagataactagaaacagtgtgatgaaaatgaaggtccttgttttcttcgttgctacaattttggtagcatggcaatgccatgcgtacgatatgttccctctccgaatgaacactggctatggtgcccgtactccggaggtgaaatgcgcaagttggaggcttgctgtggaagcacacaacatctttggctttgagaccattcctgaagagtgcgttgaagcaacaaaggaatacatccatggcgaacaatatagatcagac

SEQ ID NO: 234624 - DNA, 374 bp, Glycine max
ggccacaatggttgtccctcttaggcactttcttgttttctctctcaccctcatatccatcatcttccacacccatggagcgttctctgagcaatcaataatcaagttacccacagaccaaccaagggtagagaaactgacccacttgcattttttctaccacgacatcttagagggcaagaacatcacggtggtgaaaatcatcgagccatcagcgagcgaggttcgtgaagcaactgggtttggaaccactttcatgatggacaatgttttgaccgagggtcaagagctgagctcgaagcacgttgggagggctcaagggctgtttggcttggcctctttggaggaccgtggaatggtgatgctcattaact

SEQ ID NO: 234625 - DNA, 407 bp, Glycine max
  unsure (1)..(407): unsure at all n locations
ggcacaagtgagtttgttgatcgagataactagaaacagtgtgatgaaaatgaaggtccttgttttcttcgttgctacaattttggtagcatggcaatgccatgcgtacgatatgttccctctccgaatgaacactggctatggtgcccgtactccggaggtgaaatgcgcaagttggaggcttgctgtggaagcacacaacatctttggctttgagaccattcctgaagagtgcgttgaagcatcaaaggaatacatccatggcgaacaatatagatcagactccanaacagttaaccaacaagcttacttttatgccagagaactcgaagtccatcccaaggacacatttgtgttcagtatagatggcaccgtactctctaatattccatactacanaaaacatg

SEQ ID NO: 234626 - DNA, 413 bp, Glycine max
  unsure (1)..(413): unsure at all n locations
gaatccggtagaaaagggttttatttctttttcctttcaattattttctctgtcttgtctttgttattcagttcggttgttgtgttgtgttgtgtgctgcaacacatccagaaacacaatcggtgtcgtgttgggttgggtttttttgttattaaaagaaaagaaaaggggggatggctcggagagcagaggaagagtacgattatctgttcaaggttgtactgatcggtgattctggtgttggaaaatccaatctcctgtcncgattcactcgcaacgagttttgcctcgaatccaagtccaccattggagtcgaattcgctactcgcactcttcaggtctttcttttcttcagatctgatcaagagatgtctggaattccaactttggatttcaacccctcgctcgcatca

SEQ ID NO: 234627 - DNA, 437 bp, Glycine max
  unsure (1)..(437): unsure at all n locations
ggcacaagtttgttgagatagctagaagcaataagatgaaaatgaaagtgcttgttttgtttgttgctacagttttggtagcatatgaatgccatggctcagactaccagaagttccctctccaaatgaaaactgggtttggtgggcaatacagcaatgaggtggcatgtgccagttggaggcttggcgtggaagcaaacaacgtagtcaagtggcaaactgttcctgcagcttgcggagagtacatagctgactacgttctangagaacaatatagatcagattccanaacagttaaccaacaagcttaattctatgctaaatccctcaactcacaacanagatgtccttgtcctggacgttgaagacactactctctctaatctccagtattttgctaaacatggaatttggtgtggaaccacacaatacgacgg

SEQ ID NO: 234628 - DNA, 357 bp, Glycine max
  unsure (1)..(357): unsure at all n locations
ggcacaagtgagtttgttgatcgagataactagaaacagtgtgatgaaaatgaaggtccttgttttcttcgttgctacaattttggtagcatggcaatgccatgcgtacgatatgttccctctccgaatgaacactggctatggtgcccgtactccggaggtgaaatgcgcaagttggaggcttgctgtggaagcacacaacatctttggctttgagaccattcatgaagagtgcgttgaagcaacaaaggaatacatccatggcgaacaatatagatcagactccanaacagttaaccaacaagcttacttttatgccagagacctcgaagtccatcccaaagacacatttgtgtt

SEQ ID NO: 234629 - DNA, 420 bp, Glycine max
ggacacaagctggggagttcttccacggagatcatcatcttcacttcaattcagtttactcatcgtgtgatttcatccaaagttagcaacatgagcttcttgaggccttctgcgttgtacaactttctgatcagttatcctgcgctgcgatggctgccatgtcagagttggggcttccttcgatggcccggccttgatgggttcttcaggcttttcgtggttgtgcttctgtggtctacactatccgagcttcgcttcataccctcatcttctatgtaccccacccttcgtgttggcgaccgaattattgtcgaaaaggcttcatattacatcaggagtccagctatacatgatattgtaacatttaaggatccaacacagtcctctggggaaaacacagatgctgtttttatcaagaga

SEQ ID NO: 234630 - DNA, 275 bp, Glycine max
  unsure (1)..(275): unsure at all n locations
ggcacaagtgagtttgttgatcgagataactagaaacagtgtgatgaaaatgaaggtccttgttttcttcgttgctacaattttggtagcatggcaatgccatgcgtacgatatgttccctctccgaatgaacactggctatggtgcccgtactccggaggtgaaatgcgcaagttggaggcttgctgtggaagcacacaacatctttggctttgagaccattcctgaagagtgcgttgaagcaacanaggaatacatccatggcgaacaatata

SEQ ID NO: 234631 - DNA, 268 bp, Glycine max
gactacctcaaaaacaacactacaatagcataacccttcgaagtcgtcgtttatctctcctcgttcgcatcttcaccctttccctgtctctcagaaagatgaaggtggtcgctgcgtatctgctcgccgtcctcggtggcaacaacaccccctccaccgatgacatcaaggaaatcctcggctccgttggaatagaggcagatgaagataggattgaatcgttcttgtctgaagttaagggtaaggatatagttgagctaattgctgc

SEQ ID NO: 234632 - DNA, 413 bp, Glycine max
  unsure (1)..(413): unsure at all n locations
agaagggcaagcaactaaaaaagggtgctaatgaagcgactaagacactgaacagaggcatttctgagttcgttgtgatggccgcagacactgagcctcttgagattcttctccatcttcctctccttgctgaggataagaatgttccctatgtattcgttccatcaaaacaagcacttgggcgagcatgtggagtcacacggccagtgattgcatgttctgtaacaactaatgaaggaagtcaactcaaatcccaaattcagcaactaaaggatgctattgagaagctgttaatttgaaaatttgatattcggcatgacgggcttcttgagaaggctttgactggacagatgttgtantcaacagacaaaggtgttttatgtgtaaacctacatttatatttacttttgccg

SEQ ID NO: 234633 - DNA, 433 bp, Glycine max
ggcacaagtgagtttgttgatcgagataactagaaacagtgtgatgaaaatgaaggtccttgttttcttcgttgctacaattttggtagcatggcaatgccatgcgtacgatatgttccctctccgaatgaacactggctatggtgcccgtactctggaggtgaaatgcgcaagttggaggcttgctgtggaagcacacaacatctttggctttgagaccattcctgaagagtgcgttgaagcaacaaaggaatacatccatggcgaacaatatagatcagactccagaacagttaaccaacaagcttacttttatgccagagacctcgaagtcgatcccaaggacacatttgtgttcagtatagatggcaccgtactctctaatattccgtactacaaaaaaacatggattatggggtggagaaatttaact

SEQ ID NO: 234634 - DNA, 325 bp, Glycine max
gacgttcacattcaggaatcgttttcttcagaaaatttgccatcgttgagggaagcgcgagagccttcgttgttcaagatgagagctaagtggaagaagaagcgcatgaggaggttgaagaggaagcgccgaaagatgagacaaagatctaagtaggtgcttgaacaaggagtggagatgatgtgcttttccatctgctaccagcttcatgacattttatgctgtcatggctcttatgatgatcttgaggtctagtggcgaggggagcttccatcttgactttaggttagctttactggtctaaagattgctgttttaagtgtgg

SEQ ID NO: 234635 - DNA, 366 bp, Glycine max
gaccacattccaaaacacaaacacatacattgtagtatcacttttgtctcggaatttgttcctttgagttatggcaagcttaaaggttgcatgtgtggttttgatgtgcatggctgtgatgagtgcaccaatgatggtgcaagccgtgtcatgcaatgatgtttctgtgaacctagcaccgtgcctatcttacctgatgcagggtggagatgttccagaatcgtgctgtagcggagtgaggaacattctgggttctgccagcaccacctttgacaaacaaaccgtgtgcaaatgtcttcagcaagctgctaataactatggcatcaacgacgaatacgctcaggaactcccggcccgctgcaatgt

SEQ ID NO: 234636 - DNA, 428 bp, Glycine max
gacaacaaaatttgccaattgccatttcaatcctcagtttctttcttcaacgtttccatcatacacagatcccaatcctctctcaagccctaatttcccctcatttccatggccacagaagagcccactgtcgcggtggaacccgctcccgaacctgcctccgccgatcctctcccggaggagaaggaggagaccaaacctgaagccaaggctaagaaaaccaaggagcccaaacctaaaaaggtttccagacctcgcaaccctcccactcatccttcctacgaagagatggttaaagatgcaattacctcgctgaaggagaaaaccggttcgagccaatacgcgattgcgaagttcatcgaggagaagcacaagcagcttccaccgaacttcaagaagcttcttctctaccatttgaagaagctcgt

SEQ ID NO: 234637 - DNA, 411 bp, Glycine max
  unsure (1)..(411): unsure at all n locations
ggcacaagtgagtttgttgatcgagataactagaaacagtgtgatgaaaatgaaggtccttgttttcttcgttgctacaattttggtagcatggcaatgccatgcgtacgatatgttccctctccgaatgaacactggctatggtgcccgtactccggaggtgaaatgcgcaagttggaggcttgctgtggaagcacacaacatctttggctttgagaccattcctgaagagtgcgttgaagcaacaaaggaatacatccatggcgaacaatatagattagactccaaaacagttaaccaacaagcttacttttatgtcagagacctcgaagtccatcccaaggacacatttgtgttcagtatagacggcaccgtactctctaatattccatactacaanaaacatggata

SEQ ID NO: 234638 - DNA, 273 bp, Glycine max
  unsure (1)..(273): unsure at all n locations
ggcacaagtgagtttgttgatcgagataactagaaacagtgtgatgaaaatgaaggtccttgttttcttcgttgctacaattttggtagcatggcaatgccatgcgtacgatatgttccctctccgaatgaacactggctatggtgcccgtactccggaggtgaaatgcgcaagttggaggcttgctgtggaagcacacaacatctttggctttgagaccattcctgaagagtgcgttgaagcaacanaggaatacatccatggcgaacaata

SEQ ID NO: 234639 - DNA, 304 bp, Glycine max
  unsure (1)..(304): unsure at all n locations
ggagcaaaaccctaatccctatttttcttcctcagtagtgtcatttacgcttctcttctctgcagcaactatgcctaaccctaaggtcttcttcgacatgaccatcggcggtcaatctgctggccgcatcgtgatggagctctacgccgacgtcactccccgcaccgccgagaacttccgcgcgctttgcaccggcgagaagggcgtanggcggagcggcaagcccctccactacaagggctcgtccttccaccgcgtgattccgagtttcatgtgtcacggtggcgacttcaccgccggaaac

SEQ ID NO: 234640 - DNA, 329 bp, Glycine max
  unsure (1)..(329): unsure at all n locations
tcagacagctgcaaaagacaacagaaggggagatttcgcgaaaaatatcacgtgctgacaacacggtatcgcaagtcaacctttccccaaaccgtcaattcaaattcccaaaatcttaaaccttcaaattcttcacctttccttcacttcagagagcgagtgtgagacagacaacanaacagaatgggtgtggtggtgatcgacggcagcaccgtgcgcgacttcgtgaacgacgaagcggccttcgcgaagagcgtggacgagcagttcggggtgctgggactcaacaacgacggcgtcctctcgcgctcggagctccgcacggcctt

SEQ ID NO: 234641 - DNA, 265 bp, Glycine max
gccacaacacagaacaaaaacagagaacaaatggaaacccttagccaacacaaccatcatggccacctctgctattcagcaatcagcattcactggtcaaactgctctgaagcagctcaatgagttcgtccgcaagaccggtggcgccggcaaaggtcgcactaacatgcgccgcaccgtcaagagtgctcctcagagcatttggtatggccctgaccgtcccaagtacttgggtccattctcggagcagattccatcatacctg

SEQ ID NO: 234642 - DNA, 302 bp, Glycine max
ggcacaagtgagtttgttgatcgagataactagaaacagtgtgatgaaaatgaaggtccttgttttcttcgttgctaaaattttggtagcatggcaatgccatgcgtacgatatgttccctctccgaatgaacactggctatggtgcccgtactccggaagtgaaatgcgcaagttggaagcttgctgtggaaacacacaacatctttggctttgagaccattcctgaagagtgcgtttaagcaacaaaagaatacatccatggcgaacaatatagattagactccaaaacagttaaccaac

SEQ ID NO: 234643 - DNA, 215 bp, Glycine max
cacgcatccgtaaagttccaagacgacagaaggggaaggtgcaatagtttggtgtgagctataagctagtttaacgttaggagaatatgaagtcgttggtttcctcggttgctgcagttagttaggaagcaattgcatgccatggcacatgttaccacacgttccctctccgaatgataactcgcgttggcgagcgttcttctgaggtaaaatgc

SEQ ID NO: 234644 - DNA, 387 bp, Glycine max
  unsure (1)..(387): unsure at all n locations
gatgcacaagtttgttgagatagctagaagcaataagatgaaaatgaaagtgcttgttttgtttgttgctacagttttggtagcatatgaatgccatggcccagactaccagaagttccctctccaaatgaaaactgggtttggtgggcaatacagcaatgaggtggcatgtgccagttggaggcttggcgtggaagcaaacaacgtagtcaagtggcaaactgttcctgcagcttgcggagagtacatagctgactacgttctangagaccaatatagatcagattccaaaacagttaaccaacaagcttatttctatgctaaatccctcatactcaccaacagagatgtccttgtcctggacgttgacgacactactctctctaa

SEQ ID NO: 234645 - DNA, 407 bp, Glycine max
  unsure (1)..(407): unsure at all n locations
ggcacaagtttgttgagatagctagaagcaataagatgaaaatgaaagtgcttgttttgtttgttgctacagttttggtagcatatgaatgccatggctcagactaccagaagttccctctccaaatgaaaactgggtttggtgggcaatacagcaatgaggtggcatgtgccagttggaggcttggcgtggaagcaaacaacgtagtcaagtggcaaactgttcctgcagcttgcggagagtacatagctgactacgttctaagagaccaatatagatcagattccaaaacagttaaccaacaagcttatttctatgctaaatccctcaaactcatcaacanagatgtctttgtcttggacgttgacgacactactctctctaatctccagtattttgctaaccat

SEQ ID NO: 234646 - DNA, 355 bp, Glycine max
gcagcagcaactttaaacgccgaagaaagttcatccaatctccgaagcccttcagcgcattgcaaccatgtcgagaagaaaggttagagagccaaaggaagaaaacgtgactctgggcccagctgttaaagatggcgaacatgtctttggcgtcgctcgcatctttgcctccttcaatgatagcttcattcatgtcactgatctgtccgggagggaaacacttgtccgcatcacatgtggaatgaaggttaacgctgacagagatgaatcgtctccctatgctgctatgcatgctgcacaagacgttgctgccagatgcaaagaactgggcataactgctcttcagatcaagctc

SEQ ID NO: 234647 - DNA, 378 bp, Glycine max
ggggtggttacctgcggtaatgttccactagagtcctcctttcagaaagttcctagatgtgtatatacatccacaagcttgtatgaatatcgaggatgggattcaaaagcagcaaacccaaaacatcgccgttttacatggggacttagagcagctgagagacatgtggtggacttctacatatctgatttccaatctggattgagagcattggttaaaacaggctatggtgcaagggtgactccttatgttgatgattccgttgttattgatgttaatccagccaatagagacatgtcccctgagtttcttcgatggttgggcgagagaaaactttctagcgatgaccgtataatgcaattaaaagaagggtacatc

SEQ ID NO: 234648 - DNA, 262 bp, Glycine max
ggcacaagtttgttgagatagctagaagcaataagatgaaaatgaaagtgcttgttttgtttgttgctacagttttggtagcatatgaatgccatggctcagactaccagaagttccctctccaaatgaaaactgggtttggtgggcaatacagcaatgaggtggcatgtgccaattggaggcttggcgtggaagcaaacaacatagtcaagtggcaaactgttcctgcagcttgcggagagtacatagctgactacgttct

SEQ ID NO: 234649 - DNA, 241 bp, Glycine max
gacacacagtctcttcttcttgcaattccttcctcgttatggagtcgcgagtgctgtcacgcgccggaaccttgtcctccctccctcacctccgcaagccgccgcgggaggccgtctccagcgcctccctcgtcgccgtgaaggccgtgggctccgtcgcggacggcggggacctgatttgggggaggcagctgcgcccggagctctgctcgccggtgctgaagaaagaggctgtcctcct

SEQ ID NO: 234650 - DNA, 355 bp, Glycine max
gacttgcggctgcagtagagaagcactcttcgttcttcgactgtctacgatctgcgttctccgaattgtgaaaatgtcgctcggagaaactgcctgttcatacgcagctctcatccttcaatgaagatggaattagtgtaactgctgacaagatcagcaccttgttgaaaactgcaaaggttccagtagactcttagtggccaaccttgtttggcaaacttgctgagaagaaaaatcttggcgatttgatagcagatgcggcaggcggtggtgcaccagttgctgttgcagctgccccagttgctgctgctgctggtggtgctgctgccgcagctcagctgctgaagagaaaaag

SEQ ID NO: 234651 - DNA, 341 bp, Glycine max
gaccacattccaaaacacaaacacatacattgtagtatcacttttgtctcggaatttgttcttttgagttatggcaagcttaaaggttgcatgtgtggttttgatgtgcatggctgtgatgagtgcaccaatgatggtgcaagccgtgtcatgcaatgatgtttctgtgaacctagcaccgtgcctatcttacctgatgcagggtggagatgttccagaatcgtgctgtagcggagtgaggaacattctgggttctgccagcaccacctttgacaaacaaaccgtgtgcaaatgtcttcagcaagctgctaaataactatggcatcaacgacgaatacgct

SEQ ID NO: 234652 - DNA, 395 bp, Glycine max
ggaacctttgcattctattcattcaagattcagcaagtgcgttttggaagcagagaccgaaatacttcgagatggcccgtacaaagcaaactgctcgtaagtcaactggaggaaaagctcccaggaagcagcttgcaaccaaggctgcacgtaagtctgcaccaacaactggtggtgtgaagaagcctcatcgttatcgccctggaactgttgctcttcgtgagattaggaaataccagaagagcactgagctcctaatcaggaagcttcctttccagaggttggttcgtgaaattgcccaggatttcaagactgatctgcgtttccagagccatgctgtgcttgcattgcaagaggctgctgaggcataccttgttgggctctttgaggacact

SEQ ID NO: 234653 - DNA, 349 bp, Glycine max
ggcacaagtgagtttgttgatcgagataactagaaacagtgtgatgaaaatgaaggtccttgttttcttcgttgctacaattttggtagcatggcaatgccatgcgtacgatatgttccctctccgaatgaacactggctatggtgcccgtactccggaggtgaaatgcgcaagttggaggcttgctgtggaagcacacaacatctttggctttgagaccattcctgaagagtgcgttgaagcaacaaaggaatacatccatggcgaagaatatagattagactccagaacagttaaccaacaagcttacttttatgccagagacctcgaagtccatcccaaggacaca

SEQ ID NO: 234654 - DNA, 437 bp, Glycine max
ggctttttgcagtccctcctcgaatagcccagggcattattccaggggttacggctgaatcttatcaagaggacaacaaattatggaaaaagcatgttaacgcttacaaaagaatgaataaattgattggcactaccagatatcggaatgtgatggacatgaatgcaggccttggaggatttgcagctgtgcttgaatcacagaagtcttgggtgatgaatgttgtgcctacaattgctgagaacactttgggtgttgtctatgagagaggtctgatcggcatttatcatgactggtgcgaaggcttttcaacatatccaaggacatatgatcttattcatgctaatggtttattcagcttgtagcaggacaagtgcaacctagaagacatccttctagagatggatcgcatcctaaggcctgaaggaacaatcatc

SEQ ID NO: 234655 - DNA, 279 bp, Glycine max
cgtccgtaaagctgcaaaaagaggggagcagggggcacatgtgaatttgtcgatcgcaataactagaatcagtgctgtcgcttatcagcgtccctgatttcttcgttgctagacttttggtagcatggcattgccatgcatacgatatgttccctctccgaatgaacactggctatggtgcccgtactccggaggtgaaatgcgcaagttggttgcatgctgtggaggcacacaacatctttggctttgacaccattcctgaagagtgccttgaatcaa

SEQ ID NO: 234656 - DNA, 384 bp, Glycine max
  unsure (1)..(384): unsure at all n locations
ggcacaagtttgttgagatagctagaagcaataagatgaaaatgaaagtgcttgttttgtttgttgctacagttttggtagcatatgaatgccatggctcagactaccagaagttccctctccaaatgaaaactgggtttggtgggcaatacagcaatgaggtggcatgtgccagttggaggcttggcgtggaagcaaacaacgtagtcaagtggcaaactgttcctgcagcttgcggagagtacatagctgactacgttctaggagaacaatatagatcagatttcaaaacagttaaacaacangcttaattctatgctanatccctcagactcaacaacaaagatgtccttgtcttggacgttgaccacactactctctcca

SEQ ID NO: 234657 - DNA, 351 bp, Glycine max
ggcacaagtgaatttgttggtcgaaatatgtagaatcagtgtgagtgcttatgaacgtccttgttttctgcgttgctacaattttgggagcatgacactaccatgcttacgatatgtaccatctccgattctccactgcccatggtgaacgtactccggaggtgaattgctcaagttggaggcttgctgtggaagcacacatgatctttggctttgacaccattcctgaagagtgcgttcaatcaacaaaggtatacagccatcagcagcattatagatcagcatcctgaacagttaaatccaaggcttatttctatgccatagatctcgaagtccatcccaaggacacat

SEQ ID NO: 234658 - DNA, 405 bp, Glycine max
  unsure (1)..(405): unsure at all n locations
ggcacaagtgagtttgttgatcgagataactagaaacagtgtgatgaaaatgaacgtccttgttttcttcgttgctacaattttggtagcatggcaatgccatgcgtacgatatgttccctctccgaatgaacactggctatggtgcccgtactccggaggtgaaatgcgcaagttggaggcttgctgtggaagcacacaacatctttggctttgagaccattcctgaagagtgcgttgaagcaacanaggaatacatccatggcgaacaatatagatcagactccanaacagttaaccaacaagcttacttttatgccagagacctcgaagtccatcccaaagacacatttgtgttcagtatagatggcaccgtactctctaatattccatactacaaaaaaca

SEQ ID NO: 234659 - DNA, 327 bp, Glycine max
gatgccacaatggttgtccctcttaggcactttcttgttttctctctcaccctcatatccatcatcttccacacccatggagcgttctctgagcaatcaataatcaagttacccacagaccaaccaagggtagagaaactgacccacttgcattttttctaccacgacatcttagagggcaagaacatcacggtggtgaaaatcatcgagccatcagcgagcgaggttcgtgaagcaactgggtttggaaccactttcatgatggacaatgttttgaccgagggtcgagagctgagctcgaagcacgttggaagggctcaggggctg

SEQ ID NO: 234660 - DNA, 238 bp, Glycine max
gagacacagctattcctcttaagcttgctactgagtttcgacactgcataccttacgtcttccgaattcgaagctaatttgcaagatggctaaggaaaaggctcagatcaacattgtggtggttggtcatgtggatcctgaggaggcaaccaccattaacgagctgaagaagcctgttgtggaggaagaagctcgagcgcatgccatatgagggcatgcacgtacggcctcggagggg

SEQ ID NO: 234661 - DNA, 415 bp, Glycine max
ggtgcacaagtgagtttgttgatcgagataactagaaacagtgtgatgaaaatgaaggtccttgttttcttcgttgctacaattttggtagcatggcaatgccatgcgtacgatatgttccctctccgaatgaacactggctatggtgcccgtactccggaggtgaaatgcgcaagttggaggcttgccgtggaagcacacaacatctttggctttgagaccattcctgaagagtgcgttgaagcaacagaggaatacatccatggcgaacaatatagattagactccagaacagttaaccaacaagcttacttttatgccagagacctcgaagtccatcccaaggacacatttgtgttcagtagagatggcaccgtactctctaatattccatactacaaaaaacatggatatg

SEQ ID NO: 234662 - DNA, 416 bp, Glycine max
gagagtggtggagtgtgcagaagagcgtcgcagtcgcaaccctaatcagaagaagcgcagcttcaagcgagtgacagccaccagccatgggtcgtatgcacagccgcggtaagggtatatcctcgtctgctttgccctacaaaaggacacctcctagctggctcaagatctcttcgcaagatgtcgaagaagatatctgcaagtttgcgaagaaaggtttgaccccgtctcagattggtgtcattctcagagattctcacggtattgcgcaggtcaatagcgtcactggcagcaaaatccttcgcatcctcaaagctcacggacttgcgcctgaaattccagaggacctggtacagttgattgagaaggaagtttcatttaggaagcatcttgagaggaacaggaaggacaaggac

SEQ ID NO: 234663 - DNA, 408 bp, Glycine max
  unsure (1)..(408): unsure at all n locations
atacaggtcccttgtagccacttgttctgtcttgaaaatccattttgcttcatttcattcctcacatttatttttcttccatggagaacttgttgggtctgctgagaattcatgttgaaaaaggtgtcaatcttgccatcagggatgtggtgagcagtgacccttatgttgtcatcaaaatgggcaagcagaagctgaagactcgggtagtcaataagaatctaaatcctgaatggaatgatgacttgaccttgtctatctctgagcctcatgctccaattcatctacatgtgtatgacaaggacacatttagcatggatgacaaaatgggggatgcagagtttttcatangtccatttattgaagcagtgaagatgcgcttatcaagtctccccaacaatactatag

SEQ ID NO: 234664 - DNA, 354 bp, Glycine max
tgctgctacaagacgacaacagggggggaacgtgtaagagtttgttgtgagcgaataacgagtataacttgaggagaatacgaagttgttagcattctatggtgctgtggtagatttggggacattgccaattccactgagcatgctatctactgttacttccccgactgaacgcttgctatcgagaatcttcgcctatcgcatggctactatgttctaagcatgctgtgggaccataccatatacgagccttgtactacatcactgactaatttgttaagcccctcgtacgattacattaatgcagaatcactcatctcatgcaccgaaacattttacggacagtctttcttt

SEQ ID NO: 234665 - DNA, 317 bp, Glycine max
  unsure (1)..(317): unsure at all n locations
gacagcacagcactctttgcaacacaacaaaaaaagacaacacagagagaagcgtcgtaataaacgctcttctctgaaaaacctgatttcttctcttcttctcttctcgttcgtttcgatcttcgatctctgaaaatgagagagtgcatttcaatccacatcggtcaggccggtattcaggtcngaaacgcctgctgggagctctactgcctcgaacacggcattcagcctgatgggcagatgccaagtggtaagactgttggtggaggtgatgaggcgttcaggaccttcgtcagtgaagctggngctggaaagca

SEQ ID NO: 234666 - DNA, 283 bp, Glycine max
ggagcaaaaccctaatccctatttttcttcctcagtagtgtcatttacgcttctcttctctgcagcaactatgcctaaccctaaggtcttcttcgacatgaccatcggcggtcaatctgctggccgcatcgtgatggagctctacgccgacgtcactccccgcaccgccgagaacttccgcgcgctttgcaccggcgagaaaggcctagggcggagcggcaagcccctccactacaagggctcgtccttccaccgcgtgatcccgagtttcatgtgtgagggt

SEQ ID NO: 234667 - DNA, 354 bp, Glycine max
  unsure (1)..(354): unsure at all n locations
gaactaaaggagagtgcaattacgtagtgtgtgggagacaaagagagatggctaagtggtgtatgttggtgttggttcttgctcgagctctggctgtggccacaagtgccagagatgcacccgaagatgttggtctcaaggaccagaagaacttcatcagctatgctggagttggtggctattcaggaattggaagcaatggactaccttttggaggtgccggaatacgtggtggcaccaccgggatacgtggattgggaggattcngaagtcccattggcggtgggtactggtggcagtgttggangtggcgttggcggtggtaacatacctcatcccaccccttgagtgaat

SEQ ID NO: 234668 - DNA, 415 bp, Glycine max
  unsure (1)..(415): unsure at all n locations
ggcacaagtgagtttgttgatcgagataactagaaacagtgtgatgaaaatgaaggtccttgttttcttcgttgctacaattttggtagcatggcaatgccatgcgtacgatatgttccctctccgaatgaacactggctatggtgcccgtactccggaggtgaaatgcgcaagttggaggcttgctgtggaagcacacaacatctttggctttgagaccattcctgaagagtgcgttgaagcaacanaggaatacatccatggcgagcagtatagatcagactccaaaacagttaaccaacaagcttacttttatgccagagacctcgaagtccatcccaaggacacatttgtgttcagtatagatggcaccgtactctctaatattccatactacaaaaaacatggatatggg

SEQ ID NO: 234669 - DNA, 425 bp, Glycine max
ggctcaccacttcaaaacactcataacacaaagcacaaagcaaagctcatccttgagttaaaaaatggcagcagcttcttccatggctctctcatccccatccttggctggcaaggccgtgaagctgggcccatcagccccagaagtgggaagggtgagcatgaggaagaccgtcaccaagcaggtctcctcaggaagcccatggtacggcccagaccgagtcaagtacttgggcccattctctggcgagcccccgtcctacctaaccggtgagttcccaggcgactacggctgggacactgctgggctttccgcagacccagaaaccttcgccaagaaccgtgaactcgaagtgatccacgtcaggtgggccatgctcggagccttgggctgcgtcctcgcggagttgctgtcccgcaacgggg

SEQ ID NO: 234670 - DNA, 318 bp, Glycine max
ggcacagcaaaacaattttcaaactcaattaccattccataacctaaatctcctctttgtttccgagtcagagagcaatggcacgtaccaagcaaaccgctcgcaagtccaccggcggaaaggcgccgaggaagcaattggcgactaaagccgctcgcaagtcagctccgggcaccggcggagtgaagaaggcccaacgcttcaggcccggaacggtggctctgagggagatcagaaagtaccagaagagcactgaacttctgatgcgaaaactcgcattccagaggcgcgtcagagaaatcgctcacgatttcaaaa

SEQ ID NO: 234671 - DNA, 349 bp, Glycine max
ggggagaagaattaagcactcggttgcagaacagaacaaacttctttcactctttcgcttctgaatcttcaacaatggtgctcgaggcgacgatgatctgtatcgacaattctgaatggatgcgtaacggagattactctccttctcgatttcaagctcaagcagacgctgtcaatctcatatgcggtgctaaaacgcagtctaatccggaaaatacagtgggagttctcacaatggctgggaaaggcgttcgtgttttggttacgcctagcagtgatctgggcaagatcttaggctgcatgcatggactagatataaggtgtgagatgaacctagctgctggcattca

SEQ ID NO: 234672 - DNA, 220 bp, Glycine max
aggggcacaagtgagtttgttgatcgacatatctagagacagtgtgatgaaaatgaaggtccttgttttcttcgttgctacaattttggtagcatggcaatgccatgcgtacgatatgttccctctcacgaatgaacactggctacagtgcccgtactccggaggtgaaatgcgcaagttggaggcttgctgtggaagcacacaacatctttggctttga

SEQ ID NO: 234673 - DNA, 384 bp, Glycine max
  unsure (1)..(384): unsure at all n locations
ggatgcacaagtttgttgagatagctagaagcaataagatgaaaatgaaagtgcttgttttgtttgttgctacagttttggtagcatatgaatgccatggctcagactaccagaagttccctctccaaatgaaaactgggtttggtgggcaatacagcaatgaggtggcatgtgccagttggaggcttggcgtggaagcaaacaacgtagtcaagtggcaaactgttcctgcagcttgcggagagtacatagctgactacgttctangagaacaatatagatcagattccanaacagttaaccaacaagcttatttctatgctaaatccctcaaactcancaacaaagatgtctttgtcttggacgttgacgacactactctct

SEQ ID NO: 234674 - DNA, 337 bp, Glycine max
  unsure (1)..(337): unsure at all n locations
gacttgtaataattcttataacacaacacaacccatggccaccacctccgcattcctcctccttcncctcctcctgctgctccacctcgccatcgccgctcacggcatcggcatcaactacggcacgctcggcgacaaccttccaccgcccgcggcggtggcgaacttcctgaagacgaagacgaccatcgaccgcgtgaagatctacgacgtgaacccggacatcctgcgggccttcgccggcagcggcatctccgtgacggtgaccgcccccaacggcgacatcgccgccttaaccaaaatcgactcggcgaggcattgggtggcgacgcacatc

SEQ ID NO: 234675 - DNA, 266 bp, Glycine max
ggtgagttgagaggatcgtgagaggggcagtagccgagattccgtgagttgcagaaatgaagacgattctttccagcgagaccatgaacatcccggacggcgtgagcatcaaagttcatgccaaggtcagcgaagttgagggcccccgcggaaaattggtgcgagacttcaagcatttgaatctcgattttcagctgagtactgacgaaaacggtaaaagaaagctgaaaatcgacgcgtggtttggttctcgcaaaacatccgcc

SEQ ID NO: 234676 - DNA, 433 bp, Glycine max
gagtgcacaagtgagtttgttgatcgagataactagaaacagtgtgatgaaaatgaaggtccttgttttcttcgttgctacaattttggtagcatggcaatgccatgcgtacgatatgttccctctccgaatgaacactggctatggtgcccgtactccggaggtgaaatgcgcaagttggaggcttgctgtggaagcacacaacatctttggctttgagaccattcctgaagagtgcgttgaagcaacacaggaatacatccatggcgagcagtatagatcagactccaaaacagttaaccaacaagcttacttttatgccagagacctcgaagtccatcccaaggacacatttgtgttcagtatacatggcaccgtactcgcgaatattccatacgacgtaaaacatggatatggggtggaaaaatttaac

SEQ ID NO: 234677 - DNA, 432 bp, Glycine max
ggcacacaaaaggagcatcgagtaggtttcctactcccttctcatcgttggcaagatgagtgccatgaaattttgccgtgaatgcaataacattctgtaccctaaggaagacagagaccagaaagttcttctcttcgcttgccgcaactgcgaccatcaggaggttgctgataacttctgtgtgtataggaatgagatacatcactctgttggagagcgcactcaggtgttgcaggatgtcgctgcagatccaacgcttcctcgaagcaagtctgttcgctgcagtcaatgcaatcatggtgaagctgtctttttccaggcaactgccagaggggaagaaggaatgacactttttttcgtgtgctgcaacccaaactgtggacacagatggagagactgaaatttgtgcttcctcagattaaaggttcaata

SEQ ID NO: 234678 - DNA, 349 bp, Glycine max
  unsure (1)..(349): unsure at all n locations
ggagctgaaatcgagaagaagaagaagaagaagatggagaagtatcagatctggagcaggagaatagcgttggcagcgtttgcgtttgctctgctgttccaatcggcctcagcagacgacgtcgttgtgctctctgaagataacttcgagaaggaagttggtcaggacagaggagctctcgttgagttctatgctccttggtgtggacactgcaaaaagcttgctccagaatatgaaaagcttggtagcagcttcaagaaagccaaatctgttttaattggcaaggttgactgtgatgagcataagagtttgtgcagcangtatggagtctcctgggtaccaacaattc

SEQ ID NO: 234679 - DNA, 380 bp, Glycine max
cacgcgtccgaaaggagcaagaaaagggatcaatggggcaaatttttggtgatataactatacgcatgacgatgagaatgggagtgcttgtcatgattcagtgtgctacattttgggaataattggaatcccatttgctcacacgactaaaaattgcccctccatttaagggatttgtttggagggcaatacatcaataatgtggcatatgccatttgtacgtctcgcgtggaagcaaacaacgtactcaagtggaaaactgttcctgcatcttgcggagagtacatagttgactatgttctacgagaccaatatagatcagattccaaaacaattaaacagtaagcttagtttcatgccaaaacccttatgctcaccaa

SEQ ID NO: 234680 - DNA, 261 bp, Glycine max
gataataacacgcaattttcatttttctctctcccttagtcaaagggattcatcgttcttcttcccaggttatttagaaaagcaaaatggtgaagatttgctgcattggtgctggatatgtggggggtcctactatggcagtcattgcacttaagtgcccatccattgaagtcgctgttgttgatatctctaaatcccgcattgcagcctggaacagcgaacagcttcctatctatgaacctggccttgatggtgttgtga

SEQ ID NO: 234681 - DNA, 266 bp, Glycine max
gaaggtgcaagagtttgttgtgagctataagctagtttatcgtgaggagaatatgaagttgtttgttttctttgttgctgcagtagttttggtagcatggccatgccatggcgcaggctaccaaaggttccctctccgaatgaaaactggctatggtgagcgttcttcggaggtaaaatgcgcaagttttaggcttgctgtggaagcacacaacatccgagcctttaaaaccattcctgaagagtgcgttgagccaacaaaggact

SEQ ID NO: 234682 - DNA, 292 bp, Glycine max
gatctggcagcagaagaacaagtagttgagaactaagaaggagaagcaaatggcttcctcaatgatctcttccccagctgttaccactgtcaaccgtgccggtgccggcatggttgctccattcactggcctcaagtccatggctggcttccccaccagaaagaccaacaatgacattacctccattgctagcaacggtggaagagtgcaatgcatgcaggtgtggccaccagttggcaagaagaagtttgagactctttcctacctgccagaccttgatgatgcacaattg

SEQ ID NO: 234683 - DNA, 433 bp, Glycine max
ggcacaagtttgttgagatagctagaagcaataagatgaaaatgaaagtgcttgttttgtttgttgctacagttttggtagcatatgaatgccatggctcagactaccagaagttccctctccaaatgaaaactgggtttggtgggcaatacagcaatgaggtggcatgtgccagttggaggcttggcgtggaagcaaacaacgtagtcaagtggcaaactgttcctgcagcttgcggagagtacatagctgactacgttctaggagaccagtagagatcagattccagaagagttaagcaacaggcttatttctatgctaaatccctcaaactcaccaacaaagatgtctttgtcttggacgttgacgacactactctctctaatctccagtaatttgctaaccatggatttggtgtggaacacacaatacg

SEQ ID NO: 234684 - DNA, 355 bp, Glycine max
gggaagatgagagagataatggtcaaccaagcaacagcatgtgatttgaaagaattggtgcgcaagttcatccccgaaatgattggaaaggagattgagaaggcaacatctagcatctatcctctacagaatgtgttcattcgtaaagttaagatccttaaagctccaaagtttgatcttggaaaactgatggaggttcatggggattactctgaagatgttggtgccaaggtggacagacctgccgatgaaacattggctgaggaagccacggaggtagttggggcttgatctggctcataatgcatttttgttagtttagaagtcctgtgtctcttacaaatagtaattttca

SEQ ID NO: 234685 - DNA, 280 bp, Glycine max
ggcattatatttgagttcaaacaaatcaaagccatggccacctccaacttctctattgttctctccgtctcactagccttctttttggtgctacttaccaaggcacactcgaccgataccgtttctttcaccttcaacaagttcaacccagtccaaccaaacattatgctccaaaaggatgctagtatttcatcccctggggtgttgcaactcaccaaatttggcaccaacggcttgccaacctcgggatctctcggtcgtgcccttaacgctgccccaa

SEQ ID NO: 234686 - DNA, 430 bp, Glycine max
ccgaaagctgcaaaaaaagggccgaaggggataattgacttcaaacatatcacagccatggccacctccttcttctctactgatctcgctgtctctctacccttctttttggtgctacataacggggcacactccatagaaagtgtttctttcacgttcaacaacttcacaccgctcccctaatccataggttcataccaatttagaatttcaccgtcggaggagttacatctcatgacttttggaacaatcatgatgcctacctcgggatctctcggtcgtgccctttacgctgccccaatccatatttgggacagcgataccggcaaggtagccagctgggctacatcctttagattcaacattttcgcacgcatcagatctaactcagctgacgggcttgccttcctcctgggcaccgttcggtctc

SEQ ID NO: 234687 - DNA, 314 bp, Glycine max
ggttttgattagggtttgtcattagcacttcttcttttcacactgccgctgcaacaatggcttcagagaagaaactttcgaacccaatgagggagataaaagtgcagaagctcgttctcaatatctctgttggcgagagtggagatcgtctcaccagagccgccaaggtgttggaacaacttagtggccaaaccccagtgttttccaaagcaaggtacactgttcgttcctttgggattagaagaaatgagaagattgcatgctatgtcactgtcagaggtgacaaggcaatgcaacttttggagagtggtttg

SEQ ID NO: 234688 - DNA, 289 bp, Glycine max
ggagagaatcttgtgcagcaacgcagtgttgtgagtgagttgggttttttctttggttttcctgagctgtgttttattctctttatctctctctctgccctctcatcttcgagctccgatggcgagcctgtggcgcgcggcgaccggcatgacggaaaacgccaccgattacgacggcgtcgagttctggtccaacgccgagcgcaccggctggctcaccaagcagggcgagtacatcaagacctggcgccgccgctggttcgtcctcaagcaagggaaggtcttctgg

SEQ ID NO: 234689 - DNA, 296 bp, Glycine max
agacgacagaagggggcatcacacacaaacaaacactcccattttctctctttctctttctctccgaccgagcgagaccgagcgatccgatcctaaccccgcgatgctccgccgcgcaaccacctccctcatctccggcgcctcccgccgccgcctctccaccgacgtgccggcgacgccggcggcggattccgtcttcgcggaggcgtggaagaaagtgagccccaacatcgacccgccgaagacgccgctggcgtacatgaagccccgaccacccactccttcgactctcccct

SEQ ID NO: 234690 - DNA, 267 bp, Glycine max
gatagcgaaacacagagtggtttcagtgagtgatcggtgttcacttgatccttcagaagtcgtcatcatcatcatcatcatcaccgttgattgaagaagatgccgatcagaaacatcgccatcggaaggcctgaagaggctactcaccccgacacgttgaaggcggggttggctgagttcatctccaccttgatcgtggtgttcgccggttcaggttccggcatcgcctacaacaagctcagcgacaacggcggcgcgactcccgcc

SEQ ID NO: 234691 - DNA, 419 bp, Glycine max
ggcacaagtgagtttgttgatcgagataactagaaacagtgtgatgaaaatgaaggtccttgttttcctcgttgctacaattttggtagcatggcaatgccatgcgtacgatatgttccctctccgaatgaacactggctatggtgcccgtactccggaggtgaaatgcgcaagttggaggcttgctgtggaagcacacaacatctttggctttgagaccattcctgaagagtgcgttgaagcaacaaaggaatacatccatggcgaacaatatagatcagactccaaaacagttaaccaacaagcttacttttatgccagagacctcgaagtccatcccaaggacacatttgtgttcagtatagatggcaccgtactctctaatattccatactacaaaaaacatggatatggggggg

SEQ ID NO: 234692 - DNA, 268 bp, Glycine max
ggcacaagtttgttgagatagctagaagcaataagatgaaaatgaaagtgcttgttttgtttgttgctacagttttggtagcatatgaatgccatggctcagactaccagaagttccctctccaaatgaaaactgggtttggtgggcaatacagcaatgaggtggcatgtgccagttggaggcttggcgtggaagcaaacaacgtagtcaagtggcaaactgttcctgcagcttgcggagagtacatagctgactacgttctaggaga

SEQ ID NO: 234693 - DNA, 422 bp, Glycine max
gaagcacaacatctctatcgagtaaattaactatgaagcctagcctactattatccctttccttcctgcctctctttgctttcctggctctttcagaagatgttgaacaagttgtggacataagtggcaaccccattttcccaggtggcacatattacattatgccatcaacttggggcgctgccggtggtggattgaaactaggccggacaggaaactcaaactgcccagttactgttttgcaagattactcagaaatcttccgtggcacagcagtcaagttcagcatacctgggagaagccctggaatcatctttacaggtactccacttgaaatcgagttcgcagagaaaccttattgtgctgaatcctccaaatgggtggcgtgtgtggacaatgaaatccaaaaggcatgtgtgggt

SEQ ID NO: 234694 - DNA, 275 bp, Glycine max; identical to SEQ ID NO: 234630
  unsure (1)..(275): unsure at all n locations

SEQ ID NO: 234695 - DNA, 403 bp, Glycine max
ggcacaagtgagtttgttgatcgagataactagaaacagtgtgatgaaaatgaaggtccttgttttcttcgttgctacaattttggtagcatggcaatgccatgcgtacgatatgttccctctccgaatgaacactggctatggtgcccgtactccggaggtgaaatgcgcaagttggaggcttgctgtggaagcacacaacatctttggctttgagaccattcctgaagagtgcgttgaagcaacaaaggaatacatccatggcgaacaatatagattagactccaaaacagttaaccaacaagcttactttttatgcagagacctcgaagttccatccaaagacacatttgtgttcagtttagatggcacgtactctcaataatccatactacaaaaaaca

SEQ ID NO: 234696 - DNA, 383 bp, Glycine max
  unsure (1)..(383): unsure at all n locations
gatgcacaagtttgttgagatagctagaagcaataagatgaaaatgaaagtgcttgttttgtttgttgctacagttttggtagcatatgaatgccatggctcagactaccagaagttccctctccaaatgaaaactgggtttggtgggcaatacagcaatgaggtggcatgtgccagttggaggcttggcgtggaagcaaacaacgtagtcaagtggcaaactgttcctgcagcttgcggagagtacatagctgactacgttctangagaccaatatagatcagattccaaaacagttaaccaacaagcttatttctatgctaaatccctcaaactcaccaacaaagatgtctttgtcctggacgttgacgacactactctct

SEQ ID NO: 234697 - DNA, 412 bp, Glycine max
  unsure (1)..(412): unsure at all n locations
ggcacaagtgagtttgttgatcgagataactagaaacagtgtgatgaaaatgaaggtccttgttttcttcgttgctacaattttggtagcatggcaatgccatgcgtacgatatgttccctctccgaatgaacactggctatggtgcccgtactccggaggtgaaatgcgcaagttggaggcttgctgtggaagcacacaacatctttggctttgagaccattcctgaagagtgcgttgaagcaacaaaggaatacatccatggcgaacaatatagattagactccaaaacagttaaccaacaagcttacttttatgccagagacctcgaagtccatcccaaggacacatttgtgttcagtatagatggcaacgtactctctaatattccatactacnaaaaacatggatat

SEQ ID NO: 234698 - DNA, 351 bp, Glycine max
gatgctctctaatccgtatccgccgtcacgctcctttccaccacactctccgctctctcttgccgattaaccgtttctcctcctcctcctcctcctccgcctccgccgccgccgccgccgccatggttgctcacgcgaaggacgaggcgtaccttagcgcggcgattccgaagcgcgtccgtctcttcgagaccatccaggcggagcagcgcacgcagcgcctctcgctttcgccggatcctatcaaggtcagtctccccgacggcaacgtcagggacgcgaagaagtcgctctcgaccccgctcgacgtggcgcgcgaaatctcgaagaatttgggcaacagcgcgctca

SEQ ID NO: 234699 - DNA, 270 bp, Glycine max
  unsure (1)..(270): unsure at all n locations
gaccaacacaaacaatagtgcatagcgtttttcattgtgcattattcaatggccagcacagcagctctatccggaaccatggtgagcacctccttcatgaggaagcaacctatgacgaccaagagcctaaagacattccccaacgctctttttggtctgaaaggtggacgaggtggtcgtgtaacttgcatggcctcgtacaaggtgaagctcataaccccagaaggagaagtggagtttgaatgcccagatgatgttttcnttgttgac

SEQ ID NO: 234700 - DNA, 353 bp, Glycine max
ggcacaagtgagtttgttgatcgagataactagaaacagtgtgatgaaaatgaaggtccttgttttcttcgttgctacaattttggtagcatggcaatgccatgcgtacgatatgttccctctccgaatgaacactggctatggtgcccgtactccggaggtgaaatgcgcaagttggaggcttgctgtggaagcacacaacatctttggctttgagaccattcctgaagagtgcgttgaagcaacaaaggaatacatccatggcgaacaatatagatcagactccaagacagttaagcaacaagcttacttttatgccagagagctcgaagtccatcccaaggacacatttg

SEQ ID NO: 234701 - DNA, 278 bp, Glycine max
gacacatgcccatcatcaaagtttcttcctttctctgctctttgtcttctctgacacatttggggccttgttgagtgtgtttttgcaagagggtatggcgaaggacgttgaggttgctgagcgtggctccttctctgggaaggactaccaggaccctccacgagcaccactcattgatgctgaggagctcacaaagtggtccttttacagggctcttattgctgagttcattgccactttgctcttcctctacattactgtgctcacagttatagggt

SEQ ID NO: 234702 - DNA, 432 bp, Glycine max
ggcacaagtttgttgagatagctagaagcaataagatgaaaatgaaagtgcttgttttgtttgttgctacagttttggtagcatatgaatgccatggctcagactaccagaagttccctctccaaatgaaaactgggtttggtgggctatacatcagtgaggtggcatgtgccagttggaggcttggcgtggaagcaaacaacgtagtcaagtggcaaactgttcctgcagcttgcggagagtacatagctgactacgttctaggagaccaatatagatcagatccaaaacagttaacaaacaagcttagttccatgctaaatccctcatactcaacaacaaagatgtctttgtcgtggacgttgacgacactactctcgctaatctccagtattttgctaaccatggatttggtgtggaacacacaatacg

SEQ ID NO: 234703 - DNA, 410 bp, Glycine max
ggtgtgtgcgttcctaacattattgtttcctaccaagttctctgtctggggagttcttagcaccaccaccagcttctgcagtagctttaagctacgaaagattttccttgaccatggggcaaaagcatttagtgacggtgttctgtttatgggctttaacatgttcccttcttccatctttctcctttggaattctgagaattggtttgaagaagagacctctagatcttgatagtattaatgctgctagaaaggcaagagaaggtctaagatctgtaagaccaatgatgggtgcacatgatcagtttattggtaagtcaaaaggtgaagatatagtacctttgaagaattatttggacgctcaatagtttggtgagattggaattgggaaaccccacagcccttcactg

SEQ ID NO: 234704 - DNA, 425 bp, Glycine max
  unsure (1)..(425): unsure at all n locations
gtctcagaagatgaagcaggaaagagacttgctcaggttgtaagtgatccaagcctaacaaaatctggtgtttactggagctgaaacaaagcatcagcttcgtttgaaaaccagttgtctcaggaggccagtgatacagagaaggctcgtaagatctgggagattagtgagaaacttgttggttttgcctaagtgggaggagcctccaacatcccatgttgttctagagaccttgcacttgcatggaggaagaaaatgatgtctcaaaagagtggatagataacatcctatcattttgaatgcattgatgttgttttgttagctaggagcttctttgctttgatgtaaggtgtcaatggctttttgtgaatcaagactcaataaaatcattcagccatgtgggtgtggtgaagttgctcataana

SEQ ID NO: 234705 - DNA, 250 bp, Glycine max
acgggcccggcaggctgacaacagtcggggtctcaggggattcggcaggtcttggacttgctcaggttgtctgtgctccacgctctgtcgtcatctggtgtttaatggagctgtcacaatgcatcagcttcctgtaggtaccagtctgtctcaggaggccagtgatacacagtatgctcgtaggatccgggagattagtgggagacttgttggttttgcctaagtgggacgaggctcccagatcccatgt

SEQ ID NO: 234706 - DNA, 219 bp, Glycine max
ggcacaagtgagtttgttaattcaaaataactaaaaacattgtgataaaaataaaggtccttgtttccttcgttcctacaattttggtagcttggcaatgccatgcgtacgatatgttccctctccgaattaacactggctatggtgccggtatccgtgatgtgaaatgcgcaagttggaggcttgcggttgaagcatacaacatctttggctttgaga

SEQ ID NO: 234707 - DNA, 314 bp, Glycine max
ggtgagattacccatagatagagagcgcggcataacctaaacttacccttcttctctctgtgtgtgtgcgcatcaaacgcaaccagaagcagccatggccactgcaagaactgtgaaggacgtttctcctcatgagttcgtcaaagcttactcttctcacctcaagcgatctggcaagatggagctgccagagtggactgatattgtgaaaactgcaagatttaaggagttggctccttatgatcctgactggtactatgtcagagctgcttccatgggaagaaagatctacttgagaggaggacttggtgttg

SEQ ID NO: 234708 - DNA, 307 bp, Glycine max
gatccaaattcaagttcgcaccaaattttcctcccaaaatgtcaggccgtggaaaaggtgggaacggtttgggaaagggaggagctaagaggcacagaaaggttcttcgtgacaacattcaaggaatcacgaaacctgcgattcgtaggttagcgagaagaggtggcgtgaagaggatcagtggtttgatttacgaaggagaccagacgagttctgaagatattcttggagaacgtgattcgcgatgctgtaacctacactgagcacgctaggaggaaaagtgttactgctatggatgtcgtttatg

SEQ ID NO: 234709 - DNA, 253 bp, Glycine max
gtcagccatttagctccataactgcagcattagggtttttcatctgcttcagtggcgaagggaacagggagttttggtcagagaaggaacaagactcatactctctgtgtgacgtgtggccgccgcagcttccatctccagaagagtcgttgcgccgcctgtgctttccccgccgcatgcattacgaaatatacctggggcgtcaaggcaatctgcagaaagaccacctgaactggcaggatgaggtacttgc

SEQ ID NO: 234710 - DNA, 318 bp, Glycine max
gaaggtgcaagagtttgttgtgagctataagctagtttatcgtgaggagaatatgaagttgtttgttttctttgttgctgcagtagttttggtagcatggccatgccatggcgcatgctaccaaaggttccctctccgaatgaaaactggctatggtgagcgttcttcggaggtaaaatgcgcaagttttaggcttgctgtggaagcacacaacatccgaacctttaaaaccattcctgaagagtgcgttgaaccaacaaaggactacattaatggcgaacaatttagatcagctctaaagaagttaaccaacaagct

SEQ ID NO: 234711 - DNA, 431 bp, Glycine max
tactgggacttgtaataattcttatgacacatgataggccatgggcaccagctccgcattcctctctccttctgctcctcttgctgctccacctcgccatcgccgctcacggtatcagcatcagctacggcacgctcggcgacaaccttctaccgcccgcggctgtggcgaacttcctgaagatgaggaggatcatctacggcgtgacgatctacgacgtgaatccggacatcctgcaggccttcgccggcagctgcatctccatgacggtgagctgggctatcggtgagatcgccaccttatggactatcgactctgcgaggcagtgggtggccacgcagatcaaaccctttcaggctgggacaggggtaaatacatcctcgttcgcagcgaagtccccactggggcgacaccgacatgattcgcgggct

SEQ ID NO: 234712 - DNA, 242 bp, Glycine max
gacagctattccgcgtaagcttgctactgagtttcgacactgcatggcttaggtcatcggaattcgaagctacgttgcaacatggctaatgaaaaggctcagatcaacattgtagtggttggccatgtggatcctgaggaggcaaccaccattaacgagctgaagaagcctgttgtggagaaagaatctcgagggcatgccagatgagggcatgcatgtacagactcggaggggaaccagag

SEQ ID NO: 234713 - DNA, 357 bp, Glycine max
aggtgcatgtgtttatgatggcagataggtatcacaagcaatcagatgaaatatataaaaagttggatgcggtagtcagtcaactgaagctggttggctacacacccagtacttcgggcatattggttgatttagaagaggaagagaaaaaagaagtagttctttggcatagtgagaaattagcactgtgctacgggctaattggtgagagaaaagaatcatgcattcgcatagttaaaaatcttagaatatgtgaggactgtcattcctttatgaaattggtctcaaaggtgcaccgaatagagattgtcatgagagataggactaggtttcaccattttaatggtggaatatgtt

SEQ ID NO: 234714 - DNA, 305 bp, Glycine max
  unsure (1)..(305): unsure at all n locations
ggcacaagtgagtttgttgatcgagataactagaaacagtgtgatgaaaatgaaggtccttgttttcttcgttgctacaattttggtagcatggcaatgccatgcgtacgatatgttccctctccgaatgaacactggctatggtgcccgtactccggaggtgaaatgcgcaagttggaggcttgctgtggaagcacacaacatctttggctttgagaccattcctgaagagtgcgttgaagcaacanaggaatacatccatggcgaacaatatagattagactccaaaacagttaaccaacaag

SEQ ID NO: 234715 - DNA, 291 bp, Glycine max
agaaggggcacaagtgagtttgttgatcgagataactagaaacagtgtgatgaaaatgaaggtccttgttttcttcgttgctacaattttggtagcatggcaatgccatgcgtacgatatgttccctctccgaatgaacactggctatggtgcccgtactccggaggtgaaatgcgcaagttggaggcttgctgtggaagcacacaacatctttggctttgagaacattcctgaagagtgcgttgaatcaacataggaatacatccatggcgaagcatatagatcagactc

SEQ ID NO: 234716 - DNA, 417 bp, Glycine max
ggcacaagtgagtttgttgatcgagataactagaaacagtgtgatgaaaatgaaggtccttgttttcttcgttgctacaattttggtagcatggcaatgccatgcgtacgatatgttccctctccgaatgaacactggctatggtgcccgtactccggaggtgaaatgcgcaagttggaggcttgctgtggaagcacacaacatctttggctttgagaccattcctgaagagtgcgttgaagcaacaaaggaatacatccatggcgaacaatatagatcagactccaaaacagttaaccaacaagcttacttttatgccagagacctcgaagtccatcccaaggacacatttgtgttcagtacagatggcaccgtactctctaatattccatactacaaaaaacatggatatggggt

SEQ ID NO: 234717 - DNA, 444 bp, Glycine max
ggaatcataaggcaagttgaagggaattcatggctacactgaagatgatgtggtctccactgactttatcggcgatagcagatcaagtatttcttgatgcacaagctggaattgcattgaataagaactttgtgaagcttgtttcttggtacgacaacgaatggggatacagctcacgtgtcattgatcttcatgtactcgttgccaacaagtcgctttaacgtgttacatcaaagtagcttgtcttcacattattaccgtatgtttatgtttagctgcgatttagtgtcttgctcgagcaaatcatgagaggtctgaataaatcggtttctgaaaccagtggtgttacatgttggaggagcattagctctttattggacttttgatgtattctcatgtggatggggatcgagttattggatttttatatactcgctgatgtac

SEQ ID NO: 234718 - DNA, 421 bp, Glycine max
gggctccgccatttttcgtagctgctgttcttgcgcgtgaacaagcctcaggtaagccaaaaccatggttaagcataacaatgttatcccaaacggacacttccgtaagcactggcagaactatgtgaagacttggttcaatcagccagcacggaagacaatgagacgattggctcgtcagaagaaagctgtgaagatattccccagacctacggctggacctctcaggcccattgtacatggtcaaactttgaaatacaacatgaaagtgagacgtggaaggggattttctcttgaagaactcaaggcagcagggattcccaaaaagcttgcaccaaccatacgtattgctgttgatcatcgtcgcaagaaccgttctttggaaagtctgcaagctaatgtgcagaggctgaaaacatac

SEQ ID NO: 234719 - DNA, 411 bp, Glycine max
cgggttccacatgatcagaacaaagctgggatcaagctgaactgggccattaggcggaaaattgctattggagctgctacgggattggcttttcttcaccacaactgtatcccccacatcattcatagagatatggagtcgagcaatgtgttacttgatgaaaacctggaagccagagtctctgattttggaatggctacgcttatgagtgctatggatacacatttgagtgtgagcacattggctggcacaccggggtatgttcctcgcgagtactatcagagcttcagatgctccacaaaaggtgatgtctacagttatggtgtggctttgttggagctgctaactgggaaaacgccaacggactcggctgattttggagataataatcctgttggatgggttaaacaa

SEQ ID NO: 234720 - DNA, 381 bp, Glycine max
ggcacaagtttgttgagatagctagaagcactaagatgaaaatgaaagtgcttgttttgtttgttgctacagttttggtagcatatgaatgccatggctcagactaccagaagttccctctccaaatgaaaactgggtttggtgggcaatacagcaatgatgtggcatgtgccagttggaggcttggcgtggaagcaaacaacgtagtcaagtggcacactgttcctgcagcttgcggatagtacatagctgactacgttctacgagaccaatatagatcagattccaaaacagttaaccaacaagcttatttctatgctaaatccctcagactcaccagcacagatgtctttgtcttggacgttgacgacactactctct

SEQ ID NO: 234721 - DNA, 60 bp, Glycine max
cccacgcgtccgcccacgcgtccgcccacgcgtccgcccacgcgtccgcccacgcgtccg

SEQ ID NO: 234722 - DNA, 398 bp, Glycine max
ggtccttctttgcgagattgaatcgtaagcagcggctaccctaatcctctcctcttcctctctactaatttcagctatggccgacgaagctgtggttgttccagatcccacccagatcgatgtcaagctctttaaccgctggagcttcgacgatattgagattactgacatttctctggctgattatatcggggtggcgacatccaagcacgccacgtatgtgcctcacaccgccggcaggtactcggtgaagcggttcaggaaggcgcaatgccccattgttgagaggctgagcaactctctcatgatgcacggtagaaacaatggcaagacactcttggctgttaggatcatcaaacatgctatggagattattcatttgttgactgaccagaacc

SEQ ID NO: 234723 - DNA, 373 bp, Glycine max
gcacaagtttgttgagatagctagaagcaatatgatgaaaatgaaagtgcttgttttgtttgttgctacagttttggtagcatatgaatgccatggctcagactaccagaagttccctctccaaatgaaaactgggtttggtgggcaatacagcaatgacgtggcatgtgccagttggaggcttggcgtggaagcaaacaacgtagtcaagtggcaaactgttcctgcagcttgcggagagtacatagctgactacgttctaggagaccaatatagatcagattccaaaacagttaaccatcaagcttatttctatgctaaatccctcaaactcaccaacaaagatgtctttgtcttggacgttgacgacact

SEQ ID NO: 234724 - DNA, 407 bp, Glycine max
tcacggacccatccagtcgtgcagcgagacgacgacagaggggggaattgttccattttcatttctttcgcataagttgcaactacttcctcagaaaaaaagtttcgaagttaaggaaatccagagagacagaaatggccggtgacagtgcagctacatgcatagacatcctccttgccatcattctccctcctcttggagtctttctcaaatatggctgccaggtggagttctggatttgtttggtgctgaccctttttgggtatatacctggaattatctatgctgtctatgctatcaccaagtgatcaccctttaactttgtgtggacaataaacaaatgtcatgggcgtttctgtctttcaactcagatattagtgtttctttaatatatcgccaatgttgtc

SEQ ID NO: 234725 - DNA, 421 bp, Glycine max
gaaaacaccatcatctacaacgcctcgaatccacacagttctactctacgctctaaaccctctctctctctctctcgatctatcatggctttgcccaatcagcaaaccgtggattaccctagtttcaaactcgtcatcgtcggtgacggcggtacaggaaagacaacgttcgtgaaaaggcatcttaccggtgaattcgagaaaaaatacgaaccgaccattggagtggaggttcacccattggatttcttcacaaactgcggaaagattcgcttctactgttgggatactgctggacaagagaagtttggtggcctcagagatggatattatatccatgggcaatgtgcgattataatgtttgatgttactgcccgtctaacatacaaaaatgtcctacctggcacggggatctttgccg

SEQ ID NO: 234726 - DNA, 389 bp, Glycine max
ggctagagcatgatattgaacggcgagaatcaacactgttctaatctagacgcgcgtgactcacgctcactctcacgcatcatcgagggtttgcctgatcagctctcagtgtgatatgctagattcatcctcatggtcgtctgtgagtgcggtagtggagatagatcgttcgtgatttaggcagcttaccggtgacttcgaggaatcaatatgatgcgtgcagtggtgtggaggttcacccattggatctcttcactcactgcggataaattcgcttctcctgttgggatactgctggacaagacaagtttggtggcctcacagatggatattacatccatggccgttgtgcgattataatgtctgatcttattgcgcgtctaacagac

SEQ ID NO: 234727 - DNA, 444 bp, Glycine max
ggcacaagtgagtttgttgatcgagataactagaaacagtgtgatgaaaatgaaggtccttgttttcttcgttgctacaattttggtagcatggcaatgccatgcgtgcgatatgttccctctccgaatgaacactggctatggtgcccgtactccggaggtgaaatgcgcaagttggaggcttgctgtggaagcacacaacatctttggctttgagaccattcctgaagagtgcgttgaagcaacaaaggaatacatccatggcgaacaatatagattagactccaaaacagttaaccaacaagcttacttttatgccagagacctcgaagtccatcccaaggacacatttgtgttcagtatagatggcaccgtactctctaatattccatactacaaaaaacatggatatgggggtgagaaatttaacttcgacttgtatga

SEQ ID NO: 234728 - DNA, 411 bp, Glycine max
  unsure (1)..(411): unsure at all n locations
ggcacaagtgagtttgttgatcgagataactagaaacagtgtgatgaaaatgaacgtccttgttttcttcgttgctacaattttggtagcatggcaatgccatgcgtacgatatgttccctctccgaatgaacactggctatggtgcccgtactccggaggtgaaatgcgcaagtcgaaggcttgctgtggaagcacacaacatctttggctttgagaccattcctgaatagtgcgttgaagcaacagaggaatacatccatggcgaacaatatagattagactccacaacagttaaccaacaagcttacttttatgccagagacctcgaagtcatcncaaggacacatttgtgttcagtatagatggcaccgtactctctaatattccatactacananaacatggatat

SEQ ID NO: 234729 - DNA, 409 bp, Glycine max
  unsure (1)..(409): unsure at all n locations
ggcacaagtgagtttgttgatcgagataactagaaacagtgtgatgaaaatgaaggtccttgttttcttcgttgctacaattttggtagcatggcaatgccatgcgtacgatatgttccctctccgaatgaacactggctatggtgcccgtactccggaggtgaaatgcgcaagttggaggcttgctgtggaagcacacaacatctttggctttgagaccattcctgaagagtgcgttgaagcaacaaaggaatacatccatggcgaacaatatagattagactccaaaacagttaaccaacaagcttacttttatgccagagacctcgaagtccatcccaaggacacatttgtgttcagtatagatggcaccgtactctctaatattccatactacaanaaacatgga

SEQ ID NO: 234730 - DNA, 383 bp, Glycine max
  unsure (1)..(383): unsure at all n locations
gaagagagggcgaggaagccacatatagacacaatacagagtgagttgttgctccttcgccacaactctctgccaacatgggtatctccagagattctatgcacaagaggcgtgccactggtggcaagaagaaggcctggaggaaaaagagaaagtatgagcttggtcgccagcctgctaacactaagctgtcaagcaacaagacagtcaggaggatccgtgttagaggtggaaatgtgaaatggagggcattgagattggatactggaaattactcctggggaagtgaagctgtaactcgcaagactcgtgtactagatgtggtttacaatgcctcanacaatgagcttgtgcgtactcagactcttgtcaanagtgctatc

SEQ ID NO: 234731 - DNA, 399 bp, Glycine max
ggtgcacaagtgagtttgttgatcgagataaccagaaacagtgtgatgaaaatgaaggtccttgttttcttcgttgctacaattttggtagcatggcaatgccatgcgtacgatatgttccctctccgaatgaacactggctatggtgcccgtactccggaggtgaaatgcgcaagttggaagcttgctgtggaagcacacaacatctttggctttgagaccattcctgaagagtgcgttgaagcaacaaaggaatacatccatggcgaacaatatagatcagactccaaaacagttaaccaacaagcttacttttatgccagagacctcgaagtccatcccaaggacacatttgtgttcagtatagatggcaccgtactctctaatattccatactac

SEQ ID NO: 234732 - DNA, 406 bp, Glycine max
gaaggtgcatgagtttgttgtgagctataagctagtttatcgtgaggagaatatgaagttgtttgttctctttgttgctgcagtagttttggtagcatggccatgccatggcgcaggctaccaaaggttccctctccgaatgaaaactggctatggtgagcgttcttcggacgtaaaatgcgcaagttttaggcttgctgtggaagcacacaacatccgagcctttaaaaccattcctgaagagtgcgttgaaccaacacaggactacattaatggcgaacaatttagattagactctaaaacagttaaccaacaagctttcttttatgctagtgaacgcgaagtccatcacaacgacatatttatattcggcatagataacaccgtactctctaatatcccatac

SEQ ID NO: 234733 - DNA, 358 bp, Glycine max
ggcacaagtgagtttgttgatcgagataactagaaacagtgtgatgaaaatgaaggtccttgttttcttcgttgctacaattttggtagcatggcaatgccatgcgtacgatatgttccctctccgaatgaacactggctatggtgcccgtactccggaggtgaaatgcgcaagttggaggcttgctgtggaagcacacaacatctttggctttgagaccattcctgaagagtgcgttgaagcaacaaaggaatacatccatggcgaacaatatagatcagactccaaaacagttaaccaacaagcttacttttatgccagagacctcgaagtccatcccaaggacacatttgtgttc

SEQ ID NO: 234734 - DNA, 361 bp, Glycine max
gaaggtgcaagagtttgttgtgagctataagctagtttatcgtgaggagaatatgaagttgtttgttttctttgttgctgcagtagttttggtagcatggccatgccatggcgcatgctaccaaaggttccctctccgaatgaaaactggctatggtgagcgttcttcggaggtaaaatgcgcaagttttaggcttgctgtggaagcacacaacatccgagcctttaaaaccattcctgaagagtgcgttgaaccaacaaaggactacattaatggcgaacaatttagattagactctaaaacagttaaccaacaagctttcttttatgctagtgaacgcgaagtccatcacaacgacata

SEQ ID NO: 234735 - DNA, 363 bp, Glycine max
ggcacaagtgagtttgttgatcgagataactagaaacagtgtgatgaaaatgaaggtccttgttttcttcgttgctacaattttggtagcatggcaatgccatgcgtacgatatgttccctctccgaatgaacactggctatggtgcccgtactccggaggtgaaatgcgcaagttggaggcttgctgtggaagcacacaacatctttggctttgagaccattcctgaagagtgcgttgaagcaacaaaggaatacatccatggcgaacaatatagattagactccaaatcagttaaccaacaagcttacttttatgccagagacctcgaagtccatcccaaggacacatttgtgttcagtat

SEQ ID NO: 234736 - DNA, 354 bp, Glycine max
aggggcacaagtgagtttggtgatcgagataactagaaacaatgtgatgaaaatgaaaggccttggtttcctcggtgccacaattttgggaacaagggaatgccaagcgtacgaaaagttccctcccccaatgaacaatgggtaaggggcccgttatcccgaaggtaaatgcccaagtttgaaggcttccgttgaaacaaaaaacaaccttgggctttgaaacaatccttaaaaattgcgttgaagcaccaaaggaatacatcaatggcgaacaatataaatcagactccaaaacagttaaccaacaagcttacttttatgccagagacctcgaagtccatcccaaggacacat

SEQ ID NO: 234737 - DNA, 423 bp, Glycine max
  unsure (1)..(423): unsure at all n locations
ccaaggctcctcctcgtgctgatgtagtgaaaggcttgaaaaatggtataatgttgaacctgttggggatgggtgctgctattcttgggatgcaagccacggttggattgttagttgctaaggctctcacttcctcggcaaacccgtattatcagggaatttctcccggtagcaccccagtgctcgcattggatgtatttttggtgcaggcttcagcgaacactattctttctcatttccttgggcttgttttctcactggagttgctgcgatcagtcacattaccaccttcagatgcaactccatttcncaaatttgcgtaatatgtgcctcgagactagataatgaaatcacacacccaaaaattgtccctcgtctcttgtggttatttgcttaattaattgtgttcagctttttgataca

SEQ ID NO: 234738 - DNA, 425 bp, Glycine max
  unsure (1)..(425): unsure at all n locations
gaactcttcctctttttacttcccctatggctcgtcactccttgctcttagccctcctcctcttcgccgccgtggccgccgccgcgatggcggtggccgcgtccgacgccgacgacatcctgatccgtcaggtggtgccagatgttggcgaagccgaagaggaggacaacctgctgaacgccgagcaccacttcgcgagcttcaaggccaagttcgccaagacctacgccaccaaggaggagcacgatcatcgcttcggcgtcttcaagtccaacctccgcagagccaggctgcacgccaagctcgacccctccgccgtccacggcgtcaccaaattctccgattcaactccggccgagttccgccgccagttcctcggcctcaagccgctccgcttcncggcgcacgcncagaaggcgcccatc

SEQ ID NO: 234739 - DNA, 404 bp, Glycine max
acaccgtctggtctattcttaactcaacttctgctacccagtctcttcttccaagtccaaccacgcttttctctacagtcatgggcaaggtcaagatcggaatcaacggatttggaagaattggccgtttggttgccagagtcgctctgcaaagagacgatgtggagctcgttgccgttaacgaccctttcattaccaccgattacatgacatatatgtttaaatacgacagtgttcacggacactggaagcatcacgatgtcaccgttaaggacgagaagacccttctcttcagtgacaagccagtcactgtttttggacacaggaaccctgaagagatcccatgggggtcaactggagctgatatcattgttgagtccaccggagttttcaccgataaagac

SEQ ID NO: 234740 - DNA, 396 bp, Glycine max
  unsure (1)..(396): unsure at all n locations
gaacctacgccgagtgaaaccccaatcccaatacactcccaactcacaaagccatgtctccaggtcctgttgtcgacgcttcccctgaggttgaagcagagcaacaacttccctccgtcgatgacgcaacccagttgaagaaatcccaaccgcaggaggatgatgctcccgttgtcgaggacgtgagggatgatgacaaggacgacgacgatgaggacgacgacgacgatgatgaagatgacaaggaagacgatgctctaggtggtgctgagggttcaaagcagagcagaagtgagaagaagagtcgaaaagcaatgttgaagctgggactaaaacctgtcaccggtgttagtagggtcacaatcaagagaacaaaanataatcttttcttcatct

SEQ ID NO: 234741 - DNA, 405 bp, Glycine max
  unsure (1)..(405): unsure at all n locations
aaggaagaaaaaaagaaaaagaagatcaaggaagtgtcacatgaatggtccttggtgaacaagcagaagcctatttggatgaggaagcctgaggagatcacaaaagaggagtattctgctttctacaagagtcttaccaatgactgggaagagcatttggctgtcaagcacttctctgttgagggtcagttggagtttaaggctatactctttgttcccaagagggcaccttttgacctctttgacacaaggaagaagcctaacaacattaagctctatgtccgccgtgtctttattatggacaactgtgaggagttgattcctgagtatttgggctttgtcaagggtattgttgattctgaagatctcncactcaacatttcaagagaaatgttgcaacagaac

SEQ ID NO: 234742 - DNA, 423 bp, Glycine max
ggaaattggaatgaataagaggagcagcagcagcagcagcagttcagtttttgaggcgaatggagtggaggaacctcaacaaccttcatcctgtgcagcagcagcacttgatgagttgcataaagagaaaaatgagaatggagaagaaaccctcgtgccttccaatccctatcccaatcttgacgatggcttctatgaaatcgaaaccatacgccgtaagaggctacgcaagggtcagctccagtacctaatcaaatggcgtggatggcctgagactgccaacacttgggaacctcttgaaaatctacagtccgttcctgatctcgttgatgcttttgaggacagcctcaagtctggaaaacatcagaagcgcaagcgcaagcatgtggatgtgcttcaactcaccctactcaagaagcgctc

SEQ ID NO: 234743 - DNA, 402 bp, Glycine max
ggcacaagtgagtttgttgatcgagataactagaaacagtgtgatgaaaatgaaggtccttgttttcttcgttgctacaattttggtagcatggcaatgccatgcgtacgatatgttccctctccgaatgaacactggctatggtgcccgtactccggaggtgaaatgcgcaagttggaggcttgctgtggaagcacacaacatctttggctttgagaccattcctgaagagtgcgttgaagcaacaaaggaatacatccatggcgaacaatatagatcagactccaaaacagttaaccaacaagcttacttttatgccagagacctcgaagtccatcccaaggacacatttgtgttcagtatagatggcaccgtactctctaataatccatactacaaaaa

SEQ ID NO: 234744 - DNA, 368 bp, Glycine max
  unsure (1)..(368): unsure at all n locations
gagagcaagcaaagcgggggagaaagagaggcagcanacaaaaacaatggcgacgtcgctctctgtttcgccatctctctctctcaacactctcttcatcgccaaagcgcttccactatctcgcccctcctttctctctctccctctccccaaatccctactctctctctccacgcgccgccgcaccttcatcgtccgcgccgaatcccaaaacggcgccgaccccgttcccgcccactacgacttcgacctcttcaccatcggcgcaggcagcggcggggtccgagccgctcgcttcgccgccaactacggcgcttctgtcgccatctgcgagcttcctttctccactatctcctccgaaaccaccg

SEQ ID NO: 234745 - DNA, 390 bp, Glycine max
aaaaaaacaacaaaagggaaaggttcaaaatttggttgtaaccaaaaaccaatttaaccttgaggagaatataaatttgttggtttcctttgttgcggcattatttttggtatcatggcaatgcaatggcgcaggctacaaaaggttccctctccgaataaaaacgggctatggtaagcgttccttcggaggtaaaatgcgcaatttttaggcttgctgtggaagcacacaacatccgagcctttaaaaccattcctgaaaattgcgttgaaccaacaaaggactacattaatggcaaacaatttagattagactctaaaacagttaaccaacaagctttcttttatgctagtgaacgcgaagtccatcacaacgacatatttatattcg

SEQ ID NO: 234746 - DNA, 364 bp, Glycine max
  unsure (1)..(364): unsure at all n locations
caacaaaaggggaaaattcaaattcccacccattgcttcgcctcacaacagcacctgcagcagcaatggctcccaaacaaggtggaaaggctccggctcttgccgctaagaagaagcctgagaaggtcacgaatccgttttcgagaacgtccaacaattcggaatccgagggcgttcctccgaaaagactactagttcgtaagtgccaaagaatgttcaaattcagaggaagaagaggattctgaagcagaggttgaangttcccccagctttgaaccagtttaccaaaactcttgacaaaaacctagcaacaagtctgttcaagttgcttctgaagtacangcccgangacaaagctgaaaag

SEQ ID NO: 234747 - DNA, 420 bp, Glycine max
aaacacaaaggggactaggtttcagctgtcgcgttaatcgtaccgcctagcattgatttggaaaagtccaacttcaaggatgagtaagcttcagagtgatgctctaagagaagctatctcaggaatcatggctgattccaaggaaaagaacaggaaatttgtggagaccattgaactccaaattgggctgaaaaactatgatccccagaaggacaagcgttttagtggctctgttaagttgcctcacattcctcgccccaagatgaagatttgtatgcttggagatgcccaacacgttgaagacgctgagaagatacgattggactacatggatgttgaggccttgaagaagcttaacacaaacaagaaattggtgaaaaaactagccaagaaatatcatgcctttttggcctctgaagc

SEQ ID NO: 234748 - DNA, 405 bp, Glycine max
  unsure (1)..(405): unsure at all n locations
ggcacaagtgagtttgttgatcgagataactagaaacagtgtgatgaaaatgaaggtccttgttttcttcgttgctacaattttggtagcatggcaatgccatgcgtacgatatgttccctctccgaatgaacactggctatggtgcccgtactccggaagtgaaatgcgcaagttggaggcttgctgtggaagcacacaacatctttggctttgagaccattcctgaagagtgcgttgaagcancaaaggaatacatccatggcgaacaatatagattagactccaaaacagttaaccaacaagcttacttttatgccagagacctcgaagtcaatcccaaggacacatttgtgttcagtatagatggcaccgtactctctaatattcatactacanaaaacat

SEQ ID NO: 234749 - DNA, 433 bp, Glycine max
ggcacaagtgagtttgttgatcgagataactagaaacagtgtgatgaaaatgaaggtccttgttttcttcgttgctacaattttggtagcatggcaatgccatgcgtacgatatgttccctctccgaatgaacactggctatggtgcccgtactccggaggtgaaatgcgcaagttggaggcttgctgtggaagcacacaacatctttggctttgagaccattcctgaagagtgcgttgaagcaacaaaggaatacatccatggcgaacaatatagattagactccaaaacagttaaccaacaagcttacttttatgccagagacctcgaagtccatcccaaggacacatttgtgttcagtatagatggcaccgtactctctaatattccatactacaaaaaacatggatatggggtggagaaattaactcga

SEQ ID NO: 234750 - DNA, 422 bp, Glycine max
  unsure (1)..(422): unsure at all n locations
gaaggtgcaagagtttgttgtgagctataagctagtttatcgtgaggagaatatgaagttgtttgttttctttgttgctgcagtagttttggtagcatggccatgccatggcgcaggctaccaaaggttccctctccgaatgaaaactggctatggtgagcgttcttcggaggtaaaatgcgcaagttttaggcttgctgtggaagcacacaacatccgagcctttaaaaccattcctgaagagtgcgttgaaccaacaaaggactacattaatggcgaacaatttagatcagactctaaaacagttaaccaacaagctttcttttatgctagtgaacgcgaagtccatcacaacgacatatttatattcggcatagataacaccgtactctctaatatcncatactatganaaacatggat

SEQ ID NO: 234751 - DNA, 345 bp, Glycine max
ggtccttcacattctcctctctgaattcctcttattcaggaatttggagagactgttgatatagaaaggtaggataaaccagtggccaaggaatatatggcgttttctatggttttcattgttagcaacattatgctgcttttcagttcagcatttgccaaaactgctagtcctccctctctgagcccaactccagcaccagccccggcacccgactacgtgaacctcaccgagttgctcagtgttgctggtccatttcacaccttccttggataccttgagtccaccaaagtgattgacactttccaaaaccaagccaacaacactgaagaaggaattaccatc

SEQ ID NO: 234752 - DNA, 365 bp, Glycine max
ggcacaagtgagtttgttgatcgagataactagaaacagtgtgatgaaaatgaaggtccttgttttcttcgttgctacaattttggtagcatggcaatgccatgcgtacgatatgttccctctccgaatgaacactggctatggtgcccgtactccggaggtgaaatgcgcaagttggaggcttgctgtggaagcacacaacatctttggctttgagaccattcctgaagagtgcgttgaagcaacaaaggaatacatccatggcgaacaatatagatcagactccaaaacagttaaccaacaagcttacttttatgccagagacctcgaagtccatcccaaggacacatttgtgttcagtatag

SEQ ID NO: 234753 - DNA, 246 bp, Glycine max
aaaaggggcacaagtgagtttggtgattgaaataactaaaaacaatgttatgaaaatgaaagtccttgttttcatcgttgccacaattttggtaacatggcaatgccaagcctacgataagttccctctccgaattaacactggctatggtgaccgtactccggaagttaaatgcccaagtttgaagcttgctgttgaaacacacaacaaccttggcttttaaaacaatcctgaaaaattccttta

SEQ ID NO: 234754 - DNA, 424 bp, Glycine max
  unsure (1)..(424): unsure at all n locations
gagagttaaaaaggttactactcagatttagcagagcgtagagctgagctgcgaaaacccccaactccaacctctgttcatcgtctaccgcgctttcttttcaaccagaactatgattaagctttttaaagtaaaggaaaagcagagagaacttgcagaaaatgcaagtggcggaccacctgttaagaagcaaagtgctggagagttgcgtcttcacaaagatataagtgagctgaatctaccaaaatcatgtaccatgcaattccccaatggcaaagatgatctgatgaactttgaagtttcaattcgacctgatgatggatattacttaggtggcacatttntgttttcctttcaagtgtctcncatctatccacacgaagcaccaaaggttaagtgtaagacaaaggtctatcatccaaat

SEQ ID NO: 234755 - DNA, 415 bp, Glycine max
ggggcgaggtacccaaaaattgatacattacagagtgcgttgttgctccttcgccacaactccctgccaacatgggtatctccagagattctatgcacaagaggcgtgccactggtggcaagaagaaggcatggaggaagaagagaaagtatgagcttggtcgccagcctgctaacactaagctgtcaagcaacaagacagtcaggaggatccgggttagaggtggaaatgtgaagtggagggcactgagattggatactggaaattactcctggggaagtgaagctgtaactcgcaagactcgtatactagatgtggtttacaatgcctcaaacaacgagcttgtgcgtactcagactcttgtaaaaagtgctattgttcaggttgatgctgctccattcaaacagtggtacct

SEQ ID NO: 234756 - DNA, 342 bp, Glycine max
aaaaacaaaaggggaattgaagaattaaagaaaaagagaccataaccgaaaaagaagaagaagaagaaagctagggtttttgcaattgcaacgatggcgcatcaaggagaaccggcaaacctgcaatggggaaagctggaggaggacaacggagaggatttggacttcctcctgccgccgcggcaggtgatagggcccgacgagaacgggataaagaaggtgatcgagtacaagttcgacgaggacgggaacaaggtaaagatcaccaccaccacacgcacgcgcaaactcgccaacgcgcgtctcaacaaacgcgccatcgagcgccgctcctggcccaaa

SEQ ID NO: 234757 - DNA, 361 bp, Glycine max
  unsure (1)..(361): unsure at all n locations
gaaggtgcaagagtttgttgtgagctataagctagtttatcgtgaggagaatatgaagttgtttgttttctttgttgctgcagtagttttggtagcatggccatgccatggcgcaggctaccaaaggttccctctccgaatgaaaactggctatggtgagcgttcttcggaggtaaaatgcgcaagttttaggcttgctgtggaagcacacaacatccgagcctttaaaaccattcctgaagagtgcgttgaaccaacanaggactacattaatggcgaacaatttagatcagactctanaacagtttaacaacaggctttcttttatgctagtgaacgcgaagtccatcacaacgacata

SEQ ID NO: 234758 - DNA, 426 bp, Glycine max
cgcgtccggagagtcggtccatgatgacattgcgggagtgcggaggagtcttgttgtcgaacatctgccccttctacagtcaagaggctgtgacgttgctggaactctcagttgtcactttaatattagtagtcttggaatgagaagtcgcaggggacaaaatgcactggcttagcattttggcagtctatagtgacctgtcttcggacgtgcaatgcacaagtttcaagcctactctgaaatcaagatgttcataacctgtatcaccattcgttaacactgcctataaccaactcaggactacatatagtggctagcaatttagatcagactcaagatcagttaaccaacaagctttcttattacggtactgaacgcgatgtccatcaaagcaacatatttacaatcggccatacataacatcgt

SEQ ID NO: 234759 - DNA, 358 bp, Glycine max
ggccgcataccctagcgttcctgttattctattgtggctgaaacaaaacagtgttgaacggcgaggtagaacgacgacccccttctgcgttttgaccttcaatctcaatcatggccaaagctgaaggtggcaaggaaccaataaatgaacaagcagtagcaaatatgtatgctgcaatgaggtctgagctcaaccaaatttactccaaaataactgaactggagatggaagttagtgagcacacattggttaccaatgccattcaaccacttgaccaatctagacgatgctatcgtatgattggaggggtgcttgtggagagaacatcaaagaggtcttgcctgctgtgcagcgaaat

SEQ ID NO: 234760 - DNA, 354 bp, Glycine max
  unsure (1)..(354): unsure at all n locations
ggaggcagacacaagagacagcagagcagagatctagcgtattctctcgctctttctttcactgtcacagagccacatccatgggcttcccagccaacggcgcctctgcggcccagcccctaaacttcctcatctacggccgcacgggctggattggcggcctcctcggctccctctgccgggcccagggcatctccttccattacggctcgggccgcctcgagaaccgggcctccctcgaaaccgacatagccctcctcaagccctcncacgtcttcaacgccgccggcgtcacgggccgccccaacgtcgactggtgcgagtcccacanagtcgagaacatccgaaacaacg

SEQ ID NO: 234761 - DNA, 383 bp, Glycine max
ggcacaagtttgttgagatagctagaagcaataagatgaaaatgaaagtgcttgttttgtttgttgctacagttttggtagcatatgaatgccatggctcagactacaagaagttccctctccaaatgaaaactgggtttggtgggcaatacagcaatgaggtggcatgtgccagttggaggcttggcgtggaagcaaacaacgtagtcaagtggcaaactgttcctgcagcttgcggagagtacatagctgactacgttctaggagaccaatatagatcagattccaaaacagttaaccaacaagcttatttctatgctaaatccctcaaactcaccaactaaagatgtcctttgtcctggacgttgacgacactactctct

SEQ ID NO: 234762 - DNA, 211 bp, Glycine max
ggcacaagtgagtttgttgatcgagataactagaaacagtgtgatgaaaatgaaggtccttgttttcttcgttgctacaattttggtagcatggcaatgccatgcgtacgatatgttccctctccgaatgaacactggctatggtgcccgtactccggaggtgaaatgcgcaagttggaggcttgctgtggaagcacacaacatctttggc

SEQ ID NO: 234763 - DNA, 355 bp, Glycine max
  unsure (1)..(355): unsure at all n locations
ggcacaagtgagtttgttgatcgagataacaagaaacagtgtgatgaaaatgaaggtccttgttttcttcgttgctacaattttggtagcatggcaatgccatgcgtacgatatgttccctctccgaatgaacactggctatggtgcccgtactccggaagtgaaatgcgcaagttggangcttgctgtggaagcacacaacatctttggctttgagaacattcctgaagagtgcgttgaagcancanaggaatacatccatggcgaacaatatagattagactccanaacagttaaccaacaagcttacttttaatgcagagaactcgaagttcatccaangacacatttgtgt

SEQ ID NO: 234764 - DNA, 357 bp, Glycine max
  unsure (1)..(357): unsure at all n locations
ggcacaagtttgttgagatagctagaagcaataagatgaaaatgaaagtgcttgttttgtttgttgctacagttttggtagcatatgaatgccatggctcagactaccagaagttccctctccaaatgaaaactgggtttggtgggcaatacagcaatgaggtggcatgtgccagttggaggcttggcgtggaagcaaacaacgtagtcaagtggcaaactgttcctgcagcttgcggagagtacatagctgactacgttctaggagaccaatatagatcagattccaaaacagttaaccaacaagcttatttctatgctaaatccctcaaactcaccancaaagatgtctttgtct

SEQ ID NO: 234765 - DNA, 423 bp, Glycine max
gagacagggaactggagacagatatggattggcatcacggcacaaagccacttgttcctcggccagagaccttaagcttcttctacaactataactacaacagtccatatccaggagtggaagtgaaacaagcagcattgatggagacaggagaaaggtcagttccagcattaatggacagcagaaacaaagagaagaagaagcgattaacaaataaccagatagagttattggagaagagttttcaagaagagataaagttggaccctgaaaggaagatgaagctttccaaggagctaagccttcagcctcgccaaatcgctgtttggttccaaaatagacgaacaaggtggaagaccaagcagcttgagcacttgtacgatgtgcttaaacaccaatatgatgtcgtctccaacgaaaagc

SEQ ID NO: 234766 - DNA, 398 bp, Glycine max
tcagtaaagctgcaacagcaagacaacgagagaatgggagtgaatgaataatgagcgtcattaatttacgattttgccactgttcccaactcctcctcctctcatgatacccgaagctctcttcttcctcgcaaactgcaatgttaactctgagaaagagatacctaacgaccccttttgccatttcctgcaaaacccgtttctcttcttcaattcgcgcgtccatggcttcaccctccatcacagacgccgaaacatagccgttttctgttctcttcgtgtgcctcggcaacatctgcagaagccccgctgctgaaggagtcttcactgacttagtcaacaaaagggacctcaattcgaagttcaaaatcgactctgctggcaccatcaattaccac

SEQ ID NO: 234767 - DNA, 366 bp, Glycine max
gagaatttttgggggctatgacccttgttattccaattatgtagaagaatacttcaatagaaaagatgttcagtcatcttttcatgcagatactaaaagagacactaacgtagcatggaaggtttgcaagtggccttaagatatggatttatagtggagacgcagatggaagagtgccggtgataggaacacgatattgcgttgaggctctgggattacctttaaagtctaggtggcgaacttggtaccatgataatcaggttggaggaaggatagttgaatatgaagggttgacatatgtgacagtgagaggagcaggtcacttggtgccactgaacaagcctagtgaagctctctctctaattc

SEQ ID NO: 234768 - DNA, 402 bp, Glycine max
  unsure (1)..(402): unsure at all n locations
ggcacaagtgagtttgttgatcgagataactaaaaacaatgtgatgaaaattaaaggtccttgttttcctccgttgccaaaattttggtaacaatgcaatgccatgcgtacgatatgtccctctccgaatgaacactggctaatggtgccgtactccggaagtgaaatgcgcaagttggaggcttgctgtggaagcacacaacatctttggctttgagaccattcctgaagagtgcgttgaagcaacanaggaatacatccatggcgaacaatatagattagactccaaaacagttaaccaacaagcttacttttatgccagagacctcgaagtccatcccaaggacacatttgtgttcagtatagatggcaccgtactctctaatattccatactacaaaa

SEQ ID NO: 234769 - DNA, 356 bp, Glycine max
  unsure (1)..(356): unsure at all n locations
ggcacaagtgagtttgttgatcgagataacaaganacagtgtgatgaaaatgaaggtccttgttttcttcgttgctacaattttggtagcatggcaatgccatgcgtacgatatgttccctctccgaatgaacactggctatggtgcccgtactccggaggtgaaatgcgcaagttggaggcttgctgtggaagcacacaacatctttggctttgagaccattcctgaagagtgcgttgaagcaacaaaggaatacatccatggcgaacaatatagattagactccaaaacagttaaccaacaagcttacttttatgccagagacctcgaagtccatcccaaggacacatttgtgt

SEQ ID NO: 234770 - DNA, 385 bp, Glycine max
gaccgttccatttctcaacaacttctgctacttcctactccaaccgcacttctgctccgcaattatcatgggcaaggtcaagatcggaatcaacggatttggaagaattggccgtttggtagccagagtggctctgcagagagacgatgttgaactcgttgccgttaacgaccctttcatcaccaccgattacatgacatacatgtttaaatacgacagtgttcatggacactggaagcatcacgatgtcaccgttaaggacgagaagacccttctcttcggtgacaagccagtcactatttttggacacagaaaccctgaagagattccatgggggtcaactggagctgacatcattgttgagtccaccggagttttcaccgat

SEQ ID NO: 234771 - DNA, 386 bp, Glycine max
gaaggtgcaagagtttgttgtgagctataagctagtttaacgtgaggagaatatgaagttgtttggtttccttggtgctgcagtagttttggtagcatgggcatgccatggcgcaggctacaaaaggttccctctccgaatgaaaactggctatggtgagcgttcttcggaggtaaaatgcgcaattttaaggcttgctgtggaagcacacaacatccgagcctttaaaacaattcctgaagattgcgttgaaccaacaaaggactacattaatggcgaacaatttagattagactctaaaacagttaaccaacaagctttcttttatgctagtgaacgcgaagtccatcacaacgacatatttatattcggcatagataacaccg

SEQ ID NO: 234772 - DNA, 460 bp, Glycine max
  unsure (1)..(460): unsure at all n locations
gtcgaccacgcgtccgaaaaccaaagttattgataacaacttgaatcctacctggaatgagaaatttgagttgattgcagaagacaaggagacccaatcactaattcttgaggttcttgataaagacattggacaagataagcgattgggaatagcacagttaccccttattgatctagaaatacaaactgaaaaggagattgaattgaggctgctgccctcacttgatacactgaaggtgaaagataagaaggatcgangaaccttaacagtaaaggtcatgtattatcagtttaacaaggaagagcagctggttgcactaaangcagaaaagaagatactagaagaaaggaagaaactgaaagaagctggaatgatangaagcacgatggatgcactagatggagcagtatcagtggtaggctctggtgttggactggttggtactggtgttgttgcc

SEQ ID NO: 234773 - DNA, 385 bp, Glycine max
  unsure (1)..(385): unsure at all n locations
ggtcagaattcttgaaacatacgggttggaggaggaagatgagactatgcctccaggggatgcttctcattcagggttcaactttggtagcagtgacgctcctgctgtgccgtccggtggattcaactttaattacaagatattcatgctctactggggagttttggttggtctatctgtgaagtcctcctttatgacacgacagcagttgggggacaagtcaacgtcttgtcattgtcctaatgtccttgggttgtacgaagtccagcaagtaaatacatggttgctggactgccttgggtttttgcaatgcctgatatttcatatctcatggtgtaaaatgctttgtggctatatttttttgcancgtagagaatactagagt

SEQ ID NO: 234774 - DNA, 397 bp, Glycine max
ggcacaagtgagtttgttgatcgagataactagaaacagtgtgatgaaaatgaaggtccttgttttcttcgttgctacaattttggtagcatggcaatgccatgcgtacgatatgttccctctccgaatgaacactggctatggtgcccgtactccggaggtgaaatgcgcaagttggaggcttgctgtggaagcacacaacatctttggctttgagaccattcctgaagagtgcgttgaagcaacaaaggaatacatccatggcgaacaatatagatcagactccaaaacagttaaccaacaagcttacttttatgccagagacctcgaagtccatcccaaggacacatttgtgttcagtatagatggcaccgtactctctaatattccatactac

SEQ ID NO: 234775 - DNA, 312 bp, Glycine max
gattgagtacaacttcacattttagaagaataccccctcttttgctgcatcagaggagttgtaaattaagagcatggctgcacaagctcttgtatcatcatcttctcttaccttctcagcggaggctgcaagacaaagtcttggaccaagatcactccaatctccatttggcttctccagaaaagcctcctttcttgttaaggcagctgctaccccccctgtcaagcaaggattagacagacctttgtggtttgcatcaaagcaaagtctttcttacttggatggaagccttccgggtgactatggatttga

SEQ ID NO: 234776 - DNA, 158 bp, Glycine max
  unsure (1)..(158): unsure at all n locations
gaaggtgcaagagtttgttgtgagctataagctagtttatcgtgaggagaatatgaagttgtttgttttctttgttgctgcagtagttttggtagcatggccatgccatggcgcaggctaccaaaggttcnctctccgaatganaactggctatggtg

SEQ ID NO: 234777 - DNA, 361 bp, Glycine max
  unsure (1)..(361): unsure at all n locations
ggtgcacaagtgagtttgttgatcgagataactaaaaacagtgttgatgaaaatgaaggtccttgttttcttcgttgcaacaattttggtagcatggaaatgccatgcgtacaatatgttccctctccgaatgaaaactggctatggtgcccgtactccggaggtgaaatgcgcaatttggaggcttgctgtggaagcacacaacatctttggctttgaaaccattcctgaagagtgcgttgaagcaacanaggaatacatccatggcgaacaatatagattagactccaaaacagttaaccaacaagcttacttttatgccagagacctcgaagtccatcccaaggacacatttgtgttc

SEQ ID NO: 234778 - DNA, 357 bp, Glycine max
  unsure (1)..(357): unsure at all n locations
ggttctagtgtgtgattgtttgttgttgtaactcgttcttcttcttttgttgttctgtgtttgtgtttgttttttctctcacctgaaaatgtcttgctgcggtggtaactgtggttgcggaagctcctgcaagtgcggcaacggctgcggatgctgcaagatgtacccagacttgagctacactgagtcaaccaccaccgagaccttggtcatgggagtggcacctgttaaggctcaatttgagggtgctgaaatgggtgtgcccgctgagaacgatggctgcaaatgtggaccaaactgctcctgcaacccctgcacttgcaagtgangtgttgggagagcaagcttcaagcagag

SEQ ID NO: 234779 - DNA, 408 bp, Glycine max
  unsure (1)..(408): unsure at all n locations
gcacaagtgagtttgttgatcgagataactagaaacagtgtgatgaaaatgaaggtccttgttttcttcgttgctacaattttggtagcatggcaatgccatgcgtacgatatgttccctctccgaatgaacactggctatggtgcccgtactccggaggtgaaatgcgcaagttggaggcttgctgtggaagcacacaacatctttggctttgagaccattcctgaagagtgcgttgaagcaacanaggaatacatccatggcgaacaatatagatcagactccaaaacagttaaccaacaagcttacttttatgccagagacctcgaagtccatcccaaggacacatttgtgttcagtatagatggcaccgtactctctaatattccatactacaaaanacatgga

SEQ ID NO: 234780 - DNA, 157 bp, Glycine max
tacatccatggcgaacaatatagatagactcaaaacagttaaccaacaagcttacttttatgccagagacctcgaagtccatcccaaggacacatttgtgttcagtatagatggcaccgtactctctaatatttcatactacaaaaaacatggatat

SEQ ID NO: 234781 - DNA, 349 bp, Glycine max
gtttgcaaattaagttcattttcctccctttcactctcgtagacatcacaaaccttccctccattcatcccacgcatggctgccatgaactctagcgtattggcctgtaactatgccatatcacgtgcagcgtgttcggagctcaatgggaatgtcacttccgtggcctatgttgcatgctctggctacaagttgccattgatcaaagctgaagccagagttccctaggcacatgaatctgaaggaggaaggataggtgcccttgtcctcttggaagctacccttttcacatctgcagcttccaattcttctgccaatgctgggattattgaacattaccttgagagga

SEQ ID NO: 234782 - DNA, 403 bp, Glycine max
gattcgcagaactttgtttcccaatttccattgcctccgcttccacctcgcaaccatgatcatcccggagaagaaccgcaaggagatctgcaaatacctcttccaagagggagtttgcttcgcgaagaaggacttcaatttggccaagcaccctgagatcgacgtgccgaatctgcaggtgattaagctgatgcagagtttcaagtctcgcgagtacgtgagagaaacttttgcttggatgcactattactggttcctcaccaacgatggcatcgagtttctcagaacttaccttaaccttccttccgaaattgtccctgctactttgaagaagcaagcaaagccacctggcaggccctttggaggcccatccggtgatcgccctagaggtccaccacgcttt

SEQ ID NO: 234783 - DNA, 366 bp, Glycine max
ggatgaatgtagaacgctgctgccgaaacccttcccgatccctaaggtaagtgagtaatcggtggttgagaatggtggagaaggcgaagggtaggaaggaggaggtggttaccagagagtacaccattaacctccacaagcgcctccatggctgcacatttaagaagaaagctcctaaagctattaaggagataaggaaatttgcccaaaaggccatggggaccaatgatgtgagggtggatgtgaagttgaacaagtttgtctggagccagggaatcaggagtgttccaaggaggattagggtaagaattgctcgcaagaggaatgacgatgaagatgccaaggaagagctatactcccttgtca

SEQ ID NO: 234784 - DNA, 270 bp, Glycine max
ggtaataattcttataacacaacacaacccatggccaccacctccgcattcctcctccttcccctcctcctgctgctccacctcgccatcgccgctcacggcatcggcatcaactacggcacgctcggcgacaaccttccgccgcccgcggcggtggcgaacttcctgaagacgaagacgaccatcgaccgcgtgaagatctacgacgtgaacccggacatcctgcgggccttcgccggcagcgggatctccgtgacggtgaacggcccc

SEQ ID NO: 234785 - DNA, 363 bp, Glycine max
gacaatcgaacgggaaaaggcgtcttcataaacgccgcccaaaacttctcatacccttttattcattccattcgtttctagggttttcttttctttgccgagaaaatgagagagtgcatttcgatccacattggccaggccggtatccaggttggaaacgcctgctgggaactctattgccttgaacacggcattcagcccgatggacagatgccgagtgacaagaccgttggcggaggagacgacgccttcaacacatttttcagcgagaccggcgccggaaagcacgtgccccgcgccgtcttcgtggatcttgaacccaccgtgatcgacgaagtccgaaccggtgcgtaccggcagctc

SEQ ID NO: 234786 - DNA, 361 bp, Glycine max
ggcacaagtgagtttgttgatcgagataactagaaacagtgtgatgaaaatgaaagtccttgttttcttcgttgctacaattttggtaacaatggaatgccatgcgttacgatatgttctcctcccccaaatgaacactggctatggtgcccgtactccggaggtgaaatgcgcaagttggaggcttgctgtggaagcacacaacatctttggctttgagaccattcctgaagagtgcgttgaagcaacaaaggaatacatccatggcgaacaatatagattagactccaaaacagttaaccaacaagcttacttttatgccagagacctcgaagtccatcccaaggacacatttgtgttc

SEQ ID NO: 234787 - DNA, 386 bp, Glycine max
gaaggtgcaagagtttgttgtgagctataagctagtttatcgtgaggagaatatgaagttgtttgttttctttgttgctgcagtagttttggtagcatggccatgccatggcgcaggctaccaaaggttccctctccgaatgaaaactggctatggtgagcgttcttcggaggtaaaatgcgcaagttttaggcttgctgtggaagcacacaacatccgagcctttaaaaccattcctgaagagtgcgttgaaccaacaaaggactacattaatggcgaacaatttagattagactctaaaacagttaaccaacaagctttcttttatgctagtgaacgcgaagtccatcacaacgacatatttatattcggcatagattacaccg

SEQ ID NO: 234788 - DNA, 383 bp, Glycine max
ggcaatacaattgagttcaaacaaatcaaagccaagggcaacctcaacttccccaatggtctccccggtcccctaaccctctttttggtgccacttaccaaggtgaaatcgaacgatacgtttccttcaacctcaacaaattcaaacccattcaaaccaaacattatcctccagaaaaatcctagaatttaatccccgggggtgttacaacgcaccactagttggcaacaacggcgtgcccacctcgggatctctcggtcgtgccctttacgctgccccaatccagatttgggacagcgaaaccggcaaggttaccagctgggctacatcctttaaattcaacattttcgcacccattagatcaaactcaactgaagggcctg

SEQ ID NO: 234789 - DNA, 327 bp, Glycine max
ccactcacgcgtccgacagctgccaaaagaagggggcacaagtgagtttgttgatcgagatagctacaaacagtgtgatgaaaatgaaagtccttgttttcttcgttgctacaattttggtagcatggcaatgccatgcgtacgatatgttccctctccgaatgaacactggctatggtgcccgtactccggaggtgaaatgcgcaagttggaagcttgctgtggaagcacacaacatcattggctttgacaccattcgtgaagagtgcgttgaatcaacaaaggaatacatccattgggaacaatacagattaaactccaaaacag

SEQ ID NO: 234790 - DNA, 403 bp, Glycine max
gaaggtgcaagagtttgttgtgagctataagctagtttatcgtgaggagaatatgaacttgtttgttttctttgttgctgcagtagttttggtaacatggccatgccatggcgcatgctaccaaaggttccctctccgaatgaaaactggctatggtgagcgttcttcggaggtaaaatgcgcaagttttaggcttgctgtggaatcacacatcatccgagcctttaaaaccattcctgaagagtgcgttgaaccaacacaggactacattaatggcgaacactttagatcagactctaaaacagttaaccaacaagctttcttttatgctagtgaacgcgaggtccatcacaacgacatatttatattcggcatactatacaccgtactctctaatatccca

SEQ ID NO: 234791 - DNA, 322 bp, Glycine max
gcacaagtgagtttgttgatcgacataactagaaacagtgtgatgaaaatgaacgtccttgttttcttcgttgctacaattttggtagcatggcaatgccatgcgtacgatatgttccctctccgaatgaacactggctatggtgcccgtactccggaggtgaaatgcgcaagttggaggcttgctgtggaagcacacaacatctttggctttgagaccattcctgaagagtgcgttgaagcaacaaatgaatacatccatggcgaacaatatagatcagactccagagcagttaaccaacaagcttacttttatgccagag

SEQ ID NO: 234792 - DNA, 390 bp, Glycine max
ggggcacaagtgagtttgttgatcgagataactagaaacagtgtgatgaaaatgaacgtccttgttttcttcgttgctacaattttggtagcatggcaatgccatgcgtacgatatgttccctctccgaatgaacactggctatggtgcccgtactccggaggtgaaatgcgcaagttggaggcttgctgtggaagcacacaacatcgttggctttgagaccattcctgaatagtgcgttgaagcaacagaggaatacatccatggcgaacaatttttgataagactccagaacagttaaccaacatgcttacttttatgccagagacctcgaagtccatcccaaggacacatttgtgttcagtatagatggcaccgtactctctaatat

SEQ ID NO: 234793 - DNA, 377 bp, Glycine max
  unsure (1)..(377): unsure at all n locations
cggggcacaagtttgttgagatagctagaagcaataagatgaaaatgacagtgcttgttttgtttgttgctacagttttggtagcatatgaatgccatggctcagactaccagaagttccctctccaaatgaaaactgggtttggtgggcaatacagcaatgaggtggcatgtgccagttggaggcttggcgtggaagcaaacaacgtagtcaagtggcaaactgttcctgcagcttgcggagagtacatagctgactacgttctacgagaccaatatagatcagattccaaaacagttaaccaacaagcttatttctatgctaaatcgctcaaactcaccaacanagatgtctttgtcttggacgttgacgacact

SEQ ID NO: 234794 - DNA, 306 bp, Glycine max
gaaggtgcaagagtttgttgtgagctataagctagtttatcgtgaggagaatatgaagttgtttgttttctttgttgctgcagtagttttggtagcatggccatgccatggcgcacgctaccaaaggttccctctccgaatgaaaactggctatggtgagcgttcttcggaggtaaaatgcgcaagttttaggcttgctgtggaagcacacaacatccgagcctttaaaaccattcctgaagagtgcgttgaaccaacaaaggactacattaatggcgaacaatttagatcagactctaaaacagt

SEQ ID NO: 234795 - DNA, 360 bp, Glycine max
ggtgcacaagtgagtttgttgatcgagataactagaaacagtgtgatgaaaatgaaggtccttgtgttcttcgttgctacaattttggtagcatggcaatgccatgcgtacgatatgttccctctccgaatgaacactggctatggtgcccgtactccggacgtgaaatgcgcaagttggacgcttgctgtgggagcacacaacatctttggctttgagaccattcctgaagagtgcgttgaagcaacataggaatacatccatggcgaacaatatagattagactccaatacagttaaccaacaagcttacttttatgccagagacctcgaagtccatcccaaggacacatttgtgttc

SEQ ID NO: 234796 - DNA, 328 bp, Glycine max
gggtgtcgcgtcagctagatgttcgacacgaatttctgcattttccttcttccatcggtccgtgacatatacacagacacatttcgtctgacagggaagggtgattcgcgcacagcgtacgggcgcggagtcagtgttcacgtcgcagacccatcatccgcaacggtccgtgcaagttctgcaggctcgatttcggcgaacacaacagctatctcataggggtcattactgatatcatccatgaccctgcacgcggtgatcttcaagccaaagtggcgttctgacactccatccgcgttaagcagcagacggacctctacgtcaccga

SEQ ID NO: 234797 - DNA, 361 bp, Glycine max
ggaaaactaagtggtataagagctgaaaaaccctaataacaatgggaggaaaatgtccgcacaggaacgtgaagaagagaagatattctcacaagaccgcgcggcgatacaaatttgagctgaaaggggacgacatggtttatgcgcagctcaacaaacccgatcaagagagaccccctttacccgtcgacgaagatttgcctgagatgggccagtactattgccttcactgcgatcggtactttgccaatataactgtgagggatgagcactttaagaccaaacgacacaagaagcgtataaaacaaatgatgggtcctgcaccacatactcaacttgatgccgatttagcttctgggat

SEQ ID NO: 234798 - DNA, 342 bp, Glycine max
ggcacaagtttgttgagatagctagaagcaataagatgaaaatgaaagtgcttgttttgtttgttgctacaattttggtaagcaaataaatgcaatggtccaaacaaccaaaatttccccccccaaatgaaacctgggtttgggggccaatacaccactaatgtggtatgtgccactgtggagcttggcgtgaaagcatacaacgtagtcaagtggcacactgttcctgcatcttgcagagagtacatagctgactacgttctaggagaccaatacatatcatcttccaaaacagttaaccaacaagcttacttcgatgctaaatccctcacactcaccaac

SEQ ID NO: 234799 - DNA, 379 bp, Glycine max
agaaggggaccacattccaaaacacaaacacatacattgtagtatcacttttgtctcggaatttgttcttttgagttatggcaagcttaaaggttgcatgtgtggttttgatgtgcatggctgtgatgagtgcaccaatgatggtgcaagccgtgtcatgcaatgatgtttctgtgaacctagcaccgtgcctatcttacctgatgcagggtggagatgttccagaatcgtgctgtagcggagtgaggaacattctgggttctgccagcaccacctttgacaaacaaatcgtgtgcaaatgtcttcagcaagctgctaataactatggcatcaacgacgaatacgctcaagcactccccgcccgctgcaatgtcagcgt

SEQ ID NO: 234800 - DNA, 227 bp, Glycine max
ggcacaagtgagtttgttgatcgagataactagaaacagtgtgatgaaaatgaaggtccttgttttcttcgttgctacaattttggtagcatggcaatgccatgcgtacgatatgttccctctccgaatgaacactggctatggtgcccgtactccggaggtgaaatgcgcaagttggaggcttgctgtggaagcacacaacatctttggctttgagaccattcctg

SEQ ID NO: 234801 - DNA, 351 bp, Glycine max
gacattaagtagcgccattctgttgctactattgttcccacaaaaccaaaagccatcttcttcttccatgtcgagggcgcgaagctttgttctgtggcttcacggcctgggtgactctggtcccgccaacgaacccatcaaaaccttattcacttcttcccaattcagagacaccaaatggtccttcccttctgccccttccgcccctgtcacttgcaactatggttctgtaatgccttcatggtttgacattcttgagattcccgtggcagctgattctccatatgacgagagtagtttacttaaagctgttcgaaatgtgcatgctactatagacaaggaaatagctgc

SEQ ID NO: 234802 - DNA, 405 bp, Glycine max
ggcatcaattcaaaatatatcatcaattataagcatgggtttgtggaacacaacgaatgcagtgtcttgccgctttcacaagtttggtgatgaccagaagaatctggtcttccaaggtgatgccacgtcttcttccaggggcatagaactcacaaagttagacggtggaggaaaaccagtgggtggcagtgtggggagagtgttatactcttctccagtgcacctttgggaaagctctacagtggtcgcaagctttgaaaccgacttcaccttttccatctcatcagactctactactccaggtgatggccttgccttcttcattgcaccatttgacactaaaatccctccaaactctggtgggagcaaccttggactcttcccatcagacaatgttgttgctgt

SEQ ID NO: 234803 - DNA, 372 bp, Glycine max
tcaaagtagatcatcggggataacaaaggacatgtggcacacactcattgtctcgccgtgctgtgttcacacgtctcgtaatccctagcgttcttcgcgcttccgccgagtcgcgacatgctcatcgactggtccgacgctcaaaccgttagatagaggttgaagacggatgggtgctggtgctgggaggaagcaatcgacgaaacctgctgaaggattggaacaagctctacaataggtcgaaacgctttcttcggatttaagtttgacgatatcagaccagttcaagaacgaacattctaagaatagatctctccatgttgtcagttgagctggtggtgactcctggcactcgcgagctgatgcttaaaa

SEQ ID NO: 234804 - DNA, 353 bp, Glycine max
  unsure (1)..(353): unsure at all n locations
ggcatcaattcaaaatatatcatcaattataagcatgggtttgtggaacacaacgaatgcagtgtcttgccgctttcacaagtttggtgatgaccaaaagaatctggtcttccaaggtgatgccacgtcttcttccaggggcatagaactcacaaagttagacggtggaggaaaaccagtgggtggcagtgtggggagagtgttatactcttctccagtgcacctttgggaaagctctacagtggtcgcaagctttgaaaccgacttcaccttttccatctcatcagactctactactccaggtgatggccttgccttcntcaatggcacatttgacactaaaatccctccaa

SEQ ID NO: 234805 - DNA, 286 bp, Glycine max
gcacaagtgagtttgttgatccagataactagaaacagtgtgatgaaaatgaaggtccttgttttcttcgttgctacaattttggtagcatggcacatgccatgcgtacgatatgttccctctccgaatgaacactggatatggtgcacgtactccggaggtgaaatgcgcaagttggaggcttgctgtggaagcagacaacatctttggctttgagaccattcctgaagagtgccttcgaccaacacatgaatacatccatgcgcatcaagatagatcacactcc

SEQ ID NO: 234806 - DNA, 384 bp, Glycine max
  unsure (1)..(384): unsure at all n locations
gattgttcaacgaagcaagatgcttagcaaccgcatatggcagaggagagctttgatctccgcccggaccttattttctggctctgcttctcactcttcatcatcttcccatgcgatctcgcttcgcttcgccaaagctaatgctccttcttcttcacatgtcattttcaattttgcacgtgtggacagatattggttttctactcaacccgccctagagcttcccgcgagcaagatcgtggacgtgccgttggcacaaactggtgaaggcatcgcagaatgtgagcttctcaaatggtatgtacaagagggggattatgttgaagactttcaaccactttgcgaagtccanagtgataaagctaccatagaaattactagtcg

SEQ ID NO: 234807 - DNA, 360 bp, Glycine max
agcaaggggaccttctaacgtgatcgcagtccagtcagcctccaattcgtgccactctctttacaatggccgttaccttctcatctctccacagagaatcaggtctcatgtctctcgaggacttcctctctggggaagtctacgtatctggggatcagttcacaaaggacgacatcaatgtgtcaggtgctgttttggagatgtcaggtgactcatttcccaatgctgccaagtgggactaagttgtctcaacacagcttgcagtaagcttcattggcaatgctcagcgggtgagattcactggaatggcatctgctccattcgaagctgctcctgtcaaagcggttgcctctgctgtcg

SEQ ID NO: 234808 - DNA, 395 bp, Glycine max
ggcacaagtgagtttgttgatcgagataactagaaacagtgtgatgaaaatgaaggtccttgttttcttcgttgctacaattttggtagcatggcaatgccatgcgtacgatatgttccctctccgaatgaacactggctatggtgcccgtactccggaggtgaaatgcgcaagttggaggcttgctgtggaagcacacaacatctttggctttgagaccattcctgaagagtgcgttgaagcaacaaaggaatacatccatggcgaacaatatagatcagactccaaaacagttaaccaacaagcttacttttatgccagagacctcgaagtccatcccaaggacacatttgtgttcagtatagatggcaccgtactctctaatattccatact

SEQ ID NO: 234809 - DNA, 356 bp, Glycine max
ggcacaagtgagtttgttgatcgagataactagaaacagtgtgatgaaaatgaaggtccttgttttcttcgttgctacaattttggtagcatggcaatgccatgcgtacgatatgttccctctccgaatgaacactggctatggtgcccgtactccggaggtgaaatgcgcaagttggaggcttgctgtggaagcacacaacatctttggctttgagaccattcctgaagagtgcgttgaagcaacaaaggaatacatccatggcgaacaatatagatcagactccaaaacagttaaccaacaagcttacttttatgccagagacctcgaagtccatcccaaggacacatttgtgt

SEQ ID NO: 234810 - DNA, 386 bp, Glycine max
ggcacaagtttgttgagatagctagaagcaataagatgaaaatgaaagtgcttgttttgtttgttgctacagttttggtagcatatgaatgccatggctcagactaccagaagttccctctccaaatgaaaactgggtttggtgggcaatacagcaatgaggtggcatgtgccagttggaggcttggcgtggaagcaaacaacgtagtcaagtggcaaactgttcctgcagcttgcggagagtacatagctgactacgttctaggagaccaatatacatcagattccaaaacagttaaccaacaagcttatttctatgctaaatccctcaaactcaccaacaaagatgtctttgtcttggacgttgacgacactactccctccaat

SEQ ID NO: 234811 - DNA, 384 bp, Glycine max
gattatatttgagttcaaacaaatcaaagccatggccacctccaacttctctattgttctctccgtctccctagccttctttttggtgctacttaccaaggcacactcgaccgataccgtttctttcaccttcaacaagttcaacccagtccaaccaaacattatgctccaaaaagatgctagtatttcatcctctggggtgttacaactcaccaaagttggcagcaacggcgtgcccacctcgggatctctcggtcgtgccctttacgctgccccaatccagatttgggacagcgaaaccggcaaggtagccagctgggctacatcctttaaattcaacattttcgcacccaacaaatcaaactcagctgacgggcttgcctt

SEQ ID NO: 234812 - DNA, 407 bp, Glycine max
gggcacaagtgagtttgttgatcgagataactagaaacagtgtgatgaaaatgaaggtccttgttttcttcgttgctacaattttggtagcatggcaatgccatgcgtacgatatgttccctctccgaatgaacactggctatggtgcccgtactccggaggtgaaatgcgcaagttggaggcttgctgtggaagcacacaacatctttggctttgagaccattcctgaagagtgcgttgaagcaacaaaggaatacatccatggcgaacaatatagattagactccaaaacagttaaccaacaagcttacttttatgccagagacctcgaagtccatcccaaggacacatttgtgttcagtatagatggcaccgtactctctaatattccatactacaaaaaacat

SEQ ID NO: 234813 - DNA, 387 bp, Glycine max
aagacgacagaaggggaccaagtgaaccaatatagcccaagccctatacaaccaaaccctaacacacacccatttgattcagtttccatggctagcctcaaggttgcatttttggttgcagtgctctgcatggttgtggtgagtgcacccatggcacatgcagctatcacgtgcgggcaggtgacgaatagcctgatcaattgcatcggttacctccagaacggaggaacgccgccgtcgggatgctgcaacggagtgaagagcctcaatgccgccgccaagaccaccgccgaccgccagacggcgtgcaactgcctcaagtcggccgccagccaaatctccggcttcaaagccaacaacgccgcctcgctccccggcaaatgcgga

SEQ ID NO: 234814 - DNA, 367 bp, Glycine max
ggcacaagtgagtttgttgatcgagataactagaaacagtgtgatgaaaatgaaggtccttgttttcttcgttgctacaattttggtagcatggcaatgccatgcgtacgatatgttccctctccgaatgaacactggctatggtgcccgtactccggaggtgaaatgcgcaagttggaggcttgctgtggaagcacacaacatctttggctttgagaccattcctgaagagtgcgttgaagcaacaaaggaatacatccatggcgaacaatatagattagactccaaaacagttaaccaacaagcttacttttatgccagagacctcgaagtccatcccaaggacacatttgtgttcagtatagat

SEQ ID NO: 234815 - DNA, 378 bp, Glycine max
gcgaaaagacgacagaagggggcacaagtgagtttgttgatcgagataactagaaacagtgtgatgaaaatgaaggtccttgttttcttcgttgctacaattttggtagcatggcaatgccatgcgtacgatatgttccctctccgaatgaacactggctatggtgcccgtactccggaggtgaaatgcgcaagttggaggcttgctgtggaagcacacaacatctttggctttgagaccattcctgaagagtgcgttgaagcaacaaaggaatacatccatggcgaacaatatagatcagactccaaaacagttaaccaacaagcttacttttatgccagagacctcgaagtccatcccaaggacacatttgtgttc

SEQ ID NO: 234816 - DNA, 405 bp, Glycine max
  unsure (1)..(405): unsure at all n locations
gagataggtttgtgatagtgattgcctccctctgctgccgtccctaatctgaaggctcccgccatctgcgatcggatttcatggctccaaagaaggacaaggctcccccaccttcatccaagcctgccaagtctggcggtggcaagcagaagaagaagaagtggagcaagggtaagcaaaaggaaaaggtgaataacatggtgctcttcgatcagggtacctatgacaagctcctctctgaggcacccaaatacaagctcattactccttccattctctctgaccgtttgaggattaatggatcacttgcaangaaggctattanggaattgatggctanaggttcaatcangatggtgttctgccatgcaagtcagcagatttacactagagctacaaacacct

SEQ ID NO: 234817 - DNA, 399 bp, Glycine max
  unsure (1)..(399): unsure at all n locations
gaacacagttatccattcacatttcacagttagcacttagcagactctgctgcagtgaggtgaggggaggtttgtttgttgtttcgtttttcctttcctttccgccagaatccgttgagaatggcgttgccggtagtcgtcgatgcagagtacctcaaggaggtcgacaaggctcgccgcgatctccgcgcactcatcgctaacaggaactgcgctcctctcatgctccgattagcctggcacgatgccggaacttacgatgctaagaccaagaccggtggacctaacggttcgatccggaacgangaagagtattctcacggagccaataatggcttgaagaaagctattgatttctgccaggaagtgaaggcanaatatcctanaattacatatgca

SEQ ID NO: 234818 - DNA, 401 bp, Glycine max
  unsure (1)..(401): unsure at all n locations
ggagagagagagaaggcaagatgtcgaagagaggacgcggtggttcggcggggaacaagttccggatgtcgctgggtctgccggtggcggcgacggtgaactgcgccgacaatacgggggcgaagaacctctacatcatatcggtgaaagggatcaaagggcgtttgaaccgtctcccctcggcttgcgttggcgacatggtgatggccaccgtgaagaaggggaaacccgatctgaggaagaaggttttgccagctgtcattgttcgccagcgcaagccatggcgccgaaaggacggcgtctacatgtatttcgaagataatgctggtgttattgtcaatcccaaaggagaaatgaaaggttctgctatcactggtcccattnggaaagagtgtgctgat

SEQ ID NO: 234819 - DNA, 379 bp, Glycine max
  unsure (1)..(379): unsure at all n locations
gatttccccattcccaaatttctcattctcccatttcctctcagaaccctcgatcactcccacgcgctcctatatcctctccttcaccgtcgctctctccaacgatcacaacaacatcgtcatcccatggcaaacgccgcatctggtatggcagtccatgatgactgcaagttaaggtttttggagctgaagacaaagaggacacaccgtttcatagtttttaagattgaggagcagcagaagcaggtcattgtggagaagcttggtgagccagcccaaggctatgaagatttcactgccagccttcctgctgatgagtgccgttatgctgtttatgattttgagtatctgactgaagggaatgtccctaanagcagaa

SEQ ID NO: 234820 - DNA, 385 bp, Glycine max
  unsure (1)..(385): unsure at all n locations
ggcacaagtgagtttgttgatcgagataactagaaacagtgtgatgaaaatgaaggtccttgttttcttcgttgctacaattttggtagcatggcaatgccatgcgtacgatatgttccctctccgaatgaacactggctatggtgcccgtactccggaggtgaaatgcgcaagttggaggcttgctgtggaagcacacaacatctttggctttgagaccattcctgaagagtgcgttgaagcaacaaaggaatacatccatggcgaacaatatagatcagactccanaacagttaaccaacaagcttacttttatgccagagacctcgaagtccatcccaaggacacatttgtgttcagtatagatggcaccgtactctctaat

SEQ ID NO: 234821 - DNA, 361 bp, Glycine max
gagagtggtggggtgtgcagaagagcgtcgcagttgtaaccctaatcagaagaagcgcagcttcaagcgagtgacagccaccagccatgggtcgtatgcacagccgcggtaagggtatatcctcttctgctttgccctacaaaaggacacctcctagctggctcaagatctcttcgcaagatgtcgaagaaaatatctgcaagtttgcgaagaaaggtttgaccccgtctcagattggtgtcattctcagagattctcacggtattgctcaggtcaatagcgtcactggcagcaaaatccttcgcatcctcaaagctcacggacttgcgcctgaaattccagaggatctgtaccatttgat

SEQ ID NO: 234822 - DNA, 356 bp, Glycine max
ggcacaagtgagtttgttgatcgagataactagaaacagtgtgatgaaaatgaaggtccttgttttcttcgttgctacaattttggtagcatggcaatgccatgcgtacgatatgttccctctccgaatgaacactggctatggtgcccgtactccggaggtgaaatgcgcaagttggaggcttgctgtggaagcacacaacatctttggctttgagaccattcctgaagagtgcgttgaagcaacaaaggaatacatccatggcgaacaatatagattagactccaaaacagttaaccaacaagcttacttttatgccagagacctcgaagttcatcccaaggacacatttgtgt

SEQ ID NO: 234823 - DNA, 382 bp, Glycine max
  unsure (1)..(382): unsure at all n locations
gaataaagtgaggttggtgcatgccgagtttatttggactgagccccattccagaagggtaaaagtcaaggtcaaggttcagaaggaggttctgaatggagcaatacttgaacagtcttatcctgtagagtatgttcaacaagagcatatgtgtgaatcctgttctaaggtccaggctaatcctgaccagtgggttgcttctgtgcaactcaggcaacacgcttctcacaggcgcactttcttttatttggagcagctgattctgaagcatggtgctgctgccactgctataagaatcaagcagatggaacaaggtattgacttccttttctctaatcgaagtcatggagtcaaatttgtggagtttatanggaaagttgct

SEQ ID NO: 234824 - DNA, 434 bp, Glycine max
  unsure (1)..(434): unsure at all n locations
gggtcgacgcacgcgtccaaagtaaatcgataggggtcttgcaggggaaaaaaggcacgttcaaggcagctcgtgtgggagatcgtcaagatcaacaattccttcttggtcaagcagtttggaaggggcagccagagcgtcgaattcagcagagagagcaacaatctctacaacctcaattcgttcaagtactctggtttggcaaacaagaaaactgttactgttcagcctgagggcaaagatcaggctgtgttgttggctacaaccaagacaaagaagcataacaagcccgctgcattgctccacaaatctgtgatgaagaaggagttcacgangatggcanaagctgttgacaacgaggtggccaacaattactacaggcctgatctcaagaacgctgcccttgcaatgttgagtgcctgtcacagaagcct

SEQ ID NO: 234825 - DNA, 326 bp, Glycine max
ggtacacagcctcaacaaccctaacgcgtgcagagcagagagagacgcagccatggggcgaagacccgcgaggtgttataggcaaattaagaacaaaccataccccaagtcacggttttgccgtggtgttcctgatcccaagatcaggatttacgatgttggtatgaagaagaagggtgttgatgagtttcctttctgtgtccatctggttagttgggagaaggaaaacgtttctagtgaggccctggaagctgctcgtattgcttgcaacaagtacatggccaaatttgctggaaaggatgctttccacttgagagtcagggtgc

SEQ ID NO: 234826 - DNA, 358 bp, Glycine max; identical to SEQ ID NO: 234733

SEQ ID NO: 234827 - DNA, 397 bp, Glycine max; identical to SEQ ID NO: 234774

SEQ ID NO: 234828 - DNA, 400 bp, Glycine max
ggcacaagtgagtttgttgatcgagataactagaaacagtgtgatgaaaatgaaggtccttgttttcttcgttgctacaattttggtagcatggcaatgccatgcgtacgatatgttccctctccgaatgaacactggctatggtgcccgtactccggaggtgaaatgcgcaagttggaggcttgctgtggaagcacacaacatctttggctttgagaccattcctgaagagtgcgttgaagcaacaaaggaatacatccatggcgaacaatatagatcagactccaaaacagttaaccaacaagcttacttttatgccagagacctcgaagtccatcccaaggacacatttgtgttcagtatagatggcaccgtactctctaatattccatactacaaa

SEQ ID NO: 234829 - DNA, 362 bp, Glycine max
  unsure (1)..(362): unsure at all n locations
gtgagtcgagggtgttcaccacagtttacactcacgagagtacccattttctcttctcaatttctcaagtgtgccgagaaaatcatggtggacgcagcagaacgtagatacttggaggatgatgattcatctctcatgaaaactatcaagggcgcaacaactggtttagtggctggaactatctggggtactgtagttgccacctggtatgatgtcccccgtgtcgagagaaatgttgctcttccagggctgattaggactatcaggatgatgggcatctatggtttgacctttgctgccatangaggagtctacataagtgtagagcagttggtgcagaactataagatgaagatggattt

SEQ ID NO: 234830 - DNA, 340 bp, Glycine max
ggaaaagcccagaaaaaatctgagcgtgaacaagaactgaaaggacgatttgagcagagcataaaggaagctgctgacaaatatccaggtttgaacttgtatctcaagaacttggatgatacaatcagtgatgaaaaacttaaggaaatgtttgccgactatggtacaataacttcttgcaaggttatgcgagacccgactggaatcagcagaggatcaggatttgttgcattttcaactcctgaggaagcaactcgagctcttggtgagatgaatggtaaaatgtttgctggaaaacctctgtatgttgcccttgcacagagaaaagaagagagaagag

SEQ ID NO: 234831 - DNA, 315 bp, Glycine max
ggcacaagtgagtttgttgatcgagataactagaaacagtgtgatgaaaatgaaggtccttgttttcttcgttgctacaattttggtagcatggcaatgccatgcgtacgatatgttccctctccgaatgaacactggctatggtgcccgtactccggaggtgaaatgcgcaagttggaggcttgctgtggaagcacacaacatctttggctttgagaccattcctgaagagtgcgttgaagcaacaaaggaatacatccatggcgaacaatatagatcagactccaaaacagttaaccaacaagcttactttta

SEQ ID NO: 234832 - DNA, 354 bp, Glycine max
gacagctattcctcttaagcttgctactgagtttccacactgcataccttaggtcttccgaattcgaagttaatttgcaagatggctaaggaaaaggctcagatcaacattgtgggggttggtcatgtggaccctgaggaggcaaccaccattaacgagctgaagaagcctgttgtggagaaagaagctccagggcatgccatatgagggcatgcacgtacggcctcggaggggaaccagaaaattatgttaacaaaataatctggaaccctaatgtatcagtgtcatcatcagtgtgtagtttaagctagctttgctatggttacgttctttgagatgagagtcttgatgaac

SEQ ID NO: 234833 - DNA, 353 bp, Glycine max
gatgaaaatgaaagtgcttgttttgtttgtcgctacagttttggtaccatatgaatgccatggctcagactaccataagttccctctccaaatgaaaactgggtttggtgggcaatacagcaatgaggtggcatgtgccagttggaggcttggcgtggaagcaaacaacgtagtcaagtggcaaactgttcctgcagcttgcggaagattacatagctgactacgttctacgagaccaatatagatcagattccacaacagttaaccaacaagcttatttctatgctaaatccctcaaactcaccaacaaagatgtctttgtcttggacgttgacgacactactctctctaat

SEQ ID NO: 234834 - DNA, 399 bp, Glycine max
ggcacaagtttgttgagatagctagaagcaataagatgaaaatgaaagtgcttgttttgtttgttgctacagttttggtagcatatgaatgccatggctcagactaccagaagttccctctccaaatgaaaactgggtttggtgggcaatacagcaatgaggtggcatgtgccagttggaggcttggcgtggaagcaaacaacgtagtcaagtggcaaactgttcctgcagcttgcggagagtacatagctgactacgttctaggagaccaatatagatcagattccaaaacagttaaccaacaagcttatttctatgctaaatccctcaaactcaccaacaaagatgtctttgtcttggacgttgacgacactactctctctaatctccagtattttg

SEQ ID NO: 234835 - DNA, 366 bp, Glycine max
  unsure (1)..(366): unsure at all n locations
gagggtttttgagagttgcagtttgcactttgtaggatcatctcctagcattgatcgattgagatggcagacgaagctaacagaactgctttccttgaaattcaaagtcgcatgatcgatactactggaaaaataaaacaggtgcaaacccagatgcgttccaaagaagcagaaaaaaagcgtgcttttctgaccatggaggagctgaagcaagttcctgatgatacgaatgtttacaaatccattggaagaatgtntgtattggagaccaaggcaacattaatgaatgaacaggagaccaagtttaaggatggtgaagcttcaattactgcattacagagctcaaaagaatactttggaaaacag
